United States Patent Application Publication US 2006/0134663 A1 - sequence listing, part 21

SEQ ID NO: 29090 - DNA, 5765 bp, Homo Sapiens
cagccgcccctcctgcggccgctgcgggggccgccgcctgacttcggacaccggccccgcacccgccaggaggggagggaaggggaggcggggagagcgacggcggggggcgggcggtggaccccgcctcccccggcacagcctgctgaggggaagagggggtctccgctcttcctcagtgcactctctgactgaagcccggcgcgtggggtgcagcgggagtgcgaggggactggacaggtgggaagatgggaatgaggaccgggcggcgggaatgttctcacttctccggattccaccgggatgcaggactctagctgcccagccgcacctgcgaagagactacacttcccgaggtgctcagcggcagcgagggcctccacgcatgcgcaccgcggcgcgctgggcggggctggatgggctgtggtgggagggttgcagcgccgcgagaaaggcgagccgggccgggggcggggaaaggggtggggcaggaacgggggcggggacggcgctggaggggcgggtcgggtaggtctcccggagctgatgtgtactgtgtgcgccggggaggcgccggcttgtactcggcagcgcgggaataaagtttgctgatttggtgtctagcctggatgcctgggttgcaggccctgcttgtggtggcgctccacagtcatccggctgaagaagacctgttggactggatcttctcgggttttctttcagatattgttttgtatttacccatgaagacattgttttttggactctgcaaataggacatttcaaagatgagtgaaaaaaaattggaaacaactgcacagcagcggaaatgtcctgaatggatgaatgtgcagaataaaagatgtgctgtagaagaaagaaaggcatgtgttcggaagagtgtttttgaagatgacctccccttcttagaattcactggatccattgtgtatagttacgatgctagtgattgctctttcctgtcagaagatattagcatgagtctatcagatggggatgtggtgggatttgacatggagtggccaccattatacaatagagggaaacttggcaaagttgcactaattcagttgtgtgtttctgagagcaaatgttacttgttccacgtttcttccatgtcagtttttccccagggattaaaaatgttgcttgaaaataaagcagttaaaaaggcaggtgtaggaattgaaggagatcagtggaaacttctacgtgactttgatatcaaattgaagaattttgtggagttgacagatgttgccaataaaaagctgaaatgtacagagacctggagccttaacagtctggttaaacacctcttaggtaaacagctcctgaaagacaagtctatccgctgtagcaattggagtaaatttcctctcactgaggaccagaaactgtatgcagccactgatgcttatgctggttttattatttaccgaaatttagagattttggatgatactgtgcaaaggtttgctataaataaagaggaagaaatcctacttagcgacatgaacaaacagttgacttcaatctctgaggaagtgatggatctggctaagcatcttcctcatgctttcagtaaattggaaaacccacggagggtttctatcttactaaaggatatttcagaaaatctatattcactgaggaggatgataattgggtctactaacattgagactgaactgaggcccagcaataatttaaacttattatcctttgaagattcaactactgggggagtacaacagaaacaaattagagaacatgaagttttaattcacgttgaagatgaaacatgggacccaacacttgatcatttagctaaacatgatggagaagatgtacttggaaataaagtggaacgaaaagaagatggatttgaagatggagtagaagacaacaaattgaaagagaatatggaaagagcttgtttgatgtcgttagatattacagaacatgaactccaaattttggaacagcagtctcaggaagaatatcttagtgatattgcttataaatctactgagcatttatctcccaatgataatgaaaacgatacgtcctatgtaattgagagtgatgaagatttagaaatggagatgcttaagcatttatctcccaatgataatgaaaacgatacgtcctatgtaattgagagtgatgaagatttagaaatggagatgcttaagtctttagaaaacctcaatagtggcacggtagaaccaactcattctaaatgcttaaaaatggaaagaaatctgggtcttcctactaaagaagaagaagaagatgatgaaaatgaagctaatgaaggggaagaagatgatgataaggactttttgtggccagcacccaatgaagagcaagttacttgcctcaagatgtactttggccattccagttttaaaccagttcagtggaaagtgattcattcagtattagaagaaagaagagataatgttgctgtcatggcaactggatatggaaagagtttgtgcttccagtatccacctgtttatgtaggcaagattggccttgttatctctccccttatttctctgatggaagaccaagtgctacagcttaaaatgtccaacatcccagcttgcttccttggatcagcacagtcagaaaatgttctaacagatattaaattaggtaaataccggattgtatacgtaactccagaatactgttcaggtaacatgggcctgctccagcaacttgaggctgatattggtatcacgctcattgctgtggatgaggctcactgtatttctgagtgggggcatgattttagggattcattcaggaagttgggctccctaaagacagcactgccaatggttccaatcgttgcacttactgctactgcaagttcttcaatccgggaagacattgtacgttgcttaaatctgagaaatcctcagatcacctgtactggttttgatcgaccaaacctgtatttagaagttaggcgaaaaacagggaatatccttcaggatctgcagccatttcttgtcaaaacaagttcccactgggaatttgaaggtccaacaatcatctactgtccttctagaaaaatgacacaacaagttacaggtgaacttaggaaacttaatctatcctgtggaacataccatgcgggcatgagttttagcacaaggaaagacattcatcataggtttgtaagagatgaaattcagtgtgtcatagctaccatagcttttggaatgggcattaataaagctgacattcgccaagtcattcattacggtgctcctaaggacatggaatcatattatcaggagattggtagagctggtcgtgatggacttcaaagttcttgtcacgtcctctgggctcctgcagacattaacttaaataggcaccttcttactgagatacgtaatgagaagtttcgattatacaaattaaagatgatggcaaagatggaaaaatatcttcattctagcagatgtaggagacaaatcatcttgtctcattttgaggacaaacaagtacaaaaagcctccttgggaattatgggaactgaaaaatgctgtgataattgcaggtccagattggatcattgctattccatggatgactcagaggatacatcctgggactttggtccacaagcatttaagcttttgtctgctgtggacatcttaggcgaaaaatttggaattgggcttccaattttatttctccgaggatctaattctcagcgtcttgccgatcaatatcgcaggcacagtttatttggcactggcaaggatcaaacagagagttggtggaaggctttttcccgtcagctgatcactgagggattcttggtagaagtttctcggtataacaaatttatgaagatttgcgcccttacgaaaaagggtagaaattggcttcataaagctaatacagaatctcagagcctcatccttcaagctaatgaagaattgtgtccaaagaagtttcttctgcctagttcgaaaactgtatcttcgggcaccaaagagcattgttataatcaagtaccagttgaattaagtacagagaagaagtctaacttggagaagttatattcttataaaccatgtgataagatttcttctgggagtaacatttctaaaaaaagtatcatggtacagtcaccagaaaaagcttacagttcctcacagcctgttatttcggcacaagagcaggagactcagattgtgttatatggcaaattggtagaagctaggcagaaacatgccaataaaatggatgttcccccagctattctggcaacaaacaagatactggtggatatggccaaaatgagaccaactacggttgaaaacgtaaaaaggattgatggtgtttctgaaggcaaagctgccatgttggcccctctgttggaagtcatcaaacatttctgccaaacaaatagtgttcagacagacctcttttcaagtacaaaacctcaagaagaacagaagacgagtctggtagcaaaaaataaaatatgcacactttcacagtctatggccatcacatactctttattccaagaaaagaagatgcctttgaagagcatagctgagagcaggattctgcctctcatgacaattggcatgcacttatcccaagcggtgaaagctggctgcccccttgatttggagcgagcaggcctgactccagaggttcagaagattattgctgatgttatccgaaaccctcccgtcaactcagatatgagtaaaattagcctaatcagaatgttagttcctgaaaacattgacacgtaccttatccacatggcaattgagatccttaaacatggtcctgacagcggacttcaaccttcatgtgatgtcaacaaaaggagatgttttcccggttctgaagagatctgttcaagttctaagagaagcaaggaagaagtaggcatcaatactgagacttcatctgcagagagaaagagacgattacctgtgtggtttgccaaaggaagtgataccagcaagaaattaatggacaaaacgaaaaggggaggtctttttagttaagctggcaattaccagaacaattatgtttcttgctgtattataagaggatagctatattttatttctgaagagtaaggagtagtattttggcttaaaaatcattctaattacaaagttcactgtttattgaagaactggcatcttaaatcagccttccgcaattcatgtagtttctgggtcttctgggagcctacgtgagtacatcacctaacagaatattaaattagacttcctgtaagattgctttaagaaactgttactgtcctgttttctaatctctttattaaaacagtgtatttggaaaatgttatgtgctctgatttgatatagataacagattagtagttacatggtaattatgtgatataaaatattcatatattatcaaaattctgttttgtaaatgtaagaaagcatagttattttacaaattgtttttactgtcttttgaagaagttcttaaatacgttgttaaatggtattagttgaccagggcagtgaaaatgaaaccgcattttgggtgccattaaatagggaaaaaacatgtaaaaaatgtaaaatggagaccaattgcactaggcaagtgtatattttgtattttatatacaatttctattatttttcaagtaataaaacaatgtttttcatactgaatattaaaaaaaaaaaaaaaaaaaa

SEQ ID NO: 29091 - DNA, 2573 bp, Homo Sapiens
gaatcggccgatgtgaaccgaatgttgatgtaagaggcagggcactcggctgcggatgggtaacagggcgtgggctggcacacttacttgcaccagtgcccagagagggggtgcaggctgaggagctgcccagagcaccgctcacactcccagagtacctgaagtcggcatttcaatgacaggtgacaagggtccccaaaggctaagcgggtccagctatggttccatctccagcccgaccagcccgaccagcccagggccacggcaagcacctcccagagagacctacctgagtgagaagatccccatcccagacacaaaaccgggcaccttcagcctgcggaagctatgggccttcacggggcctggcttcctcatgagcattgctttcctggacccaggaaacatcgagtcagatcttcaggctggcgccgtggcgggattcaaacttctctgggtgctgctctgggccaccgtgttgggcttgctctgccagcgactggctgcacgtctgggcgtggtgacaggcaaggacttgggcgaggtctgccatctctactaccctaaggtgccccgcaccgtcctctggctgaccatcgagctagccattgtgggctccgacatgcaggaagtcatcggcacggccattgcattcaatctgctctcagctggacgaatcccactctggggtggcgtcctcatcaccatcgtggacaccttcttcttcctcttcctcgataactacgggctgcggaagctggaagctttttttggactccttataaccattatggccttgacctttggctatgagtatgtggtggcgcgtcctgagcagggagcgcttcttcggggcctgttcctgccctcgtgcccgggctgcggccaccccgagctgctgcaggcggtgggcattgttggcgccatcatcatgccccacaacatctacctgcactcggccctggtcaagtctcgagagatagaccgggcccgccgagcggacatcagagaagccaacatgtacttcctgattgaggccaccatcgccctgtccgtctcctttatcatcaacctctttgtcatggctgtctttgggcaggccttctaccagaaaaccaaccaggctgcgttcaacatctgtgccaacagcagcctccacgactacgccaagatcttccccatgaacaacgccaccgtggccgtggacatttaccaggggggcgtgatcctgggctgcctgttcggccccgcggccctctacatctgggccataggtctcctggcggctgggcagagctccaccatgacgggcacctacgcgggacagttcgtgatggagggcttcctgaggctgcggtggtcacgcttcgcccgtgtcctcctcacccgctcctgcgccatcctgcccaccgtgctcgtggctgtcttccgggacctgagggacttgtcgggcctcaatgatctgctcaacgtgctgcagagcctgctgctcccgttcgccgtgctgcccatcctcacgttcaccagcatgcccaccctcatgcaggagtttgccaatggcctgctgaacaaggtcgtcacctcttccatcatggtgctagtctgcgccatcaacctctacttcgtggtcagctatctgcccagcctgccccaccctgcctacttcggccttgcagccttgctggccgcagcctacctgggcctcagcacctacctggtctggacctgttgccttgcccacggagccacctttctggcccacagctcccaccaccacttcctgtatgggctccttgaagaggaccagaaaggggagacctctggctaggcccacaccagggcctggctgggagtggcatgtatgacgtgactggcctgctggatgtggagggggcgcgtgcaggcagcaggatggagtgggacagttcctgagaccagccaacctgggggctttagggacctgctgtttcctagcgcagccatgtgattaccctctgggtctcagtgtcctcatctgtaaaatggagacgccaccacccttgccatggaggttaagcactttaacacagtgtctggcacttgggacaaaaacaaacaaacaaacaaaaaacatttcaaaaggtatttattgagcacctgcaggcgtgacctgacagcccaagggtgggtggggtgagggcttgaggacttgggcgggacacaggctccaaactggagcttgaaatagtgtctgatgaatgttaaattatctatctatctatttatttatttatttgagacagggaaagggtctccctctgttgccaaggctggagtgcagtggcgcaatcttaactcattgcaacctccaccttctgggttcaagcgattctctttattcagccccgggagtggcgcgcgccaccacgcccagctaatttgtgtattttcagcagagacggggtttgccatgctggccaggctggtctcgaactgctggattcaagtgatccgcccatctccgtctcccaaagtgctgggaattacaggcgtgagccaccaaaacccggcctgattaaagttaaataaatacg

SEQ ID NO: 29092 - DNA, 4034 bp, Homo Sapiens
agggagaggcagagaggcaggcagcctgctgggctcttcctgctgttgaaaacttacccggcccttacagaggaaatcttcctcctctcttctgccctgaatgttttcccaaacatgaaggtgataagcttattcattttggtgggatttataggagagttccaaagtttttcaagtgcctcctctccagtcaactgccagtgggacttctatgccccttggtcagaatgcaatggctgtaccaagactcagactcgcaggcggtcagttgctgtgtatgggcagtatggaggccagccttgtgttggaaatgcttttgaaacacagtcctgtgaacctacaagaggatgtccaacagaggagggatgtggagagcgtttcaggtgcttttcaggtcagtgcatcagcaaatcattggtttgcaatggggattctgactgtgatgaagacagtgctgatgaagacagatgtgaggactcagaaaggagaccttcctgtgatatcgataaacctcctcctaacatagaacttactggaaatggttacaatgaactcactggccagtttaggaacagagtcatcaataccaaaagttttggtggtcaatgtagaaaggtgtttagtggggatggaaaagatttctacaggctgagtggaaatgtcctgtcctatacattccaggtgaaaataaataatgattttaattatgaattttacaatagtacttggtcttatgtaaaacatacgtcgacagaacacacatcatctagtcggaagcgctccttttttagatcttcatcatcttcttcacgcagttatacttcacataccaatgaaatccataaaggaaagagttaccaactgctggttgttgagaacactgttgaagtggctcagttcattaataacaatccagaatttttacaacttgctgagccattctggaaggagctttcccacctcccctctctgtatgactacagtgcctaccgaagattaatcgaccagtacgggacacattatctgcaatctgggtcgttaggaggagaatacagagttctattttatgtggactcagaaaaattaaaacaaaatgattttaattcagtcgaagaaaagaaatgtaaatcctcaggttggcattttgtcgttaaattttcaagtcatggatgcaaggaactggaaaacgctttaaaagctgcttcaggaacccagaacaatgtattgcgaggagaaccgttcatcagagggggaggtgcaggcttcatatctggccttagttacctagagctggacaatcctgctggaaacaaaaggcgatattctgcctgggcagaatctgtgactaatcttcctcaagtcataaaacaaaagctgacacctttatatgagctggtaaaggaagtaccttgtgcctctgtgaaaaaactatacctgaaatgggctcttgaagagtatctggatgaatttgacccctgtcattgccggccttgtcaaaatggtggtttggctactgttgaggggacccattgtctgtgccattgcaaaccgtacacatttggtgcggcgtgtgagcaaggagtcctcgtagggaatcaagcaggaggggttgatggaggttggagttgctggtcctcttggagcccctgtgtccaagggaagaaaacaagaagccgtgaatgcaataacccacctcccagtgggggtgggagatcctgcgttggagaaacgacagaaagcacacaatgcgaagatgaggagctggagcacttgaggttgcttgaaccacattgctttcctttgtctttggttccaacagaattctgtccatcacctcctgccttgaaagatggatttgttcaagatgaaggtacaatgtttcctgtggggaaaaatgtagtgtacacttgcaatgaaggatactctcttattggaaacccagtggccagatgtggagaagatttacggtggcttgttggggaaatgcattgtcagaaaattgcctgtgttctacctgtactgatggatggcatacagagtcacccccaaaaacctttctacacagttggtgagaaggtgactgtttcctgttcaggtggcatgtccttagaaggtccttcagcatttctctgtggctccagccttaagtggagtcctgagatgaagaatgcccgctgtgtacaaaaagaaaatccgttaacacaggcagtgcctaaatgtcagcgctgggagaaactgcagaattcaagatgtgtttgtaaaatgccctacgaatgtggaccttccttggatgtatgtgctcaagatgagagaagcaaaaggatactgcctctgacagtttgcaagatgcatgttctccactgtcagggtagaaattacacccttactggtagggacagctgtactctgcctgcctcagctgagaaagcttgtggtgcctgcccactgtggggaaaatgtgatgctgagagcagcaaatgtgtctgccgagaagcatcggagtgcgaggaagaagggtttagcatttgtgtggaagtgaacggcaaggagcagacgatgtctgagtgtgaggcgggcgctctgagatgcagagggcagagcatctctgtcaccagcataaggccttgtgctgcggaaacccagtaggctcctggaggccctggtcagcttgcttggaatccagcaggcagctggggctgagtgaaaacatctgcacaactgggcactggacagcttttccttcttctccagtgtctaccttcctcctcaactcccagccatctgtataaacacaatcctttgttctcccaaatctgaatcgaattactcttttgcctcctttttaatgtcagtaaggatatgagcctttgcacaggctggctgcgtgttcttgaaataggtgttaccttctctgggccttggttttttaaaatctgtaaaattagaggattgcactagagaaacttgaatgctccattcaggcctatcattttattaagtatgattgacacagcccatgggccagaacacactctacaaaatgactaggataacagaaagaacgtgatctcctgattagagagggtggttttcctcaatggaaccaaatataaagaggacttgaacaaaaatgacagatacaaactatttctatcctgagtagtaatctcacacttcatcctatagagtcaaccaccacagataggaattccttattctttttttaatttttttaagacagagtctcactttgttgcccaggctggagcgcagtggggtgatctcatctccctgcaacctccgcctcctgggttcaagcgattcttgtgcctcagcttcccaagcagctgggattacaggtgcccgccaccacgcccagctaatttttgcatttttagtagagatggggtttcaccatgttggccacgctcgtctccaactcctgacctcaggtaatccgcctgccttggcctcccaaagtgctgggattacagacatgaaccaccacgcctggctggaatacttactcttgtcgggagattgaaccactaaaatgttagagcagaattcattatgctgtggtcacaggggtgtcttgtctgagaacaaatacaattcagtcttctctttggggttttagtatgtgtcaaacataggactggaagtttgcccctgttcttttttcttttgaaagaacatcagttcatgcctgaggcatgagtgactgtgcatttgagaatagttttccctattctgtggatacagtcccagagttttcagggagtacacaggtagattagtttgaagcattgaccttttatttattccttatttctctttcatcaaaacaaaacagcagctgtgggaggagaaatgagagggcttaaatgaaatttaaaataagctatattatacaaatactatctctgtattgttctgaccctggtaaatatatttcaaaacttcagatgacaaggattagaacactcattaaagatgctattcttcagaaaaaaaaaaaaaaaaaaaaaaaa

SEQ ID NO: 29093 - DNA, 1669 bp, Homo Sapiens
ctccctcagcaaggacagcagaggaccagctaagagggagagaagcaactacagaccccccctgaaaacaaccctcagacgccacatcccctgacaagctgccaggcaggttctcttcctctcacatactgacccacggctccaccctctctcccctggaaaggacaccatgagcactgaaagcatgatccgggacgtggagctggccgaggaggcgctccccaagaagacaggggggccccagggctccaggcggtgcttgttcctcagcctcttctccttcctgatcgtggcaggcgccaccacgctcttctgcctgctgcactttggagtgatcggcccccagagggaagagttccccagggacctctctctaatcagccctctggcccaggcagtcagatcatcttctcgaaccccgagtgacaagcctgtagcccatgttgtagcaaaccctcaagctgaggggcagctccagtggctgaaccgccgggccaatgccctcctggccaatggcgtggagctgagagataaccagctggtggtgccatcagagggcctgtacctcatctactcccaggtcctcttcaagggccaaggctgcccctccacccatgtgctcctcacccacaccatcagccgcatcgccgtctcctaccagaccaaggtcaacctcctctctgccatcaagagcccctgccagagggagaccccagagggggctgaggccaagccctggtatgagcccatctatctgggaggggtcttccagctggagaagggtgaccgactcagcgctgagatcaatcggcccgactatctcgactttgccgagtctgggcaggtctactttgggatcattgccctgtgaggaggacgaacatccaaccttcccaaacgcctcccctgccccaatccctttattaccccctccttcagacaccctcaacctcttctggctcaaaaagagaattgggggcttagggtcggaacccaagcttagaactttaagcaacaagaccaccacttcgaaacctgggattcaggaatgtgtggcctgcacagtgaagtgctggcaaccactaagaattcaaactggggcctccagaactcactggggcctacagctttgatccctgacatctggaatctggagaccagggagcctttggttctggccagaatgctgcaggacttgagaagacctcacctagaaattgacacaagtggaccttaggccttcctctctccagatgtttccagacttccttgagacacggagcccagccctccccatggagccagctccctctatttatgtttgcacttgtgattatttattatttatttattatttatttatttacagatgaatgtatttatttgggagaccggggtatcctgggggacccaatgtaggagctgccttggctcagacatgttttccgtgaaaacggagctgaacaataggctgttcccatgtagccccctggcctctgtgccttcttttgattatgttttttaaaatatttatctgattaagttgtctaaacaatgctgatttggtgaccaactgtcactcattgctgagcctctgctccccaggggagttgtgtctgtaatcgccctactattcagtggcgagaaataaagtttgcttagaaaagaa

SEQ ID NO: 29094 - DNA, 4341 bp, Homo Sapiens
gaaactaggggcaaggagacgaagagaacatgaaagttaaactttaagatgaagaacaaagctgaacatactgatgcattggatctttggagaggatctcagaactcattgtacttaatttacaggctaaaaccttagaagaggaatttattatatcctacacaagactccagggaagcacatggccttggactgaaggctggcatctggaagctgtcagccaccagcaccttctgcagcaggaaaaggccagggctctgctggagcaggcagcagagtggacgcacagtaacatgggcaacttgaagagcgtggcccaggagcctgggccaccctgcggcctggggctggggctgggccttgggctgtgcggcaagcagggcccagccaccccggcccctgagcccagccgggccccagcatccctactcccaccagcgccagaacacagccccccgagctccccgctaacccagcccccagaggggcccaagttccctcgtgtgaagaactgggaggtggggagcatcacctatgacaccctcagcgcccaggcgcagcaggatgggccctgcaccccaagacgctgcctgggctccctggtatttccacggaaactacagggccggccctcccccggccccccggcccctgagcagctgctgagtcaggcccgggacttcatcaaccagtactacagctccattaagaggagcggctcccaggcccacgaacagcggcttcaagaggtggaagccgaggtggcagccacaggcacctaccagcttagggagagcgagctggtgttcggggctaagcaggcctggcgcaacgctccccgctgcgtgggccggatccagtgggggaagctgcaggtgttcgatgcccgggactgcaggtctgcacaggaaatgttcacctacatctgcaaccacatcaagtatgccaccaaccggggcaaccttcgctcggccatcacagtgttcccgcagcgctgccctggccgaggagacttccgaatctggaacagccagctggtgcgctacgcgggctaccggcagcaggatggctctgtgcggggggacccagccaacgtggagatcaccgagctctgcattcagcacggctggaccccaggaaacggtcgcttcgacgtgctgcccctgctgctgcaggccccagatgatcccccagaactcttccttctgccccccgagctggtccttgaggtgcccctggagcaccccacgctggagtggtttgcagccctgggcctgcgctggtacgccctcccggcagtgtccaacatgctgctggaaattgggggcctggagttccccgcagcccccttcagtggctggtacatgagcactgagatcggcacgaggaacctgtgtgaccctcaccgctacaacatcctggaggatgtggctgtctgcatggacctggatacccggaccacctcgtccctgtggaaagacaaggcagcagtggaaatcaacgtggccgtgctgcacagttaccagctagccaaagtcaccatcgtggaccaccacgccgccacggcctctttcatgaagcacctggagaatgagcagaaggccagggggggctgccctgcagactgggcctggatcgtgccccccatctcgggcagcctcactcctgttttccatcaggagatggtcaactatttcctgtccccggccttccgctaccagccagacccctggaaggggagtgccgccaagggcaccggcatcaccaggaagaagacctttaaagaagtggccaacgccgtgaagatctccgcctcgctcatgggcacggtgatggcgaagcgagtgaaggcgacaatcctgtatggctccgagaccggccgggcccagagctacgcacagcagctggggagactcttccggaaggcttttgatccccgggtcctgtgtatggatgagtatgacgtggtgtccctcgaacacgagacgctggtgctggtggtaaccagcacatttgggaatggggatcccccggagaatggagagagctttgcagctgccctgatggagatgtccggcccctacaacagctcccctcggccggaacagcacaagagttataagatccgcttcaacagcatctcctgctcagacccactggtgtcctcttggcggcggaagaggaaggagtccagtaacacagacagtgcaggggccctgggcaccctcaggttctgtgtgttcgggctcggctcccgggcatacccccacttctgcgcctttgctcgtgccgtggacacacggctggaggaactgggcggggagcggctgctgcagctgggccagggcgacgagctgtgcggccaggaggaggccttccgaggctgggcccaggctgccttccaggccgcctgtgagaccttctgtgtgggagaggatgccaaggccgccgcccgagacatcttcagccccaaacggagctggaagcgccagaggtaccggctgagcgcccaggccgagggcctgcagttgctgccaggtctgatccacgtgcacaggcggaagatgttccaggctacaatccgctcagtggaaaacctgcaaagcagcaagtccacgagggccaccatcctggtgcgcctggacaccggaggccaggaggggctgcagtaccagccgggggaccacataggtgtctgcccgcccaaccggcccggccttgtggaggcgctgctgagccgcgtggaggacccgccggcgcccactgagcccgtggcagtagagcagctggagaagggcagccctggtggccctccccccggctgggtgcgggacccccggctgcccccgtgcacgctgcgccaggctctcaccttcttcctggacatcacctccccacccagccctcagctcttgcggctgctcagcaccttggcagaagagcccagggaacagcaggagctggaggccctcagccaggatccccgacgctacgaggagtggaagtggttccgctgccccacgctgctggaggtgctggagcagttcccgtcggtggcgctgcctgccccactgctcctcacccagctgcctctgctccagccccggtactactcagtcagctcggcacccagcacccacccaggagagatccacctcactgtagctgtgctggcatacaggactcaggatgggctgggccccctgcactatggagtctgctccacgtggctaagccagctcaagcccggagaccctgtgccctgcttcatccggggggctccctccttccggctgccacccgatcccagcttgccctgcatcctggtgggtccaggcactggcattgcccccttccggggattctggcaggagcggctgcatgacattgagagcaaagggctgcagcccactcccatgactttggtgttcggctgccgatgctcccaacttgaccatctctaccgcgacgaggtgcagaacgcccagcagcgcggggtgtttggccgagtcctcaccgccttctcccgggaacctgacaaccccaagacctacgtgcaggacatcctgaggacggagctggctgcggaggtgcaccgcgtgctgtgcctcgagcggggccacatgtttgtctgcggcgatgttaccatggcaaccaacgtcctgcagaccgtgcagcgcatcctggcgacggagggcgacatggagctggacgaggccggcgacgtcatcggcgtgctgcgggatcagcaacgctaccacgaagacattttcgggctcacgctgcgcacccaggaggtgacaagccgcatacgcacccagagcttttccttgcaggagcgtcagttgcggggcgcagtgccctgggcgttcgaccctcccggctcagacaccaacagcccctgagagccgcctggctttcccttccagttccgggagagcggctgcccgactcaggtccgcccgaccaggatcagccccgctcctcccctcttgaggtggtgccttctcacatctgtccagaggctgcaaggattcagcattattcctccaggaaggagcaaaacgcctcttttccctctctaggcctgttgcctcgggcctgggtccgccttaatctggaaggcccctcccagcagcggtaccccagggcctactgccacccgcttcctgtttcttagtcgaatgttagattcctcttgcctctctcaggagtatcttacctgtaaagtctaatctctaaatcaagtatttattattgaagatttaccataagggactgtgccagatgttaggagaactactaaagtgcctaccccagctcaaaaaaaaaaaaaaaaaa

SEQ ID NO: 29095 - DNA, 3560 bp, Homo Sapiens
gccgcactttcactctccgtcagccgcattgcccgctcggcgtccggcccccgacccgcgctcgtccgcccgcccgcccgcccgcccgcgccatgaacgccaaggtcgtggtcgtgctggtcctcgtgctgaccgcgctctgcctcagcgacgggaagcccgtcagcctgagctacagatgcccatgccgattcttcgaaagccatgttgccagagccaacgtcaagcatctcaaaattctcaacactccaaactgtgcccttcagattgtagcccggctgaagaacaacaacagacaagtgtgcattgacccgaagctaaagtggattcaggagtacctggagaaagctttaaacaagaggttcaagatgtgagagggtcagacgcctgaggaacccttacagtaggagcccagctctgaaaccagtgttagggaagggcctgccacagcctcccctgccagggcagggccccaggcattgccaagggctttgttttgcacactttgccatattttcaccatttgattatgtagcaaaatacatgacatttatttttcatttagtttgattattcagtgtcactggcgacacgtagcagcttagactaaggccattattgtacttgccttattagagtgtctttccacggagccactcctctgactcagggctcctgggttttgtattctctgagctgtgcaggtggggagactgggctgagggagcctggccccatggtcagccctagggtggagagccaccaagagggacgcctgggggtgccaggaccagtcaacctgggcaaagcctagtgaaggcttctctctgtgggatgggatggtggagggccacatgggaggctcacccccttctccatccacatgggagccgggtctgcctcttctgggagggcagcagggctaccctgagctgaggcagcagtgtgaggccagggcagagtgagacccagccctcatcccgagcacctccacatcctccacgttctgctcatcattctctgtctcatccatcatcatgtgtgtccacgactgtctccatggccccgcaaaaggactctcaggaccaaagctttcatgtaaactgtgcaccaagcaggaaatgaaaatgtcttgtgttacctgaaaacactgtgcacatctgtgtcttgtttggaatattgtccattgtccaatcctatgtttttgttcaaagccagcgtcctcctctgtgaccaatgtcttgatgcatgcactgttccccctgtgcagccgctgagcgaggagatgctccttgggccctttgagtgcagtcctgatcagagccgtggtcctttggggtgaactaccttggttcccccactgatcacaaaaacatggtgggtccatgggcagagcccaagggaattcggtgtgcaccagggttgaccccagaggattgctgccccatcagtgctccctcacatgtcagtaccttcaaactagggccaagcccagcactgcttgaggaaaacaagcattcacaacttgtttttggtttttaaaacccagtccacaaaataaccaatcctggacatgaagattctttcccaattcacatctaacctcatcttcttcaccatttggcaatgccatcatctcctgccttcctcctgggccctctctgctctgcgtgtcacctgtgcttcgggcccttcccacaggacatttctctaagagaacaatgtgctatgtgaagagtaagtcaacctgcctgacatttggagtgttccccttccactgagggcagtcgatagagctgtattaagccacttaaaatgttcacttttgacaaaggcaagcacttgtgggtttttgttttgtttttcattcagtcttacgaatacttttgccctttgattaaagactccagttaaaaaaaattttaatgaagaaagtggaaaacaaggaagtcaaagcaaggaaactatgtaacatgtaggaagtaggaagtaaattatagtgatgtaatcttgaattgtaactgttcttgaatttaataatctgtagggtaattagtaacatgtgttaagtattttcataagtatttcaaattggagcttcatggcagaaggcaaacccatcaacaaaaattgtcccttaaacaaaaattaaaatcctcaatccagctatgttatattgaaaaaatagagcctgagggatctttactagttataaagatacagaactctttcaaaaccttttgaaattaacctctcactataccagtataattgagttttcagtggggcagtcattatccaggtaatccaagatattttaaaatctgtcacgtagaacttggatgtacctgcccccaatccatgaaccaagaccattgaattcttggttgaggaaacaaacatgaccctaaatcttgactacagtcaggaaaggaatcatttctatttctcctccatgggagaaaatagataagagtagaaactgcagggaaaattatttgcataacaattcctctactaacaatcagctccttcctggagactgcccagctaaagcaatatgcatttaaatacagtcttccatttgcaagggaaaagtctcttgtaatccgaatctctttttgctttcgaactgctagtcaagtgcgtccacgagctgtttactagggatccctcatctgtccctccgggacctggtgctgcctctacctgacactcccttgggctccctgtaacctcttcagaggccctcgctgccagctctgtatcaggacccagaggaaggggccagaggctcgttgactggctgtgtgttgggattgagtctgtgccacgtgtttgtgctgtggtgtgtccccctctgtccaggcactgagataccagcgaggaggctccagagggcactctgcttgttattagagattacctcctgagaaaaaaggttccgcttggagcagaggggctgaatagcagaaggttgcacctcccccaaccttagatgttctaagtctttccattggatctcattggacccttccatggtgtgatcgtctgactggtgttatcaccgtgggctccctgactgggagttgatcgcctttcccaggtgctacacccttttccagctggatgagaatttgagtgctctgatccctctacagagcttccctgactcattctgaaggagccccattcctgggaaatattccctagaaacttccaaatcccctaagcagaccactgataaaaccatgtagaaaatttgttattttgcaacctcgctggactctcagtctctgagcagtgaatgattcagtgttaaatgtgatgaatactgtattttgtattgtttcaattgcatctcccagataatgtgaaaatggtccaggagaaggccaattcctatacgcagcgtgctttaaaaaataaataagaaacaactctttgagaaacaacaatttctactttgaagtcataccaatgaaaaaatgtatatgcacttataattttcctaataaagttctgtactcaaatgtagccaccaaaaaaaaaaaaaaaaa

SEQ ID NO: 29096 - DNA, 7633 bp, Homo Sapiens
gggccggggggcggagccttgcgggctggagcgaaagaatgcgggggctgagcgcagaagcggctcgaggctggaagaggatcttgggcgccgccaggttctgtggacaatcacaatgggaatccaaggagggtctgtcctgttcgggctgctgctcgtcctggctgtcttctgccattcaggtcatagcctgcagtgctacaactgtcctaacccaactgctgactgcaaaacagccgtcaattgttcatctgattttgatgcgtgtctcattaccaaagctgggttacaagtgtataacaagtgttggaagtttgagcattgcaatttcaacgacgtcacaacccgcttgagggaaaatgagctaacgtactactgctgcaagaaggacctgtgtaactttaacgaacagcttgaaaatggtgggacatccttatcagagaaaacagttcttctgctggtgactccatttctggcagcagcctggagccttcatccctaagtcaacaccaggagagcttctcccaaactccccgttcctgcgtagtccgctttctcttgctgccacattctaaaggcttgatattttccaaatggatcctgttgggaaagaataaaattagcttgagcaacctggctaagatagaggggctctgggagactttgaagaccagtcctgtttgcagggaagccccacttgaaggaagaagtctaagagtgaagtaggtgtgacttgaactagattgcatgcttcctcctttgctcttgggaagaccagctttgcagtgacagcttgagtgggttctctgcagccctcagattatttttcctctggctccttggatgtagtcagttagcatcattagtacatctttggagggtggggcaggagtatatgagcatcctctctcacatggaacgctttcataaacttcagggatcccgtgttgccatggaggcatgccaaatgttccatatgtgggtgtcagtcagggacaacaagatccttaatgcagagctagaggacttctggcagggaagtggggaagtgttccagatagcagggcatgaaaacttagagaggtacaagtggctgaaaatcgagtttttcctctgtctttaaattttatatgggctttgttatcttccactggaaaagtgtaatagcatacatcaatggtgtgttaaagctatttccttgccttttttttattggaatggtaggatatcttggctttgccacacacagttacagagtgaacactctactacatgtgactggcagtattaagtgtgcttattttaaatgttactggtagaaaggcagttcaggtatgtgtgtatatagtatgaatgcagtggggacaccctttgtggttacagtttgagacttccaaaggtcatccttaataacaacagatctgcaggggtatgttttaccatctgcatccagcctcctgctaactcctagctgactcagcatagattgtataaaatacctttgtaacggctcttagcacactcacagatgtttgaggctttcagaagctcttctaaaaaatgatacacacctttcacaagggcaaactttttccttttccctgtgtattctagtgaatgaatctcaagattcagtagacctaatgacatttgtattttatgatcttggctgtatttaatggcataggctgacttttgcagatggaggaatttcttgattaatgttgaaaaaaaacccttgattatactctgttggacaaaccgagtgcaatgaatgatgcttttctgaaaatgaaatataacaagtgggtgaatgtggttatggccgaaaaggatatgcagtatgcttaatggtagcaactgaaagaagacatcctgagcagtgccagctttcttctgttgatgccgttccctgaacataggaaaatagaaacttgcttatcaaaacttagcattaccttggtgctctgtgttctctgttagctcagtgtctttccttacatcaataggtttttttttttttttttggcctgaggaagtactgaccatgcccacagccaccggctgagcaaagaagctcatttcatgtgagttctaaggaatgagaaacaattttgatgaatttaagcagaaaatgaatttctgggaacttttttgggggcggggggttggggaattcagccacactccagaaagccaggagtcgacagttttggaagcctctctcaggattgagattctaggatgagattggcttactgctatcttgtgtcatgtacccactttttggccagactacactgggaagaaggtagtcctctaaagcaaaatctgagtgccactaaatggggagatggggctgttaagctgtccaaatcaacaagggtcatataaatggccttaaactttggggttgctttctgcaaaaagttgctgtgactcatgccatagacaaggttgagtgcctggacccaaaggcaatactgtaatgtaaagacatttatagtactaggcaaacagcaccccaggtactccaggccctcctggctggagagggctgtggcaatagaaaattagtgccaactgcagtgagtcagcctaggttaaatagagagtgtaagagtgctggacaggaacctccaccctcatgtcacatttcttcaatgtgacccttctggcccctctcctcctgacagcggaacaatgactgccccgataggtgaggctggaggaagaatcagtcctgtccttggcaagctcttcactatgacagtaaaggctctctgcctgctgccaaggcctgtgactttctaacctggcctcacgctgggtaagcttaaggtagaggtgcaggattagcaagcccacctggctaccaggccgacagctacatcctccaactgaccctgatcaacgaagagggattcatgtgtctgtctcagttggttccaaatgaaaccagggagcaggggagttaggaatcgaacaccagtcatgcctactggctctctgctcgagagccaataccctgtgccctccactcatctggatttacaggaactgtcatagtgttcagtattgggtggtgataagcccattggattgtccccttggggggatgagctaggggtgcaaggaacacctgatgagtagataagtggagctcatggtatttcctgaaagatgctaatctatttgccaaacttggtcttgaatgtactgggggcttcaaggtatgggtatatttttcttgtgtccttgcagttagcccccatgtcttatgtgtgtcctgaaaaaataagagcctgcccaagactttgggcctcttgacagaattaaccacttttatacatctgagttctcttggtaagttctttagcagtgttcaaagtctactagctcgcattagtttctgttgctgccaacagatctgaactaatgctaacagatccccctgagggattcttgatgggctgagcagctggctggagctagtactgactgacattcattgtgatgagggcagctttctggtacaggattctaagctctatgttttatatacattttcatctgtacttgcacctcactttacacaagaggaaactatgcaaagttagctggatcgctcaaggtcacttaggtaagttggcaagtccatgcttcccactcagctcctcaggtcagcaagtctacttctctgcctattttgtatactctctttaatatgtgcctagctttggaaagtctagaatgggtccctggtgcctttttactttgaagaaatcagtttctgcctctttttggaaaagaaaacaaagtgcaattgttttttactggaaagttacccaatagcatgaggtgaacaggacgtagttaggccttcctgtaaacagaaaatcatatcaaaacactatcttcccatctgtttctcaatgcctgctacttcttgtagatatttcatttcaggagagcagcagttaaacccgtggattttgtagttaggaacctgggttcaaaccctcttccactaattggctatgtctctggacaagtttttttttttttttttttttaaaccctttctgaactttcactttctatgtctacctcaaagaattgttgtgaggcttgagataatgcatttgtaaagggtctgccagataggaagatgctagttatggatttacaaggttgttaaggctgtaagagtctaaaacctacagtgaatcacaatgcatttacccccactgacttggacataagtgaaaactagccagaagtctctttttcaaattacttacaggttattcaatataaaatttttgtaatggataatcttatttatctaaactaaagcttcctgtttatacacactcctgttattctgggataagataaatgaccacagtaccttaatttctaggtgggtgcctgtgatggttcattgtaggtaaggacattttctctttttcagcagctgtgtaggtccagagcctctgggagaggaggggggtagcatgcacccagcaggggactgaactgggaaactcaaggttctttttactgtggggtagtgagctgcctttctgtgatcggtttccctagggatgttgctgttcccctccttgctattcgcagctacatacaacgtggccaaccccagtaggctgatcctatatatgatcagtgctggtgctgactctcaatagccccacccaagctggctataggtttacagatacattaattaggcaacctaaaatattgatgctggtgttggtgtgacataatgctatggccagaactgaaacttagagttataattcatgtattagggttctccagagggacagaattagtaggatatatgtatatatgaaagggaggttattagggagaactggctcccacagttagaaggcgaagtcgcacaataggccgtctgcaagctgggttagagagaagccagtagtggctcagcctgagttcaaaaacctcaaaactggggaagctgacagtgcagccagccttcagtctgtggccaaaggcccaagagcccctggcaaccaacccactggtgcaagtcctagattccaaaggctgaagaacctggagtctgatgtccaagagcaggaagagtggaagaaagccagaagactcagcaaacaaggtagacagtgtctaccaccatagtggccataccaaagaggctaccgattccttcctgctacctggatccctgaagttgccctggtctctgcaccttctaaacctagttcttaagagctttccattacatgagctgtctcaaagccctccaataaattctcagtgtaagcttctgttgcttgtggacagaaaattctgacagacctaccctataagtgttactgtcaggataacatgagaacgcacaacagtaagtggtcactaagtgttagctacggttattttgcccaaggtagcatggctagttgatgccggttgatggggcttaaacccagctccctcatcttccaggcctctgtactccctattccactaaactacctctcaggtttatttttttaaattcttactctgcaagtacataggaccacatttacctgggaaaacaagaataaaggctgctctgcattttttagaaacttttttgaaagggagatgggaatgcctgcacccccaagtccagaccaacacaatggttaattgagatgaataataaaggaaagactgttctgggcttcccagaatagcttggtccttaaattgtggcacaaacaacctcctgtcagagccagcctcctgccaggaagaggggtaggagactagaggccgtgtgtgcagccttgccctgaaggctagggtgacaatttggaggctgtccaaacaccctggcctctagagctggcctgtctatttgaaatgccggctctgatgctaatcggcgaccctcaggcaagttacttaaccttacatgcctcagttttctcatctggaaaatgagaaccctaggtttagggttgttagaaaagttaaatgagttaagacaagtgcctgggacacagtagcctcttgtgtgtgtttatcattatgtcctcagcaggtcgtagaagcagcttctcaggtgtgaggctggcgcattatctggagtgggttgggttttctaggatggaccccctgctgcattttcctcattcatccaccagggcttaatggggaatcaaggaatccatgtgtaactgtataataactgtagccacactccaatgaccacctactagttgtccctggcactgcttatacatatgtccatcaaatcaatcctatgaagtagatactgtcttcattttatagatcagagacaattggggttcagagagctgatgtgattttcccagggtcacagagagtcccagattcaggcacaactcttgtattccaagacacaaccactacatgtccaaaggctgcccagagccaccgggcacggcaaattgtgacatatccctaaagaggctgagcacctggtcaggatctgatggctgacagtgtgtccagatgcagagctggagtgggggaggggaaggggggctccttgggacagagaaggctttctgtgctttctctgaagggagcagtctgaggaccaagggaacccggcaaacagcacctcaggtactccaggccctcctggctggagagggctgtggcaatggaaaattagtgccaactgcaatgagtcagcctcggttaaatagagagtgaagaatgctggacaggaacctccaccctcatgtcacatttcttcagtgtgacccttctggcccctctcctcctgacagcggaacaatgactgccccgataggtgaggctggaggaagaatcagtcctgtccttggcaagctcttcactatgacagtaaaggctctctgcctgctgccaaggcctgtgactttctaacctggcctcacgctgggtaagcttaaggtagaggtgcaggattagcaagcccacctggctaccaggccgacagctacatctttcaactgaccctgatcaacgaagagggacttgtgtctctcagttggttccaaatgaaaccagggagcaggggcgttaggaagctccaacaggatggtacttaatggggcatttgagtggagaggtaggtgacatagtgctttggagcccagggagggaaaggttctgctgaagttgaattcaagactgttctttcatcacaaacttgagtttcctggacatttgtttgcagaaacaaccgtagggttttgccttaacctcgtgggtttattattacctcatagggactttgcctcctgacagcagtttatgggtgttcattgtggcacttgagttttcttgcatacttgttagagaaaccaagtttgtcatcaacttcttatttaaccccctggctataacttcatggattatgttataattaagccatccagagtaaaatctgtttagattatcttggagtaagggggaaaaaatctgtaattttttctcctcaactagatatatacataaaaaatgattgtattgcttcatttaaaaaatataacgcaaaatctcttttccttctaaaaaaaaaaaaaaaaaa

SEQ ID NO: 29097 - DNA, 6099 bp, Homo Sapiens
aggcggcgcgtgcgtagaggggcggtgagagctaagaggggcagcgcgtgtgcagaggggcggtgtgacttaggacggggcgatggcggctgagaggagctgcgcgtgcgcgaacatgtaactggtgggatctgcggcggctcccagatgatggtcgtcctcctgggcgcgacgaccctagtgctcgtcgccgtggcgccatgggtgttgtccgcagccgcaggtggaaaaaatctaaaatctcctcaaaaagtagaggtcgacatcatagatgacaactttatcctgaggtggaacaggagcgatgagtctgtcgggaatgtgactttttcattcgattatcaaaaaactgggatggataattggataaaattgtctgggtgtcagaatattactagtaccaaatgcaacttttcttcactcaagctgaatgtttatgaagaaattaaattgcgtataagagcagaaaaagaaaacacttcttcatggtatgaggttgactcatttacaccatttcgcaaagctcagattggtcctccagaagtacatttagaagctgaagataaggcaatagtgatacacatctctcctggaacaaaagatagtgttatgtgggctttggatggtttaagctttacatatagcttagttatctggaaaaactcttcaggtgtagaagaaaggattgaaaatatttattccagacataaaatttataaactctcaccagagactacttattgtctaaaagttaaagcagcactacttacgtcatggaaaattggtgtctatagtccagtacattgtataaagaccacagttgaaaatgaactacctccaccagaaaatatagaagtcagtgtccaaaatcagaactatgttcttaaatgggattatacatatgcaaacatgacctttcaagttcagtggctccacgcctttttaaaaaggaatcctggaaaccatttgtataaatggaaacaaatacctgactgtgaaaatgtcaaaactacccagtgtgtctttcctcaaaacgttttccaaaaaggaatttaccttctccgcgtacaagcatctgatggaaataacacatctttttggtctgaagagataaagtttgatactgaaatacaagctttcctacttcctccagtctttaacattagatcccttagtgattcattccatatctatatcggtgctccaaaacagtctggaaacacgcctgtgatccaggattatccactgatttatgaaattattttttgggaaaacacttcaaatgctgagagaaaaattatcgagaaaaaaactgatgttacagttcctaatttgaaaccactgactgtatattgtgtgaaagccagagcacacaccatggatgaaaagctgaataaaagcagtgtttttagtgacgctgtatgtgagaaaacaaaaccaggaaatacctctaaaatttggcttatagttggaatttgtattgcattatttgctctcccgtttgtcatttatgctgcgaaagtcttcttgagatgcatcaattatgtcttctttccatcacttaaaccttcttccagtatagatgagtatttctctgaacagccattgaagaatcttctgctttcaacttctgaggaacaaatcgaaaaatgtttcataattgaaaatataagcacaattgctacagtagaagaaactaatcaaactgatgaagatcataaaaaatacagttcccaaactagccaagattcaggaaattattctaatgaagatgaaagcgaaagtaaaacaagtgaagaactacagcaggactttgtatgaccagaaatgaactgtgtcaagtataaggtttttcagcaggagttacactgggagcctgaggtcctcaccttcctctcagtaactacagagaggacgtttccctgtttagggaaagaaaaaacatcttcagatcataggtcctaaaaatacgggcaagctcttaactatttaaaaatgaaattacaggcccgggcacggtggctcacacctgtaatcccagcactttgggaggctgaggcaggcagatcatgaggtcaagagatcgagaccagcctggccaacgtggtgaaaccccatctctactaaaaatacaaaaattagccgggtgtggtggcgcgcgcctgttgtcttagctactcaggaggctgaggcaggagaatcgcttgaaaacaggaggtggaggttgcagtgagccgagatcacgccactgcactccagcctggtgacagcgtgagactctttaaaaaaagaaattaaaagagttgagacaaacgtttcctacattcttttccatgtgtaaaatcatgaaaaagcctgtcaccggacttgcattggatgagatgagtcagaccaaaacagtggccacccgtcttcctcctgtgagcctaagtgcagccgtgctagctgcgcaccgtggctaaggatgacgtctgtgttcctgtccatcactgatgctgctggctactgcatgtgccacacctgtctgttcgccattcctaacattctgtttcattcttcctcgggagatatttcaaacatttggtcttttcttttaacactgagggtaggcccttaggaaatttatttaggaaagtctgaacacgttatcacttggttttctggaaagtagcttaccctagaaaacagctgcaaatgccagaaagatgatccctaaaaatgttgagggacttctgttcattcatcccgagaacattggcttccacatcacagtatctacccttacatggtttaggattaaagccaggcaatcttttactatgcattaagacctctgattcaaaacttattagaacagtagcttctgctggaatttgcaatcactgaagtcatagaaaataggtaactatctaattagagaaataattgttgtattttaagatctgagagtgtgtacaagttttagtatacatgccatgccagaagatagtgtatgcaagaagtcttgggaccagaaaatggcaatgataggagactgacatagaagaagaatgcttccctaggaaaaaggtcgctggctttggtgcaagaggaagaagaatgttccactggaagcctgagcacctaatcagctctcagtgatcaacccactcttgttatgggtggtctctgtcactttgaatgccaggctggcttctcgtctagcagtattcagataccccttctgctcagcctgcttggcgttaaaatacaaatcattgaactgagggggaaaaatgtaactaggaagaaaaacccaatttaagaaattacataatgctttccaaaggcacctacaacttagttttaaattacttgctactggggattacccatggatatccttaataggcaggaagtctgggaattctggtggcctctagggcagtgttctcacagcaccgttccgacagggaccagtgaaagaaaagagacaaagttagaacgtgctggggagcggccatttctaaggccagtctggtttaagtagtcatttctgctgaaaaaacagatgatcctggtggaagaaaaggttgaaggcagctgccctcgggagggctgtgatgctcggcacatcctgcctggcacatacacgtgtctgcaggccacaccgtgcatgtccccagacctgccgcctggcttctggagtgcttcaagcagagcatggtgggtcattgaggagacccaggaatctcatctgagaacccactctctgccggagaaccccatggtgacacattttcatctttctgaccagaggctgtttttttttttttttgagacagtctcattctgttgcccaggctggagtgcagtggcttgatctcggctcactgcaacctcgcctcccgggttcaagcaattctctgccgcagcctccagagtagctgggataacaggtgcccaccaccacaccccactaatttttgtatttgtatttttagtagagatggggtttcaccatgttggtcaggctggtcttggactcctgacctcatgctccacccgcttcggcctcccaaagttctgggattacaggtgtgagccaccgtgcacggccggcctgacctttggaaaagccttgtcactttggacgtttgcgtctttgaagaggcgatgggagcatatcatgactgcctgccaccattgcttttcagactaccacaactcaatcatgctgtccaggacttctggccctgtgttcaccactgggaaaacgtacttcagactggatagcctaaaaaggagcaatgcccttgtaggatgtggagaagggaaaatacggacattaacattaaaagacaccagtgaaattgttaggtctctaggaagttggagcacaaggcttcacgctttaagaccatctgtggttttcagtgaacaagcgctgagcaccagcagcagaaaacaacaacaaaaaaacacctcgtttttaccttgtcttctagacatgaaaaggcagttgcattccactctgcattatgttctacatgttgctttatcagtatatgcttagctgtaagtgacaagtattttttctgaacagaagtttacttagaaataccatgcacttgggggtaccaattaaccgcctgaaaattagcatattgatagttcttagagagaccagatataatctaagaatttatatgaaagatttgtatcattagagccagaaataattttatattaatatataatacagattaacattatatataatatgtacctgtgtcacttctgacatgagcctgtaaacatatattcatatatgtacctgcacatgtacccacctgatgtaggtcttattcctttagtatggacttaaagtacttattcatataccttgtaactaaaaattagaacagctccctagaattgtgaacttttaagagtctgactagaaatttgcaacttataaaaaagttacttttaaaaatataagttagggctaggcacagtggctcatgcctataatctcagcacttttgggaggccaagacaggaggatcacttcaggccaggagttcaagatcaaccaacctgggtaacatggccagaccccatctctatttatatatatatatataaaacttagagtttttatcttcccctaaaagaggccgtgatatttgcagcagcctcaaattgctcttaaggggtttaggtgtgcagaagctttcctttccctacccagtaaccatgtgactactaacgtggtatattgatttattttgtttgctgtctgtctcccctgccccactgctggaacagaggctccaagaaaacagggaccttattattcattactgcatccccagtaatgaaagtacttagaaaataattattgaatgaatgaaatctaaactgtgaacctgagggtgtttgtggcagtgtttgttttactgaattgtagaaggacataaccgtgttttcagtgtttctatggaacaaacttgtacattttatttcacttgtgttttgtcttaaaccctactgctggaaacaattttatgtaataagcaatgggcccaaaagtctaggagtttttttgtacttagtgaatttgtatgcaacagagatgctgcagctgatgcctttaaaaggtattcatcatggaagagctgaggcctgtgcttggtgttccagagcccagggttgagcatcctgaaggagccactgcagccgtcactgtccccagagcctgtggagatagagcctgtttgctgctttttcttcccgctcttaagacatggctggagctcagtcttcattgaatgaagtttgctgtggtattgcatagccttgctttcttgaactaaactgtttgcccttcacaagtagttcttctttcaggattagttcgttccaaggaggctcttcagtctcacagataagtagatctctcctgctgtctggacacatttcactcggaaattgaatacaatttgtattcaggctgggaacctgaacacacacttgtgtttttaagcttcccttttttacagtggacaaggacacaaataataaataaatcatccctaatgcccaagaaaaaaa

SEQ ID NO: 29098 - DNA, 6030 bp, Homo Sapiens
gttggcccccgttacttttcctctgggaaatatggcgcacgctgggagaacagggtacgataaccgggagatagtgatgaagtacatccattataagctgtcgcagaggggctacgagtgggatgcgggagatgtgggcgccgcgcccccgggggccgcccccgcgccgggcatcttctcctcgcagcccgggcacacgccccatacagccgcatcccgggacccggtcgccaggacctcgccgctgcagaccccggctgcccccggcgccgccgcggggcctgcgctcagcccggtgccacctgtggtccacctgaccctccgccaggccggcgacgacttctcccgccgctaccgccgcgacttcgccgagatgtccaggcagctgcacctgacgcccttcaccgcgcggggacgctttgccacggtggtggaggagctcttcagggacggggtgaactgggggaggattgtggccttctttgagttcggtggggtcatgtgtgtggagagcgtcaaccgggagatgtcgcccctggtggacaacatcgccctgtggatgactgagtacctgaaccggcacctgcacacctggatccaggataacggaggctgggatgcctttgtggaactgtacggccccagcatgcggcctctgtttgatttctcctggctgtctctgaagactctgctcagtttggccctggtgggagcttgcatcaccctgggtgcctatctgggccacaagtgaagtcaacatgcctgccccaaacaaatatgcaaaaggttcactaaagcagtagaaataatatgcattgtcagtgatgttccatgaaacaaagctgcaggctgtttaagaaaaaataacacacatataaacatcacacacacagacagacacacacacacacaacaattaacagtcttcaggcaaaacgtcgaatcagctatttactgccaaagggaaatatcatttattttttacattattaagaaaaaaagatttatttatttaagacagtcccatcaaaactcctgtctttggaaatccgaccactaattgccaagcaccgcttcgtgtggctccacctggatgttctgtgcctgtaaacatagattcgctttccatgttgttggccggatcaccatctgaagagcagacggatggaaaaaggacctgatcattggggaagctggctttctggctgctggaggctggggagaaggtgttcattcacttgcatttctttgccctgggggctgtgatattaacagagggagggttcctgtggggggaagtccatgcctccctggcctgaagaagagactctttgcatatgactcacatgatgcatacctggtgggaggaaaagagttgggaacttcagatggacctagtacccactgagatttccacgccgaaggacagcgatgggaaaaatgcccttaaatcataggaaagtatttttttaagctaccaattgtgccgagaaaagcattttagcaatttatacaatatcatccagtaccttaagccctgattgtgtatattcatatattttggatacgcaccccccaactcccaatactggctctgtctgagtaagaaacagaatcctctggaacttgaggaagtgaacatttcggtgacttccgcatcaggaaggctagagttacccagagcatcaggccgccacaagtgcctgcttttaggagaccgaagtccgcagaacctgcctgtgtcccagcttggaggcctggtcctggaactgagccggggccctcactggcctcctccagggatgatcaacagggcagtgtggtctccgaatgtctggaagctgatggagctcagaattccactgtcaagaaagagcagtagaggggtgtggctgggcctgtcaccctggggccctccaggtaggcccgttttcacgtggagcatgggagccacgacccttcttaagacatgtatcactgtagagggaaggaacagaggccctgggcccttcctatcagaaggacatggtgaaggctgggaacgtgaggagaggcaatggccacggcccattttggctgtagcacatggcacgttggctgtgtggccttggcccacctgtgagtttaaagcaaggctttaaatgactttggagagggtcacaaatcctaaaagaagcattgaagtgaggtgtcatggattaattgacccctgtctatggaattacatgtaaaacattatcttgtcactgtagtttggttttatttgaaaacctgacaaaaaaaaagttccaggtgtggaatatgggggttatctgtacatcctggggcattaaaaaaaaaatcaatggtggggaactataaagaagtaacaaaagaagtgacatcttcagcaaataaactaggaaatttttttttcttccagtttagaatcagccttgaaacattgatggaataactctgtggcattattgcattatataccatttatctgtattaactttggaatgtactctgttcaatgtttaatgctgtggttgatatttcgaaagctgctttaaaaaaatacatgcatctcagcgtttttttgtttttaattgtatttagttatggcctatacactatttgtgagcaaaggtgatcgttttctgtttgagatttttatctcttgattcttcaaaagcattctgagaaggtgagataagccctgagtctcagctacctaagaaaaacctggatgtcactggccactgaggagctttgtttcaaccaagtcatgtgcatttccacgtcaacagaattgtttattgtgacagttatatctgttgtccctttgaccttgtttcttgaaggtttcctcgtccctgggcaattccgcatttaattcatggtattcaggattacatgcatgtttggttaaacccatgagattcattcagttaaaaatccagatggcaaatgaccagcagattcaaatctatggtggtttgacctttagagagttgctttacgtggcctgtttcaacacagacccacccagagccctcctgccctccttccgcgggggctttctcatggctgtccttcagggtcttcctgaaatgcagtggtgcttacgctccaccaagaaagcaggaaacctgtggtatgaagccagacctccccggcgggcctcagggaacagaatgatcagacctttgaatgattctaatttttaagcaaaatattattttatgaaaggtttacattgtcaaagtgatgaatatggaatatccaatcctgtgctgctatcctgccaaaatcattttaatggagtcagtttgcagtatgctccacgtggtaagatcctccaagctgctttagaagtaacaatgaagaacgtggacgcttttaatataaagcctgttttgtcttctgttgttgttcaaacgggattcacagagtatttgaaaaatgtatatatattaagaggtcacgggggctaattgctggctggctgccttttgctgtggggttttgttacctggttttaataacagtaaatgtgcccagcctcttggccccagaactgtacagtattgtggctgcacttgctctaagagtagttgatgttgcattttccttattgttaaaaacatgttagaagcaatgaatgtatataaaagcctcaactagtcatttttttctcctcttcttttttttcattatatctaattattttgcagttgggcaacagagaaccatccctattttgtattgaagagggattcacatctgcatcttaactgctctttatgaatgaaaaaacagtcctctgtatgtactcctctttacactggccagggtcagagttaaatagagtatatgcactttccaaattggggacaagggctctaaaaaaagccccaaaaggagaagaacatctgagaacctcctcggccctcccagtccctcgctgcacaaatactccgcaagagaggccagaatgacagctgacagggtctatggccatcgggtcgtctccgaagatttggcaggggcagaaaactctggcaggcttaagatttggaataaagtcacagaatcaaggaagcacctcaatttagttcaaacaagacgccaacattctctccacagctcacttacctctctgtgttcagatgtggccttccatttatatgtgatctttgttttattagtaaatgcttatcatctaaagatgtagctctggcccagtgggaaaaattaggaagtgattataaatcgagaggagttataataatcaagattaaatgtaaataatcagggcaatcccaacacatgtctagctttcacctccaggatctattgagtgaacagaattgcaaatagtctctatttgtaattgaacttatcctaaaacaaatagtttataaatgtgaacttaaactctaattaattccaactgtacttttaaggcagtggctgtttttagactttcttatcacttatagttagtaatgtacacctactctatcagagaaaaacaggaaaggctcgaaatacaagccattctaaggaaattagggagtcagttgaaattctattctgatcttattctgtggtgtcttttgcagcccagacaaatgtggttacacactttttaagaaatacaattctacattgtcaagcttatgaaggttccaatcagatctttattgttattcaatttggatctttcagggattttttttttaaattattatgggacaaaggacatttgttggaggggtgggagggaggaacaatttttaaatataaaacattcccaagtttggatcagggagttggaagttttcagaataaccagaactaagggtatgaaggacctgtattggggtcgatgtgatgcctctgcgaagaaccttgtgtgacaaatgagaaacattttgaagtttgtggtacgacctttagattccagagacatcagcatggctcaaagtgcagctccgtttggcagtgcaatggtataaatttcaagctggatatgtctaatgggtatttaaacaataaatgtgcagttttaactaacaggatatttaatgacaaccttctggttggtagggacatctgtttctaaatgtttattatgtacaatacagaaaaaaattttataaaattaagcaatgtgaaactgaattggagagtgataatacaagtcctttagtcttacccagtgaatcattctgttccatgtctttggacaaccatgaccttggacaatcatgaaatatgcatctcactggatgcaaagaaaatcagatggagcatgaatggtactgtaccggttcatctggactgccccagaaaaataacttcaagcaaacatcctatcaacaacaaggttgttctgcataccaagctgagcacagaagatgggaacactggtggaggatggaaaggctcgctcaatcaagaaaattctgagactattaataaataagactgtagtgtagatactgagtaaatccatgcacctaaaccttttggaaaatctgccgtgggccctccagatagctcatttcattaagtttttccctccaaggtagaatttgcaagagtgacagtggattgcatttcttttggggaagctttcttttggtggttttgtttattataccttcttaagttttcaaccaaggtttgcttttgttttgagttactggggttatttttgttttaaataaaaataagtgtacaataagtgtttttgtattgaaagcttttgttatcaagattttcatacttttaccttccatggctctttttaagattgatacttttaagaggtggctgatattctgcaacactgtacacataaaaaatacggtaaggatactttacatggttaaggtaaagtaagtctccagttggccaccattagctataatggcactttgtttgtgttgttggaaaaagtcacattgccattaaactttccttgtctgtctagttaatattgtgaagaaaaataaagtacagtgtgagatactg

SEQ ID NO: 29099 - DNA, 4015 bp, Homo Sapiens
gggagccggaggaggagcggccgccgccgccaccgccgccgccatagagactgtagccgtggagactgttacttaccaacggggaccaacacgcagcagccgctgccgccgccgcgggagccgctgcccgaactcccggcccgaactccagacctgagcatgcagaattccgagggtggagcggattcgccagcgtccgtggctctgcgtccctcggcggcagccccgcctgtgccagcctccccgcagagggtgttggtccaggcagccagctccaatcccaaaggggcccagatgcagccgatctccctccccagagttcagcaggtaccccagcaggtgcagccggtgcagcacgtgtatcctgcccaggtgcagtacgtggaagggggagacgccgtctacaccaatggagccatacgaacagcctacacctacaaccccgagcctcagatgtacgcccccagcagcacggcttcttacttcgaggccccaggcggtgcccaggtgaccgtggcagcctcgtccccgccagcggtcccctcccacagcatggtgggcatcaccatggatgtcggggggagccccatcgtctccagcgcgggagcctatctcatccacggggggatggacagcaccagacactccctggcccacacctcccgctcatcgcccgccacgcttgaaatggcgattgaaaacctccaaaaaagcgaaggaatcacatcacacaaaagcggtttactcaacagccatctccagtggctgttggataattatgaaacagcggaaggtgtgagtctccccagaagttctctttacaaccactaccttcggcactgccaggagcacaagctagacccagtgaacgccgcctccttcgggaaactgatccgttctgtgtttatggggctgagaacgcggcggctgggcaccaggggcaactcgaagtaccattactatgggattcgtctgaagccggactcaccactgaaccggctgcaggaggacacgcagtacatggccatgcggcagcagcccatgcaccagaagcccaggtaccggccagcccagaagacggacagcctcggggacagcggctcccacagcggcctgcacagcactccggaacagaccatggccgtgcagagccagcaccaccagcagtacatagatgtctcccacgtcttccccgagttcccagcgcccgacctgggcagcttcctgctgcaggacggcgtcacactgcacgacgtcaaggccctgcagctggtgtacagacggcactgcgaggcaactgtagatgtggtgatgaacctccagttccactacatcgagaagctgtggctctccttctggaactctaaggcctcctccagcgacggccccacctctcttcctgccagtgacgaagaccccgagggcgccgtcctgcccaaggacaagcttatctccctgtgtcagtgcgaccccatcctcaggtggatgaggagctgcgaccacatcctctaccaggcgctggtggagattctcatccccgacgtgctgaggccggtccccagtaccttgacacaggccatccgtaactttgccaagagcttggaaggctggttgacaaatgccatgagtgacttcccacaacaggtcatccagaccaaggtgggcgtcgtcagtgccttcgcccagacgctgcggcgctacacgtccctcaaccacctggcgcaggcggcccgggcggtgctgcagaacacgtcccagatcaaccagatgctcagcgacctcaaccgcgtggactttgccaacgtgcaggagcaggcctcgtgggtgtgccagtgcgaggagagtgtggtgcagcggctggagcaggatttcaagctgaccctgcagcagcagagctccctggaccagtgggccagctggctggacagtgtggtcacccaggtcctgaagcagcatgccggcagccccagcttccccaaggccgcccggcagttcttgctgaaatggtccttttacagctccatggtgatccgggacctgaccctgcgcagcgctgccagcttcggctccttccacctcatccgcctgctctacgacgagtacatgttctacctggtggagcaccgcgtcgcggaggccaccggagagacgccgatcgctgtgatgggagagttcaacgatctcgcctctctgtcgctgacgctgctcgacaaagatgacatgggcgatgagcagcgtggcagcgaggcgggcccagacgcccgcagcctgggtgagcccctggtaaagcgggagcgcagtgaccccaaccactccctgcagggcatctagcagccccggccggcgcctcctcgaggttccaaaagatgccgcctggtcactctgggaacctggatttcaccggctccaccaaattagtgcctcttagatgatgtgatgtttactttgactcaagcgggggctcccggggtcagtgttcaagaaggaaagcagttgttgaagctacagaagcccaggccagggctcccactggctgtagctgtgctctgggtccccaggtccctgcgcagccaccagggccccaccagaccatgggttccttattctggacaaaccctcctctgctggaaccctggactttggccccagtccctttaagagctgaaagggctgtgctgagagcactggcctctgcactcaactggaaccaattttcaccatgattttaaaaattaaaaaaacctggcagagcccgactagaaagggacggcctctcccctcctacctgccaccgctggggaggcacagagctcgccagcgtccctggagtcccctcaggaatggaaagtggagtgcccttgtctggtagcaccatgtgggagggacccagctgggcgcagcgccctgtggccttttagatccagacctccctgccggatgccccgaggcgggaggccggctgtgctgcaggaacccatctccagatgccaaaggacttgaggggcagctgacaatcgctgtgtcccggcagatccgcagctcgaaaaagaacaagccacagaaacgggctcgctcgtgccaggacacagcagtgtctttcaaaaaatcaaaaccagaagttttatcagcagcaggaaggatgtgggactctgtccaagttcaccgtcaccatcaagccactggctgtggaaggagtttgtccaacagggtcagtgtcacagccacaacttcagaaagcagccatcccgcgtgtcgtccaaacagcagtgcctgcgtcccgctccacggagtcttccagaacacctccctctgaactaatcccggagcaccccacccccagcgagtcccacctggacctcttcaaagtcaaaactcttctctcgggacaaacaaatattcgggactttcgaagccctgaacttgagacaccaagtttgtctccatggaaacacgtagccgctgcagttggacagctgcgtgctggagttctgtccccaaaccaactgcagagaagaaagacgagcctcggcccaggacgcgatttctaacgaaatgcaatagttttctctttttggaaaaatgtttataccaatagttttgtgcgctaattgttattagaacgtttcttatgaatgtgtacattgcagtatattcagtcccaaaattcagtcccaaatgttttgttctcattcacacagaaggtactaatgtcagctcacgtggcctttaaaaacctacttccccgcccgcaggagctcagagcatcgctgggcctgcgccagagtgaggggtgcaggaagacaaagacgcgtgctcactttagaaacgaaaagctgggaataatcacactgtttgtctggtcgtatagcccaaaccttagttgaaatcagacagaaagaatgtctttaaaatatacatctcctctccttggagacactgaagctcacagttaacggattgtaatgcccggcttttcctcactcctggtaaccaatacaagctggtttctgcctta

SEQ ID NO: 29100 - DNA, 7180 bp, Homo Sapiens
tgtataagaatttgcacatcccaagttgctatgtgaataggaatgtacgtttccaggggaaggagaaagagacattacagagcagacagctctatgatgtttactatacttgctaaaatgtgaaattcagctaaattggaatacaaagtagtgccaaaacagcattaggtttgcggagttattttaaacataattgaaaaatcaaggttttttaatactttaaataaaacatctgtttttcaatgtggtaatttaagtcctacgatgagtttattaacatgtgctttttatttagggtatgagctacagttccgattaggcccaactttacagggaaaagcagttaccgtgtatacaaattacccatttcctggagaaacatttaatagagaaaaattccgttctctggattgggaaaatccaacagaaagagaagatgattctgataaatactgtaaacttaatctgcaacaatctggttcatttcagtattatttccttcaaggaaatgagaaaagtggtggaggttacatagttgtggaccccattttacgtgttggtgctgataatcatgtgctacccttggactgtgttactcttcagacatttttagctaagtgtttgggaccttttgatgaatgggaaagcagacttagggttgcaaaagaatcaggctacaacatgattcattttaccccattgcagactcttggactatctaggtcatgctactcccttgccaatcagttagaattaaatcctgacttttcaagacctaatagaaagtatacctggaatgatgttggacagctagtggaaaaattaaaaaaggaatggaatgttatttgtattactgatgttgtctacaatcatactgctgctaatagtaaatggatccaggaacatccagaatgtgcctataatcttgtgaattctccacacttaaaacctgcctgggtcttagacagagcactttggcgtttctcctgtgatgttgcagaagggaaatacaaagaaaagggaatacctgctttgattgaaaatgatcaccatatgaattccatccgaaaaataatttgggaggatatttttccaaagcttaaactctgggaatttttccaagtagatgtcaacaaagcggttgagcaatttagaagacttcttacacaagaaaataggcgagtaaccaagtctgatccaaaccaacaccttacgattattcaagatcctgaatacagacggtttggctgtactgtagatatgaacattgcactaacgactttcataccacatgacaaggggccagcagcaattgaagaatgctgtaattggtttcataaaagaatggaggaattaaattcagagaagcatcgactcattaactatcatcaggaacaggcagttaattgccttttgggaaatgtgttttatgaacgactggctggccatggtccaaaactaggacctgtcactagaaagcatcctttagttaccaggtattttactttcccatttgaagagatagacttctccatggaagaatctatgattcatctgccaaataaagcttgttttctgatggcacacaatggatgggtaatgggagatgatcctcttcgaaactttgctgaaccgggttcagaagtttacctaaggagagaacttatttgctggggagacagtgttaaattacgctatgggaataaaccagaggactgtccttatctctgggcacacatgaaaaaatacactgaaataactgcaacttatttccagggagtacgtcttgataactgccactcaacacctcttcacgtagctgagtacatgttggatgctgctaggaatttgcaacccaatttatatgtagtagctgaactgttcacaggaagtgaagatctggacaatgtctttgttactagactgggcattagttccttaataagagaggcaatgagtgcatataatagtcatgaagagggcagattagtttaccgatatggaggagaacctgttggatcctttgttcagccctgtttgaggcctttaatgccagctattgcacatgccctgtttatggatattacgcatgataatgagtgtcctattgtgcatagatcagcgtatgatgctcttccaagtactacaattgtttctatggcatgttgtgctagtggaagtacaagaggctatgatgaattagtgcctcatcagatttcagtggtttctgaagaacggttttacactaagtggaatcctgaagcattgccttcaaacacaggtgaagttaatttccaaagcggcattattgcagccaggtgtgctatcagtaaacttcatcaggagcttggagccaagggttttattcaggtgtatgtggatcaagttgatgaagacatagtggcagtaacaagacactcacctagcatccatcagtctgttgtggctgtatctagaactgctttcaggaatcccaagacttcattttacagcaaggaagtgcctcaaatgtgcatccctggcaaaattgaagaagtagttcttgaagctagaactattgagagaaacacgaaaccttataggaaggatgagaattcaatcaatggaacaccagatatcacagtagaaattagagaacatattcagcttaatgaaagtaaaattgttaaacaagctggagttgccacaaaagggcccaatgaatatattcaagaaatagaatttgaaaacttgtctccaggaagtgttattatattcagagttagtcttgatccacatgcacaagtcgctgttggaattcttcgaaatcatctgacacaattcagtcctcactttaaatctggcagcctagctgttgacaatgcagatcctatattaaaaattccttttgcttctcttgcctccagattaactttggctgagctaaatcagatcctttaccgatgtgaatcagaagaaaaggaagatggtggagggtgctatgacataccaaactggtcagcccttaaatatgcaggtcttcaaggtttaatgtctgtattggcagaaataagaccaaagaatgacttggggcatcctttttgtaataatttgagatctggagattggatgattgactatgtcagtaaccggcttatttcacgatcaggaactattgctgaagttggtaaatggttgcaggctatgttcttctacctgaagcagatcccacgttaccttatcccatgttactttgatgctatattaattggtgcatataccactcttctggatacagcatggaagcagatgtcaagctttgttcagaatggttcaacctttgtgaaacacctttcattgggttcagttcaactgtgtggagtaggaaaattcccttccctgccaattctttcacctgccctaatggatgtaccttataggttaaatgagatcacaaaagaaaaggagcaatgttgtgtttctctagctgcaggcttacctcatttttcttctggtattttccgctgctggggaagggatacttttattgcacttagaggtatactgctgattactggacgctatgtagaagccaggaatattattttagcatttgcgggtaccctgaggcatggtctcattcctaatctactgggtgaagggatttatgccagatacaattgtcgggatgctgtgtggtggtggctgcagtgtatccaggattactgtaaaatggttccaaatggtctagacattctcaagtgcccagtttccagaatgtatcctacagatgattctgctcctttgcctgctggcacactggatcagccattgtttgaagtcatacaggaagcaatgcaaaaacacatgcagggcatacagttccgagaaaggaatgctggtccccagatagatcgaaacatgaaggacgaaggttttaatataactgcaggagttgatgaagaaacaggatttgtttatggaggaaatcgtttcaattgtggcacatggatggataaaatgggagaaagtgacagagctagaaacagaggaatcccagccacaccaagagatgggtctgctgtggaaattgtgggcctgagtaaatctgctgttcgctggttgctggaattatccaaaaaaaatattttcccttatcatgaagtcacagtaaaaagacatggaaaggctataaaggtctcatatgatgagtggaacagaaaaatacaagacaactttgaaaagctatttcatgtttccgaagacccttcagatttaaatgaaaagcatccaaatctggttcacaaacgtggcatatacaaagatagttatggagcttcaagtccttggtgtgactatcagctcaggcctaattttaccatagcaatggttgtggcccctgagctctttactacagaaaaagcagggaaagctttggagattgcagaaaaaaaattgcttggtccccttggcatgaaaactttagatccagatgatatggtttactgtggaatttatgacaatgcattagacaatgacaactacaatcttgctaaaggtttcaattatcaccaaggacctgagtggctgtggcctattgggtattttcttcgtgcaaaattatatttttccagattgatgggcccggagactactgcaaagactatagttttggttaaaaatgttctttcccgacattatgttcatcttgagagatccccttggaaaggacttccagaactgaccaatgagaatgcccagtactgtcctttcagctgtgaaacacaagcctggtcaattgctactattcttgagacactttatgatttatagtttattacagatattaagtatgcaattactgtattataggatgcaaggtcatcatatgtaaatgctatatgcacaggctcaagttgttttaaaaatctcatttattataatattgatgctcaattaggtaagattgtaaaagcattgattttttttaatgtacagaggtagatttcaatttgaatcagaaagaaatatcattaccaatgaaatgtgtttgagttcagtaagaattattcaaatgcctagaaatccatagtttggaaaataaaaatcatgtcatcttctatttgtacagaaatgaaaataaaatatgaaaataatgaaagaaatgaaaagatagcttttaattgtggtatatataatcttcagtaacaatacatactgaatacgctgtggttcattaatattaacaccacgtactatagtattcttagaatacagtgctcactgcatttaataaatatttaataaatgatgaatgatagaagtttccatctacaatatatgttcctaaatggagcacagatgttcaaactatgctttcattttttcactgatatattaatttttgtgtaatgaatgccaacagtatattttatatgatttacttatgtgaggaaacatgcaaagcattaggaaatttatttcctaaaaacagttttgtaaaattagtattgagttctattgagtattataagatagcttacattttcaaaatggaaattgtcggtcatatttctagaactttaaagaaaaaagaatgttatattagttttctaaaactcaactatctttagtcatgttcaaaaatctattgctagatcatagtagatactggttttctattaactcaaaacctacattgacaagtttaacattgagaagaatcttaacaaaaatatggatatgaattcagtagatatcttaaattcaataaaatcactggaagtttttcatgataacttattttaagatgccttaaaaatcttaaagtcacaaaaggaaaaaggtttttaacatttacatgagttaacattttttcatagaacttatttcctagatagaattttttactgttttttactgttttcttaagaaaacagttaaatcattatgcattcagttggaagaaagtagtggcaagaattctttcattgctatataatattcagtggctcatttatacctaataaaataatggtattttaaaataatgctactttcaaagtagcatttttttagttagtttacaggttacatacccaaaaccttaactatgactaagaaattaaagaagaaaaccagcaaactaaaacttctgggcagcaaaaatatataaatgcttcagatgtcaaatacccatgcttgaaagctcgtgtaatttactttaagattatctgcctgctcttcttcaaagctgaccttgctttagaaatagttttaactagcttagttttctggtttccaaaactaaaatagattaaatcctacaaatttaaggacagttgtgacagtaatctgaccactatctataaatacattggacattggtttccaaatctccctttctcttcagttccttccttgttcaatatatacccttctctaaactgtgcgggtaaaaggaatgactgtccttgagagaaccattagtttatcaaaggtttatgtagttttgttgctgtaccctaactttgatattcagggaggtaggaaaggtaacagaaaaccagcatatttaatcaaagcaagaagtaatcgctgacagttaaatgtgaccaaaaaaattaaaagttcacaatttttttaatgtagccatttggggttatctctagtaaggcagatacccacgttggtaaatttttaggatattgtgttgcactagaaaactaagtggttcatatttctaatgaggaagattaatgaaagaacattgttatattctgcgtggtatattttaaagtttaagaaggcatgttaaacattatttcctctatggtagttaaaatacagaattagatttttaacaggtgtcatttgactaaacgtttcggtagaatgcttcatacttgagtgatgctggataaggtattgtatttcaacaatggactatgccttggtttttcactaatcaaaatcaaaattactctttaacatgataaatgaatttaccagtttagtatgctgtggtattttaataagttttcaaagataattgggaaaacatgagactggtcatattgatgaatattgtaacatgtgaattgtgatccatttctgatatgtcttgaactactgtgtctagtaggcaaatgtcattgttacctctgtgtgttaagaaaataaaaatattttctaaaggtcg

SEQ ID NO: 29101 - DNA, 2324 bp, Homo Sapiens
ctccctttgggcaaggacctgagacccttgtgctaagtcaagaggctcaatgggctgcagaagaactagagaaggaccaagcaaagccatgatatttccatggaaatgtcagagcacccagagggacttatggaacatcttcaagttgtgggggtggacaatgctctgttgtgatttcctggcacatcatggaaccgactgctggacttaccattattctgaaaaacccatgaactggcaaagggctagaagattctgccgagacaattacacagatttagttgccatacaaaacaaggcggaaattgagtatctggagaagactctgcctttcagtcgttcttactactggataggaatccggaagataggaggaatatggacgtgggtgggaaccaacaaatctcttactgaagaagcagagaactggggagatggtgagcccaacaacaagaagaacaaggaggactgcgtggagatctatatcaagagaaacaaagatgcaggcaaatggaacgatgacgcctgccacaaactaaaggcagccctctgttacacagcttcttgccagccctggtcatgcagtggccatggagaatgtgtagaaatcatcaataattacacctgcaactgtgatgtggggtactatgggccccagtgtcagtttgtgattcagtgtgagcctttggaggccccagagctgggtaccatggactgtactcaccctttgggaaacttcagcttcagctcacagtgtgccttcagctgctctgaaggaacaaacttaactgggattgaagaaaccacctgtggaccatttggaaactggtcatctccagaaccaacctgtcaagtgattcagtgtgagcctctatcagcaccagatttggggatcatgaactgtagccatcccctggccagcttcagctttacctctgcatgtaccttcatctgctcagaaggaactgagttaattgggaagaagaaaaccatttgtgaatcatctggaatctggtcaaatcctagtccaatatgtcaaaaattggacaaaagtttctcaatgattaaggagggtgattataaccccctcttcattccagtggcagtcatggttactgcattctctgggttggcatttatcatttggctggcaaggagattaaaaaaaggcaagaaatccaagagaagtatgaatgacccatattaaatcgcccttggtgaaagaaaattcttggaatactaaaaatcatgagatcctttaaatccttccatgaaacgttttgtgtggtggcacctcctacgtcaaacatgaagtgtgtttccttcagtgcatctgggaagatttctacctgaccaacagttccttcagcttccatttcgcccctcatttatccctcaacccccagcccacaggtgtttatacagctcagctttttgtcttttctgaggagaaacaaataagaccataaagggaaaggattcatgtggaatataaagatggctgactttgctctttcttgactcttgttttcagtttcaattcagtgctgtacttgatgacagacacttctaaatgaagtgcaaatttgatacatatgtgaatatggactcagttttcttgcagatcaaatttcacgtcgtcttctgtatactgtggaggtacactcttatagaaagttcaaaaagtctacgctctcctttctttctaactccagtgaagtaatggggtcctgctcaagttgaaagagtcctatttgcactgtagcctcgccgtctgtgaattggaccatcctatttaactggcttcagcctccccaccttcttcagccacctctctttttcagttggctgacttccacacctagcatctcatgagtgccaagcaaaaggagagaagagagaaatagcctgcgctgttttttagtttgggggttttgctgtttccttttatgagacccattcctatttcttatagtcaatgtttcttttatcacgatattattagtaagaaaacatcactgaaatgctagctgcaagtgacatctctttgatgtcatatggaagagttaaaacaggtggagaaattccttgattcacaatgaaatgctctcctttcccctgcccccagaccttttatccacttacctagattctacatattctttaaatttcatctcaggcctccctcaaccccaccacttcttttataactagtcctttactaatccaacccatgatgagctcctcttcctggcttcttactgaaaggttaccctgtaacatgcaattttgcatttgaataaagcctgctttttaagtgttaa

SEQ ID NO: 29102 - DNA, 10128 bp, Homo Sapiens
ggcccccgccgggtgctgagcgcccgccaccgccctcttggccttttcccggtccccgccgcgcgcctgctgctgtccccgtgcccgaggactgggaggatggggctgagccgcttgcctgacttttgatccgaccagtaatcactttgcccgtgtggcgcgtggcccgttgcctgaggcttcctggcgcgtggggctgtttggtcccctccggagtgcggtgaggcgggccgagccgggactgcctgggtttggggataacgttcccatctccacccctgttgcagcaagggaaattgaggctgagggaactgggcccagggacggcgagccgtggctgcctctccagtccgggccccgaagggctgctcgtggatgaaccagactgattttaaggggtgaagagggtgcgtttcaatcagatgcttctggaacgtcgaaattgtcttctttggaaagaaccatcccctctttgggcttcagaggcccaaattgaggcgcaatgatgagaggatgtggtggtctactctgatgtcaatcttgagggctaggtctttctggaagtggatatctactcagacagtaagaattataagagctgtaagagctcattttggaggaataatggatgaaccatctcccttggcccaacctctggagctgaaccagcactctcgattcataataggttctgtgtctgaagataactcagaggatgagatcagcaacctggtgaagttggacctactggaggagaaggagggctccttgtcacctgcttctgttggctcagatacactctctgatttggggatctctagcctacaggatggcttggccttgcacataagactttgaaatactcgtgggatatgaagtggaggtgcctagagggttgaagataatgaggacagatgaagaaatgtttgattgtgccatacttacagttgctgattttcaaggtccagcatgtctggcttgcacctagtaaagcagggccgagacagaaagaaaatagattctcaacgagatttcactgtggcttctccagcagaatttgttactcgctttgggggaaataaagtgattgagaaggttcttattgctaacaatggcattgcagcagtgaaatgcatgcggtctatccgtaggtggtcttatgaaatgtttcgaaatgaacgtgcaattagattcgttgtcatggtcacacctgaagaccttaaagccaatgcagaatacattaagatggcagatcactatgtgccagtgcctggaggaccaaacaacaacaactatgcaaatgtggaattaattcttgatattgctaaaaggatcccagtacaagcagtgtgggctggctggggtcatgcttctgagaatcccaaactaccggaacttctcttgaaaaatggcattgccttcatgggtcctccaagccaggccatgtgggctttaggggataagattgcatcttccatagtggctcaaactgcaggtatcccaactcttccctggagcggcagtggtcttcgtgtggactggcaggaaaatgatttttcaaaacgtatcttaaatgttccccaggagctatatgaaaaaggttatgtgaaagatgtggatgatgggctacaggcagctgaggaagttggatatccagtaatgatcaaggcctcagagggaggaggagggaagggaattagaaaagtcaacaatgcagatgacttccctaatctcttcagacaggttcaagctgaagttcctggatctcccatatttgtgatgagactagccaaacaatctcgtcatctggaggtgcagatcttagcggaccaatatggcaatgctatctctttgtttggtcgtgattgctctgtacaacgcaggcatcagaagattattgaagaagcacctgctactattgctactccagcagtatttgaacacatggaacagtgtgcggtgaaacttgccaaaatggtgggttatgtgagtgctgggactgtggaatacctgtacagccaggatggcagcttctactttctggaattgaatcctcggctgcaggtagagcacccttgtacagagatggtggctgatgtcaatctccctgcagcacagctccagattgccatggggattcctctatatagaatcaaggatatccgtatgatgtatggggtatctccctggggtgattctcccattgattttgaagattctgcacacgttccttgtccaaggggccatgttattgctgctcggatcactagtgaaaatccagatgagggttttaagcccagctcaggaacagttcaggagctaaatttccgcagcaataagaatgtttggggatatttcagtgttgctgctgcagggggacttcatgaatttgctgattctcagtttggtcactgcttttcttggggagaaaacagagaagaggcaatttcaaacatggtggtggctttgaaggagctgtctattcggggtgactttcgaactacagttgaatacctgatcaaattgttagagactgaaagctttcagatgaacagaattgatactggctggctggacagactgatagcagaaaaagtacaggctgagcgacctgacaccatgttgggggttgtgtgtggtgccctccacgtggcagatgtgagcctgcggaatagcgtctctaacttccttcactccttagaaaggggtcaagtccttcctgctcatacacttctgaatacagtagatgttgaacttatctatgagggagtcaagtatgtacttaaggtgactcgacagtcccccaactcctatgtggtgatcatgaatggctcatgtgtagaagtagatgtacatcggctgagtgacggtggactgctcttgtcctatgatggcagcagttatactacgtatatgaaagaggaagtggatagatatcgcatcacaattggcaataaaacctgtgtgtttgagaaggaaaatgacccatcggtgatgcgctcaccttctgctgggaagttaatccagtacattgtagaagatggaggtcatgtgtttgccggccagtgctatgctgagattgaggtaatgaagatggtaatgaccttaacagctgtggagtctggctgtatccattacgtcaagcgacctggagcagctcttgaccctggctgtgtactagccaaaatgcaactggacaaccccagcaaggttcagcaggctgaacttcacacaggtagtctgccacggatccagagcacggcactcagaggcgagaaactccatcgagtgttccattatgtcctggataatctggtcaatgtaatgaatggatactgccttccagatcctttctttagcagcaaggtaaaagactgggtagagcgattgatgaaaaccctcagagatccctccctgcctctcctagaattgcaagatattatgaccagtgtgtctggccgcattccccccaatgtggagaagtctatcaagaaggaaatggctcagtatgctagcaacatcacatcagtcctctgtcagtttcccagccagcagattgcaaacatcctagatagccatgcagctacattgaaccggaaatctgaacgggaagtcttctttatgaatactcagagcattgttcagctggtacagaggtaccgaagtggcatccgaggccacatgaaggctgtggtgatggatctgctccggcagtacctgcgagtagagacacaattccagaatggtcactatgacaaatgtgtattcgccctccgagaagagaataaaagtgacatgaacactgtactgaactacatcttctctcacgctcaagtcaccaagaagaatcttctggtcacaatgcttattgatcagttgtgtggccgggaccctactctcactgatgagctgctgaatattctcacagagctaactcaactcagtaagaccaccaatgccaaagtagcacttcgagcacgccaggttcttattgcctcccatttgccatcatatgagcttcgccataaccaagtagagtctatcttcctatcagctattgacatgtatggacatcaattttgcattgagaacctgcagaaactcatcctatcagaaacatctatttttgatgtcctaccaaacttcttctatcacagcaaccaagtagtgaggatggcagctctggaggtgtatgttcgaagggcttatattgcctatgaacttaacagcgtacaacaccgccagcttaaggacaacacctgtgtggtggaattccagttcatgctgcccacatctcatccaaacagagggaacatccctacgctaaacagaatgtccttctcctccaacctcaaccactatggcatgacccatgtagctagtgtcagcgatgtactgttggacaactcattcactccaccttgtcagcggatgggcggaatggtctcttttcggacttttgaagattttgtcaggatctttgatgaagtgatgggctgcttctctgactccccaccccagagtcccacattccctgaggcaggtcacacgtctctttatgatgaggataaggttcccagggatgaaccaattcacattctcaatgtggctatcaagactgactgtgatattgaggatgacaggctggcagctatgttcagagaatttacccagcaaaataaagctaccctggttgaccatgggatccggcgccttactttcctggttgcacaaaaggatttcagaaagcaggtcaactatgaggtggatcggagatttcatagagaattccctaaattttttacattccgagcaagggataagtttgaggaggatcgtatctatcgtcatctggagcctgctctggctttccagttagagctgaaccggatgagaaattttgacctcactgccattccatgtgctaatcacaagatgcacctgtatctcggggcagccaaggtggaagtgggcacagaagtgacagactacaggttctttgttcgtgcaatcatcaggcattctgatctggtcaccaaggaagcttcttttgaatatctgcaaaatgaaggggagcggctactcctggaagccatggatgagttggaagttgcttttaacaatacaaatgtccgcactgactgtaaccacatcttcctcaactttgtgcccacggttatcatggacccatcaaagattgaggaatccgtgcggagcatggtaatgcggtatggaagtcgcctgtggaaattgcgcgtcctccaggcagaactgaaaatcaacattcgcctgacgccaactggaaaagcaattcccatccgcctcttcctgacaaacgagtctggctattacttggatatcagcctatacaaggaagtgactgactccaggacagcacagatcatgtttcaggcatatggagacaaacagggaccactgcatggaatgttaatcaatactccatatgtgaccaaagacctgctgcaatcaaagaggttccaggcacaatccttagggacaacatacatatatgatatcccagagatgtttcggcagtccctgatcaaactctgggagtctatgtccactcaagcatttcttccatctccccctctgccttctgacatgctgacttacactgaactggtactggatgatcaaggtcagctggtccacatgaacaggcttccaggaggaaatgagattggcatggtagcttggaaaatgacctttaaaagtcctgaatatccagaaggccgagatatcattgttattggcaatgacatcacataccgaattgggtcctttgggcctcaagaggatttgttatttctcagagcttccgaacttgctagggcagaaggtattccacgcatctatgtatcagccaacagtggagcaagaatcggactggcagaagaaattcgccatatgtttcatgtggcctgggtagatcctgaggatccttacaagggatacaggtatttatatctgactcctcaagattataagagagtcagtgctctcaactctgtccattgtgaacacgtggaagatgaaggagaatccaggtacaagataacagatattattgggaaagaagagggaattggacccgagaaccttcgaggttctggaatgattgctggagaatcctcattggcctataatgagatcattaccatcagcctggtgacgtgccgggccattgggattggggcttaccttgtccggctgggacagagaaccatccaggttgagaattctcacttaattctaacaggagctggagccctcaacaaagtcctcgggcgggaagtgtacacctccaataaccagctggggggcatccagattatgcacaacaatggggtgacccactgcactgtgtgtgatgactttgaaggggttttcactgtcctgcactggctgtcttacatgcccaagagcgtgcacagttcagttcctcttctgaactcaaaggatcctatagacagaatcatcgagtttgttcccacaaagaccccatacgatcctcgatggatgctagcaggccgtcctcacccaacccaaaaaggtcagtggttgagtggcttttttgactatggatctttctcagagattatgcagccctgggcacagactgtggtggttggtagagccaggctaggaggaatacctgtgggagttgttgctgtagaaacccgaacagtagaactaagtatcccagctgatccagcaaacctggattctgaagccaagataatccagcaggctggccaggtttggttcccagattctgcgtttaagacgtatcaggccatcaaggacttcaaccgggaagggctgcctctgatggtctttgccaactggagaggcttctctggtggaatgaaagatatgtacgaccaagtgctgaagtttggtgcttacattgtggatggcttgagggagtgctgccagcctgtgctggtttacattcctccccaggctgagctgcggggtggctcctgggtggtgattgactcctccatcaacccccggcacatggagatgtatgctgaccgagaaagcaggggatctgttctggagccagaagggacagtagaaatcaaattccgcagaaaggatctggtgaaaaccatgcgtcgggtggacccagtctacatccacttggctgagcgattggggaccccagagctaagcacagctgagcggaaggagttggagaacaagttgaaggagcgggaggaattcctaattcccatttaccatcaggtagccgtgcagtttgctgacttgcacgacacaccaggccggatgcaggagaagggtgttattagcgatatcctggattggaaaacatcccgtaccttcttctactggcggctgaggcgtcttctgctggaggacctggtcaagaagaaaatccacaatgccaaccctgagctgactgatggccagattcaagccatgttaaggcgctggtttgtggaagtggaaggaacagtgaaggcttatgtttgggacaataataaggatctggcggagtggctagagaaacagctgacagaggaggatggtgttcactcggtaatagaggaaaacatcaaatgcatcagcagagactacgtcctcaagcaaatccgcagcttggtccaggccaatccagaggttgccatggattccatcatccatatgacgcagcacatatcacccactcagcgagcagaagtcatacggatcctctccacaatggattccccttccacgtaggaagagcttcctgcctgtccctgccctgtctctggagaaaagggctagagctgccttttacaactgtaaccactgtaatgagaaggcacaggagacccagcactggagtcaaatggcattttacttcctctcgtttcaggttatgcatgacatcctgggatgtaagatcacagaatccccctccagcccaccagtcacacctaccccattcagtatttattaccctggccaggcctagtcctccactccctgcacaggactgagaaggcaatgaaaggtacaaacatgtaccatgaggtcttactaaccaaagtagggctgcccctcctgtcctgacagccccttggcctcccagcatggggaagcgtgaggagttgcccagcagtgagcagcccccctcactcctggccccatgagccgcagccacaggcagcagaggagggctaaggagaggaggaagcctcaagtccattgtttattaccccgactcttagcccagcacacagtaggcactggagaggaatgattcccagtttaaccacactacggtaccttttatgaagaaaaattagagcataaaatctactacaagctccataggaactcaaagatgagggcaaaactgtgagccaagaagcagagaaagaaaatagaaccagttattcttgatttaggggacctcaaccttgggttcagtctctgaggacaaagggaaaggtagttgttggcctgcctctcgcctgcacgtcactgctggactagctgtcgcatgtggctgggagctgcaaggccagtgcttgaggggccccagcagttccacaggtggtgaagcctgagttggcagaggaggagccagaagagaactgccctttctgcactggtggaaactagttatttatgccatgtggagagccagtgagatagatagatagtctgtttgttttgaggacttggaaagttgttcctatgaagcctggagcttggatggttttgagaggttaatggtgcctccacactcactcttccctagttccaggattactgtcctagcagctaacggttctactctcttccccagagtgtagacaggcagcaggtctccccacagctctgaaaggaccctggtgacagctacaccctcagcaccaggagctggccttcctgatgagggaggcttccaggaaacacagaatccacatgaccttaagattatttacaactcagtcatggtgctgctgtcctccaggcttactggcccctcctgactggcatcaggggcttcctcaggtggtggagagagtttactttcaacaactagtttattcaagaaaagaacttactgattcctctgttcctaaagcaagagtggcaggtgatcagggctggtgtagcatccggttcctttagtgcagctaactgcatttgtcactgatgaccaaggaggaaatcactaagacatttgagaagcagtggtatgaacgttcttggacaagccacagttctgagccttaaccctgtagtttgcacacaagaacgagctccacctccccttcttcaggaggaatctgtgcggatagattggctggacttttcaatggttctgggttgcaggtgggcactgtatggctgggtatggagcggacagcccccaggagtcagagcctcagcccggctgccctggtggaaggtacaggtgttcagcaccttcagaaaagggcataaagtggtgggggacaattctcagtccaggaaaatgcattgaccattgctggctatttgcttacctagtaagaattggattcatttttgaccagattattcttctatgcttttttgcaataaatcaaatcccacatatctacaagtggtatgaagtcctgcaccccccaggaggcctgtccaggcatgtcttcagaggcagggtgggttacactcatttacctcccctctccccaccaaattatgacacaaacgagtatgtttcctctctagaaccctgtaatgcctcctcccccatccccagagctccttactgtaggtcttaccctggacaaggattttttcaagttggaggcacagaacatgagcaatctgacattcccacagcccctcaaacatgcaaggctactaaggcaggaggagtataaatgatggatattgaccaagacctgcttggacggagaccgccatattatctgttctcttcgttcacaaaacagccttcacttgtctcagaatttgatggacacatactgtgatgagcaggagcttcagatgcactctttacacattttgttgaaataaacctctacatttgtagaagaaaaaaaaaaaaaaaaaaaaaaaaaaaaa

SEQ ID NO: 29103 - DNA, 2241 bp, Homo Sapiens
atctttgctgcaaaggctgggtatcggctgtgctcagcaaagcgtcaactcgtgcaagaacttagcaggaatagttctggctaaggttaggaggctgccaccaaagtctcttttttgttcctctgcttctcccgtttgcctccttatcatgagatctttttgctaagctggcagaaagattgcatagtcagtgcttccagctctgctcccacctgatcctgcactgtcctctggtccctgaatgaatgaactctgatacccaatcttgtctcgagccttctctatgccactcatggctcctcttctgctctttccatctttttgctgagagttctgagctctgtacttcctcttggcccatctcacttcctgaaacacccctgaagagggttgcttatcttgatggaactcaaaaagccaaaaagctgcaggcagaggcgttgaggacatctgtttggggaactaagagcagcagcactttcagattcagtccatatagagctgtcctacagcattctggaaacttgaggatgtgcggtgcataaaggggctggaagtgacccacctgtgatgagccctttctaaggagaagggtttccaagagatcaccccaccagaaaagggtaggaatgagcaagttgggaattttagactgtcactgcacatggacctctgggaagacgtctggcgagagctaggcccactggccctacagacggatcttgctggctcacctgtccctgtggaggttcccctgggaaggcaagatgcccaacaacagcactgctctgtcattggccaatgttacctacatcaccatggaaattttcattggactctgcgccatagtgggcaacgtgctggtcatctgcgtggtcaagctgaaccccagcctgcagaccaccaccttctatttcattgtctctctagccctggctgacattgctgttggggtgctggtcatgcctttggccattgttgtcagcctgggcatcacaatccacttctacagctgcctttttatgacttgcctactgcttatctttacccacgcctccatcatgtccttgctggccatcgctgtggaccgatacttgcgggtcaagcttaccgtcagatacaagagggtcaccactcacagaagaatatggctggccctgggcctttgctggctggtgtcattcctggtgggattgacccccatgtttggctggaacatgaaactgacctcagagtaccacagaaatgtcaccttcctttcatgccaatttgtttccgtcatgagaatggactacatggtatacttcagcttcctcacctggattttcatccccctggttgtcatgtgcgccatctatcttgacatcttttacatcattcggaacaaactcagtctgaacttatctaactccaaagagacaggtgcattttatggacgggagttcaagacggctaagtccttgtttctggttcttttcttgtttgctctgtcatggctgcctttatctatcatcaactgcatcatctactttaatggtgaggtaccacagcttgtgctgtacatgggcatcctgctgtcccatgccaactccatgatgaaccctatcgtctatgcctataaaataaagaagttcaaggaaacctaccttttgatcctcaaagcctgtgtggtctgccatccctctgattctttggacacaagcattgagaagaattctgagtagttatccatcagagatgactctgtctcattgaccttcagattccccatcaacaaacacttgagggcctgtatgcctgggccaagggatttttacatccttgattacttccactgaggtgggagcatctccagtgctccccaattatatctcccccactccactactctcttcctccacttcatttttcctttgtcctttctctctaattcagtgttttggaggcctgacttggggacaacgtattattgatattattgtctgttttccttcttcccaatagaagaataagtcatggagcctgaagggtgcctagttgacttactgacaaaaggctctagttgggctgaacatgtgtgtggtggtgactcatttccatgccattgtggaattgagcagagaacctgctctcggaggatgcctagaagatgttgggaacagaagaaataaactgagtttaagggggacttaaactgctgaattcacctgtggatgtttttgagtaaataaaagctaatag

SEQ ID NO: 29104 - DNA, 1786 bp, Homo Sapiens
aggcaggagacgtgctgcgggctgggctgcccgggggagatgactcctgccaggagggcgcctctgggaagaagaccacgggggaagcaaagtttcagggcagctgaggagccttcgccgcagcccttccgagcccaatcatcccccaggctatggagggcggactctaagatgaatcccgacctggacaccggccacaacacatcagcacctgcccactggggagagttgaaaaatgccaacttcactggccccaaccagacctcgagcaactccacactgccccagctggacatcaccagggccatctctgtgggcctggtgctgggcgccttcatcctctttgccatcgtgggcaacatcctagtcatcttgtctgtggcctgcaaccggcacctgcggacgcccaccaactacttcattgtcaacctggccatggccgacctgctgttgagcttcaccgtcctgcccttctcagcggccctagaggtgctcggctactgggtgctggggcggatcttctgtgacatctgggcagccgtggatgtcctgtgctgcacagcgtccattctgagcctgtgcgccatctccatcgatcgctacatcggggtgcgctactctctgcagtatcccacgctggtcacccggaggaaggccatcttggcgctgctcagtgtctgggtcttgtccaccgtcatctccatcgggcctctccttgggtggaaggagccggcacccaacgatgacaaggagtgcggggtcaccgaagaacccttctatgccctcttctcctctctgggctccttctacatccctctggcggtcattctagtcatgtactgccgtgtctatatagtggccaagagaaccaccaagaacctagaggcaggagtcatgaaggagatgtccaactccaaggagctgaccctgaggatccattccaagaactttcacgaggacacccttagcagtaccaaggccaagggccacaaccccaggagttccatagctgtcaaactttttaagttctccagggaaaagaaagcagctaagacgttgggcattgtggtcggtatgttcatcttgtgctggctacccttcttcatcgctctaccgcttggctccttgttctccaccctgaagccccccgacgccgtgttcaaggtggtgttctggctgggctacttcaacagctgcctcaaccccatcatctacccatgctccagcaaggagttcaagcgcgctttcgtgcgcatcctcgggtgccagtgccgcggccgcggccgccgccgacgccgccgccgccgtcgcctgggcggctgcgcctacacctaccggccgtggacgcgcggcggctcgctggagcgctcgcagtcgcgcaaggactcgctggacgacagcggcagctgcctgagcggcagccagcggaccctgccctcggcctcgccgagcccgggctacctgggccgcggcgcgccaccgccagtcgagctgtgcgccttccccgagtggaaggcgcccggcgccctcctgagcctgcccgcgcctgagccccccggccgccgcggccgccacgactcgggcccgctcttcaccttcaagctcctgaccgagcccgagagccccgggaccgacggcggcgccagcaacggaggctgcgaggccgcggccgacgtggccaacgggcagccgggcttcaaaagcaacatgcccctggcgcccgggcagttttagggcccccgtgcgcagctttctttccctggggaggaaaacatcgtggggggga

SEQ ID NO: 29105 - DNA, 1723 bp, Homo Sapiens
tgctacccgcgcccgggcttctggggtgttccccaaccacggcccagccctgccacaccccccgcccccggcctccgcagctcggcatgggcgcgggggtgctcgtcctgggcgcctccgagcccggtaacctgtcgtcggccgcaccgctccccgacggcgcggccaccgcggcgcggctgctggtgcccgcgtcgccgcccgcctcgttgctgcctcccgccagcgaaagccccgagccgctgtctcagcagtggacagcgggcatgggtctgctgatggcgctcatcgtgctgctcatcgtggcgggcaatgtgctggtgatcgtggccatcgccaagacgccgcggctgcagacgctcaccaacctcttcatcatgtccctggccagcgccgacctggtcatggggctgctggtggtgccgttcggggccaccatcgtggtgtggggccgctgggagtacggctccttcttctgcgagctgtggacctcagtggacgtgctgtgcgtgacggccagcatcgagaccctgtgtgtcattgccctggaccgctacctcgccatcacctcgcccttccgctaccagagcctgctgacgcgcgcgcgggcgcggggcctcgtgtgcaccgtgtgggccatctcggccctggtgtccttcctgcccatcctcatgcactggtggcgggcggagagcgacgaggcgcgccgctgctacaacgaccccaagtgctgcgacttcgtcaccaaccgggcctacgccatcgcctcgtccgtagtctccttctacgtgcccctgtgcatcatggccttcgtgtacctgcgggtgttccgcgaggcccagaagcaggtgaagaagatcgacagctgcgagcgccgtttcctcggcggcccagcgcggccgccctcgccctcgccctcgcccgtccccgcgcccgcgccgccgcccggacccccgcgccccgccgccgccgccgccaccgccccgctggccaacgggcgtgcgggtaagcggcggccctcgcgcctcgtggccctacgcgagcagaaggcgctcaagacgctgggcatcatcatgggcgtcttcacgctctgctggctgcccttcttcctggccaacgtggtgaaggccttccaccgcgagctggtgcccgaccgcctcttcgtcttcttcaactggctgggctacgccaactcggccttcaaccccatcatctactgccgcagccccgacttccgcaaggccttccagggactgctctgctgcgcgcgcagggctgcccgccggcgccacgcgacccacggagaccggccgcgcgcctcgggctgtctggcccggcccggacccccgccatcgcccggggccgcctcggacgacgacgacgacgatgtcgtcggggccacgccgcccgcgcgcctgctggagccctgggccggctgcaacggcggggcggcggcggacagcgactcgagcctggacgagccgtgccgccccggcttcgcctcggaatccaaggtgtagggcccggcgcggggcgcggactccgggcacggcttcccaggggaacgaggagatctgtgtttacttaagaccgatagcaggtgaactcgaagcccacaatcctcgtctgaatcatccgaggcaaagagaaaagccacggaccgttgcacaaaaaggaaagtttgggaagggatgggagagtggcttgctgatgttccttgttg

SEQ ID NO: 29106 - DNA, 2116 bp, Homo Sapiens
atcagaaccaaattgctgagccagtcacctgtgttccaggagccgaatcagaaatgtcatcctcaggcacgccagacttacctgtcctactcaccgatttgaagattcaatatactaagatcttcataaacaatgaatggcatgattcagtgagtggcaagaaatttcctgtctttaatcctgcaactgaggaggagctctgccaggtagaagaaggagataaggaggatgttgacaaggcagtgaaggccgcaagacaggcttttcagattggatccccgtggcgtactatggatgcttccgagagggggcgactattatacaagttggctgatttaatcgaaagagatcgtctgctgctggcgacaatggagtcaatgaatggtggaaaactctattccaatgcatatctgaatgatttagcaggctgcatcaaaacattgcgctactgtgcaggttgggctgacaagatccagggccgtacaataccaattgatggaaatttttttacatatacaagacatgaacctattggtgtatgtggccaaatcattccttggaatttcccgttggttatgctcatttggaagatagggcctgcactgagctgtggaaacacagtggttgtcaaaccagcagagcaaactcctctcactgctctccacgtggcatctttaataaaagaggcagggtttcctcctggagtagtgaatattgttcctggttatgggcctacagcaggggcagccatttcttctcacatggatatagacaaagtagccttcacaggatcaacagaggttggcaagttgatcaaagaagctgccgggaaaagcaatctgaagagggtgaccctggagcttggaggaaagagcccttgcattgtgttagctgatgccgacttggacaatgctgttgaatttgcacaccatggggtattctaccaccagggccagtgttgtatagccgcatccaggatttttgtggaagaatcaatttatgatgagtttgttcgaaggagtgttgagcgggctaagaagtatatccttggaaatcctctgaccccaggagtcactcaaggccctcagattgacaaggaacaatatgataaaatacttgacctcattgagagtgggaagaaagaaggggccaaactggaatgtggaggaggcccgtgggggaataaaggctactttgtccagcccacagtgttctctaatgttacagatgagatgcgcattgccaaagaggagatttttggaccagtgcagcaaatcatgaagtttaaatctttagatgacgtgatcaaaagagcaaacaatactttctatggcttatcagcaggagtgtttaccaaagacattgataaagccataacaatctcctctgctctgcaggcaggaacagtgtgggtgaattgctatggcgtggtaagtgcccagtgcccctttggtggattcaagatgtctggaaatggaagagaactgggagagtacggtttccatgaatatacagaggtcaaaacagtcacagtgaaaatctctcagaagaactcataaagaaaatacaagagtggagagaagctcttcaatagctaagcatctccttacagtcactaatatagtagattttaaagacaaaatttttcttttcttgatttttttaaacataagctaaatcatattagtattaatactacccatagaaaacttgacatgtagcttcttctgaaagaattatttgccttctgaaatgtgacccccaagtcctatcctaaataaaaaaagacaaattcggatgtatgatctctctagctttgtcatagttatgtgattttcctttgtagctacttttgcaggataataattttatagaaaaggaacagttgcatttagcttctttcccttagtgactcttgaagtacttaacatacacgttaactgcagagtaaattgctctgttcccagtagttataaagtccttggactgttttgaaaagtttcctaggatgtcatgtctgcttgtcaaaagaaataatccctgtaatatttagctgtaaactgaatataaagcttaataaaaacaaccttgcatgaaaaaaaaaaaaaaaaaaaaa

SEQ ID NO: 29107 - DNA, 5468 bp, Homo Sapiens
tctctgtctgccagggtctccgactgtcccagacgggctggtgtgggcttgggatcctcctggtgacctctcccgctaaggtccctcagccactctgccccaagatgggccgtggggctggccgtgagtactcacctgccgccaccacggcagagaatgggggcggcaagaagaaacagaaggagaaggaactggatgagctgaagaaggaggtggcaatggatgaccacaagctgtccttggatgagctgggccgcaaataccaagtggacctgtccaagggcctcaccaaccagcgggctcaggacgttctggctcgagatgggcccaacgccctcacaccacctcccacaacccctgagtgggtcaagttctgccgtcagcttttcggggggttctccatcctgctgtggattggggctatcctctgcttcctggcctacggcatccaggctgccatggaggatgaaccatccaacgacaatctatatctgggtgtggtgctggcagctgtggtcattgtcactggctgcttctcctactaccaggaggccaagagctccaagatcatggattccttcaagaacatggtacctcagcaagcccttgtgatccgggagggagagaagatgcagatcaacgcagaggaagtggtggtgggagacctggtggaggtgaagggtggagaccgcgtccctgctgacctccggatcatctcttctcatggctgtaaggtggataactcatccttaacaggagagtcggagccccagacccgctcccccgagttcacccatgagaaccccctggagacccgcaatatctgtttcttctccaccaactgtgttgaaggcactgccaggggcattgtgattgccacaggagaccggacggtgatgggccgcatagctactctcgcctcaggcctggaggttgggcggacacccatagcaatggagattgaacacttcatccagctgatcacaggggtcgctgtattcctgggggtctccttcttcgtgctctccctcatcctgggctacagctggctggaggcagtcatcttcctcatcggcatcatagtggccaacgtgcctgaggggcttctggccactgtcactgtgtgcctgaccctgacagccaagcgcatggcacggaagaactgcctggtgaagaacctggaggcggtggagacgctgggctccacgtccaccatctgctcggacaagacgggcaccctcacccagaaccgcatgaccgtcgcccacatgtggttcgacaaccaaatccatgaggctgacaccaccgaagatcagtctggggccacttttgacaaacgatcccctacgtggacggccctgtctcgaattgctggtctctgcaaccgcgccgtcttcaaggcaggacaggagaacatctccgtgtctaagcgggacacagctggtgatgcctctgagtcagctctgctcaagtgcattgagctctcctgtggctcagtgaggaaaatgagagacagaaaccccaaggtggcagagattcctttcaactctaccaacaagtaccagctgtctatccacgagcgagaagacagcccccagagccacgtgctggtgatgaagggggccccagagcgcattctggaccggtgctccaccatcctggtgcagggcaaggagatcccgctcgacaaggagatgcaagatgcctttcaaaatgcctacatggagctggggggacttggggagcgtgtgctgggattctgtcaactgaatctgccatctggaaagtttcctcggggcttcaaattcgacacggatgagctgaactttcccacggagaagctttgctttgtggggctcatgtctatgattgaccctccccgggctgctgtgccagatgctgtgggcaagtgccgaagcgcaggcatcaaggtgatcatggtaaccggggatcaccctatcacagccaaggccattgccaaaggcgtgggcatcatatcagagggtaacgagactgtggaggacattgcagcccggctcaacattcccatgagtcaagtcaaccccagagaagccaaggcatgcgtggtgcacggctctgacctgaaggacatgacatcggagcagctcgatgagatcctcaagaaccacacagagatcgtctttgctcgaacgtctccccagcagaagctcatcattgtggagggatgtcagaggcagggagccattgtggccgtgacgggtgacggggtgaacgactcccctgcattgaagaaggctgacattggcattgccatgggcatctctggctctgacgtctctaagcaggcagccgacatgatcctgctggatgacaactttgcctccatcgtcacgggggtggaggagggccgcctgatctttgacaacttgaagaaatccatcgcctacaccctgaccagcaacatccccgagatcacccccttcctgctgttcatcattgccaacatccccctacctctgggcactgtgaccatcctttgcattgacctgggcacagatatggtccctgccatctccttggcctatgaggcagctgagagtgatatcatgaagcggcagccacgaaactcccagacggacaagctggtgaatgagaggctcatcagcatggcctacggacagatcgggatgatccaggcactgggtggcttcttcacctactttgtgatcctggcagagaacggtttcctgccatcacggctactgggaatccgcctcgactgggatgaccggaccatgaatgatctggaggacagctatggacaggagtggacctatgagcagcggaaggtggtggagttcacgtgccacacggcattctttgccagcatcgtggtggtgcagtgggctgacctcatcatctgcaagacccgccgcaactcagtcttccagcagggcatgaagaacaagatcctgatttttgggctcctggaggagacggcgttggctgcctttctctcttactgcccaggcatgggtgtagccctccgcatgtacccgctcaaagtcacctggtggttctgcgccttcccctacagcctcctcatcttcatctatgatgaggtccgaaagctcatcctgcggcggtatcctggtggctgggtggagaaggagacatactactgaccccattggaagaagaaccaggcatggaaagatggggagctctggaggtgttgtggggatggtgatggagagggatggaaataacgggtggcattgggtggcaacatttggggagagataatgaggcaactcagcaggctaagttgcggggtatataaattggggtgatgaccccatagacctaactgtgaacaatcagattagacactatgtgttagagtccccccgaccagatccttttccatcccactccactatgttgtctattttttctgaggaattaagggttaccccaccctgcccactcccatcccttcaaccccacttcctactgtaatagatcagcatccaaaagcaggaacccatctaaaccagaaggaagccctctcagatcaccccagcctcactccatttcccacttccacccccgttagcttcctgcaggactctatccctggcttccccttcagaccttgcaatcacaaaaggttcttctggtgagtgcaagagcctgagactggaaaaggtggacttgtctcccagtcgaggctggtaagggaccttcagggagagctgggcagacaggtgggagatggaggtagggctggctggaggaaggaaacaacaaaggaagtgaggtagtgccaatgacaggacatttgacatgagtctccagatagatgtcgtggactccagctctacgtcccacattttagaataccccaccagcagaacaaactcagatctcatcagggtagcagcagaggcaggaccagaaggcaatcaagagcttccagaaatgccacacttgtgtgccacagagttccccgctgacccttggttaggggtcctcttagtccacaaggtccggatgtcactcatgtacttaataacacttcaccttctgtaatactaagtcctcagagctccatgctgttctgaaagggatggccacaagttctttcccagcctcttccattccctttcttttcatgcccatcccgatgaacctgcatcattccccgacactgccaagccaaccctggaaaaggagttcgctggccattggctagaatcagggtggagaagttccctgaaccttcctgtctcccagggacatgtatgcttccagggacaagcttaggtcatgaacatggtcagaacctttggacaagaggaaaaatactaagagatttgctttttctgggtgcggtggctcatgcctgtaatcccagcactttgggaggccgaggcaggtggatcatgaggtcaggagttcgaggcgagcctggccaacatggtgaaaccctgtctctactaaaagtacaaaaaattagccagtcatggtggcacacgcctgtaatctcagctactcaggaggctgaggcaggagaattgcttgaacctgtgaggaagaggttgcagtgagctgagatcgtgccattacactccagcctgggcgaaagggtgagactccatctcaaaaaaaaaaaaaatgatttgcttttgacgtcttaggtggcagggctgttccctccaggcaaatgcccttcaaaccgacgatcattgtgcccacttaccctgggctggagagttggtttcaggttcctacaggagatagctttctttcccttactccctatctaacacttttgctctgcaggcagccttgcccattctctaagcctggcttagaaggcactgggaatgtcctgtagagagagacctagataggtcatgcaagtgagaaagacatctgaggaaaatggaagacctaaggcagacaggaaggaagcacaaaagacaagcattgggtcagacccataaaccacctcccaaaggctgtcatttcattgcactggaattttgctttatcagaagcaaggaagtaagggagtcattgccttgggcctgggaatctaagtgggagacaatattaatttggatccgattaattggagattactaactgtggacaaaagtttatctttgcacaatcaataaaaatggcatttttttagtaaattaagagcataaacaatattgctagaggtggcatgtttagtctaccaaaaacaatacttttcaggcactttagaaatatccttttagaagcagcgagtgcatgggctaattatcatcaatctttatgtatttgttaaagaaacatctacaggatctttattggtgaccttttgtaagacattagtttgaggtactacctatgtacttgaaaataataaagtggcatttctttatgaaaaaaaaaaaaaaaaaaaaaaaaaaaaaaaaaaaaaaaaa

SEQ ID NO: 29108 - DNA, 2437 bp, Homo Sapiens
agcggctctctgagcgaagtcactgagcgagccgccaggctatgaccccaggggctctgctgatgctgctgggggcgctgggggcgccgctcgccccaggcgtccgcggctcggaggcggagggtcgactccgggagaaacttttctctggctatgatagctccgtgcggccagcgcgggaggtgggagaccgtgtcagggtcagcgttggtctcatcctggcgcaactcatcagcctgaacgagaaggatgaagagatgagcacaaaggtgtacttagacctggagtggactgactacaggctgagctgggaccctgcggagcacgacggcatcgattcgctccgcatcacggcggaatccgtgtggctccctgacgtggtgctactgaacaacaatgatgggaattttgacgtggctctggacattagcgtcgtggtgtcctccgacggctccgtgcgttggcaacccccgggcatctatcgcagcagctgcagcatccaggtcacctacttccccttcgactggcagaattgcactatggtgttcagctcctacagctacgacagctcggaggtcagcctgcagacaggcctgggtcctgacgggcaagggcatcaggaaatccacattcatgaagggactttcattgagaatggccagtgggagattatccacaagccctctcggctaatccagcctccaggcgatcctaggggagggagggaaggacagcgccaggaagtcatcttctacctcatcatccgccgcaagcctctcttctacctggtcaacgtcattgccccatgcatcctcatcactcttctggccatcttcgtcttctacctgccaccagatgcaggagagaagatggggctctcaatctttgccctgctgacccttactgtgttcctgctgctgctggctgacaaagtacctgagacctcactatcagtacccattattatcaagtacctcatgtttaccatggtcctcgtcaccttctcagtcatccttagtgtcgtggttctcaacctgcaccaccgctcaccccacacccaccaaatgcccctttgggtccgtcagatcttcattcacaaacttccgctgtacctgcgtctaaaaaggcccaaacccgagagagacctgatgccggagccccctcactgttcttctccaggaagtggctggggtcggggaacagatgaatatttcatccggaagccgccaagtgattttctcttccccaaacccaataggttccagcctgaactgtctgcccctgatctgcggcgatttatcgatggtccaaaccgggctgtggccctgcttccggagctacgggaggtcgtctcctctatcagctacatcgctcgacagctgcaggaacaggaggaccacgatgcgctgaaggaggactggcagtttgtggccatggtagtggaccgcctcttcctgtggactttcatcatcttcaccagcgttgggaccctagtcatcttcctggacgccacgtaccacttgccccctccagacccctttccttgaagactggagggttgagacccaggccccctgccagttgaagtgagagtttggtgatactgtcaagccctatccttctctgcctcttaactccttcacgaggaatctgggcctcttatttcgtttctggggactgcattggactgagggctgggtaggcaggtgtcttggacccacctgaaatgcagtatcatctgatttactctttgggatcttgaagaagctcttttgggtatcaacacctaggtcgccagtgaaatagaacacagaacaggaactagattataagccttatgaggtcaagaaatgtgacttggccgggcgcggtggctcacgcctgtaatcccagcactttgggaggccaaggcgggcggatcacctgaggtcgggagtttgagaccagcccgaccaacatggagaaaccctgtctctactaaaaatacaaaattagccaggtgtggtggtacatgcctgtaatcccagctactagggaggctgaggcaggagaatcactcgaacccgggaggcagaggttgcagtgagtcaagatcacgccattgcactccagcctgggcaacaagagcgaaactccatctcaaaaaaaaaaaagtgtcttgttcactgcagcatgcccagtgccacgcacaggtgctgacctatagtaagtgcttaacatttgttgaataggggaaagaaatttccggaagtaaatacagcaattaataatgtttataagctgggcatggtcgctcaggccagtaatcccagtgacttaggaggctgaggtgggaggattacttgaaacccacagtttgagaccagcctgggcaacatagtgagaccctgtctctaaaaaaataaaaatagaaataaagtagtgcttattgtttgca

SEQ ID NO: 29109 - DNA, 1279 bp, Homo Sapiens
agaaactcagagaccaagtccattgagagactgaggggaaagagaggagagaaagaaaaagagagtgggaacagtaaagagaaaggaagacaacctccagagaaagcccccggagacgtctctctgcagagaggcggcagcacccggctcacctgcgaagcgcctgggaagcgagtgcccctaacatgcggctgccgctgcttgtgtccgcgggagtcctgctggtggctctcctgccctgcccgccatgcagggcgctcctgagccgcgggccggtcccgggagctcggcaggcgccgcagcaccctcagcccttggatttcttccagccgccgccgcagtccgagcagccccagcagccgcaggctcggccggtcctgctccgcatgggagaggagtacttcctccgcctggggaacctcaacaagagcccggccgctcccctttcgcccgcctcctcgctcctcgccggaggcagcggcagccgcccttcgccggaacaggcgaccgccaactttttccgcgtgttgctgcagcagctgctgctgcctcggcgctcgctcgacagccccgcggctctcgcggagcgcggcgctaggaatgccctcggcggccaccaggaggcaccggagagagaaaggcggtccgaggagcctcccatctccctggatctcaccttccacctcctccgggaagtcttggaaatggccagggccgagcagttagcacagcaagctcacagcaacaggaaactcatggagattattgggaaataaaacggtgcgtttggccaaaaagaatctgcatttagcacaaaaaaaatttaaaaaaatacagtattctgtaccatagcgctgctcttatgccatttgtttatttttatatagcttgaaacatagagggagagagggagagagcctataccccttacttagcatgcacaaagtgtattcacgtgcagcagcaacacaatgttattcgttttgtctacgtttagtttccgtttccaggtgtttatagtggtgttttaaagagaatgtagacctgtgagaaaacgttttgtttgaaaaagcagacagaagtcactcaattgtttttgttgtggtctgagccaaagagaatgccattctcttgggtgggtaagactaaatctgtaagctctttgaaacaactttctcttgtaaacgtttcagtaataaaacatctttccagtccttggtcagtttggttgtgtaagagaatgttgaatacttatatttttaataaaagttgcaaaggt

SEQ ID NO: 29110 - DNA, 781 bp, Homo Sapiens
acacagagagaaaggctaaagttctctggaggatgtggctgcagagcctgctgctcttgggcactgtggcctgcagcatctctgcacccgcccgctcgcccagccccagcacgcagccctgggagcatgtgaatgccatccaggaggcccggcgtctcctgaacctgagtagagacactgctgctgagatgaatgaaacagtagaagtcatctcagaaatgtttgacctccaggagccgacctgcctacagacccgcctggagctgtacaagcagggcctgcggggcagcctcaccaagctcaagggccccttgaccatgatggccagccactacaagcagcactgccctccaaccccggaaacttcctgtgcaacccagattatcacctttgaaagtttcaaagagaacctgaaggactttctgcttgtcatcccctttgactgctgggagccagtccaggagtgagaccggccagatgaggctggccaagccggggagctgctctctcatgaaacaagagctagaaactcaggatggtcatcttggagggaccaaggggtgggccacagccatggtgggagtggcctggacctgccctgggccacactgaccctgatacaggcatggcagaagaatgggaatattttatactgacagaaatcagtaatatttatatatttatatttttaaaatatttatttatttatttatttaagttcatattccatatttattcaagatgttttaccgtaataattattattaaaaatatgcttcta

SEQ ID NO: 29111 - DNA, 3052 bp, Homo Sapiens
caggaccatggaactcagcgtcctcctcttccttgcactcctcacaggactcttgctactcctggttcagcgccaccctaacacccatgaccgcctcccaccagggccccgccctctgccccttttgggaaaccttctgcagatggatagaagaggcctactcaaatcctttctgaggttccgagagaaatatggggacgtcttcacggtacacctgggaccgaggcccgtggtcatgctgtgtggagtagaggccatacgggaggcccttgtggacaaggctgaggccttctctggccggggaaaaatcgccatggtcgacccattcttccggggatatggtgtgatctttgccaatggaaaccgctggaaggtgcttcggcgattctctgtgaccactatgagggacttcgggatgggaaagcggagtgtggaggagcggattcaggaggaggctcagtgtctgatagaggagcttcggaaatccaagggggccctcatggaccccaccttcctcttccagtccattaccgccaacatcatctgctccatcgtctttggaaaacgattccactaccaagatcaagagttcctgaagatgctgaacttgttctaccagactttttcactcatcagctctgtattcggccagctgtttgagctcttctctggcttcttgaaatactttcctggggcacacaggcaagtttacaaaaacctgcaggaaatcaatgcttacattggccacagtgtggagaagcaccgtgaaaccctggaccccagcgcccccaaggacctcatcgacacctacctgctccacatggaaaaagagaaatccaacgcacacagtgaattcagccaccagaacctcaacctcaacacgctctcgctcttctttgctggcactgagaccaccagcaccactctccgctacggcttcctgctcatgctcaaataccctcatgttgcagagagagtctacagggagattgaacaggtgattggcccacatcgccctccagagcttcatgaccgagccaaaatgccatacacagaggcagtcatctatgagattcagagattttccgaccttctccccatgggtgtgccccacattgtcacccaacacaccagcttccgagggtacatcatccccaaggacacagaagtatttctcatcctgagcactgctctccatgacccacactactttgaaaaaccagacgccttcaatcctgaccactttctggatgccaatggggcactgaaaaagactgaagcttttatccccttctccttagggaagcggatttgtcttggtgaaggcatcgcccgtgcggaattgttcctcttcttcaccaccatcctccagaacttctccatggccagccccgtggccccagaagacatcgatctgacaccccaggagtgtggtgtgggcaaaatacccccaacataccagatccgcttcctgccccgctgaaggggctgagggaagggggtcaaaggattccagggtcattcagtgtccccgcctctgtagacaatggctctgactccccgcaacttcctgcctctgagagacctgctacaagccagcttccttcccctccatggcaccagttgtctgaggtcacattgcaagtgagtgcaggagtgagattatcgaaaattataatatacaaaatcatatatatatatatgttcttgttttttgagacagagtctcacactgttgcccaggctggagtgcagtggcgtgatctcggctcactgcaacctccacccccggggatcaagcaactctcctgcctcagcctccctagtagctgggattacaggcatgcactaccacgcttggctaatttttgtatttttagtagagatggggtttcactgtgtaggccaggctggtctcgaactcctgaactcaagtgattcacccaccttagcctcccaaagtgctgggattacaggcgtgagtcaccgtgcccagccatgtatatatataattttaaaaattaagctgaaattcacataacataaaattagctgttttaaagtgtaaaatttagtggcgtgtggttcattcacaaagctgtacaaccaccaccatctagttccaaacattttctttttttctgagatggagtctcactctgtcacccaggttcgagttcagtggtgccatctctgtccactgcaacctccacatcctgggttcaagtgattctcctgcctcagcctctggaggagctggtatcacaggcgtcccccaccacgcctggctaaattttgtatttttaggtggtcttgaactcctgatgtcaggtgattctcctagctccaaatgttttcattatctctcccccaacaaaacccatacctatcaagctgtcactccccataccccattctctttttcatctcggcccctgtcaatctggtttttgtcactatggacttaccaattctgaatatttcccataaacagaatcatacaatatttgattttttttttttttttgaaactaagccttgctctgtctcccaggctggagtgctatggtgcaatttttgttcactgcaacctctgccttccaagatcaagagattctccagtctcagctcccaagtagctgggattacaggcatgtactaccatgcctggctaattttcttgtagttttagtagggacatgttggccaggctggtggtgagctcctggcctcaggtgatccacccacctcagtgttccaaagtgctgatattacaggcataatatgtgatcttttgtgtctggttgctttcatgttgaatgctatttttgaggttcatgcctgttgtagaccacagtcacacactgctgtagtcttccccagtcctcattcccagctgcctcttcctactgcttccgtctatcaaaaagcccccttggcccaggttccctgagctgtgggattctgcactggtgctttggattccctgatatgttccttcaaatctgctgagaattaaataaacatctctaaagcctgacctccccacgtc

SEQ ID NO: 29112 - DNA, 1953 bp, Homo Sapiens
ggagagagagaggacagagagcaagtcactcccggctgcctttttcacctctgacagagcccagacaccatgaacgcaagtgaattccgaaggagagggaaggagatggtggattacgtggccaactacatggaaggcattgagggacgccaggtctaccctgacgtggagcccgggtacctgcggccgctgatccctgccgctgcccctcaggagccagacacgtttgaggacatcatcaacgacgttgagaagataatcatgcctggggtgacgcactggcacagcccctacttcttcgcctacttccccactgccagctcgtacccggccatgcttgcggacatgctgtgcggggccattggctgcatcggcttctcctgggcggcaagcccagcatgcacagagctggagactgtgatgatggactggctcgggaagatgctggaactaccaaaggcatttttgaatgagaaagctggagaagggggaggagtgatccagggaagtgccagtgaagccaccctggtggccctgctggccgctcggaccaaagtgatccatcggctgcaggcagcgtccccagagctcacacaggccgctatcatggagaagctggtggcttactcatccgatcaggcacactcctcagtggaaagagctgggttaattggtggagtgaaattaaaagccatcccctcagatggcaacttcgccatgcgtgcgtctgccctgcaggaagccctggagagagacaaagcggctggcctgattcctttctttatggttgccaccctggggaccacaacatgctgctcctttgacaatctcttagaagtcggtcctatctgcaacaaggaagacatatggctgcacgttgatgcagcctacgcaggcagtgcattcatctgccctgagttccggcaccttctgaatggagtggagtttgcagattcattcaactttaatccccacaaatggctattggtgaattttgactgttctgccatgtgggtgaaaaagagaacagacttaacgggagcctttagactggaccccacttacctgaagcacagccatcaggattcagggcttatcactgactaccggcattggcagataccactgggcagaagatttcgctctttgaaaatgtggtttgtatttaggatgtatggagtcaaaggactgcaggcttatatccgcaagcatgtccagctgtcccatgagtttgagtcactggtgcgccaggatccccgctttgaaatctgtgtggaagtcattctggggcttgtctgctttcggctaaagggttccaacaaagtgaatgaagctcttctgcaaagaataaacagtgccaaaaaaatccacttggttccatgtcacctcagggacaagtttgtcctgcgctttgccatctgttctcgcacggtggaatctgcccatgtgcagcgggcctgggaacacatcaaagagctggcggccgacgtgctgcgagcagagagggagtaggagtgaagccagctgcaggaatcaaaaattgaagagagatatatctgaaaactggaataagaagcaaataaatatcatcctgccttcatggaactcagctgtctgtggcttcccatgtctttctccaaagttatccagagggttgtgattttgtctgcttagtatctcatcaacaaagaaatattatttgctaattaaaaagttaatcttcatggccatagcttttattcattagctgtgatttttgttgattaaaacattatagattttcatgttcttgcagtcatcagaagtggtaggaaagcctcactgatatattttccagggcaatcaatgttcacgcaacttgaaattatatctgtggtcttcaaattgtcttttgtcatgtggctaaatgcctaataaacaattcaagtgaaatactaaaaaaaaaaaaaaaaa

SEQ ID NO: 29113 - DNA, 2357 bp, Homo Sapiens
gagccgggctactctgagaagaagacaccaagtggattctgcttcccctgggacagcactgagcgagtgtggagagaggtacagccctcggcctacaagctctttagtcttgaaagcgccacaagcagcagctgctgagccatggctgaaggggaaatcaccaccttcacagccctgaccgagaagtttaatctgcctccagggaattacaagaagcccaaactcctctactgtagcaacgggggccacttcctgaggatccttccggatggcacagtggatgggacaagggacaggagcgaccagcacattcagctgcagctcagtgcggaaagcgtgggggaggtgtatataaagagtaccgagactggccagtacttggccatggacaccgacgggcttttatacggctcacagacaccaaatgaggaatgtttgttcctggaaaggctggaggagaaccattacaacacctatatatccaagaagcatgcagagaagaattggtttgttggcctcaagaagaatgggagctgcaaacgcggtcctcggactcactatggccagaaagcaatcttgtttctccccctgccagtctcttctgattaaagagatctgttctgggtgttgaccactccagagaagtttcgaggggtcctcacctggttgacccaaaaatgttcccttgaccattggctgcgctaacccccagcccacagagcctgaatttgtaagcaacttgcttctaaatgcccagttcacttctttgcagagccttttacccctgcacagtttagaacagagggaccaaattgcttctaggagtcaactggctggccagtctgggtctgggtttggatctccaattgcctcttgcaggctgagtccctccatgcaaaagtggggctaaatgaagtgtgttaaggggtcggctaagtgggacattagtaactgcacactatttccctctactgagtaaaccctatctgtgattcccccaaacatctggcatggctcccttttgtccttcctgtgccctgcaaatattagcaaagaagcttcatgccaggttaggaaggcagcattccatgaccagaaacagggacaaagaaatccccccttcagaacagaggcatttaaaatggaaaagagagattggattttggtgggtaacttagaaggatggcatctccatgtagaataaatgaagaaagggaggcccagccgcaggaaggcagaataaatccttgggagtcattaccacgccttgaccttcccaaggttactcagcagcagagagccctgggtgacttcaggtggagagcactagaagtggtttcctgataacaagcaaggatatcagagctgggaaattcatgtggatctggggactgagtgtgggagtgcagagaaagaaagggaaactggctgaggggataccataaaaagaggatgatttcagaaggagaaggaaaaagaaagtaatgccacacattgtgcttggcccctggtaagcagaggctttggggtcctagcccagtgcttctccaacactgaagtgcttgcagatcatctggggacctggtttgaatggagattctgattcagtgggttgggggcagagtttctgcagttccatcaggtcccccccaggtgcaggtgctgacaatactgctgccttacccgccatacattaaggagcagggtcctggtcctaaagagttattcaaatgaaggtggttcgacgccccgaacctcacctgacctcaactaacccttaaaaatgcacacctcatgagtctacctgagcattcaggcagcactgacaatagttatgcctgtactaaggagcatgattttaagaggctttggccaatgcctataaaatgcccatttcgaagatatacaaaaacatacttcaaaaatgttaaacccttaccaacagcttttcccaggagaccatttgtattaccattacttgtataaatacacttcctgcttaaacttgacccaggtggctagcaaattagaaacaccattcatctctaacatatgatactgatgccatgtaaaggcctttaataagtcattgaaatttactgtgagactgtatgttttaattgcatttaaaaatatatagcttgaaagcagttaaactgattagtattcaggcactgagaatgatagtaataggatacaatgtataagctactcacttatctgatacttatttacctataaaatgagatttttgttttccactgtgctattacaaattttcttttgaaagtaggaactcttaagcaatggtaattgtgaataaaaattgatgagagtgttaaaaaaaaaaaaaaaaa

SEQ ID NO: 29114 - DNA, 3948 bp, Homo Sapiens
ggcaagggacggagaacggggcggaggcggagtcagggcgcccgcgcgtgggccccgcccccttatgtagggtataaagcccctcccgctcacagtttccctagtcctcgaaggctcggaagcccgtcaccatgtcgtgcgagtcgtctatggttctcgggtactgggatattcgtgggctggcgcacgccatccgcctgctcctggagttcacggatacctcttatgaggagaaacggtacacgtgcggggaagctcctgactatgatcgaagccaatggctggatgtgaaattcaagctagacctggactttcctaatctgccctacctcctggatgggaagaacaagatcacccagagcaatgccatcttgcgctacatcgctcgcaagcacaacatgtgtggtgagactgaagaagaaaagattcgagtggacatcatagagaaccaagtaatggatttccgcacacaactgataaggctctgttacagctctgaccacgaaaaactgaagcctcagtacttggaagagctacctggacaactgaaacaattctccatgtttctggggaaattctcatggtttgccggggaaaagctcacctttgtggattttctcacctatgatatcttggatcagaaccgtatatttgaccccaagtgcctggatgagttcccaaacctgaaggctttcatgtgccgttttgaggctttggagaaaatcgctgcctacttacagtctgatcagttctgcaagatgcccatcaacaacaagatggcccagtggggcaacaagcctgtatgctgagcaggaggcagacttgcagagcttgttttgtttcatcctgtccgtaaggggtcagcgctcttgctttgctcttttcaatgaatagcacttatgttactggtgtccagctgagtttctcttgggtataaaggctaaaagggaaaaaggatatgtggagaatcatcaagatatgaattgaatcgctgcgatactggcatttccctactccccaactgagttcaagggctgtaggttcatgcccaagccctgagagtgggtactagaaaaaacgagattgcacagttggagagagcaggtgtgttaaatgggactggagtccctgtgaagactgggtgaggataacacaagtaaaactgtggtactgatggacttaaccggagttcggaaaccgtcctgtgtacacatgggagtttagtgtgataaaggcagtatttcagactggtgggctagccaatagagttgggacaattgcttactcattaaaaataatagagccccacttgacactattcactaaaattaatctggaatttaaggcccaacattaaacacaaagctgttgaaatattgatgaaaatgtaagaatttttgtgaccacggggtaggagaagtttctttaaagacgtaaaaagaaaaaaaccataggctgctctgcctgtggagtagccattctttattcttttactttttaaaataataacaatcacaaaggaaagatttgccaattgaataggatcaaattctacaacttttcctaaggcacccacaaataaatgacaagtgagacaaaaagcactagtataaagattatataaagacctataaatcattaagacaactgagtttttaaaaatggacaaaatccatgaacaatttataaaatagaaatatagccaaaaatgtctaaaagatgtttatgatgtaaggaattatcaattacaacagtgagaaaccatatttccttctatccgatgagtaaaaagtttctaaagtgttggcaaggcttaggaaagtgatatgcatttcctgctggtcaagttgtaaattagtatagctactttggaggacaattgtaaaatttaaatcatatcctatgacccagcaattccatgctataaaaactcatccatggccgggcttggtggctcacgcctgtaatcccagcactttgggaggctgaggtgggcagatcacgaggtcaagagatcgagaccatcctggccaacatgatgaaaccccgtttctactaaaaatacaaaaattagctgggcatggtggcatgtgcctatagtcccagctactcaggaggctgaggcaggagaattgcttgaacctgggaggcagaggttgcagtgagccgagatcacgccactgcactccagcctggctacagggcgagactctgtctcaaaaaaaaaaaaaaaaaaaaaaaaaaaacattcaaagagacatatactaagatgttcactgtggcattgtctgtaatgacaaataagtggaaaccgtgtaaatacctgtcaatactatggagtaccatgtggcaacggaagaatgagactgaactgtgtgaactaacatgcaaagatccccaaaacaggccaggtgtggttgctcacagctgtaataacaacaccttcagaggctgaggtgagaggatcagttgaggccaggagtttaagaccagcctgggcaacatagtgagacccctgtctcccaaaaattttttttaattagctgtgcgcaattgctcatgcatagtcccagctacccaggaggctgaggtgggaggatcacttgagcccaggaatttgaagctgcagtgagctgtgttcttgccactgcactccaatctgggtgactgagcaagaccctgtctcttaaaaaaataaaaaagatctccaagcatagagaagagtctggagggaaacaccaaactcataacagtcttactgcaggcaagtgggataaaggcccagactccatggtggaagttaaagggcatttccaagttaaggctaagacttgcttttctaactaagagaatgtgctcatgcattgcttgtgtagtagaaactagtttttagaaaagaaagcaaacttaagaaacactgactcctgtggagatgacttggcaccactctcctttcacagagcagagtctgaatagtcttcagagataggcctgtgggccagattgccatcccctatggaccagaagccaaggatctctctagtgatggtcagagggcccaaatggcagggatacccagtgatgtcaggaggaatagtacagacagaaggtgctaagcagacaattcaactgccatgttttgccaccccctgtgagcagggattaggtgttcaggccagtatcttgggcatgggggagcctttggccagaagaggtataaagctcagaagtttttcagtctgataactattgatataatttccatagtgtgagggagcggtatgctctacccttgtgtatttaaggcaggacagagaaattgaggatgcccctggggctagatcgatgatatgaccagaaatcaaaaagggaatgcattatttattgctgtgtaacactgttaagagaggaggtagttaagggatggataggcacatagagagggaaggtctcaggagaagggatagaaaggaactatgttcacaagaacaacggcaagacagtgcctatactgcctctacagttaataggaaaaacggaagaagttacccttaagctaggatgttgctcagaagtgaccatcccaactttggtgcgggcacaataaatcagcctaaatgtccctaatttaacccagctcattataatgtcattaaacatgacattagcattgtggttttagcacccccatgggttttgcttaggcactcatgggtaataaccaagatggagtccctttggcaaaacttaggcatgcacagctgtagtaccccaagaagaaaatgttacttctctcatctgggcaaaacccacagaagacttcccagcttctgccacataaaagacacagaacacagacgccttactggcaacctgctttcaagacccctgtctttgctgagagctttcctttttcccaataaattctactctgccctactcactctc

SEQ ID NO: 29115 - DNA, 3870 bp, Homo Sapiens
cagggagacatacaggatttaagaagcccatcatggagaagaccttcaattacagagataaaaagtttttcttgtggaacaagttaacactagatggcagataacagactgaggagtgagctgcttctgactcgattaaaaagggagtgagccataactggcggctgctctttcgccaatgagcctccccaattcctcctgcctcttagaagacaagatgtgtgagggcaacaagaccactatggccagcccccagctgatgcccctggtggtggtcctgagcactatctgcttggtcacagtagggctcaacctgctggtgctgtatgccgtacggagtgagcggaagctccacactgtggggaacctgtacatcgtcagcctctcggtggcggacttgatcgtgggtgccgtcgtcatgcctatgaacatcctctacctgctcatgtccaagtggtcactgggccgtcctctctgcctcttttggctttccatggactatgtggccagcacagcgtccattttcagtgtcttcatcctgtgcattgatcgctaccgctctgtccagcagcccctcaggtaccttaagtatcgtaccaagacccgagcctcggccaccattctgggggcctggtttctctcttttctgtgggttattcccattctaggctggaatcacttcatgcagcagacctcggtgcgccgagaggacaagtgtgagacagacttctatgatgtcacctggttcaaggtcatgactgccatcatcaacttctacctgcccaccttgctcatgctctggttctatgccaagatctacaaggccgtacgacaacactgccagcaccgggagctcatcaataggtccctcccttccttctcagaaattaagctgaggccagagaaccccaagggggatgccaagaaaccagggaaggagtctccctgggaggttctgaaaaggaagccaaaagatgctggtggtggatctgtcttgaagtcaccatcccaaacccccaaggagatgaaatccccagttgtcttcagccaagaggatgatagagaagtagacaaactctactgctttccacttgatattgtgcacatgcaggctgcggcagaggggagtagcagggactatgtagccgtcaaccggagccatggccagctcaagacagatgagcagggcctgaacacacatggggccagcgagatatcagaggatcagatgttaggtgatagccaatccttctctcgaacggactcagataccaccacagagacagcaccaggcaaaggcaaattgaggagtgggtctaacacaggcctggattacatcaagtttacttggaagaggctccgctcgcattcaagacagtatgtatctgggttgcacatgaaccgcgaaaggaaggccgccaaacagttgggttttatcatggcagccttcatcctctgctggatcccttatttcatcttcttcatggtcattgccttctgcaagaactgttgcaatgaacatttgcacatgttcaccatctggctgggctacatcaactccacactgaaccccctcatctaccccttgtgcaatgagaacttcaagaagacattcaagagaattctgcatattcgctcctaagggaggctctgaggggatgcaacaaaatgatccttatgatgtccaacaaggaaatagaggacgaaggcctgtgtgttgccaggcaggcacctgggctttctggaatccaaaccacagtcttaggggcttggtagtttggaaagttcttaggcaccatagaagaacagcagatggcggtgatcagcagagagattgaactttgaggaggaagcagaatctttgcaagaaagtcagacctgtttcttgtaactgggttcaaaaagaaaaaaataataaaaataaaagagagagagaatcagacctgggtggaactctcctgctcctcaggaactatgggagcctcagactcattgtaattcaagctttccgagtcaagtgattgacaactgaagagacacgtggctagggttccactggagaattgaaaaggactcttgagccctcctggaatggagctgtataactgtgcagagactttatccatgccaatagttgctgtccccttccaggggtcaccttgagaggcatgacagctgttccacaggggctatcccttctcagaaaacttctcttctgagcctctttaacagctttctccagaaccagtgtctgaaccaccctggaaattctgccttattatttcttactcaaacatgtttagagtggatagaaaattatgcagcttgcacacccatcatctttaaccccaaatttcctttggctattaaaaaagtggtggcaaaaggcatcctcaaaagaaagagaaatgaaatatttttgaatggttgcacgttaaaaattaaaagaaggaatgggggcagaatgccatatttttgagggctgtactaggtttatctcatttaagccccacaacaccccacaggagggtaattttctaactctagtttgcagaggagcaaattgaggttcagcaaggtgagagaggtacccaaggtcacatagctagttatgtgagaaagttagagtacagatcctctggggtttcagcttattgtagcatattttctccgaaaggcaaaaatgtgcccttttggccgggcatggtagctcaagcctataatcccagcatgttgagaggctgaggtgggcagatcatttgaggccaggagttcaagaccagtctggccaatatggagaaaccttgtctctactaaaaacacaaaaattatctgggcatggtggggcatgcctgtagtcccacttacttgggaggccgaggcacgagaatcgcttgaacccgggaggtggaggttgccgtgagccaagatcacgccactgcactccagcctgggcaacagagcaagactctgtctcaaaaaaaaaaatacaatattttaacaatgtgccctcttaagtgtgcacagatacacatacacggtattcccaagagtggtggcagctcaaaatgatatgtttgagtagacgaacagctgacatggagttcccgtgcacctacggaaggggacgctttgaaggaaccaagtgcatttttatctgtgagttctgttgtgtttgtcaaaaagtcattgtaatctttcatagccatacctggtaagcaaaaactagtaaagacataggaacatgtagttttacttggtgtttatgttgcaatctggttgtgatttatattttaaagcttggtgctaaaccacaatatgtatagcacatggagtgcctgtacaagctgatgttttgtattttgtgttcctctttgcatgatctgtcaaagtgagatatttttacctgcctaaaatatgatgtttaaaagcatactctatgtgatttatttatttctacctttctgagtctcttggactaagaagatgttttgaaatgtaccatcaaatgttaacagagtttgatatgggctttctctttggtttctcatcacatttgtaaatgtcttttcaaaaggatttactttttgtaaaaagcttcattctcactctgctttgcatcccccaaacttcttgttcaaaacggggggagtttaggagactttaatcccggtttcagaagctgcagctggtctgtttccaggtcagaaaccattgttcagaagacctccctgtgagagagttgctcctcagggtccctcaggaccaaagaacactcgaaaagagcacttcacacagacaagtggctaagtgtccattatttaccttgaacaatcaaggcaactagtggagagaactgattgtgagctc

SEQ ID NO: 29116 - DNA, 2260 bp, Homo Sapiens
gggggtatttgtttcactgctttcaaccgcctgtgctggaggctcagaataagtcaatgggaggaggatttcagtcacagcagcaagcaagtctagtgaacagataagatgacatgctcagcaaaataacaacgaaaccagagggggaactctctggcatgcaagttcaaacacgactctacaactacggcagaaaaagagagagagagaaactaaaaatatatatatatcctatttttttcacagctatcagtttctttcactgagctttcctaaatttaagcctctagaaaataataaatacttggatatcttacctacaaacatggacagatgtgtgtatgcgctcattttagagaacttgaatttttttttttaaaggaaggtgtcaactttggcttttgagtgtttggcatggttacaatgccttaaaaaaacagatgagcagcttagctactaaccatgctgaccactgttcggaacgggattgaatcacagaaaaacagcaaatggctctctcttacagagtgtctgaacttcaaagcacaattcctgagcacattttgcagagcacctttgttcacgttatctcttctaactggtctggattacagacagaatcaataccagaggaaatgaaacagattgttgaggaacagggaaataaactgcactgggcagctcttctgatactcatggtgataatacccacaattggtggaaatacccttgttattctggctgtttcactggagaagaagctgcagtatgctactaattactttctaatgtccttggcggtggctgatttgctggttggattgtttgtgatgccaattgccctcttgacaataatgtttgaggctatgtggcccctcccacttgttctatgtcctgcctggttatttcttgacgttctcttttcaaccgcatccatcatgcatctctgtgccatttcagtggatcgttacatagccatcaaaaagccaatccaggccaatcaatataactcacgggctacagcattcatcaagattacagtggtgtggttaatttcaataggcattgccattccagtccctattaaagggatagagactgatgtggacaacccaaacaatatcacttgtgtgctgacaaaggaacgttttggcgatttcatgctctttggctcactggctgccttcttcacacctcttgcaattatgattgtcacctactttctcactatccatgctttacagaagaaggcttacttagtcaaaaacaagccacctcaacgcctaacatggttgactgtgtctacagttttccaaagggatgaaacaccttgctcgtcaccggaaaaggtggcaatgctggatggttctcgaaaggacaaggctctgcccaactcaggtgatgaaacacttatgcgaagaacatccacaattgggaaaaagtcagtgcagaccatttccaacgaacagagagcctcaaaggtcctagggattgtgtttttcctctttttgcttatgtggtgtcccttctttattacaaatataactttagttttatgtgattcctgtaaccaaactactctccaaatgctcctggagatatttgtgtggataggctatgtttcctcaggagtgaatcctttggtctacaccctcttcaataagacatttcgggatgcatttggccgatatatcacctgcaattaccgggccacaaagtcagtaaaaactctcagaaaacgctccagtaagatctacttccggaatccaatggcagagaactctaagtttttcaagaaacatggaattcgaaatgggattaaccctgccatgtaccagagtccaatgaggctccgaagttcaaccattcagtcttcatcaatcattctactagatacgcttctcctcactgaaaatgaaggtgacaaaactgaagagcgagttagttatgtatagcagaactggcagttgtcatcaaacataatgatgagtaagatgatgaatgagatgtaaatgtgccaagaatatattatataaagaattttatgtcatatatcaaatcatctctttaacctaagatgtaagtattaagaatatctaattttcctaatttggacaagattattccatgaggaaaataattttatatagctacaaatgaaaacaatccagcactctggttaaattttaaggtattcgaatgaaataaagtcaaatcaataaatttcaggccaaaaaaaaaaaaaaaaaaaaaaaaaaaa

SEQ ID NO: 29117 - DNA, 4045 bp, Homo Sapiens
gcagccagagctcagcagggccctggagagatggccacggtcccagcaccggggaggactggagagcgcgcgctgccaccgccccatgtctcagccagggcttccttcctcggctccaccctgtggatgtaatggcggcccctgctctgtcctggcgtctgcccctcctcatcctcctcctgcccctggctacctcttgggcatctgcagcggtgaatggcacttcccagttcacatgcttctacaactcgagagccaacatctcctgtgtctggagccaagatggggctctgcaggacacttcctgccaagtccatgcctggccggacagacggcggtggaaccaaacctgtgagctgctccccgtgagtcaagcatcctgggcctgcaacctgatcctcggagccccagattctcagaaactgaccacagttgacatcgtcaccctgagggtgctgtgccgtgagggggtgcgatggagggtgatggccatccaggacttcaagccctttgagaaccttcgcctgatggcccccatctccctccaagttgtccacgtggagacccacagatgcaacataagctgggaaatctcccaagcctcccactactttgaaagacacctggagttcgaggcccggacgctgtccccaggccacacctgggaggaggcccccctgctgactctcaagcagaagcaggaatggatctgcctggagacgctcaccccagacacccagtatgagtttcaggtgcgggtcaagcctctgcaaggcgagttcacgacctggagcccctggagccagcccctggccttcaggacaaagcctgcagcccttgggaaggacaccattccgtggctcggccacctcctcgtgggcctcagcggggcttttggcttcatcatcttagtgtacttgctgatcaactgcaggaacaccgggccatggctgaagaaggtcctgaagtgtaacaccccagacccctcgaagttcttttcccagctgagctcagagcatggaggagacgtccagaagtggctctcttcgcccttcccctcatcgtccttcagccctggcggcctggcacctgagatctcgccactagaagtgctggagagggacaaggtgacgcagctgctcctgcagcaggacaaggtgcctgagcccgcatccttaagcagcaaccactcgctgaccagctgcttcaccaaccagggttacttcttcttccacctcccggatgccttggagatagaggcctgccaggtgtactttacttacgacccctactcagaggaagaccctgatgagggtgtggccggggcacccacagggtcttccccccaacccctgcagcctctgtcaggggaggacgacgcctactgcaccttcccctccagggatgacctgctgctcttctcccccagtctcctcggtggccccagccccccaagcactgcccctgggggcagtggggccggtgaagagaggatgcccccttctttgcaagaaagagtccccagagactgggacccccagcccctggggcctcccaccccaggagtcccagacctggtggattttcagccaccccctgagctggtgctgcgagaggctggggaggaggtccctgacgctggccccagggagggagtcagtttcccctggtccaggcctcctgggcagggggagttcagggcccttaatgctcgcctgcccctgaacactgatgcctacttgtccctccaagaactccagggtcaggacccaactcacttggtgtagacagatggccagggtgggaggcaggcagctgcctgctctgcgccgagcctcagaaggaccctgttgagggtcctcagtccactgctgaggacactcagtgtccagttgcagctggacttctccacccggatggcccccacccagtcctgcacacttggtccatccatttccaaacctccactgctgctcccgggtcctgctgcccgagccaggaactgtgtgtgttgcaggggggcagtaactccccaactccctcgttaatcacaggatcccacgaatttaggctcagaagcatcgctcctctccagccctgcagctattcaccaatatcagtcctcgcggctctccagggctccctgccctgacctcttccctgggttttctgccccagcctcctccttccctcccctccccgtccacagggcagcctgagcgtgctttccaaaacccaaatatggccacgctccccctcggttcaaaaccttgcacaggtcccactgccctcagccccacttctcagcctggtacttgtacctccggtgtcgtgtggggacatccccttctgcaatcctccctaccgtcctcctgagccactcagagctccctcacaccccctctgttgcacatgctattccctggggctgctgtgcgctccccctcatctaggtgacaaacttccctgactcttcaagtgccggttttgcttctcctggagggaagcactgcctcccttaatctgccagaaacttctagcgtcagtgctggagggagaagctgtcagggacccagggcgcctggagaaagaggccctgttactattcctttgggatctctgaggcctcagagtgcttggctgctgtatctttaatgctggggcccaagtaagggcacagatccccccacaaagtggatgcctgctgcatcttcccacagtggcttcacagacccacaagagaagctgatggggagtaaaccctggagtccgaggcccaggcagcagccccgcctagtggtgggccctgatgctgccaggcctgggacctcccactgccccctccactggaggggtctcctctgcagctcagggactggcacactggcctccagaagggcagctccacagggcagggcctcattatttttcactgccccagacacagtgcccaacaccccgtcgtataccctggatgaacgaattaattacctggcaccacctcgtctgggctccctgcgcctgacattcacacagagaggcagagtcccgtgcccattaggtctggcatgccccctcctgcaaggggctcaaccccctaccccgacccctccacgtatctttcctaggcagatcacgttgcaatggctcaaacaacattccaccccagcaggacagtgaccccagtcccagctaactctgacctgggagccctcaggcacctgcacttacaggccttgctcacagctgattgggcacctgaccacacgcccccacaggctctgaccagcagcctatgagggggtttggcaccaagctctgtccaatcaggtaggctgggcctgaactagccaatcagatcaactctgtcttgggcgtttgaactcagggagggaggcccttgggagcaggtgcttgtggacaaggctccacaagcgttgagccttggaaaggtagacaagcgttgagccactaagcagaggaccttgggttcccaatacaaaaatacctactgctgagagggctgctgaccatttggtcaggattcctgttgcctttatatccaaaataaactcccctttcttgaggttgtctgagtcttgggtctatgccttgaaaaaagctgaattattggacagtctcacctcctgccatagggtcctgaatgtttcagaccacaaggggctccacacctttgctgtgtgttctggggcaacctactaatcctctctgcaagtcggtctccttatccccccaaatggaaattgtatttgccttctccactttgggaggctcccacttcttgggagggttacattttttaagtcttaatcatttgtgacatatgtatctatacatccgtatcttttaatgatccgtgtgtaccatctttgtgattatttccttaatattttttctttaagtcagttcattttcgttgaaatacatttatttaaagaaaaatctttgttactctgtaaatgaaaaaacccattttcgctataaataaaaggtaactgtacaaaataagtacaatgcaacaaaa

SEQ ID NO: 29118 - DNA, 2116 bp, Homo Sapiens
acatccgcggcaacgcctccttggtgtcgtccgcttccaataacccagcttgcgtcctgcacacttgtggcttccgtgcacacattaacaactcatggttctagctcccagtcgccaagcgttgccaaggcgttgagagatcatctgggaagtcttttacccagaattgctttgattcaggccagctggtttttcctgcggtgattcggaaattcgcgaattcctctggtcctcatccaggtgcgcgggaagcaggtgcccaggagagaggggataatgaagattccatgctgatgatcccaaagattgaacctgcagaccaagcgcaaagtagaaactgaaagtacactgctggcggatcctacggaagttatggaaaaggcaaagcgcagagccacgccgtagtgtgtgccgccccccttgggatggatgaaactgcagtcgcggcgtgggtaagaggaaccagctgcagagatcaccctgcccaacacagactcggcaactccgcggaagaccagggtcctgggagtgactatgggcggtgagagcttgctcctgctccagttgcggtcatcatgactacgcccgcctcccgcagaccatgttccatgtttcttttaggtatatctttggacttcctcccctgatccttgttctgttgccagtagcatcatctgattgtgatattgaaggtaaagatggcaaacaatatgagagtgttctaatggtcagcatcgatcaattattggacagcatgaaagaaattggtagcaattgcctgaataatgaatttaacttttttaaaagacatatctgtgatgctaataaggaaggtatgtttttattccgtgctgctcgcaagttgaggcaatttcttaaaatgaatagcactggtgattttgatctccacttattaaaagtttcagaaggcacaacaatactgttgaactgcactggccaggttaaaggaagaaaaccagctgccctgggtgaagcccaaccaacaaagagtttggaagaaaataaatctttaaaggaacagaaaaaactgaatgacttgtgtttcctaaagagactattacaagagataaaaacttgttggaataaaattttgatgggcactaaagaacactgaaaaatatggagtggcaatatagaaacacgaactttagctgcatcctccaagaatctatctgcttatgcagtttttcagagtggaatgcttcctagaagttactgaatgcaccatggtcaaaacggattagggcatttgagaaatgcatattgtattactagaagatgaatacaaacaatggaaactgaatgctccagtcaacaaactatttcttatatatgtgaacatttatcaatcagtataattctgtactgatttttgtaagacaatccatgtaaggtatcagttgcaataatacttctcaaacctgtttaaatatttcaagacattaaatctatgaagtatataatggtttcaaagattcaaaattgacattgctttactgtcaaaataattttatggctcactatgaatctattatactgtattaagagtgaaaattgtcttcttctgtgctggagatgttttagagttaacaatgatatatggataatgccggtgagaataagagagtcataaaccttaagtaagcaacagcataacaaggtccaagatacctaaaagagatttcaagagatttaattaatcatgaatgtgtaacacagtgccttcaataaatggtatagcaaatgttttgacatgaaaaaaggacaatttcaaaaaaataaaataaaataaaaataaattcacctagtctaaggatgctaaaccttagtactgagttacattgtcatttatatagattataacttgtctaaataagtttgcaatttgggagatatatttttaagataataatatatgtttaccttttaattaatgaaatatctgtatttaattttgacactatatctgtatataaaatattttcatacagcattacaaattgcttactttggaatacatttctcctttgataaaataaatgagctatgtattaacaaaaaaaaaaaaaaaaaaaaaaaaaaaaaaaaaaaaaaa

SEQ ID NO: 29119 - DNA, 4666 bp, Homo Sapiens
agtaccttggtccagctcttcctgcaacggcccaggagctcagagctccacatctgaccttctagtcatgaccaggaccagggcagcactcctcctgttcacagccttagcaacttctctaggtttcaacttggacacagaggagctgacagccttccgtgtggacagcgctgggtttggagacagcgtggtccagtatgccaactcctgggtggtggttggagccccccaaaagataacagctgccaaccaaacgggtggcctctaccagtgtggctacagcactggtgcctgtgagcccatcggcctgcaggtgcccccggaggccgtgaacatgtccctgggcctgtccctggcgtctaccaccagcccttcccagctgctggcctgcggccccaccgtgcaccacgagtgcgggaggaacatgtacctcaccggactctgcttcctcctgggccccacccagctcacccagaggctcccggtgtccaggcaggagtgcccaagacaggagcaggacattgtgttcctgatcgatggctcaggcagcatctcctcccgcaactttgccacgatgatgaacttcgtgagagctgtgataagccagttccagagacccagcacccagttttccctgatgcagttctccaacaaattccaaacacacttcactttcgaggaattcaggcgcagctcaaaccccctcagcctgttggcttctgttcaccagctgcaagggtttacatacacggccaccgccatccaaaatgtcgtgcaccgattgttccatgcctcatatggggcccgtagggatgccgccaaaattctcattgtcatcactgatgggaagaaagaaggcgacagcctggattataaggatgtcatccccatggctgatgcagcaggcatcatccgctatgcaattggggttggattagcttttcaaaacagaaattcttggaaagaattaaatgacattgcatcgaagccctcccaggaacacatatttaaagtggaggactttgatgctctgaaagatattcaaaaccaactgaaggagaagatctttgccattgagggtacggagaccacaagcagtagctccttcgaattggagatggcacaggagggcttcagcgctgtgttcacacctgatggccccgttctgggggctgtggggagcttcacctggtctggaggtgccttcctgtaccccccaaatatgagccctaccttcatcaacatgtctcaggagaatgtggacatgagggactcttacctgggttactccaccgagctggccctctggaaaggggtgcagagcctggtcctgggggccccccgctaccagcacaccgggaaggctgtcatcttcacccaggtgtccaggcaatggaggatgaaggccgaagtcacggggactcagatcggctcctacttcggggcctccctctgctccgtggacgtagacagcgacggcagcaccgacctggtcctcatcggggccccccattactacgagcagacccgagggggccaggtgtctgtgtgtcccttgcccagggggtggagaaggtggtggtgtgatgctgttctctacggggagcagggccacccctggggtcgctttggggcggctctgacagtgctgggggatgtgaatggggacaagctgacagacgtggtcatcggggccccaggagaggaggagaaccggggtgctgtctacctgtttcacggagtcttgggacccagcatcagcccctcccacagccagcggatcgcgggctcccagctctcctccaggctgcagtattttgggcaggcactgagcgggggtcaagacctcacccaggatggactggtggacctggctgtgggggcccggggccaggtgctcctgctcaggaccagacctgtgctctgggtgggggtgagcatgcagttcatacctgccgagatccccaggtctgcgtttgagtgtcgggagcaggtggtctctgagcagaccctggtacagtccaacatctgcctttacattgacaaacgttctaagaacctgcttgggagccgtgacctccaaagctctgtgaccttggacctggccctcgaccctggccgcctgagtccccgtgccaccttccaggaaacaaagaaccggagtctgagccgagtccgagtcctcgggctgaaggcacactgtgaaaacttcaacctgctgctcccgagctgcgtggaggactctgtgacccccattaccttgcgtctgaacttcacgctggtgggcaagcccctccttgccttcagaaacctgcggcctatgctggccgccgatgctcagagatacttcacggcctccctaccctttgagaagaactgtggagccgaccatatctgccaggacaatctcggcatctccttcagcttcccaggcttgaagtccctgctggtggggagtaacctggagctgaacgcagaagtgatggtgtggaatgacggggaagactcctacggaaccaccatcaccttctcccaccccgcaggactgtcctaccgctacgtggcagagggccagaaacaagggcagctgcgttccctgcacctgacatgtgacagcgccccagttgggagccagggcacctggagcaccagctgcagaatcaaccacctcatcttccgtggcggcgcccagatcaccttcttggctacctttgacgtctcccccaaggctgtcctgggagaccggctgcttctgacagccaatgtgagcagtgagaacaacactcccaggaccagcaagaccaccttccagctggagctcccggtgaagtatgctgtctacactgtggttagcagccacgaacaattcaccaaatacctcaacttctcagagtctgaggagaaggaaagccatgtggccatgcacagataccaggtcaataacctgggacagagggacctgcctgtcagcatcaacttctgggtgcctgtggagctgaaccaggaggctgtgtggatggatgtggaggtctcccacccccagaacccatcccttcggtgctcctcagagaaaatcgcacccccagcatctgacttcctggcgcacattcagaagaatcccgtgctggactgctccattgctggctgcctgcggttccgctgtgacgtcccctccttcagcgtccaggaggagctggatttcaccctgaagggcaacctcagctttggctgggtccgccagatattgcagaagaaggtgtcggtcgtgagtgtggctgaaattacgttcgacacatccgtgtactcccagcttccaggacaggaggcatttatgagagctcagacgacaacggtgctggagaagtacaaggtccacaaccccacccccctcatcgtaggcagctccattgggggtctgttgctgctggcactcatcacagcggtactgtacaaagttggcttcttcaagcgtcagtacaaggaaatgatggaggaggcaaatggacaaattgccccagaaaacgggacacagacccccagcccgcccagtgagaaatgatcccctctttgccttggacttcttctcccccgcgagttttccccacttacttaccctcacctgtcaggcctgacggggaggaaccactgcaccaccgagagaggctgggatgggcctgcttcctgtctttgggagaaaacgtcttgcttgggaaggggcctttgtcttgtcaaggttccaactggaaacccttaggacagggtccctgctgtgttccccaaaggacttgacttgcaatttctacctagaaatacatggacaatacccccaggcctcagtctcccttctcccatgaggcacgaatgatctttctttcctttctttttttttttttttcttttcttttttttttttttgagacggagtctcgctctgtcacccaggctggagtgcaatggcgtgatctcggctcactgcaacctccgcctcccgggttcaagtaattctgctgtctcagcctcctgagtagctgggactacaggcacacgccacctcgcccggcccgatctttctaaaatacagttctgaatatgctgctcatccccacctgtcttcaacagctccccattaccctcaggacaatgtctgaactctccagcttcgcgtgagaagtccccttccatcccagagggtgggcttcagggcgcacagcatgagaggctctgtgcccccatcaccctcgtttccagtgaattagtgtcatgtcagcatcagctcagggcttcatcgtggggctctcagttccgatttcccaggctgaattgggagtgagatgcctgcatgctgggttctgcacagctggcctcccgcgttgggcaacattgctggctggaagggaggagcgccctctagggagggacatggccccggtgcggctgcagctcacccagccccaggggcagaagagacccaaccacttctattttttgaggctatgaatatagtacctgaaaaaatgccaagacatgattatttttttaaaaagcgtactttaaatgtttgtgttaataaattaaaacatgcacaaaaagatgcatctaccgctcttgggaaatatgtcaaaggtctaaaaataaaaaagccttctgtgaaaaaaaaaaaaaaaaa

SEQ ID NO: 29120 - DNA, 2397 bp, Homo Sapiens
gcaagaactgaaacgaatggggattgaactgctttgcctgttctttctatttctaggaaggaatgatcacgtacaaggtggctgtgccctgggaggtgcagaaacctgtgaagactgcctgcttattggacctcagtgtgcctggtgtgctcaggagaattttactcatccatctggagttggcgaaaggtgtgataccccagcaaaccttttagctaaaggatgtcaattaaacttcatcgaaaaccctgtctcccaagtagaaatacttaaaaataagcctctcagtgtaggcagacagaaaaatagttctgacattgttcagattgcgcctcaaagcttgatccttaagttgagaccaggtggtgcgcagactctgcaggtgcatgtccgccagactgaggactacccggtggatttgtattacctcatggacctctccgcctccatggatgacgacctcaacacaataaaggagctgggctcccggctttccaaagagatgtctaaattaaccagcaactttagactgggcttcggatcttttgtggaaaaacctgtatcccctttcgtgaaaacaacaccagaagaaattgccaacccttgcagtagtattccatacttctgtttacctacatttggattcaagcacattttgccattgacaaatgatgctgaaagattcaatgaaattgtgaagaatcagaaaatttctgctaatattgacacacccgaaggtggatttgatgcaattatgcaagctgctgtgtgtaaggaaaaaattggctggcggaatgactccctccacctcctggtctttgtgagtgatgctgattctcattttggaatggacagcaaactagcaggcatcgtcattcctaatgacgggctctgtcacttggacagcaagaatgaatactccatgtcaactgtcttggaatatccaacaattggacaactcattgataaactggtacaaaacaacgtgttattgatcttcgctgtaacccaagaacaagttcatttatatgagaattacgcaaaacttattcctggagctacagtaggtctacttcagaaggactccggaaacattctccagctgatcatctcagcttatgaagaactgcggtctgaggtggaactggaagtattaggagacactgaaggactcaacttgtcatttacagccatctgtaacaacggtaccctcttccaacaccaaaagaaatgctctcacatgaaagtgggagacacagcttccttcagcgtgactgtgaatatcccacactgcgagagaagaagcaggcacattatcataaagcctgtggggctgggggatgccctggaattacttgtcagcccagaatgcaactgcgactgtcagaaagaagtggaagtgaacagctccaaatgtcaccacgggaacggctctttccagtgtggggtgtgtgcctgccaccctggccacatggggcctcgctgtgagtgtggcgaggacatgctgagcacagattcctgcaaggaggccccagatcatccctcctgcagcggaaggggtgactgctactgtgggcagtgtatctgccacttgtctccctatggaaacatttatgggccttattgccagtgtgacaatttctcctgcgtgagacacaaagggctgctctgcggaggtaacggcgactgtgactgtggtgaatgtgtgtgcaggagcggctggactggcgagtactgcaactgcaccaccagcacggactcctgcgtctctgaagatggagtgctctgcagcgggcgcggggactgtgtttgtggcaagtgtgtttgcacaaaccctggagcctcaggaccaacctgtgaacgatgtcctacctgtggtgacccctgtaactctaaacggagctgcattgagtgccacctgtcagcagctggccaagcccgagaagaatgtgtggacaagtgcaaactagctggtgcgaccatcagtgaagaagaagatttctcaaaggatggttctgtttcctgctctctgcaaggagaaaatgaatgtcttattacattcctaataactacagataatgaggggaaaaccatcattcacagcatcaatgaaaaagattgtccgaagcctccaaacattcccatgatcatgttaggggtttccctggctattcttctcatcggggttgtcctactgtgcatctggaagctactggtgtcatttcatgatcgtaaagaagttgccaaatttgaagcagaacgatcaaaagccaagtggcaaacgggaaccaatccactctacagaggatccacaagtacttttaaaaatgtaacttataaacacagggaaaaacaaaaggtagacctttccacagattgctagaactactttatgca

SEQ ID NO: 29121 - DNA, 2245 bp, Homo Sapiens
agaacagcttgaagaccgttcatttttaagtgacaagagactcacctccaagaagcaattgtgttttcagaatgattttattcaagcaagcaacttatttcatttccttgtttgctacagtttcctgtggatgtctgactcaactctatgaaaacgccttcttcagaggtggggatgtagcttccatgtacaccccaaatgcccaatactgccagatgaggtgcacattccacccaaggtgtttgctattcagttttcttccagcaagttcaatcaatgacatggagaaaaggtttggttgcttcttgaaagatagtgttacaggaaccctgccaaaagtacatcgaacaggtgcagtttctggacattccttgaagcaatgtggtcatcaaataagtgcttgccatcgagacatttataaaggagttgatatgagaggagtcaattttaatgtgtctaaggttagcagtgttgaagaatgccaaaaaaggtgcaccaataacattcgctgccagtttttttcatatgccacgcaaacatttcacaaggcagagtaccggaacaattgcctattaaagtacagtcccggaggaacacctaccgctataaaggtgctgagtaacgtggaatctggattctcactgaagccctgtgccctttcagaaattggttgccacatgaacatcttccagcatcttgcgttctcagatgtggatgttgccagggttctcactccagatgcttttgtgtgtcggaccatctgcacctatcaccccaactgcctcttctttacattctatacaaatgtatggaaaatcgagtcacaaagaaatgtttgtcttcttaaaacatctgaaagtggcacaccaagttcctctactcctcaagaaaacaccatatctggatatagccttttaacctgcaaaagaactttacctgaaccctgccattctaaaatttacccgggagttgactttggaggagaagaattgaatgtgacttttgttaaaggagtgaatgtttgccaagagacttgcacaaagatgattcgctgtcagtttttcacttattctttactcccagaagactgtaaggaagagaagtgtaagtgtttcttaagattatctatggatggttctccaactaggattgcgtatgggacacaagggagctctggttactctttgagattgtgtaacactggggacaactctgtctgcacaacaaaaacaagcacacgcattgttggaggaacaaactcttcttggggagagtggccctggcaggtgagcctgcaggtgaagctgacagctcagaggcacctgtgtggagggtcactcataggacaccagtgggtcctcactgctgcccactgctttgatgggcttcccctgcaggatgtttggcgcatctatagtggcattttaaatctgtcagacattacaaaagatacacctttctcacaaataaaagagattattattcaccaaaactataaagtctcagaagggaatcatgatatcgccttgataaaactccaggctcctttgaattacactgaattccaaaaaccaatatgcctaccttccaaaggtgacacaagcacaatttataccaactgttgggtaaccggatggggcttctcgaaggagaaaggtgaaatccaaaatattctacaaaaggtaaatattcctttggtaacaaatgaagaatgccagaaaagatatcaagattataaaataacccaacggatggtctgtgctggctataaagaagggggaaaagatgcttgtaagggagattcaggtggtcccttagtttgcaaacacaacggaatgtggcgtttggtgggcatcacaagctggggtgaaggctgtgcccgcagggagcaacctggtgtctacaccaaagtcgctgagtacatggactggattttagagaaaacacagagcagtgatggaaaagctcagatgcagtcaccagcatgagaagcagtccagagtctaggcaatttttacaacctgagttcaagtcaaattctgagcctggggggtcctcatctgcaaagcatggagagtggcatcttctttgcatcctaaggacgaaagacacagtgcactcagagctgctgaggacaatgtctgctgaagcccgctttcagcacgccgtaaccaggggctgacaatgcgaggtcgcaactgagatctccatgactgtgtgttgtgaaataaaatggtgaaagatc

SEQ ID NO: 29122 - DNA, 1668 bp, Homo Sapiens
aaatatgtttggataacccagcagagccatttaacctttgggaacaaggcaactagcgtctggcagcaggaatccaaccagtgccctgagttctgaggcagagaggaggacagaagaaacaagaggctggagattgtcaaattcagtatcccagttggctcttgattcttggtgaaaccatccctcagctcctagagggagattgttagatcatgaaactaattaccatccttttcctctgctccaggctgctactaagtttaacccaggaatcacagtccgaggaaattgactgcaatgacaaggatttatttaaagctgtggatgctgctctgaagaaatataacagtcaaaaccaaagtaacaaccagtttgtattgtaccgcataactgaagccactaagacggttggctctgacacgttttattccttcaagtacgaaatcaaggagggggattgtcctgttcaaagtggcaaaacctggcaggactgtgagtacaaggatgctgcaaaagcagccactggagaatgcacggcaaccgtggggaagaggagcagtacgaaattctccgtggctacccagacctgccagattactccagccgagggccctgtggtgacagcccagtacgactgcctcggctgtgtgcatcctatatcaacgcagagcccagacctggagcccattctgagacacggcattcagtactttaacaacaacactcaacattcctccctcttcatgcttaatgaagtaaaacgggcccaaagacaggtggtggctggattgaactttcgaattacctactcaattgtgcaaacgaattgttccaaagagaattttctgttcttaactccagactgcaagtccctttggaatggtgataccggtgaatgtacagataatgcatacatcgatattcagctacgaattgcttccttctcacagaactgtgacatttatccagggaaggattttgtacaaccacctaccaagatttgcgtgggctgccccagagatatacccaccaacagcccagagctggaggagacactgactcacaccatcacaaagcttaatgcagagaataacgcaactttctatttcaagattgacaatgtgaaaaaagcaagagtacaggtggtggctggcaagaaatattttattgacttcgtggccagggaaaccacatgttccaaggaaagtaatgaagagttgaccgaaagctgtgagaccaaaaaacttggccaaagcctagattgcaacgctgaagtttatgtggtaccctgggagaaaaaaatttaccctactgtcaactgtcaaccactgggaatgatctcactgatgaaaaggcctccaggtttttcacctttccgatcatcacgaataggggaaataaaagaagaaacaactagtcacctaaggtcctgcgagtacaagggtcgacccccaaaggcaggggcagagccagcatctgagagggaggtctcttgaccaatgggcagaatcttcactccaggcacatagccccaaccacctctgccagcaaccttgagaggaaggacaagaagaaagatgggatagaatttaaatagagaagaatgccattttatcactctgcctctgggtgaaataaagatcagtcttgatgttctaactctaaaaa

SEQ ID NO: 29123 - DNA, 5749 bp, Homo Sapiens
cgcgggagccaacttcaggctgctcagaggaagcccgtgcagtcagtcacctgggtgcaagagcgttgctgcctcgggctctcccgctgcagggagagcggcactcgctggcctggatgtggttggatttaggggggctccgcagcaggggtttcgtggcggtggcaagcgctgcaacaggtagacggcgagagacggaccccggccgaggcagggatggagaccaaaggctaccacagtctccctgaaggtctagatatggaaagacggtggggtcaagtttctcaggctgtggagcgttcttccctgggacctacagagaggaccgatgagaataactacatggagattgtcaacgtaagctgtgtttccggtgctattccaaacaacagtactcaaggaagcagcaaagaaaaacaagaactactcccttgccttcagcaagacaataatcggcctgggattttaacatctgatattaaaactgagctggaatctaaggaactttcagcaactgtagctgagtccatgggtttatatatggattctgtaagagatgctgactattcctatgagcagcagaaccaacaaggaagcatgagtccagctaagatttatcagaatgttgaacagctggtgaaattttacaaaggaaatggccatcgtccttccactctaagttgtgtgaacacgcccttgagatcatttatgtctgactctgggagctccgtgaatggtggcgtcatgcgcgccattgttaaaagccctatcatgtgtcatgagaaaagcccgtctgtttgcagccctctgaacatgacatcttcggtttgcagccctgctggaatcaactctgtgtcctccaccacagccagctttggcagttttccagtgcacagcccaatcacccagggaactcctctgacatgctcccctaatgctgaaaatcgaggctccaggtcgcacagccctgcacatgctagcaatgtgggctctcctctctcaagtccgttaagtagcatgaaatcctcaatttccagccctccaagtcactgcagtgtaaaatctccagtctccagtcccaataatgtcactctgagatcctctgtgtctagccctgcaaatattaacaactcaaggtgctctgtttccagcccttcgaacactaataacagatccacgctttccagtccggcagccagtactgtgggatctatctgtagccctgtaaacaatgccttcagctacactgcttctggcacctctgctggatccagtacattgcgggatgtggttcccagtccagacacgcaggagaaaggtgctcaagaggtcccttttcctaagactgaggaagtagagagtgccatctcaaatggtgtgactggccagcttaatattgtccagtacataaaaccagaaccagatggagcttttagcagctcatgtctaggaggaaatagcaaaataaattcggattcttcattctcagtaccaataaagcaagaatcaaccaagcattcatgttcaggcacctcttttaaagggaatccaacagtaaacccgtttccatttatggatggctcgtatttttcctttatggatgataaagactattattccctatcaggaattttaggaccacctgtgcccggctttgatggtaactgtgaaggcagcggattcccagtgggtattaaacaagaaccagatgacgggagctattacccagaggccagcatcccttcctctgctattgttggggtgaattcaggtggacagtccttccactacaggattggtgctcaaggtacaatatctttatcacgatcggctagagaccaatctttccaacacctgagttcctttcctcctgtcaatactttagtggagtcatggaaatcacacggcgacctgtcgtctagaagaagtgatgggtatccggtcttagaatacattccagaaaatgtatcaagctctactttacgaagtgtttctactggatcttcaagaccttcaaaaatatgtttggtgtgtggggatgaggcttcaggatgccattatggggtagtcacctgtggcagctgcaaagttttcttcaaaagagcagtggaagggcaacacaactatttatgtgctggaagaaatgattgcatcattgataagattcgacgaaagaattgtcctgcttgcagacttcagaaatgtcttcaagctggaatgaatttaggagcacgaaagtcaaagaagttgggaaagttaaaagggattcacgaggagcagccacagcagcagcagcccccacccccacccccacccccgcaaagcccagaggaagggacaacgtacatcgctcctgcaaaagaaccctcggtcaacacagcactggttcctcagctctccacaatctcacgagcgctcacaccttcccccgttatggtccttgaaaacattgaacctgaaattgtatatgcaggctatgacagctcaaaaccagatacagccgaaaatctgctctccacgctcaaccgcttagcaggcaaacagatgatccaagtcgtgaagtgggcaaaggtacttccaggatttaaaaacttgcctcttgaggaccaaattaccctaatccagtattcttggatgtgtctatcatcatttgccttgagctggagatcgtacaaacatacgaacagccaatttctctattttgcaccagacctagtctttaatgaagagaagatgcatcagtctgccatgtatgaactatgccaggggatgcaccaaatcagccttcagttcgttcgactgcagctcacctttgaagaatacaccatcatgaaagttttgctgctactaagcacaattccaaaggatggcctcaaaagccaggctgcatttgaagaaatgaggacaaattacatcaaagaactgaggaagatggtaactaagtgtcccaacaattctgggcagagctggcagaggttctaccaactgaccaagctgctggactccatgcatgacctggtgagcgacctgctggaattctgcttctacaccttccgagagtcccatgcgctgaaggtagagttccccgcaatgctggtggagatcatcagcgaccagctgcccaaggtggagtcggggaacgccaagccgctctacttccaccggaagtgactgcccgctgcccagaagaactttgccttaagtttccctgtgttgttccacacccagaaggacccaagaaaacctgtttttaacatgtgatggttgattcacacttgttcaacagtttctcaagtttaaagtcatgtcagaggtttggagccgggaaagctgtttttccgtggatttggcgagaccagagcagtctgaaggattccccacctccaatcccccagcgcttagaaacatgttcctgttcctcgggatgaaaagccatatctagtcaataactctgattttgatattttcacagatggaagaagttttaactatgccgtgtagtttctggtatcgttcgcttgttttaaaagggttcaaggactaacgaacgttttaaagcttacccttggtttgcacataaaacgtatagtcaatatggggcattaatattcttttgttattaaaaaaacacaaaaaaataataaaaaaatatatacagattcctgttgtgtaataacagaactcgtggcgtggggcagcagctgcctctgagccctcgctcgtccacggtcttctgcatcactggtatacacactcgttagcgtccatttcttatttaattagaatggataagatgatgttaaatgccttggtttgatttctagtatctattgtgttggctttacaaataattttttgcagtcttttgctgtgctgtacattactgtatgtataaattatgaaggacctgaaataaggtataaggatcttttgtaaatgagacacatacaaaaaaaatctttaatggttaataggatgaatgggaaagtatttttgaaagaattctattttgctggagactatttaagtactatctttgtctaaacaaggtaatttttttttgtaaagtgcaatgtcctgcatgcataatgaaccgtttacagtgtatttaagaaagggaaagctgtgccttttttagcttcatatctaatttaccattattttacagtctctgttgtaaataaccacactgaaacctcttcggttgtcttgaaacctttctactttttctgtactttttgttttgttcttggtctcccgcttggggcatttgtgggactccagcacgttttctggcttctgcttcatcctgctccatcggggaatgacacactgcggtgtctgcagctcctggaaggtgtcatttgacaacacatgtgggagaggaggtccttggagtgctgcagctttgggaaagcctgcctcgtttcccttttcctctagaagcagaaccagctctacgagagtgagactgggaacttgatggctcagagagcatcttttcctcccattttagaaaatcagattttctcctgtgggaaaaaaaaattccatgcactctctctctgttaaagatcagctattcccttctgatcttggaaagaggttctgcactcctggaaccggtcacaggaacgcacagatcatggcaggatgcgctgggacggcccatcttggcaaggttcagtctgaatggcatggagaccgggagatagaggggttttagatttttaaaaggtaggttttaaaaataagttttatacataaacagttttggagaaaaattacagatcatataagcaagacagtggcactaaaatgtttaattcattaatctgtttgtttggcactgatgcaatgtatggcttttctcttgccccaaatcacaaacatatgtatctttggggaaactaacaatatgattgcactaaataaactactttgaatagaggccaaattaatcttttaaaaatgatgataatcatcaggtttactcagtgaaatcatattaattattttccaaaatctaaaagctgtagctggagaagcccatggccacgaggaagcagcaattaattagatcaacacttttctccagggttcaccatgcaggcaacattaccttgtctttcaaaagacacctgccttagtgcaaggggaaacctgtgaaagctgcactcagagggaggagtctttcttacataatttgcaatttcaggaatttaatttataggcagatctttaaatacagtcaacttacggtgcacagtaatatgaaagccacactttgaaggtaataaatacacagcatgcagactgggagttgctagcaaacaaatggcttacttacaaaagcagcttttagttcagacttagtttttataaaatgagaattctgacttacttaaccaggtttgggatggagatggtctgcatcagctttttgtattaacaaagttactggctctttgtgtgtctccaggtaactttgcttgattaaacagcaaagccatattctaaattcactgttgaatgcctgtcccagtccaaattgtctgtctgctcttatttttgtaccatattgctcttaaaaatcttggtttggtacagttcataattcaccaaaaagttcatataatttaaagaaacactaaattagtttaaaatgaagcaatttatatctttatgcaaaaacatatgtctgtctttgcaaaggactgtaagcagattacaataaatcctttacttt

SEQ ID NO: 29124 - DNA, 2447 bp, Homo Sapiens
cccggcaaccacgagcccagccaatcagcgccccggactgcaccagagccatggtcggcagaagagcactgatcgtactggctcactcagagaggacctccttcaactatgccatgaaggaggctgctgcagcggctttgaagaagaaaggatgggaggtggtggagtcggacctctatgccatgaacttcaatcccatcatttccagaaaggacatcacaggtaaactgaaggaccctgcgaactttcagtatcctgccgagtctgttctggcttataaagaaggccatctgagcccagatattgtggctgaacaaaagaagctggaagccgcagaccttgtgatattccagttccccctgcagtggtttggagtccctgccattctgaaaggctggtttgagcgagtgttcataggagagtttgcttacacttacgctgccatgtatgacaaaggacccttccggagtaagaaggcagtgctttccatcaccactggtggcagtggctccatgtactctctgcaagggatccacggggacatgaatgtcattctctggccaattcagagtggcattctgcatttctgtggcttccaagtcttagaacctcaactgacatatagcattgggcacactccagcagacgcccgaattcaaatcctggaaggatggaagaaacgcctggagaatatttgggatgagacaccactgtattttgctccaagcagcctctttgacctaaacttccaggcaggattcttaatgaaaaaagaggtacaggatgaggagaaaaacaagaaatttggcctttctgtgggccatcacttgggcaagtccatcccaactgacaaccagatcaaagctagaaaatgagattccttagcctggatttccttctaacatgttatcaaatctgggtatctttccaggcttccctgacttgctttagtttttaagatttgtgtttttctttttccacaaggaataaatgagagggaatcgaccgtattcgtgcatttttggatgcatttttaactgattcttatgattactatcatggcatataaccaaaatccgactgggctcaagaggccacttagggaaagatgtagaaagatgctagaaaaatgttctttaaaggcatctacacaatttaattcctctttttagggtcaaagtttagggtacagttggctaggtatcattcaactctccaatgttctattaatcacctctctgtagtttatggtcagaagggaattgctcagagaaggtaaaagactgaatctacctgcctaagggacttaacttgtttggtagttagccatctaatgcttgtttatgatatttcttgctttcaattacaaagcagttactaatatgcctagcacaagtaccactcttggtcagcttttgttgtttatatacagtacacagataccttgaaaggaagagctaataaatctcttctttgctgcagtcatctactttttttttaattaaaaaaaattttttttgaagcagtcttgctctgttacccaggctggagtgcagtggtgtgatctcggctcactgcaacctctgcctcccaggttccagcaattctcctgcctcagcctccctagtagctgggatgacaggcgcctgccatcatgcctgactaatttttgtatttttagtagagacggcgtttcaccatgttggccaggctggtctcaaactcctgacctcaggtgatccgcctacctcagcctcccaaagtgctgggattacaggcgtgatccaccacacctggcccttgcaatcttctactttaaggtttgcagagataaaccaataaatccacaccgtacatctgcaatatgaattccaagaaaggaaatagtaccttcaatacttaaaaatagtcttccacaaaaaatactttatttctgatctatacaaattttcagaaggttattttctttatcattgctaaactgatgacttaccatgggatggggtccagtcccatgaccttggggtacaattgtaaacctagagttttatcaactttggtgaacagttttggcataatagtcaatttctacttctggaagtcatctcattccactgttggtattatataattcaaggagaatatgataaaacactgccctcttgtggtgcattgaaagaagagatgagaaatgatgaaaaggttgcctgaaaaatgggagacagcctcttacttgccaagaaaatgaagggattggaccgagctggaaaacctcctttaccagatgctgactggcactggtggtttttgctctcgacatatccacaatagctgacggctgggtgtttcagtttgcaaaatattttgttgccttcatcttcactgcaattttgtgtaaatttctcaaagatctaattaaataaataaaattcatttctacagactca

SEQ ID NO: 29125 - DNA, 2775 bp, Homo Sapiens
aatctttaggatctgagcaggagaaataccagcggatcttccccactctgctcccttccattcccacccttccttctttaataagcaggagcgaaaaagacaaattccaaagaggattgttcagttcaagggaatgaagaattcagaataattttggtaaatggattccaatatggggaataagaataagctgaacagttgacctgctttgaagaaacatactgtccatttgtctaaaataatctataacaaccaaaccaatcaaaatgaattcaacattattttcccaggttgaaaatcattcagtccactctaatttctcagagaagaatgcccagcttctggcttttgaaaatgatgattgtcatctgcccttggccatgatatttaccttagctcttgcttatggagctgtgatcattcttggtgtctctggaaacctggccttgatcataatcatcttgaaacaaaaggagatgagaaatgttaccaacatcctgattgtgaacctttccttctcagacttgcttgttgccatcatgtgtctcccctttacatttgtctacacattaatggaccactgggtctttggtgaggcgatgtgtaagttgaatccttttgtgcaatgtgtttcaatcactgtgtccattttctctctggttctcattgctgtggaacgacatcagctgataatcaaccctcgagggtggagaccaaataatagacatgcttatgtaggtattgctgtgatttgggtccttgctgtggcttcttctttgcctttcctgatctaccaagtaatgactgatgagccgttccaaaatgtaacacttgatgcgtacaaagacaaatacgtgtgctttgatcaatttccatcggactctcataggttgtcttataccactctcctcttggtgctgcagtattttggtccactttgttttatatttatttgctacttcaagatatatatacgcctaaaaaggagaaacaacatgatggacaagatgagagacaataagtacaggtccagtgaaaccaaaagaatcaatatcatgctgctctccattgtggtagcatttgcagtctgctggctccctcttaccatctttaacactgtgtttgattggaatcatcagatcattgctacctgcaaccacaatctgttattcctgctctgccacctcacagcaatgatatccacttgtgtcaaccccatattttatgggttcctgaacaaaaacttccagagagacttgcagttcttcttcaacttttgtgatttccggtctcgggatgatgattatgaaacaatagccatgtccacgatgcacacagatgtttccaaaacttctttgaagcaagcaagcccagtcgcatttaaaaaaatcaacaacaatgatgataatgaaaaaatctgaaactacttatagcctatggtcccggatgacatctgtttaaaaacaagcacaacctgcaacatactttgattacctgttctcccaaggaatggggttgaaatcatttgaaaatgactaagattttcttgtcttgctttttactgcttttgttgtagttgtcataattacatttggaacaaaaggtgtgggctttggggtcttctggaaatagttttgaccagacatctttgaagtgctttttgtgaatttatgcatataatataaagacttttatactgtacttattggaatgaaatttctttaaagtattactattaactgacttcagaagtacctgccatccaatacggtcattagattgggtcatcttgattagattagattagattagattgtcaacagattgggccatccttactttatgataggcatcattttagtgtgttacaatagtaacagtatgcaaaagcagcattcaggagccgaaagatagtctgaagtcattcagaagtggtttgaggtttctgttttttggtggtttttgtttgttttttttttttttcaccttaagggaggatttaatttgctcccaactgattgtcacttaaatgaaaatttaaaaatgaataaaaagacatacttctcagctgcaaatattatggagaattggggcacccacaggaatgaagagagaaagcagctccctaacttcaaaaccattttggtacctgacaacaagagcattttagagtaattaatttaataaagtaaattagtattgctgcaaatagttaaattatatttatttgaattgatggtcaagagattttccattttttttacagactgttcagtgtttgtcaagctttctggcataaatatgtactcaaaaggcatttccgcttacaatttgtagaaacacaaaatgcgttttccatacagcagtgcctatatagtgactgatttttaactttcaatgtccatctttcaaaggaagtaacaccaaggtacaatgttaaaggaatattcactttacctagcagggaaaaatacacaaaaactgcagatacttcatatagcccattttaacttgtataaactgtgtgacttgtggcgtcttataaataatgcactgtaaagattactgaatagttgtgtcatgttaatgtgcctaatttcatgtatcttgtaatcatgattgagcctcagaatcatttggagaaactatattttaaagaacaagacatacttcaatgtattatacagataaagtattacatgtgtttgattttaaaagggcggacattttattaaaatcaatattgtttttgctttttcaaaaaaaaaaaaaaaa

SEQ ID NO: 29126 - DNA, 3236 bp, Homo Sapiens
ggtagcggcagcagcagcggcggtgcggagagcttggactgggagcccaaagctcggctgggcagcgggagaggaggagccgcaggagctgcagctctgccagcttgggccgagcctagagacaccggcctggctggtccacgccagccgcagaccgtggctgagcatggagctgtccccccgcagtcctccggagatgctggaggagtcggattgcccgtcacccctggagctgaagtcagcccccagcaagaagatgtggattaagcttcggtctctgctgcgctacatggtgaagcagttggagaatggggagataaacattgaggagctgaagaaaaatctggagtacacagcttctctgctggaagccgtctacatagatgagacacggcaaatcttggacacggaggacgagctgcaggagctgcggtcagatgccgtgccttcggaggtgcgggactggctggcctccaccttcacccagcaggcccgggccaaaggccgccgagcagaggagaagcccaagttccgaagcattgtgcacgctgtgcaggctgggatcttcgtggaacggatgttccggagaacatacacctctgtgggccccacttactctactgcggttctcaactgtctcaagaacctggatctctggtgctttgatgtcttttccttgaaccaggcagcagatgaccatgccctgaggaccattgtttttgagttgctgactcggcataacctcatcagccgcttcaagattcccactgtgtttttgatgagtttcctggatgccttggagacaggctatgggaagtacaagaatccttaccacaaccagatccacgcagccgatgttacccagacagtccattgcttcttgctccgcacagggatggtgcactgcctgtcggagattgagctcctggccatcatctttgctgcagctatccatgattatgagcacacgggcactaccaacagcttccacatccagaccaagtcagaatgtgccatcgtgtacaatgatcgttcagtgctggagaatcaccacatcagctctgttttccgattgatgcaggatgatgagatgaacattttcatcaacctcaccaaggatgagtttgtagaactccgagccctggtcattgagatggtgttggccacagacatgtcctgccatttccagcaagtgaagaccatgaagacagccttgcaacagctggagaggattgacaagcccaaggccctgtctctactgctccatgctgctgacatcagccacccaaccaagcagtggttggtccacagccgttggaccaaggccctcatggaggaattcttccgtcagggtgacaaggaggcagagttgggcctgcccttttctccactctgtgaccgcacttccactctagtggcacagtctcagatagggttcatcgacttcattgtggagcccacattctctgtgctgactgacgtggcagagaagagtgttcagcccctggcggatgaggactccaagtctaaaaaccagcccagctttcagtggcgccagccctctctggatgtggaagtgggagaccccaaccctgatgtggtcagctttcgttccacctgggtcaagcgcattcaggagaataagcagaaatggaaggaacgggcagcaagtggcatcaccaaccagatgtccattgacgagctgtccccctgtgaagaagaggcccccccatcccctgccgaagatgaacacaaccagaatgggaatctggattagccctggggctggcccaggtcttcattgagtccaaagtgtttgatgtcatcagcaccatccatcaggactggctcccccatctgctccaagggagcgtggtcgtggaagaaacaacccacctgaaggccaaatgccagagatttggggttggggaaagggcccctccccacctgacacccactggggtgcactttaatgttccggcagcaagactggggaacttcaggctcccagtggtcactgtgcccatccctcagcctctggattctcttcatggccaggtggctgccagggagcggggagcttcctggaggcttcccagggccttggggaagggtcagagatgccagccccctgggacctcccccatcctttttgcctccaagtttctaagcaatacattttgggggttccctcagccccccaccccagatcttagctggcaggtctgggtgccccttttcctcccctgggaagggctggaataggatagaaagctgggggttttcagagccctatgtgtggggaggggagtggattccttcagggcatggtacctttctaggatctgggaatggggtggagaggacatcctcttcaccccagaattgcgctgcttcagccccatctccagcctgatcctctgaatcttccttccctccctttctgatacagtgactggggcaaaaggagccattgtgaccaggggctgcgggaggcctttcctgggaccttccttgggactggtctgggcccctggggcttgtcgcctgccctgagtccggagccctttgcctccttcctctcccctggggctgggaggctccatccgaccaatgtctgtaaagtgctttgaggatctccccagcaaagcaccttcagaatgtatcgacaccagctgggttagggtcaagggtgcctggggagggtgagtaatcctgcattgctaaaagagagggtctgtcccctcctctccacgtcccagaactggcccagctgcaggcactaagaagctcctcccctgagacaagtgaggggtagtcggtgaaaggcagatggacaaggggctcagggctgctgccttcctgtcctctggagagaacccagccaggcgcggtgccccttcctctcctcaggctcctccttgcccccaccttgccccaggaaaggccaaagtccaggtgactgccctccttctttcttgtaaataccaaccatgcatttgtacagtgggccctgttcatgcgaaatccacatccatggtctcctagacctgctaccctggtacttccaccctaccccaccccgagaagggcagagacgcatgtgactcacccctgcccttggtttcccagacccctgctatagccagagaacaataaagaagggagaccaggaaaaaaaaaaaaaaaaaaaaaaaaaaaaaaaaaaaaaaaaaaaaaaaaaaaaaaaaaaaaaa

SEQ ID NO: 29127 - DNA, 4872 bp, Homo Sapiens
tattcagatattctccagattcctaaagattagagatcatttctcattctcctaggagtactcacttcaggaagcaaccagataaaagagaggtgcaacggaagccagaacattcctcctggaaattcaacctgtttcgcagtttctcgaggaatcagcattcagtcaatccgggccgggagcagtcatctgtggtgaggctgattggctgggcaggaacagcgccggggcgtgggctgagcacagccgcttcgctctctttgccacaggaagcctgagctcattcgagtagcggctcttccaagctcaaagaagcagaggccgctgttcgtttcctttaggtctttccactaaagtcggagtatcttcttccaaaatttcacgtcttggtggccgttccaaggagcgcgaggtcggaatggatcttgaaggggaccgcaatggaggagcaaagaagaagaacttttttaaactgaacaataaaagtgaaaaagataagaaggaaaagaaaccaactgtcagtgtattttcaatgtttcgctattcaaattggcttgacaagttgtatatggtggtgggaactttggctgccatcatccatggggctggacttcctctcatgatgctggtgtttggagaaatgacagatatctttgcaaatgcaggaaatttagaagatctgatgtcaaacatcactaatagaagtgatatcaatgatacagggttcttcatgaatctggaggaagacatgaccaggtatgcctattattacagtggaattggtgctggggtgctggttgctgcttacattcaggtttcattttggtgcctggcagctggaagacaaatacacaaaattagaaaacagttttttcatgctataatgcgacaggagataggctggtttgatgtgcacgatgttggggagcttaacacccgacttacagatgatgtctccaagattaatgaaggaattggtgacaaaattggaatgttctttcagtcaatggcaacatttttcactgggtttatagtaggatttacacgtggttggaagctaacccttgtgattttggccatcagtcctgttcttggactgtcagctgctgtctgggcaaagatactatcttcatttactgataaagaactcttagcgtatgcaaaagctggagcagtagctgaagaggtcttggcagcaattagaactgtgattgcatttggaggacaaaagaaagaacttgaaaggtacaacaaaaatttagaagaagctaaaagaattgggataaagaaagctattacagccaatatttctataggtgctgctttcctgctgatctatgcatcttatgctctggccttctggtatgggaccaccttggtcctctcaggggaatattctattggacaagtactcactgtattcttttctgtattaattggggcttttagtgttggacaggcatctccaagcattgaagcatttgcaaatgcaagaggagcagcttatgaaatcttcaagataattgataataagccaagtattgacagctattcgaagagtgggcacaaaccagataatattaagggaaatttggaattcagaaatgttcacttcagttacccatctcgaaaagaagttaagatcttgaagggtctgaacctgaaggtgcagagtgggcagacggtggccctggttggaaacagtggctgtgggaagagcacaacagtccagctgatgcagaggctctatgaccccacagaggggatggtcagtgttgatggacaggatattaggaccataaatgtaaggtttctacgggaaatcattggtgtggtgagtcaggaacctgtattgtttgccaccacgatagctgaaaacattcgctatggccgtgaaaatgtcaccatggatgagattgagaaagctgtcaaggaagccaatgcctatgactttatcatgaaactgcctcataaatttgacaccctggttggagagagaggggcccagttgagtggtgggcagaagcagaggatcgccattgcacgtgccctggttcgcaaccccaagatcctcctgctggatgaggccacgtcagccttggacacagaaagcgaagcagtggttcaggtggctctggataaggccagaaaaggtcggaccaccattgtgatagctcatcgtttgtctacagttcgtaatgctgacgtcatcgctggtttcgatgatggagtcattgtggagaaaggaaatcatgatgaactcatgaaagagaaaggcatttacttcaaacttgtcacaatgcagacagcaggaaatgaagttgaattagaaaatgcagctgatgaatccaaaagtgaaattgatgccttggaaatgtcttcaaatgattcaagatccagtctaataagaaaaagatcaactcgtaggagtgtccgtggatcacaagcccaagacagaaagcttagtaccaaagaggctctggatgaaagtatacctccagtttccttttggaggattatgaagctaaatttaactgaatggccttattttgttgttggtgtattttgtgccattataaatggaggcctgcaaccagcatttgcaataatattttcaaagattataggggtttttacaagaattgatgatcctgaaacaaaacgacagaatagtaacttgttttcactattgtttctagcccttggaattatttcttttattacatttttccttcagggtttcacatttggcaaagctggagagatcctcaccaagcggctccgatacatggttttccgatccatgctcagacaggatgtgagttggtttgatgaccctaaaaacaccactggagcattgactaccaggctcgccaatgatgctgctcaagttaaaggggctataggttccaggcttgctgtaattacccagaatatagcaaatcttgggacaggaataattatatccttcatctatggttggcaactaacactgttactcttagcaattgtacccatcattgcaatagcaggagttgttgaaatgaaaatgttgtctggacaagcactgaaagataagaaagaactagaaggttctgggaagatcgctactgaagcaatagaaaacttccgaaccgttgtttctttgactcaggagcagaagtttgaacatatgtatgctcagagtttgcaggtaccatacagaaactctttgaggaaagcacacatctttggaattacattttccttcacccaggcaatgatgtatttttcctatgctggatgtttccggtttggagcctacttggtggcacataaactcatgagctttgaggatgttctgttagtattttcagctgttgtctttggtgccatggccgtggggcaagtcagttcatttgctcctgactatgccaaagccaaaatatcagcagcccacatcatcatgatcattgaaaaaacccctttgattgacagctacagcacggaaggcctaatgccgaacacattggaaggaaatgtcacatttggtgaagttgtattcaactatcccacccgaccggacatcccagtgcttcagggactgagcctggaggtgaagaagggccagacgctggctctggtgggcagcagtggctgtgggaagagcacagtggtccagctcctggagcggttctacgaccccttggcagggaaagtgctgcttgatggcaaagaaataaagcgactgaatgttcagtggctccgagcacacctgggcatcgtgtcccaggagcccatcctgtttgactgcagcattgctgagaacattgcctatggagacaacagccgggtggtgtcacaggaagagattgtgagggcagcaaaggaggccaacatacatgccttcatcgagtcactgcctaataaatatagcactaaagtaggagacaaaggaactcagctctctggtggccagaaacaacgcattgccatagctcgtgcccttgttagacagcctcatattttgcttttggatgaagccacgtcagctctggatacagaaagtgaaaaggttgtccaagaagccctggacaaagccagagaaggccgcacctgcattgtgattgctcaccgcctgtccaccatccagaatgcagacttaatagtggtgtttcagaatggcagagtcaaggagcatggcacgcatcagcagctgctggcacagaaaggcatctatttttcaatggtcagtgtccaggctggaacaaagcgccagtgaactctgactgtatgagatgttaaatactttttaatatttgtttagatatgacatttattcaaagttaaaagcaaacacttacagaattatgaagaggtatctgtttaacatttcctcagtcaagttcagagtcttcagagacttcgtaattaaaggaacagagtgagagacatcatcaagtggagagaaatcatagtttaaactgcattataaattttataacagaattaaagtagattttaaaagataaaatgtgtaattttgtttatattttcccatttggactgtaactgactgccttgctaaaagattatagaagtagcaaaaagtattgaaatgtttgcataaagtgtctataataaaactaaactttcatgtgactggagtcatcttgtccaaactgcctgtgaatatatcttctctcaattggaatattgtagataacttctgctttaaaaaagttttctttaaatatacctactcatttttgtgggaatggttaagcagtttaaataattcctgttgtatatgtctattcacattgggtcttacagaaccatctggcttcattcttcttggacttgatcctgctgattcttgcatttccacat

SEQ ID NO: 29128 - DNA, 6732 bp, Homo Sapiens
gagagcgcggccgggacggttggagaagaaggcggctccccggaagggggagagacaaactgccgtaacctctgccgttcaggaacccggttacttatttattcgttaccctttttcttcttcctcccccaaaaaccttttccttttcccttctttttttttcctttttgggagctgaaaaatttccggtaagggaaagaagggctcctttcgctccttatttcgccgcctccttccctccgccaccttcccctcctccggctttttcctcccaactcggggaggtccttcccggtggccgccctgacgaggtctgagcacctaggcggaggcggcgcaggctttttgtagtgaggtttgcgcctgcgcaggcgcctgcctccgccatgcacgggggtggccccccctcgggggacagcgcatgcccgctgcgcaccatcaagagagtccagttcggagtcctgagtccggatgaactgaagcgaatgtctgtgacggagggtggcatcaaatacccagagacgactgagggaggccgccccaagcttggggggctgatggacccgaggcagggggtgattgagcggactggccgctgccaaacatgtgcaggaaacatgacagagtgtcctggccactttggccacattgaactggccaagcctgtgtttcacgtgggcttcctggtgaagacaatgaaagttttgcgctgtgtctgcttcttctgctccaaactgcttgtggactctaacaacccaaagatcaaggatatcctggctaagtccaagggacagcccaagaagcggctcacacatgtctacgacctttgcaagggcaaaaacatatgcgagggtggggaggagatggacaacaagttcggtgtggaacaacctgagggtgacgaggatctgaccaaagaaaagggccatggtggctgtgggcggtaccagcccaggatccggcgttctggcctagagctgtatgcggaatggaagcacgttaatgaggactctcaggagaagaagatcctgctgagtccagagcgagtgcatgagatcttcaaacgcatctcagatgaggagtgttttgtgctgggcatggagccccgctatgcacggccagagtggatgattgtcacagtgctgcctgtgcccccgctctccgtgcggcctgctgttgtgatgcagggctctgcccgtaaccaggatgacctgactcacaaactggctgacatcgtgaagatcaacaatcagctgcggcgcaatgagcagaacggcgcagcggcccatgtcattgcagaggatgtgaagctcctccagttccatgtggccaccatggtggacaatgagctgcctggcttgccccgtgccatgcagaagtctgggcgtcccctcaagtccctgaagcagcggttgaagggcaaggaaggccgggtgcgagggaacctgatgggcaaaagagtggacttctcggcccgtactgtcatcacccccgaccccaacctctccattgaccaggttggcgtgccccgctccattgctgccaacatgacctttgcggagattgtcacccccttcaacattgacagacttcaagaactagtgcgcagggggaacagtcagtacccaggcgccaagtacatcatccgagacaatggtgatcgcattgacttgcgtttccaccccaagcccagtgaccttcacctgcagaccggctataaggtggaacggcacatgtgtgatggggacattgttatcttcaaccggcagccaactctgcacaaaatgtccatgatggggcatcgggtccgcattctcccatggtctacctttcgcttgaatcttagcgtgacaactccgtacaatgcagactttgacggggatgagatgaacttgcacctgccacagtctctggagacgcgagcagagatccaggagctggccatggttcctcgcatgattgtcaccccccagagcaatcggcctgtcatgggtattgtgcaggacacactcacagcagtgcgcaaattcaccaagagagacgtcttcctggagcggggtgaagtgatgaacctcctgatgttcctgtcgacgtgggatgggaaggtcccacagccggccatcctaaagccccggcccctgtggacaggcaagcaaatcttctccctcatcatacctggtcacatcaattgtatccgtacccacagcacccatcccgatgatgaagacagtggcccttacaagcacatctctcctggggacaccaaggtggtggtggagaatggggagctgatcatgggcatcctgtgtaagaagtctctgggcacgtcagctggctccctggtccacatctcctacctagagatgggtcatgacatcactcgcctcttctactccaacattcagactgtcattaacaactggctcctcatcgagggtcatactattggcattggggactccattgctgattctaagacttaccaggacattcagaacactattaagaaggccaagcaggacgtaatagaggtcatcgagaaggcacacaacaatgagctggagcccaccccagggaacactctgcggcagacgtttgagaatcaggtgaaccgcattcttaacgatgcccgagacaagactggctcctctgctcagaaatccctgtctgaatacaacaacttcaagtctatggtcgtgtccggagctaaaggttccaagattaacatctcccaggtcattgctgtcgttggacagcagaacgtcgagggcaagcggattccatttggcttcaagcaccggactctgcctcacttcatcaaggatgactacgggcctgagagccgtggctttgtggagaactcctacctagccggcctcacacccactgagttctttttccacgccatggggggtcgtgaggggctcattgacacggctgtcaagactgctgagactggatacatccagcggcggctgatcaagtccatggagtcagtgatggtgaagtacgacgcgactgtgcggaactccatcaaccaggtggtgcagctgcgctacggcgaagacggcctggcaggcgagagcgttgagttccagaacctggctacgcttaagccttccaacaaggcttttgagaagaagttccgctttgattataccaatgagagggccctgcggcgcactctgcaggaggacctggtgaaggacgtgctgagcaacgcacacatccagaacgagttggagcgggaatttgagcggatgcgggaggatcgggaggtgctcagggtcatcttcccaactggagacagcaaggtcgtcctcccctgtaacctgctgcggatgatctggaatgctcagaaaatcttccacatcaacccacgccttccctccgacctgcaccccatcaaagtggtggagggagtcaaggaattgagcaagaagctggtgattgtgaatggggatgacccactaagtcgacaggcccaggaaaatgccacgctgctcttcaacatccacctgcggtccacgttgtgttcccgccgcatggcagaggagtttcggctcagtggggaggccttcgactggctgcttggggagattgagtccaagttcaaccaagccattgcgcatcccggggaaatggtgggggctctggctgcgcagtcccttggagaacctgccacccagatgaccttgaataccttccactatgctggtgtgtctgccaagaatgtgacgctgggtgtgccccgacttaaggagctcatcaacatttccaagaagccaaagactccttcgcttactgtcttcctgttgggccagtccgctcgagatgctgagagagccaaggatattctgtgccgtctggagcatacaacgttgaggaaggtgactgccaacacagccatctactatgaccccaacccccagagcacggtggtggcagaggatcaggaatgggtgaatgtctactatgaaatgcctgactttgatgtggcccgaatctccccctggctgttgcgggtggagctggatcggaagcacatgactgaccggaagctcaccatggagcagattgctgaaaagatcaatgctggttttggtgacgacttgaactgcatctttaatgatgacaatgcagagaagctggtgctccgtattcgcatcatgaacagcgatgagaacaagatgcaagaggaggaagaggtggtggacaagatggatgatgatgtcttcctgcgctgcatcgagtccaacatgctgacagatatgaccctgcagggcatcgagcagatcagcaaggtgtacatgcacttgccacagacagacaacaagaagaagatcatcatcacggaggatggggaattcaaggccctgcaggagtggatcctggagacggacggcgtgagcttgatgcgggtgctgagtgagaaggacgtggaccccgtacgcaccacgtccaatgacattgtggagatcttcacggtgctgggcattgaagccgtgcggaaggccctggagcgggagctgtaccacgtcatctcctttgatggctcctatgtcaattaccgacacttggctctcttgtgtgataccatgacctgtcgtggccacttgatggccatcacccgacacggagtcaaccgccaggacacaggaccactcatgaagtgttcctttgaggaaacggtggacgtgcttatggaagcagccgcacacggtgagagtgaccccatgaagggggtctctgagaatatcatgctgggccagctggctccggccggcactggctgctttgacctcctgcttgatgcagagaagtgcaagtatggcatggagatccccaccaatatccccggcctgggggctgctggacccaccggcatgttctttggttcagcacccagtcccatgggtggaatctctcctgccatgacaccttggaaccagggtgcaacccctgcctatggcgcctggtcccccagtgttgggagtggaatgaccccaggggcagccggcttctctcccagtgctgcgtcagatgccagcggcttcagcccaggttactcccctgcctggtctcccacaccgggctccccggggtccccaggtccctcaagcccctacatcccttcaccaggtggtgccatgtctcccagctactcgccaacgtcacctgcctacgagccccgctctcctgggggctacacaccccagagtccctcttattcccccacttcaccctcctactcccctacctctccatcctattctccaaccagtcccaactatagtcccacatcacccagctattcgccaacgtcacccagctactcaccgacctctcccagctactcacccacctctcccagctactcgcccacctctcccagctattcgcccacctctcccagctactcacccacttcccctagctattcgcccacttcccctagctactcgccaacgtctcccagctactcgccgacatctcccagctactcgccaacttcacccagctattctcccacttctcccagctactcacctacctctccaagctattcacccacctcccccagctactcacccacttccccaagttactcacccaccagcccgaactattctccaaccagtcccaattacaccccaacatcacccagctacagcccgacatcacccagctattcccctactagtcccaactacacacctaccagccctaactacagcccaacctctccaagctactctccaacatcacccagctattccccgacctcaccaagttactccccttccagcccacgatacacaccacagtctccaacctataccccaagctcacccagctacagccccagttcgcccagctacagcccaacctcacccaagtacaccccaaccagtccttcttatagtcccagctccccagagtataccccaacctctcccaagtactcacctaccagtcccaaatattcacccacctctcccaagtactcgcctaccagtcccacctattcacccaccaccccaaaatactccccaacatctcctacttattccccaacctctccagtctacaccccaacctctcccaagtactcacctactagccccacttactcgcccacttcccccaagtactcgcccaccagccccacctactcgcccacctcccccaaaggctcaacctactctcccacttcccctggttactcgcccaccagccccacctacagtctcacaagcccggctatcagcccggatgacagtgacgaggagaactgagggcacgtggggtgcggcagcgggctagggcccagggcagcttgcccgtgctgccgtgcagttcttgcctccctcacggggcgtcacccccagcccagctccgttgtacataaataccttgtgacagagctcccggtgaacttctggatcccgtttctgatgcagattcttgtcttgttctccacttgtgctgttagaactcactggcccagtggtgttctacctcctaccccacccaccccctgcctgtccccaaattgaagatccttccttgcctgtggcttgatgcggggcgggtaaagggtattttaacttaggggtagttcctgctgtgagtggttacagctgatcctcgggaagaacaaagctaaagctgccttttgtctgttattttatttttttgaagtttaaataaagtttactaattttgacc

SEQ ID NO: 29129 - DNA, 1241 bp, Homo Sapiens
agcgcgcaggcgcagccggccggcagtcccgtcagctgtcccagagcctgtgtcgcgcccgtgccggtagcgcccgtgccggtagcgccgctgccaccgctcaccatgggcccgggtcctcggctgctgctacctctcgtgctttgcgtggggctcggcgcacttgtgttttcttcgggggccgagggcttccgcaagcgaggcccctcggtgacggccaaggtcttctttgatgtgaggattggagacaaagatgttggcagaattgtgattggcctctttggaaaagttgtgcccaagacagtggaaaattttgttgctctagcaacaggagagaaaggatatggatataaaggaagcaagtttcatcgtgtcatcaaggatttcatgattcaaggaggtgacatcaccactggagatggcactgggggtgtgagcatctatggtgagacatttccagatgagaacttcaagctgaagcactatggcattgggtgggtcagcatggccaacgctgggcctgacaccaatggctctcagttctttatcaccttgaccaagcccacctggttggacggcaaacatgtggtgtttggaaaagtcattgatgggatgacagtggtgcactccatagagctccaagcaactgatgggcatgaccgtccactcaccaactgctcgatcatcaacagtggcaagatagacgtgaaaacgccttttgtggttgagatcgctgattggtgacacaactggcagaaaacaaggatatgctttggcaggggtgtgtgtgtgtgtgtgtgtgtgtgtgtgttgtgttgtctttcaattatttgcttttttttttttactttctttttgtattctatcccagatcacaggaaagttataaaaatcaaaccgtcaccctttagtttgcttgaactttagtaaaccacctgcttagggactttgaacttaaatatatccccttcctcaagtggtgctattttaaaactaaaaaaaactttgaattggctatttttttaatgcaatattttttttctgaattcattatgatccccatattgggtaatgctgaacatttatctgaaacagatgaggatattattattttgtatccaaacagaaattcagataaagggaaatttgactagtgtaatctgagatatgtcatagggatttctttctgacaaaagggtgctttgctgttctttatattaaatacttttagatcaaaaaaa

SEQ ID NO: 29130 - DNA, 4425 bp, Homo Sapiens
gcgcgcgtggggctccattccgcggtgctgggtctccgtgccggggtgggtgctcgtgtgtgcgcttctcctccccatcccccttcccccaagaataaaagaagaaccgggaggcgtgctcagaaaataaataaataaccaccacacacgcgcagcccggagcgagtcggcggggctggcggcagcggcggaggaggagtgaaggcggcggcggcggaggagggacgcgcggaaaaggcagcaactttaaagccagctcagagcctagacctccagccgagcggtttgcagcgcggcggcggcggcggcggcggcggcggcggcgttgagtgtctggcccgccggtccggtcggggtgtgcagtcggacggacgagcagcgcgtcgctgtcctccggcagctggagatgtccgagcccaaggcaattgatcccaagttgtcgacgaccgacagggtggtgaaagctgttccatttcctccaagtcaccggcttacagcaaaagaagtgtttgataatgatggaaaacctcgtgtggatatcttaaaggcgcatcttatgaaggagggaaggctggaagagagtgttgcattgagaataataacagagggtgcatcaattcttcgacaggaaaaaaatttgctggatattgatgcgccagtcactgtttgtggggacattcatggacaattctttgatttgatgaagctctttgaagtcgggggatctcctgccaacactcgctacctcttcttaggggactatgttgacagagggtacttcagtattgaatgtgtgctgtatttgtgggccttgaaaattctctaccccaaaacactgtttttacttcgtggaaatcatgaatgtagacatctaacagagtatttcacatttaaacaagaatgtaaaataaagtattcagaacgcgtatatgatgcctgtatggatgcctttgactgccttcccctggctgccctgatgaaccaacagttcctgtgtgtgcatggtggtttgtctccagagattaacactttagatgatatcagaaaattagaccgattcaaagaaccacctgcatatggacctatgtgtgatatcctgtggtcagaccccctggaagattttggaaatgagaagactcaggaacatttcactcacaacacagtcagggggtgttcatacttctacagttacccggctgtatgtgaattcttacagcacaataacttgttatctatactccgagcccacgaagcccaagatgcagggtaccgcatgtacaggaaaagccaaacaacaggcttcccttctctaattacaattttttcagcaccaaattacttagatgtatacaataacaaagctgcagtattgaagtatgagaacaatgttatgaatatcaggcaattcaactgttctcctcatccatactggcttccaaatttcatggatgtttttacttggtcccttccatttgttggggaaaaagtgactgagatgctggtaaatgtcctcaacatctgctcagatgatgaactagggtcagaagaagatggatttgatggtgcaacagctgcagcccggaaagaggtgataaggaacaagatccgagcaataggcaaaatggccagagtgttctcagtgctcagagaagagagtgagagtgtgctgacgctgaaaggcttgaccccaactggcatgctccccagcggagtactttctggagggaagcaaaccctgcaaagcgctactgttgaggctattgaggctgatgaagctatcaaaggattttcaccacaacataagatcactagcttcgaggaagccaagggcttagaccgaattaatgagaggatgccgcctcgcagagatgccatgccctctgacgccaaccttaactccatcaacaaggctctcacctcagagactaacggcacggacagcaatggcagtaatagcagcaatattcagtgaccacttcctgttcacttttttttttttttttttttttttttgagctgcggggcatgatggggattgctgcatatcagcagttggatgttcttgcctctgacagtagcttatttgctctgggggccaggaattggattcagtttacactatcattaaaaaagagggagagagataataaactatattttggtggggatggtgattaaacacctcttttgggtatgccttttaaaaatgcttatagagaaaaaaattttaaaaagaaagctaatgctagtatatactgcaatgttaggggaatgaacatgttttcctactgcattggggacttctagataggttaatgaaaggccttttattctgttactggacatgaaaactttgtctaatttcttactctattgtacgtttacagtcgcagcactaaaaatggatgacatcaaacatttttaacaaaatgatgtacaaactaaggactatttattgataatgttttgctactcttgtcagacaatggctataaactgaattaggcagtcttaaaaaaaaaaaaaaaacagaaaaagaaaaaaaagaacgttgcaaatttgttaaaatgccaaaaaggacagtttaattttgtacagattatgcttacctcaggtttctttagtgtgcttgaatgcccttctttccatataacacttatcttcttcttaattcggcaatggaatatcttttaagttttaaaaaaactggaataattatatctatcttttttgccgtttatatttaggggtttttgttgataaaatcaagtcttggttgtggcttgctgaattaaatatttatgagtggtgcatttttaagtatagtgaacaagacaccatattaagtacagtgataaagcatctatattctgtaaaaaaaaaaaaaatctgcctatgcatgttttttaagaaaaaaaaaatggctgtatcggcctgtatgggactgtaatgcgcttagtggtctgacatatactggaaatgtatgtatactggcgtactttatattctctaaaatgcttaatgcctttgaaattttgtaatcaaaaaaaagctttgaaaaaatctaaaggggagagtattctttaaagtttttaacataagcttgtcaatgcacatgtagatggttagcatgtttagcaaaccttgtgaaattataataagtttgtagttacatgtgaaactctaaatgcatggcaactgttaatgtcataacagtttagttattttgttctgttctgtcatgtgccacaaaatatgtacttttttcacttttttccctttgtatatcagttacgggttacaactggttcattctgaaaacaacaacaacaaaagtccattcatattttttaacaattgtataagtgcccaagtaattcactacagcctaaagccttgcctttgtaatttgacttctgacatgttggcaatcaaagcatgcacttgtaacaatgaaaaagaaaaagcattttatattactactcaataaaatgtgcatgaacttacagaattctcatccttccactgagtccgctgaagggatttatgtgcacaaccaccatgtgtcttctaggtgctggcccaccaccacacatcacaggctgatttccacaggcttcttcctaggggcctcgtgatctgaggggtggtgcctacttccactgtaagaaagaatcttggtggatttgtgtctcaaatcagataagagaagcctgtttaaagagcagatgccatcttctggcttcctcaaggagccagttaaaaaaccagagcattcctttttattgaaaaataaaattaatttgttatcaggttgtttcagttgtattggatgccctatctatctgctaaagcaaaaagtactaggctactaagtgcattttcatcacagaaaagagttgcatttgtattaacaagaaatttgtatacccacgcttcagctactatctaatcatcacccgaagatttaagatacaccaaatttcagtttgtttgtaacattgttcatctttagtgcactttgttttatataataaagtatgcctgttatattaaataataagaatatggcaattagcgatatagcatacccaaacaaagatgttctcgatacagtctggcaaagactatcccaaggttattttaatgaattcagacattttttcctgtggatatttctccatcctaaaaaaagtggcaaccaaggaaaatatttagatgcaacttactagagtgatgatgtgaaagaaatggtgattctggtatcatggtgtttattttctttcttataactgcagagaaaatatcctgactaaaaaaatttcatttttttggattcctttcttttacaaattgtgctgaggcaactatggcatagaaataaacatttgacattaaaataagtaaaaaaaaaaaaaaaaaaaa

SEQ ID NO: 29131 - DNA, 2353 bp, Homo Sapiens
ggtttcatatgaactctcccgccacccgggaacagtggctgccaccgtttgtgttttcccgagtttgaattcttgcaggtgaccaagatggagttttctggaagaaagtggaggaagctgaggttggcaggtgaccagaggaatgcttcctaccctcattgccttcagttttacttgcagccaccttctgaaaacatatctttaatagaatttgaaaacttggctattgatagagttaaattgttaaaatcagttgaaaatcttggagtgagctatgtgaaaggaactgaacaataccagagtaagttggagagtgagcttcggaagctcaagttttcctacagagaaaacttagaagatgaatatgaaccacgaagaagagatcatatttctcattttattttgcggcttgcttattgccagtctgaagaacttagacgctggttcattcaacaagaaatggatctccttcgatttagatttagtattttacccaaggataaaattcaggatttcttaaaggatagccaattgcagtttgaggctataagtgatgaagagaagactcttcgagaacaggagattgttgcctcatcaccaagtttaagtggacttaagttggggttcgagtccatttataagatcccttttgctgatgctctggatttgtttcgaggaaggaaagtctatttggaagatggctttgcttacgtaccacttaaggacattgtggcaatcatcctgaatgaatttagagccaaactgtccaaggctttggcattaacagccaggtccttgcctgctgtgcagtctgatgaaagacttcagcctctgctcaatcacctcagtcattcctacactggccaagattacagtacccagggaaatgttgggaagatttctttagatcagattgatttgctttctaccaaatccttcccaccttgcatgcgtcagttacataaagccttgcgggaaaatcaccatcttcgtcatggaggccgaatgcagtatggcctatttctgaagggcattggtttaactttggaacaggcattgcagttctggaagcaagaatttatcaaaggaaagatggatccagacaagtttgataaaggttactcttacaacatccgtcacagctttggaaaggaaggcaagaggacagactatacacctttcagttgcctgaagattattctgtccaatccaccaagccaaggggattatcatgggtgcccattccgtcacagtgatccagagctgctgaagcaaaagttgcagtcatacaagatctctcctggagggataagccagattttggatttagtaaaggggacacattaccaggtagcctgtcaaaaatactttgagatgatacacaatgtggatgattgtggcttttctttgaatcatcctaatcagttcttttgtgagagccaacgtattctaaatggtggtaaagacataaagaaggaacctatccaaccagaaactcctcaacccaaaccaagtgtccagaaaaccaaggatgcatcatctgctctggcctctttaaattcctctctggaaatggatatggaaggactagaagattactttagtgaagattcttaggcagttttataaccctttttcctcaatagcctgtttcctgtttttaagattttgcctttgttgttgaaaaagggtttcactctgtcaccaaggcttagtgcagtgacacaattacagctgattgcagccttgaccttcccagctcaagtgatcctcctacctcagcctcccaagtagttaggaccacaggtgtgcacctcatatccagataatttttttcaatttttttttgtagaggtggggggtctccctatgttgcccaggcagatctcagactcctgggctcaagcgatcctcacacctcagcgtcccagagtgctgggattacggttgtgagccactgtgcctggcctttttttttttttttaacctttttgtttaacttctctcttcactgcatcccaatccatctacaggcatgcacacttattaggaaaggaggtttgaggtaacaacagagactttcactatattttgctttgacagaaggaaagaggaggagtttctattaaaatctgtcacttgagtgatgtcatttaagtcctattttaggagataaaaacagctttggggactggttaaagtcccccagaaactacaataaagaacaacttttgttttaactcttaatcactttgtaattttgactcaatccttttctggaccatttttgttaataaatatcaaagtgtaaaaaaaaaaaaaaaaaaaaaaaaaaaaaaaaaaaaaaaaaaaa

SEQ ID NO: 29132 - DNA, 3162 bp, Homo Sapiens
agagccaccgggctggggaccggggagcggaggctgaaatccccagacgccggttttctgggctgggctttctgccttactcactccttctccctctttctggattttaccgaccgttcgcgaaacagctttccacacaatggagcttcatgtcctcgtgcaggaagtactcatcgactgatgtggcagactttgctccctggcaaaactaaagaactctcctattcatggaggcgaacactgaggatgctttccacatgaaccctgaagtgaacttctgatacatttcctgcagcaagagaaggcagccaacatgaaggaaaatgtggcatctgcaaccgttttcactctgctactttttctcaacacctgccttctgaatggacagttacctcctggaaaacctgagatctttaaatgtcgttctcccaataaggaaacattcacctgctggtggaggcctgggacagatggaggacttcctaccaattattcactgacttaccacagggaaggagagacactcatgcatgaatgtccagactacataaccggtggccccaactcctgccactttggcaagcagtacacctccatgtggaggacatacatcatgatggtcaatgccactaaccagatgggaagcagtttctcggatgaactttatgtggacgtgacttacatagttcagccagaccctcctttggagctggctgtggaagtaaaacagccagaagacagaaaaccctacctgtggattaaatggtctccacctaccctgattgacttaaaaactggttggttcacgctcctgtatgaaattcgattaaaacccgagaaagcagctgagtgggagatccattttgctgggcagcaaacagagtttaagattctcagcctacatccaggacagaaataccttgtccaggttcgctgcaaaccagaccatggatactggagtgcatggagtccagcgaccttcattcagatacctagtgacttcaccatgaatgatacaaccgtgtggatctctgtggctgtcctttctgctgtcatctgtttgattattgtctgggcagtggctttgaagggctatagcatggtgacctgcatctttccgccagttcctgggccaaaaataaaaggatttgatgctcatctgttggagaagggcaagtctgaagaactactgagtgccttgggatgccaagactttcctcccacttctgactatgaggacttgctggtggagtatttagaagtagatgatagtgaggaccagcatctaatgtcagtccattcaaaagaacacccaagtcaaggtatgaaacccacatacctggatcctgacactgactcaggccgggggagctgtgacagcccttcccttttgtctgaaaagtgtgaggaaccccaggccaatccctccacattctatgatcctgaggtcattgagaagccagagaatcctgaaacaacccacacctgggacccccagtgcataagcatggaaggcaaaatcccctattttcatgctggtggatccaaatgttcaacatggcccttaccacagcccagccagcacaaccccagatcctcttaccacaatattactgatgtgtgtgagctggctgtgggccctgcaggtgcaccggccactctgttgaatgaagcaggtaaagatgctttaaaatcctctcaaaccattaagtctagagaagagggaaaggcaacccagcagagggaggtagaaagcttccattctgagactgaccaggatacgccctggctgctgccccaggagaaaaccccctttggctccgctaaacccttggattatgtggagattcacaaggtcaacaaagatggtgcattatcattgctaccaaaacagagagagaacagcggcaagcccaagaagcccgggactcctgagaacaataaggagtatgccaaggtgtccggggtcatggataacaacatcctggtgttggtgccagatccacatgctaaaaacgtggcttgctttgaagaatcagccaaagaggccccaccatcacttgaacagaatcaagctgagaaagccctggccaacttcactgcaacatcaagcaagtgcaggctccagctgggtggtttggattacctggatcccgcatgttttacacactcctttcactgatagcttgactaatggaatgattggttaaaatgtgatttttcttcaggtaacactacagagtacgtgaaatgctcaagaatgtagtcagactgacactactaaagctcccagctcctttcatgctccatttttaaccacttgcctctttctccagcagctgattccagaacaaatcattatgtttcctaactgtgatttgtagatttactttttgctgttagttataaaactatgtgttcaatgaaataaaagcacactgcttagtattcttgagggacaatgccaataggtatatcctctggaaaaggctttcatgatttgacatgggacagacggaaatgaaattgtcaaaattgtttaccatagaaagatgacaaaagaaaattttccacataggaaaatgccatgaaaattgcttttgaaaaacaactgcataacctttacactcctcgtccattttattaggattacccaaatataaccatttaaagaaagaatgcattccagaacaaattgtttacataagttcctataccttactgacacattgctgatatgcaagtaagaaataatgcctccaatttttttcttaaaatagtttagatatgttaagcatggattttccccctaaattctactctaaagcttctataaaatatagtttggaaataaaaatgttcttacacaaggggcaaatgaatttcatgtgaatccctttaggatgttttcctccttcatttcagcatgatagataatttattatacaccttagtctttccttagttaaaaaaaaattccctaaagactaacttgaaaagaaaaccacagcaggatgctaatggaattactgccttactgtacatacaaattctactttaatataaacccataagtttaactgtatttttgaagactatttttctatgacttaggtaaaataaaagactattttctattttcccagaaaaaaaaaaaaaaaa

SEQ ID NO: 29133 - DNA, 4490 bp, Homo Sapiens
cacgcgtccgcgagtagcggagcgggacccgctgatgctcaccccatttagagaaagaaatccacctccccaaccccaatcaagaacctgctattgtatatcatcatagagccagattacctagggaatcatcatccagggacgtgccagaaaccacaagaaaacatggggagggttttcctcacgggagaaaaagccaattccatattaaaacgctacccaagagctaatgggttttttgaagaaataagacagggcaacattgagcgtgagtgcaaagaagaattctgtacatttgaagaagcaagagaagcttttgaaaataatgaaaaaactaaggagttttggagcacctacacaaaagcgcaacaaggggagagtaaccgaggaagtgactggtttcagttttaccttacctttccgttaatctttggcctcttcattatcctccttgtcattttcctaatctggagatgcttcctaagaaacaaaactcgtagacagacagtgactgaaggccacattcctttccctcagcaccttaatattatcaccccaccccccccaccagatgaagtgtttgacagcagtggattgtctccaggctttctgggatatgtagttgggcgctcagattccgtctctactcgcctgtccaattgtgatcccccgccaacctatgaggaagccactggccaagtgaacctgcagaggagtgaaacagaacctcatttagacccacccccagagtatgaggacatagtcaactccaactcagccagtgccattcctatggtgcctgtggtcaccaccatcaaatgaagctgcaaacttctttttactctaatcatttttaaaatactaatggaagaactttctagcactttaccactacataaatgttcattgacttattttattggactcttaccgcataccacttcacacttgttttattttctttagttttgtttcttgttatagaatcattatccatgctcatttttgctaggggaaatatatgaagagggaaaacatactaatgggggtctttctgtgatgtgatgagacatacatgtaagtgtatatatgtgtgtataggcatatatacgtgtgtatgcatcaacacagtatatgtaaaactgtcttaaaaatccattaacttctacctaaatcacctggaaggagagcattactcaccaaaattgcaaaacaagggtatcaagaatttgtgtaatagccagtgacatgctgtagatttttgcaaactggatgtacttagcatgttttctaattctgactggcttttgttaacttgataattcttcatctaccttaaaaagaaaaaaattacacatagtcattcttgatgttataaatagagaaaaagtgtgtgtgagcaataatgcataagctactgataacttgcttacagcagatagcaataaggtatttggtggcattcggcttgttttgtaatagggattttttttttggttgaccactcccccacacttccaaaattaaacagtgttttcttagcatcttgaatatctcctgcggtgtatattaacatcttgatgagacagatttccaggcaacaaaataatttctaaaatggatatatgtgtggattaatgacaggcagtaaatacccattactcctttactcatagctggtaaaattattcccactgttttattgccttttactgtacgttctacactctgtcctactcccacagaattttcaagcccttaagagtttagttaaaataaaatttttgaaattattgtcttaatatttttatataggctgatgtctttgcctcaagattgttaggaggtaattttccattgaattatcaactgtgatttttatattgccctccaagtggtagaagaagattgcaaagtccatgttatgctaggtgcacaataaatctagtaatagccccacacagatctcatcattgttgctacttccttttgtattttcatcaggtatttttttaactgtagggtttttacttttttcttggagcagagagaacaggctgtaaatgggttgccaacataagctggctgagaaataaaagaaaacaagacagttgttcataaagtttcattttgtatgcactgatggcaaattcattaggtcagttaagggaaatatttgtaccacttccaaacttttcagcgttggataaaatgattgatgaggcaggcagaaggaatgtaggtttcaggtgtgtcatttcctgctgcttccagctccatccctacagactcctccccgagtcctgccctggaaccaaaggaaggaggaacactgaggggaatcctgaagtaggagtcagatgacctgaactcagatctccctctatcacatgcttgccaccactgtaccttgagcaagaatcatatctgaccctcaacctcctcaactctaaaatggggataacatcatttgtcctgcacttctctaagggctttacaaggatcaaataagatggtgtgtatgtaagaaatttgtaaaatgtgaagagctatctacactaagttcgtaatgttattattattgtgcttcatggagaattttcccctctgttttcctaaattgtatgagagctttcacacagtgagaaatagagcaggctgccccataaatgggtaacatattcctaatctgagtgtgtgggctgttagagaacccctgccatgctctggtctgttctgaaactgtgccaactgaaagatgatagtccacacagcacaaacaggtttaagcaaatgatagaaagggaagtaaggcgtgtgtgctagttaataggtttagtagcttttatggactaaaaatgattgattgtatcttgaccctggtctcagaaatgacatttttacttttgccatgagtacacatcagatatctttggcttctatttaaagctaaaggtagaagtgtttgatccagtgaactgtgtatgtatgtgtggggtttttttctttatttttaaatgaaaattaagacaccttttgtgtggacatgtttttgtctttaatgtcaggctttagattagaccagcagttttcaaagtatggccaatggacccctgggttccttgagagcctttcaggggggactatgagatcaaaatatttttattataatgtgaagacattgtcttttcactctatctcaaaaaaagtgttgcaaatgtaaaacattgccatcttctcacaaatctctttttttgtttttgaaaatatggccatttttcataaaatgttatttgtgttagcatgtaatgggtttactatgtttaaataagttaatactttaaaaattttcaggtttttttagtatggtgaatattgatagatataaacctcatgaacaaaagtactttggcatccagattctcaataaatgttaagagcgtaagtgtaagggggtccagagaccaaaagttttagagctacaggattagacataggagcaggatattctgttagtgtgatttcttgcaactttattttatattttaaactgctgatattggatataatgctgctttttagagacacctaaattgcagtatcagaatgaatgttgatgtttgaagccaaaaagccaaatgcttaaactgatcaatgactgtagctttttagactgttggtcaaagaacattctacttcacagtaatagctctatcagccacagatctcatggtggctgttgcatgataatgataggataaacaaaataccactgtcttcaagaaacattatcttaggtttgtttgtttggtttgagtttgatttggcttttatattttttaaaatcccttttgctaccccatctggttttataaactgagtttcttagcattcgttaaaattaaggggtttgtttggaataatatatattttttatgcttttgtctttcttacctgattgatattacattcacctttgattgttttttaaaagtttatttttacagaatatatttagtacctttcttaaggagtaactgaattgaatcaaccagtttgcatttaaataaaagaacaggctcagtggtcttcctgtagaatggtttacatgcctgcatgtgcagtagttgtgtctggaatcctagaattggcactttctgcctccttgctctaaatgtcacaaaaaattatacttccttaaagtaaatgtaatgatttcttcttttcctattgaccagtacagatagatatgttgtgtttgcttcatttttaatgatgacttcaagattgatgatgtgatccaataactgtggaggtagctttaacttggttctgtgtaaatagtatgtattttattataatatttctcattttaagatgcttggtttacattaaattatggtatttaactatttttatgtttatactaggtagggtctttcttatgtttctgtgtttttggtatgctaaataaagctatttttaaaccc

SEQ ID NO: 29134 - DNA, 3432 bp, Homo Sapiens
gcgagagcggagctccaagcccggcagcccgagaggaagatgaacagccccaggccagagcctctggcagagtggaccccgagccgcccccaggtagccaggagcggcctcagcggcagccgcaaactccagtagccgcccgtgctgcccgtggctggggcggagggcagccagagctggggaccaaggctccgcgccacctgcgcgcacagcctcacacctgaacgctgtcctcccgcagacgagaccggcgggcactgcaaagctgggactcgtctttgaaggaaaaaaaatagcgagtaagaaatccagcaccattcttcactgacccatcccgctgcacctcttgtttcccaagtttttgaaagctggcaactctgacctcggtgtccaaaaatcgacagccactgagaccggctttgagaagccgaagatttggcagtttccagactgagcaggacaaggtgaaagcaggttggaggcgggtccaggacatctgagggctgaccctgggggctcgtgaggctgccaccgctgctgccgctacagacccagccttgcactccaaggctgcgcaccgccagccactatcatgtccactcccggggtcaattcgtccgcctccttgagccccgaccggctgaacagcccagtgaccatcccggcggtgatgttcatcttcggggtggtgggcaacctggtggccatcgtggtgctgtgcaagtcgcgcaaggagcagaaggagacgaccttctacacgctggtatgtgggctggctgtcaccgacctgttgggcactttgttggtgagcccggtgaccatcgccacgtacatgaagggccaatggcccgggggccagccgctgtgcgagtacagcaccttcattctgctcttcttcagcctgtccggcctcagcatcatctgcgccatgagtgtcgagcgctacctggccatcaaccatgcctatttctacagccactacgtggacaagcgattggcgggcctcacgctctttgcagtctatgcgtccaacgtgctcttttgcgcgctgcccaacatgggtctcggtagctcgcggctgcagtacccagacacctggtgcttcatcgactggaccaccaacgtgacggcgcacgccgcctactcctacatgtacgcgggcttcagctccttcctcattctcgccaccgtcctctgcaacgtgcttgtgtgcggcgcgctgctccgcatgcaccgccagttcatgcgccgcacctcgctgggcaccgagcagcaccacgcggccgcggccgcctcggttgcctcccggggccaccccgctgcctccccagccttgccgcgcctcagcgactttcggcgccgccggagcttccgccgcatcgcgggcgccgagatccagatggtcatcttactcattgccacctccctggtggtgctcatctgctccatcccgctcgtggtgcgagtattcgtcaaccagttatatcagccaagtttggagcgagaagtcagtaaaaatccagatttgcaggccatccgaattgcttctgtgaaccccatcctagacccctggatatatatcctcctgagaaagacagtgctcagtaaagcaatagagaagatcaaatgcctcttctgccgcattggcgggtcccgcagggagcgctccggacagcactgctcagacagtcaaaggacatcttctgccatgtcaggccactctcgctccttcatctcccgggagctgaaggagatcagcagtacatctcagaccctcctgccagacctctcactgccagacctcagtgaaaatggccttggaggcaggaatttgcttccaggtgtgcctggcatgggcctggcccaggaagacaccacctcactgaggactttgcgaatatcagagacctcagactcttcacagggtcaggactcagagagtgtcttactggtggatgaggctggtgggagcggcagggctgggcctgcccctaaggggagctccctgcaagtcacatttcccagtgaaacactgaacttatcagaaaaatgtatataataggcaaggaaagaaatacagtactgtttctggacccttataaaatcctgtgcaatagacacatacatgtcacatttagctgtgctcagaagggctatcatcatcctacaactcacattagagaacatcctggcttttgagcacttttcaaacaatcaagttgactcacgtgggtcctgaggcctgcagcacgtcggatgctaccccactatgacagaggattgtggtcacaacttgatggctgcgaagacctaccctccgtttttctactagataggaggatggtagaagtttggctgctgtcataacatccagagctttgtcgtatttggcacacagcagaggcccagatattagaaaggctctattccaataaactatgaggactgccttatggatgatttaagtgtctcactaaagcatgaaatgtgaatttttattgttgtacatacgatttaaggtatttaaagtattttcttctctgtgagaaggtttattgttaatacaaggtataataaaattatcgcaacccctctccttccagtataaccagctgaagttgcagatgttagatatttttcataaacaagttcgagtcaaagttgaaaattcatagtaagattgatatctataaaatagatataaatttttaagagaaagaatttagtattatcaaagggataaagaaaaaaatactatttaagatgtgaaaattacagtccaaaatactgttctttccaggctatgtataaaatacatagtgaaaattgtttagtgatattacatttatttatccagaaaactgtgatttcaggagaacctaacatgctggtgaatattttcaactttttccctcactaattggtacttttaaaaacataacataaattttttgaagtctttaataaataacccataattgaagtgtataatataaaaaattttaaaaatctaagcagcttattgtttctctgaaagtgtgtgtagttttactttcctaaggaattaccaagaatatcctttaaaatttaaaaggatggcaagttgcatcagaaagctttattttgagatgtaaaaagattcccaaacgtggttacattagccattcatgtatgtcagaagtgcagaattggggcacttaatggtcaccttgtaacagttttgtgtaactcccagtgatgctgtacacatatttgaagggtctttctcaaagaaatattaagcatgttttgttgctcagtgtttttgtgaattgcttggttgtaattaaattctgagcctgatattgatatggttttaagaagcagttgtaccaagtgaaattattttggagattataataaatatatacattcaaaaaaaaaaaaaaaaaa

SEQ ID NO: 29135 - DNA, 4465 bp, Homo Sapiens
caattgtcatacgacttgcagtgagcgtcaggagcacgtccaggaactcctcagcagcgcctccttcagctccacagccagacgccctcagacagcaaagcctacccccgcgccgcgccctgcccgccgctcggatgctcgcccgcgccctgctgctgtgcgcggtcctggcgctcagccatacagcaaatccttgctgttcccacccatgtcaaaaccgaggtgtatgtatgagtgtgggatttgaccagtataagtgcgattgtacccggacaggattctatggagaaaactgctcaacaccggaatttttgacaagaataaaattatttctgaaacccactccaaacacagtgcactacatacttacccacttcaagggattttggaacgttgtgaataacattcccttccttcgaaatgcaattatgagttatgtcttgacatccagatcacatttgattgacagtccaccaacttacaatgctgactatggctacaaaagctgggaagccttctctaacctctcctattatactagagcccttcctcctgtgcctgatgattgcccgactcccttgggtgtcaaaggtaaaaagcagcttcctgattcaaatgagattgtggaaaaattgcttctaagaagaaagttcatccctgatccccagggctcaaacatgatgtttgcattctttgcccagcacttcacgcatcagtttttcaagacagatcataagcgagggccagctttcaccaacgggctgggccatggggtggacttaaatcatatttacggtgaaactctggctagacagcgtaaactgcgccttttcaaggatggaaaaatgaaatatcagataattgatggagagatgtatcctcccacagtcaaagatactcaggcagagatgatctaccctcctcaagtccctgagcatctacggtttgctgtggggcaggaggtctttggtctggtgcctggtctgatgatgtatgccacaatctggctgcgggaacacaacagagtatgcgatgtgcttaaacaggagcatcctgaatggggtgatgagcagttgttccagacaagcaggctaatactgataggagagactattaagattgtgattgaagattatgtgcaacacttgagtggctatcacttcaaactgaaatttgacccagaactacttttcaacaaacaattccagtaccaaaatcgtattgctgctgaatttaacaccctctatcactggcatccccttctgcctgacacctttcaaattcatgaccagaaatacaactatcaacagtttatctacaacaactctatattgctggaacatggaattacccagtttgttgaatcattcaccaggcaaattgctggcagggttgctggtggtaggaatgttccacccgcagtacagaaagtatcacaggcttccattgaccagagcaggcagatgaaataccagtcttttaatgagtaccgcaaacgctttatgctgaagccctatgaatcatttgaagaacttacaggagaaaaggaaatgtctgcagagttggaagcactctatggtgacatcgatgctgtggagctgtatcctgcccttctggtagaaaagcctcggccagatgccatctttggtgaaaccatggtagaagttggagcaccattctccttgaaaggacttatgggtaatgttatatgttctcctgcctactggaagccaagcacttttggtggagaagtgggttttcaaatcatcaacactgcctcaattcagtctctcatctgcaataacgtgaagggctgtccctttacttcattcagtgttccagatccagagctcattaaaacagtcaccatcaatgcaagttcttcccgctccggactagatgatatcaatcccacagtactactaaaagaacgttcgactgaactgtagaagtctaatgatcatatttatttatttatatgaaccatgtctattaatttaattatttaataatatttatattaaactccttatgttacttaacatcttctgtaacagaagtcagtactcctgttgcggagaaaggagtcatacttgtgaagacttttatgtcactactctaaagattttgctgttgctgttaagtttggaaaacagtttttattctgttttataaaccagagagaaatgagttttgacgtctttttacttgaatttcaacttatattataagaacgaaagtaaagatgtttgaatacttaaacactatcacaagatggcaaaatgctgaaagtttttacactgtcgatgtttccaatgcatcttccatgatgcattagaagtaactaatgtttgaaattttaaagtacttttggttatttttctgtcatcaaacaaaaacaggtatcagtgcattattaaatgaatatttaaattagacattaccagtaatttcatgtctactttttaaaatcagcaatgaaacaataatttgaaatttctaaattcatagggtagaatcacctgtaaaagcttgtttgatttcttaaagttattaaacttgtacatataccaaaaagaagctgtcttggatttaaatctgtaaaatcagatgaaattttactacaattgcttgttaaaatattttataagtgatgttcctttttcaccaagagtataaacctttttagtgtgactgttaaaacttccttttaaatcaaaatgccaaatttattaaggtggtggagccactgcagtgttatctcaaaataagaatattttgttgagatattccagaatttgtttatatggctggtaacatgtaaaatctatatcagcaaaagggtctacctttaaaataagcaataacaaagaagaaaaccaaattattgttcaaatttaggtttaaacttttgaagcaaacttttttttatccttgtgcactgcaggcctggtactcagattttgctatgaggttaatgaagtaccaagctgtgcttgaataacgatatgttttctcagattttctgttgtacagtttaatttagcagtccatatcacattgcaaaagtagcaatgacctcataaaatacctcttcaaaatgcttaaattcatttcacacattaattttatctcagtcttgaagccaattcagtaggtgcattggaatcaagcctggctacctgcatgctgttccttttcttttcttcttttagccattttgctaagagacacagtcttctcatcacttcgtttctcctattttgttttactagttttaagatcagagttcactttctttggactctgcctatattttcttacctgaacttttgcaagttttcaggtaaacctcagctcaggactgctatttagctcctcttaagaagattaaaagagaaaaaaaaaggcccttttaaaaatagtatacacttattttaagtgaaaagcagagaattttatttatagctaattttagctatctgtaaccaagatggatgcaaagaggctagtgcctcagagagaactgtacggggtttgtgactggaaaaagttacgttcccattctaattaatgccctttcttatttaaaaacaaaaccaaatgatatctaagtagttctcagcaataataataatgacgataatacttcttttccacatctcattgtcactgacatttaatggtactgtatattacttaatttattgaagattattatttatgtcttattaggacactatggttataaactgtgtttaagcctacaatcattgatttttttttgttatgtcacaatcagtatattttctttggggttacctctctgaatattatgtaaacaatccaaagaaatgattgtattaagatttgtgaataaatttttagaaatctgattggcatattgagatatttaaggttgaatgtttgtccttaggataggcctatgtgctagcccacaaagaatattgtctcattagcctgaatgtgccataagactgaccttttaaaatgttttgagggatctgtggatgcttcgttaatttgttcagccacaatttattgagaaaatattctgtgtcaagcactgtgggttttaatatttttaaatcaaacgctgattacagataatagtatttatataaataattgaaaaaaattttcttttgggaagagggagaaaatgaaataaatatcattaaagataactcaggagaatcttctttacaattttacgtttagaatgtttaaggttaagaaagaaatagtcaatatgcttgtataaaacactgttcactgttttttttaaaaaaaaaacttgatttgttattaacattgatctgctgacaaaacctgggaatttgggttgtgtatgcgaatgtttcagtgcctcagacaaatgtgtatttaacttatgtaaaagataagtctggaaataaatgtctgtttatttttgtactattta

SEQ ID NO: 29136 - DNA, 5451 bp, Homo Sapiens
gagcgagggagggagcgaaggaggtagagaagagtggaggcgccaggggagggagcgtagcttggttgctccgtagtacggcggctcgcgaggaagaatcccgagcgggctccgggacggacagagaggcgggcggggatggtgtgcggggctgcggctcctgcgtccctcccagcggcgcgtgagcggcactgatttgtccctggggcggcagcgcggacccgcccggagatgaggcgtcgattagcaaggtaaaagtaacagaaccatggctcagtttccaacaccttttggtggcagcctggatatctgggccataactgtagaggaaagagcgaagcatgatcagcagttccatagtttaaagccaatatctggattcattactggtgatcaagctagaaactttttttttcaatctgggttacctcaacctgttttagcacagatatgggcactagctgacatgaataatgatggaagaatggatcaagtggagttttccatagctatgaaacttatcaaactgaagctacaaggatatcagctaccctctgcacttccccctgtcatgaaacagcaaccagttgctatttctagcgcaccagcatttggtatgggaggtatcgccagcatgccaccgcttacagctgttgctccagtgccaatgggatccattccagttgttggaatgtctccaaccctagtatcttctgttcccacagcagctgtgccccccctggctaacggggctccccctgttatacaacctctgcctgcatttgctcatcctgcagccacattgccaaagagttcttcctttagtagatctggtccagggtcacaactaaacactaaattacaaaaggcacagtcatttgatgtggccagtgtcccaccagtggcagagtgggctgttcctcagtcatcaagactgaaatacaggcaattattcaatagtcatgacaaaactatgagtggacacttaacaggtccccaagcaagaactattcttatgcagtcaagtttaccacaggctcagctggcttcaatatggaatctttctgacattgatcaagatggaaaacttacagcagaggaatttatcctggcaatgcacctcattgatgtagctatgtctggccaaccactgccacctgtcctgcctccagaatacattccaccttcttttagaagagttcgatctggcagtggtatatctgtcataagctcaacatctgtagatcagaggctaccagaggaaccagttttagaagatgaacaacaacaattagaaaagaaattacctgtaacgtttgaagataagaagcgggagaactttgaacgtggcaacctggaactggagaaacgaaggcaagctctcctggaacagcagcgcaaggagcaggagcgcctggcccagctggagcgggcggagcaggagaggaaggagcgtgagcgccaggagcaagagcgcaaaagacaactggaactggagaagcaactggaaaagcagcgggagctagaacggcagagagaggaggagaggaggaaagaaattgagaggcgagaggctgcaaaacgggaacttgaaaggcaacgacaacttgagtgggaacggaatcgaaggcaagaactactaaatcaaagaaacaaagaacaagaggacatagttgtactgaaagcaaagaaaaagactttggaatttgaattagaagctctaaatgataaaaagcatcaactagaagggaaacttcaagatatcagatgtcgattgaccacccaaaggcaagaaattgagagcacaaacaaatctagagagttgagaattgccgaaatcacccatctacagcaacaattacaggaatctcagcaaatgcttggaagacttattccagaaaaacagatactcaatgaccaattaaaacaagttcagcagaacagtttgcacagagattcacttgttacacttaaaagagccttagaagcaaaagaactagctcggcagcacctacgagaccaactggatgaagtggagaaagaaactagatcaaaactacaggagattgatattttcaataatcagctgaaggaactaagagaaatacacaataagcaacaactccagaagcaaaagtccatggaggctgaacgactgaaacagaaagaacaagaacgaaagatcatagaattagaaaaacaaaaagaagaagcccaaagacgagctcaggaaagggacaagcagtggctggagcatgtgcagcaggaggacgagcatcagagaccaagaaaactccacgaagaggaaaaactgaaaagggaggagagtgtcaaaaagaaggatggcgaggaaaaaggcaaacaggaagcacaagacaagctgggtcggcttttccatcaacaccaagaaccagctaagccagctgtccaggcaccctggtccactgcagaaaaaggtccacttaccatttctgcacaggaaaatgtaaaagtggtgtattaccgggcactgtacccctttgaatccagaagccatgatgaaatcactatccagccaggagacatagtcatggttaaaggggaatgggtggatgaaagccaaactggagaacccggctggcttggaggagaattaaaaggaaagacagggtggttccctgcaaactatgcagagaaaatcccagaaaatgaggttcccgctccagtgaaaccagtgactgattcaacatctgcccctgcccccaaactggccttgcgtgagacccccgcccctttggcagtaacctcttcagagccctccacgacccctaataactgggccgacttcagctccacgtggcccaccagcacgaatgagaaaccagaaacggataactgggatgcatgggcagcccagccctctctcaccgttccaagtgccggccagttaaggcagaggtccgcctttactccagccacggccactggctcctccccgtctcctgtgctaggccagggtgaaaaggtggaggggctacaagctcaagccctatatccttggagagccaaaaaagacaaccacttaaattttaacaaaaatgatgtcatcaccgtcctggaacagcaagacatgtggtggtttggagaagttcaaggtcagaagggttggttccccaagtcttacgtgaaactcatttcagggcccataaggaagtctacaagcatggattctggttcttcagagagtcctgctagtctaaagcgagtagcctctccagcagccaagccggtcgtttcgggagaagaatttattgccatgtacacttacgagagttctgagcaaggagatttaacctttcagcaaggggatgtgattttggttaccaagaaagatggtgactggtggacaggaacagtgggcgacaaggccggagtcttcccttctaactatgtgaggcttaaagattcagagggctctggaactgctgggaaaacagggagtttaggaaaaaaacctgaaattgcccaggttattgcctcatacaccgccaccggccccgagcagctcactctcgcccctggtcagctgattttgatccgaaaaaagaacccaggtggatggtgggaaggagagctgcaagcacgtgggaaaaagcgccagataggctggttcccagctaattatgtaaagcttctaagccctgggacgagcaaaatcactccaacagagccacctaagtcaacagcattagcggcagtgtgccaggtgattgggatgtacgactacaccgcgcagaatgacgatgagctggccttcaacaagggccagatcatcaacgtcctcaacaaggaggaccctgactggtggaaaggagaagtcaatggacaagtggggctcttcccatccaattatgtgaagctgaccacagacatggacccaagccagcaatgaatcatatgttgtccatccccccctcaggcttgaaagtcctcaaagagacccactatcccatatcactgcccagagggatgatgggagatgcagccttgatcatgtgacttccagcatgatcacctactgccttctgagtagaagaactcactgcagagcagtttacctcattttaccttagttgcatgtgatcgcaatgtttgagttattacttgcagagataggagcaaaaattacaaaaacacacagggtagtgggtccttttgtggctttcctagttactcaaattgactttcccccacctttgcacaggtgctttcaatagttttaaaattatttttaaatatatattttagctttttaataaacaaaataaataaatgacttctttgctattttggttttgcaaaaagacccactatcaaggaatgctgcatgtgctattaaaaattgttccaaatgtccataaatctgagacttgatgtattttttcattttgtccagtgttaccaactaaattgtgcagtttggggcttttcccccttaccatagaagtgcagaggagttcagtatctctgttttaaagacgtatagaatgagcccaattaaagcgaaggtgtttgtgcttgtttgtgtgtatcagctgtaccttgttgagcatgtaatacatcctgtacataagaaattagttctttccatggcaaagctattaccttgtacgatgctctaatcatattgcatttaattttattttgcacagtgaccttgtagccacatgagaaagcactctgtgtttttgttcggtctcagatttatctggttgagttggtgttttgtttggggtttttaattttgcgtgtttgcatagcataaaatcagtagacaacaccactgaggtcgttacgatcaacgatatccacagtctctttttagtctctgttacatgaagttttattccagttacttttcatggaatgacctattttgaacaagtaattttcttgacaagaaagaatgtatagaagtctccctgcaattaatttccaatgtttacattttttaactagactgtggaatttctacagattaatatgaaatggagctcatggtccgtttgtgtgttagatatgctgtagctgaagccctgtttgtcttttaaacactagttggaagctctcaataaaaatgcctgctgctcacagcacagaaaatggggcagggggagcctcaagcacaatctagctgtcctcctaaagactctgtaatgctcactcccctcgcgttctcccggcgctgtcgggaggctgtgctggtggtcgtgtagaggtccttctcctttcacatggtgcagagagcgaggacctctcctcctcgttcagttgcacttcagtattttcacggatatgaatgtaaaatatataaatatataaacctgcggctttaacaactgtaatacaaccttttgaattagttccgtgtatagataattaaattcttcatacaaaagttaaaaaaaaaaa

SEQ ID NO: 29137 - DNA, 6950 bp, Homo Sapiens
ggccaaaggtcaagatacttctctgggaaatgttgctgctgatgctgctttacaaagtcatacaatgagtgtttggtttaagaaagattttcatacttaaaagattttcatcttggaaatacatcaagtgaaaattaaattcttttgggaaacattttccttctgatatattatacttgtaatgggcgacatggcaaacaactcagttgcttacagtggtgtgaaaaactctttgaaggaagctaatcatgatggagactttggaattacgctcgcagagctgcgggctctcatggagctcaggtccacagatgcattacgaaaaatacaggaaagctatggagatgtctatggaatttgcaccaaattgaaaacatctcccaatgaaggtttaagtggaaaccctgcagatttagaaagaagagaagcagtgtttggaaagaattttatacctcctaaaaagccaaaaacctttcttcaattagtatgggaagcattacaagatgtcactttaattatattagaaattgcagccatagtatcattgggcctttctttttatcagcctccagaaggggataatgcactttgtggagaagtttctgttggggaggaagaaggtgaaggtgaaactggttggattgaaggagctgcaatcctcttgtctgtagtgtgtgtggtgttagtaacagctttcaatgactggagtaaggaaaaacagtttagaggtttgcagagccgaattgaacaagaacagaagttcactgtcatcaggggtggtcaggtcattcagatacctgtagctgacattactgttggagatattgctcaagtgaaatatggtgatcttcttccagctgacggcatacttattcaaggcaacgatcttaaaattgatgaaagctcattgactggtgaatcagatcatgttaaaaagtctttagataaggatcccttacttctatcaggtactcatgtaatggaaggctctggaagaatggtagttacagctgtaggtgtaaattctcaaactggaattatctttaccttacttggagctggaggtgaagaggaagagaagaaagatgagaagaaaaaggaaaagaaaaataagaaacaagatggagctattgagaatcgcaacaaagcaaaagcccaggatggtgcagccatggaaatgcagccattgaagagtgaagaaggtggagatggtgatgaaaaagataaaaagaaagcaaatttgccaaaaaaggaaaaatctgttttacaagggaaacttacaaaactggctgttcagattggcaaagcaggtctgttgatgtctgccatcacagttatcattctagtattatattttgtcattgacaccttctgggttcagaaaagaccatggcttgctgagtgcacaccaatttatatacaatactttgtgaagttcttcattattggagttacagttttagtggtcgcagtgccagaaggtcttccacttgcagtcacgatctcactggcttattcagtcaaaaaaatgatgaaagataataacttagtaaggcatctggatgcttgtgaaaccatgggaaatgctacagctatttgttcagataaaacaggaactttgacaatgaacagaatgacagtcgttcaagcttacataaatgaaaaacattataaaaaggttcctgaaccagaagctattccaccaaatattttgtcctatcttgtaacaggaatttctgtgaattgtgcttatacatcaaaaatattgccaccagagaaagagggtggattacctcgtcacgttggtaataaaactgaatgtgccttgttgggacttcttttggatttaaaacgggattatcaggatgttagaaatgaaataccagaagaagcactgtacaaagtctacaccttcaattctgttaggaagtccatgagtactgtcctgaaaaattcagatggaagttatcgaatattcagcaagggtgcatctgagataattctgaaaaagtgtttcaaaatcttgagtgctaatggtgaggcaaaagtattcagaccaagggaccgtgatgatattgtaaaaactgtgattgaaccgatggcatcagaaggcttgagaaccatatgtcttgcattcagagattttccagcaggagaaccagaaccagagtgggataatgaaaatgatattgtcaccggccttacatgcattgctgttgtggggattgaagatcctgtgagacctgaggtgccagatgcaattaaaaagtgtcagagggctggaattactgtgcggatggtcactggtgataatattaatactgctcgggccattgctaccaaatgtggtattttacatcctggggaagattttctgtgcctagaaggtaaagattttaacagaagaatacgaaatgaaaaaggagagattgagcaagagaggatagacaagatttggccaaaacttcgagtacttgcaagatcatctcctactgataagcatacactggttaaaggtataattgacagcactgtctcagaccaacgccaggttgtagctgtaactggtgatggtacaaatgatggcccagcactaaagaaagcagatgttggatttgcaatgggtattgctggaactgatgtagctaaagaagcatccgatattattctcacagatgacaactttacaagcattgttaaagcagttatgtggggacgaaatgtctatgacagcatctcaaaattccttcagttccaacttactgttaatgtagtagcagtgattgttgcttttacgggcgcctgcattactcaagactcaccgcttaaggctgtgcagatgctgtgggtaaacctcataatggatacactcgcttccctggctctggcaacggaaccacccactgagtctctcttgcttcggaaaccttatggtagaaataagcctctcatctcacgtacaatgatgaagaatattttgggtcatgcattctatcaacttgtagtagtctttacactcttatttgctggagaaaagttttttgacattgatagtggaagaaatgctcctttgcatgctcctccttcagaacattatactattgtttttaatacctttgtgctgatgcaacttttcaacgaaataaatgcccggaaaattcatggtgaaagaaatgtattcgaaggaatctttaacaatgccatcttctgcacaattgttttaggcacttttgtggtacagataataattgtgcagtttggtggaaaacctttcagttgttcagaactttcaatagaacagtggctatggtcaatattcctaggaatgggaacattactctggggccagcttatttcaacaattccaactagccgtttaaaattcctcaaagaagctggtcatggaacacaaaaggaagaaatacctgaggaggaattagcagaggatgttgaagagattgatcacgctgaaagggagttgcggcgtggccaaatcttgtggtttagaggtctgaacagaatccaaacacagatggatgtagtgaatgctttccagagtggaagttccattcagggggctctaaggcggcaaccctccatcgccagccagcatcatgatgtaacaaatatttctacccctacacatgtagtgttttcctcttctactgcttctactactgtggggtattcgagtggtgaatgcatttcgtagttctttatatgaagggttagaaaaaccggaatcaagaagttcgattcacaactttatgacacatcctgagtttaggatagaagattcagagcctcatatcccccttattgatgacactgatgccgaagatgatgctcctacaaaacgtaactccagtcctccaccctctcccaacaaaaataacaatgctgttgacagtggaattcaccttacaatagaaatgaacaagtctgctacctcttcatccccaggaagcccactacatagtttggaaacatcactctgattgtaagctgaatgttaacacactagctgcattgtaaagaaacaaattgaaactgggtcttttcacatattgtgatggacaagctagtattcttgtctttggacttcaacagaagacacacttgtacgaatgtagatttatttttttaaaaaaaaaaaagcaaagctttctgccagactgagggtgctttttggggggtgggagaaatgaactgacagataaacagtaactcagcgtaagtgacctgtggatcatcagtagtacccaagcatggtcctgaacagtgtattagcagagctttagtttatctcagtcctggatgggagagagagggaggagtaaaactgggcaagacaaagagccctggatcgttgaattgatagtttaatttctgctgttggctgttaataatttggattatttatgtttataaatgatacagatctgtttacaaggtttgtagatactttttttgttcctgttcatagatgggaagcttccttataactgatgcagagaaaaattagtccttcaaatactgctgtattttcaggaaaaaaaaaaaaaggggtgtttctattgaaactgtactaaatttttgcctacaatttaccttgttaaatattgtagataaattgctaatactaatagccaaatagataacactaatgctttgtttaaaaaaacgaaaaaaacaaaacaaaacaaaaaaacatgagcagtggtgttctaatgaagttatgacatctgtcctaattagtttcttaaatacatttactacttaatggttttgaagcaactgtttaatttttaaaatttttgaaaacttgctaataaccttttgttcagaatttagtagattgtttaatgcaggacatcaactacataatgaaagatgcttgaaatgcttttgttatttcaggcaaatcaaattaaatcagactatcaaactacaagagaaccttagtcttttttgtttttgtctaaacatgttagtttagtgatgtcttggtgaactgtgagtgaactgtattgatttttctaatctttagagaccttcacacagcatgagggctgttggcattttgaaaaaggttaataagtagaagcatacatgttttccttttgtttttgaaacttgtttgtaaacataaataaatatgcccttttattaaataaattcatggcaatgtttttttaaaagacatttcagcttctttactcagttctgcatatacagtgcatcagtctgttctctttgaccacaattggaatacatttcaagatggtaacagccccatgaagtaccgctttaattccttgctggtaatctaatagaatcagattaagaaaattaacacaattttaccatttgacatactcttcattgaatttagtttgtctaaaatagtctcacaggtaaaaaacataacaacaatgaccaccattgtctttgatacatttattttaattcttaagtggccaaataacagattaggtaaaatgagattacatgaaaaggttctaaaatgatatatttagatgcaataattaaccatatgctagaatgcccacctctaagccaattggattctttagctctctttttctttccttcatctaccttcttctcttttttgcctctgtctttaccctttagaaactggcatgtgttagggcccagatttcaccagatacacaatcctcaggctgacataaagtttacgaggactgctactataactgagagtgctgaccaagcaaagaaacatttagttgatggtgcttgatatttttggtgggtgggggaaatctttttctcaccatcaaatctttgcagtaatcctctgcaggtcttagaaacacattggctctgtcagcatttgtaattgtacatttattcatcaggtatttatagtgaatcatactgtaaaaaagaggtagcatgatatgctggaaagcatattagactaggagtcaagacctggtttctagtcttggttttgccattaatgtgctgcatgatcttgggaaaatcatttaccctaaataagggtggtggactatcttgaagaaccctttcaactctaaaaattgaccctatcaactggagagcccacaaggcatagggaatagagaaaagggaaatgttttcagttttcttttttattttggttatgcttaaatatgaatgtaattaccaaaagatttagaagtgcatgtgctttggaggatttgtattgagcttttacagtattcatttttcaactcaaggcaatggctttctacaccaactctaatccataaacgggtcttatgacatctatgaagtagtagcaagacatgcttagtgtgtatttctctctttgagacactgtaatttctaccagaaatttccagagcattatgtaggtagaaaaaaatgcaagcaagctgttaaagatcttggatcccattatatagtatgtatagctgaaatctgtaattcaatcactttttctcttttatcctctaaccaaaaaattgtttaattttgcatcccaaatgtttttaatctttgtatattttttaaaaatccttttctcctcatcattgccttttttgtggttgtaaatagacttacttgcactttgaagatgagttactccttgtcatcttacaaatatgtgatatggtaattttcataacagatgtcagttttgaaccaagaattggtgatttgtttataagaaaaaaactggcttcatttctgtgaaattgctctttgaaaatttctttttacacgtgtaagccaactgagataccgtgatggtgttgatttctttcaatgatgcttaccatctattttagccactgagccttttattatttgtctatttgtaaagtttatttgtcttaactcatttaataaatatactgtttatctgtttctgaaaaaaaaaaaaaaaaaaa

SEQ ID NO: 29138 - DNA, 2253 bp, Homo Sapiens
gctgcgccgccattaagagctagccctcagaactatcctctctaaggtttcacagtcctgcccaagatggccgtctcggctctggcaccgcccccactcctgcctctcccaacatggcgaccctgagtctccgttcccggtgcggaacgtacgaccggaagtgacggggtccagaaatttccgctttctttctgcagcaggaaccgcggctgctggacaagaggggtgcggtggatactgacctttgctccggcctcgtcgtgaagacacagcgcatctccccgctgtaggcttcctcccacagaacccgtttcgggcctcagagcgtctggtgagatgctgttgccgctgctgctgctgctacccatgtgctgggccgtggaggtcaagaggccccggggcgtctccctcaccaatcatcacttctacgatgagtccaagcctttcacctgcctggacggttcggccaccatcccatttgatcaggtcaacgatgactattgcgactgcaaagatggctctgacgagccaggcacggctgcctgtcctaatggcagcttccactgcaccaacactggctataagcccctgtatatcccctccaaccgggtcaacgatggtgtttgtgactgctgcgatggaacagacgagtacaacagcggcgtcatctgtgagaacacctgcaaagagaagggccgtaaggagagagagtccctgcagcagatggccgaggtcacccgcgaagggttccgtctgaagaagatccttattgaggactggaagaaggcacgggaggagaagcagaaaaagctcattgagctacaggctgggaagaagtctctggaagaccaggtggagatgctgcggacagtgaaggaggaagctgagaagccagagagagaggccaaagagcagcaccagaagctgtgggaagagcagctggctgctgccaaggcccaacaggagcaggagctggcggctgatgccttcaaggagctggatgatgacatggacgggacggtctcggtgactgagctgcagactcacccggagctggacacagatggggatggggcgttgtcagaagcggaagctcaggccctcctcagtggggacacacagacagacgccacctctttctacgaccgcgtctgggccgccatcagggacaagtaccggtccgaggcactgcccaccgaccttccagcaccttctgcccctgacttgacggagcccaaggaggagcagccgccagtgccctcgtcgcccacagaggaggaggaggaggaggaggaggaggaggaagaagaggctgaagaagaggaggaggaggaggattccgaggtgcagggggagcagcccaagccggccagccctgctgaggaagacaaaatgccgccctacgacgagcagacgcaggccttcatcgatgctgcccaggaggcccgcaacaagttcgaggaggccgagcggtcgctgaaggacatggaggagtccatcaggaacctggagcaagagatttcttttgactttggccccaacggggagtttgcttacctgtacagccagtgctacgagctcaccaccaacgaatacgtctaccgcctctgccccttcaagcttgtctcgcagaaacccaaactcgggggctctcccaccagccttggcacctggggctcatggattggccccgaccacgacaagttcagtgccatgaagtatgagcaaggcacgggctgctggcagggccccaaccgctccaccaccgtgcgcctcctgtgcgggaaagagaccatggtgaccagcaccacagagcccagtcgctgcgagtacctcatggagctgatgacgccagccgcctgcccggagccaccgcctgaagcacccaccgaagacgaccatgacgagctctagctggatgggcgcagagaacctcaagaaggcatgaagccagcccctgcagtgccgtccacccgcccctctgggcctgcctgtggctctgttgccctcctctgtggcggcaggacctttgtggggcttcgtgccctgctctggggcccaggcggggctggtccacattcccaggccccaacagccttcaaagatgggtaaaggagcttgccctccctgggccccccaccttggtgactcgccccaccacccccagccctgtccctgccacccctcctagtggggactagtgaatgacttgacctgtgacctcaatacaataaatgtgatcccccacccaaa

SEQ ID NO: 29139 - DNA, 1239 bp, Homo Sapiens
aaaagttcgaagtgggatgatcacgggcagacctgggtggttgggaacaggaagcatatggcatcttgcaggctataggcaccacaaaatggaacgcaggaggacaggggcttgggagagccacttcactgtcgggtaaaacaacggagcaagatgagtgcctccggatgcttggtttccccaccctccagtgtctgcttgctcttcaagtacctccaccaagctaatgacagtccactttaggacatcacgggcctcgaggttacaactttcccaggctttgttatttggttctctactgcacagaaatagatagaattctgacagccatcattgttaaacatcaggattttctaagaggacagacttaacagtaacatcatggcctcagcaggactccagctccttgctttcatcctggccttatctggggtctctggagtgctcacagccactctgctgcccaactggaaggtgaatgtggatgtggactccaacatcataacagccattgtacagctgcacgggctctggatggactgtacgtggtacagcactgggatgttcagctgtgccctgaaacactccattctgtccctccccatccacgtgcaggctgcgagagccaccatggtcctggcgtgtgttctgtctgctttggggatctgcacttccacagtaggaatgaaatgtactcgcttaggaggggacagagaaaccaagagccatgcttcctttgctggaggagtctgtttcatgtctgcaggaatctctagtttaatctcgacagtgtggtacacaaaggagatcatagcaaactttctggatctgacagttccagaaagcaacaaacatgaacctggaggagctatctatatcggattcatttctgcaatgctgttgtttatctctggcatgattttctgcacctcctgtataaaaaggaatccagaagctagactcgacccacccacacagcagcctatctctaacacacagctcgagaacaattccacacacaatctgaaggattatgtgtaaataactgagtaatgcatatgaaatggaacttttgggtgccaaatgggacttttagattaaaaaaaaatcagaattatgcttaactttccctacaaagaaagtagaatgtaaaatactttaacaactacaaagtagtttaaaatgccaataaaactatcatatacaagtaaaaaaaaaaaaaaaaaaaaaaaaaaaaaa

SEQ ID NO: 29140 - DNA, 7096 bp, Homo Sapiens
ccgggtcctgggcgagcgggcgccgtgcgcgtgtcccgcggccgagctgctaataaagttgcagcgaggagaagcgcagcgacggcgtcgggagagcgcgcctagccggctcgcgaaaaggaagctgttgaagttattgaagtacctgttgctatattctaagaaattaaaatgtccagaaatctgcctctaaatgggatctcactatgttgctcagactggacgtgattgaactcctgggctcaagtgagtctcccgaataactgggattacaggacttgacccaatgaaagaagcatatggcacttgtgaagataaatgttactcctccctttttaattggaacttctgcttaggacctgtgtatgacgtttcacctgtgatctgttctttcggtagccactgactttgagttacaggaaggtctccgaagatttgtgtcaaatgacgtcaatggccagcttgttttcttttactagtccagcagtaaagcgattgttgggctggaaacaaggtgatgaggaggagaaatgggcagaaaaggcagttgatgctttggtgaagaaactaaaaaagaaaaagggtgccatggaggaactggagaaagccttgagcagtccaggacagccgagtaaatgtgtcactattcccagatctttagatggacgcctgcaggtttctcacagaaaaggcttaccccatgttatatattgtcgtgtttggcgctggccggatttgcagagtcatcatgagctaaagccgttggatatttgtgaatttccttttggatctaagcaaaaagaagtttgtatcaacccataccactataagagagtggagagtccagtcttacctccagtattagtgcctcgtcataatgaattcaatccacaacacagccttctggttcagtttaggaacctgagccacaatgaaccacacatgccacaaaatgccacgtttccagattctttccaccagcccaacaacactccttttcccttatctccaaacagcccttatcccccttctcctgctagcagcacatatcccaactccccagcaagttctggaccaggaagtccatttcagctcccagctgatacgcctcctcctgcctatatgccacctgatgatcagatgggtcaagataattcccagcctatggatacaagcaataatatgattcctcagattatgcccagtatatccagcagggatgttcagcctgttgcctatgaagagcctaaacattggtgttcaatagtctactatgaattaaacaatcgtgttggagaagcttttcatgcatcttctactagtgtgttagtagatggattcacagatccttcaaataacaaaagtagattctgcttgggtttgttgtcaaatgttaatcgtaattcgacaattgaaaacactaggcgacatattggaaaaggtgttcatctgtactatgttggtggagaggtgtatgcggaatgcctcagtgacagcagcatatttgtacagagtaggaactgcaactttcatcatggctttcatcccaccactgtctgtaagattcccagcagctgcagcctcaaaatttttaacaatcaggagtttgctcagcttctggctcaatctgtcaaccatgggtttgaggcagtatatgagctcaccaaaatgtgtaccattcggatgagttttgtcaagggttggggagcagaatatcaccggcaggatgtaaccagcaccccatgttggattgagattcatcttcatgggcctcttcagtggctggataaagtccttactcagatgggctcccctctgaaccccatatcttctgtttcataatgcagaagtattcttttcaattatattgttagtggacttgttttaattttagagaaactttgagtacagatactgtgagcttacattgaaaacagatattacagcttatttttttctacataattgtgaccaatacatttgtattttgtgatgaatctacatttgtttgtattcatgttcatgtgattaactcttagaagtgttgtaaaagatgcagagtaagtattatgccccagttcagaaatttggcattgatcttaaactggaacatgcttttactttattgccctaacaattttttattaaatttatttgaaaatgcatcacatgatgaaaaattatagtagcttataagagggcatatacagtgaagagtaagttttccctcctactctcgatcttccagaagctgtacttttaccagtttctttgtcccaccaacttaaaaaaaaaaagtacaattcattgttttgcaaaagtgtatggtaggggcttaaaagaaactataaagttttatttgaatgaacactatgcactgctgtaactggtagtgttcagtaaaagcaaaatgatagttttctagatgacataaaatttacatttaatacagataagtgttcttcagtgtaatgtgacttcatgctatatatcttttgtaagacatttccttttttaaaaaaatttttgcaaataactgatctcaagtatatgtcatttactcaaaatctgtcataagcattactttatagctagtgacagtgcatgcacagccttgttcaactatgtttgctgcttttggacaatgttgcaagaactctatttttgacatgcattaatcttttattttgcacttttatgggtgacagtttttagcataacctttgataaaatacactcaagtgacttggacttagatgcttatccttacgtccttggtaccttttttgtattaacaaacactgcaatttatagattacatttgtaggaagttatgcttttttctggtttttgttttactttcaacctaggttataagactgttattctatagctccaacttaaggtgcctttttaattccctacagttttatgggtgttatcagtgctggagaatcatgtagttaatcccattgctcttacaagtgtcagcttacttgtatcagcctccctacgcaaggacctatgcactggagccgtaggaggctcttcagttgggccccaaggataaggctactgatttgatactaaatgaatcagcagtggatgtagggatagctgattttaaaacactcggctgggcacagtggctcacacctgtaatcccagcactttgggaggctgaggcaggcagatcatgatgtcaggagtttgagaccagcctggccaatatggtgaaaccctgtctctacaaaaaatacaaaaattagctgggcatggtggtgcgtgcctgaagtcccagctactcgggaagctgaggcagaagaatcacttgaacctgggaggcggaggttgtggtgagccgagatcgcaccactgcactccagcctgggcgacagagcgagactctgcctcaaaaaacaaaacaaaacaaaacactcacccatcaacgaatatagactcttctctcatttatcgatgatcctctttttccattttttaagtacttatgtggaagctagtctcccaaaacacaatctttagagagaaaagacatgaacgaactccaaaatatccatttaatcaatcatgtttttggctttggataaagaactttgaaccagtttttttctcaggagctgtcaaatggacacttaattatgacatgagaatgaagaaattattttggaaaaaaaaaatgacctaatttacctatcagtgaaagctttattttctggtgccttttgaaagtatatggagtcatatcattcttctgtttaaaatgttagtttggtttgactttccactttgtcctttctgctcttgtgaagaaaaaaaaaagcattttcgaggaaagaattatgcaatttcttttgttttctgtgtcattatttattgctttttcaatgtgcagccagtggatggttttagttctttcagatgaactgccatttgtgtttcagctcacagttctttgctgggtaaaagaaatactttctgacagtcacctgagccttaaatgtaagtattacatgacatgcattctgtttcttccagagttctgtctgccacacgaaagagaatatttgcttacttgatagaactttggcattttcatcattcttttacttaaccaggcttatggcatgatctctggaacaaatttgtaggaaaaaattactccaattgaatgactgatgtatgtaatcaacttcattgggctgcagtaaactagtggaaattagagagttgttttattggtgttttctactgtgagttaattaaaaattgtttttatttggggtcattatgtcacagtcttgagttaacaagatcttacgtgattggccttttctttgttttctcttaggagttgtgtctcatgaatgacagtactaaagctattaacaactaagagtttgacagagaactataagcctgttgtatctcctaaaagttgtcaactccccacccttggactttaaatgaaaattttattcagtccagctattcttacagtccctaaggattttcatatatctatgtataggagataaaatttgctagtaagatttttaaaaactggctagtgaaaggaaagtacctctgaaagaaaccattttagcaaattatggttatatgttttaatttaatctacagaatgttttatagtaaaattctagcaccactagaataatcacatagcatgtacaatatatttatgctggctgaaaagacagaatctgggaataataaaattgcaaccagtttggtaatgcaaacagcagaatagaatgaaatctcagtaatgaattaaagcaacaaaaagatattgattggcaaaaagcaagatataagagattcatttgcttaacatttctacataatatttatggtctggtcagtattggtctggtcagtattgcctggctgacgtgaaatgtaaactagtaggcgtgttattgatctgctaaaactaaccctctttttaagaggagatttaaggaagacgtcaatcaaaatgtcaaatatgtgtgtcagaatataaataatttttcacattgtattgttgctatataaaaaaaataatagaattggttgggtttctgaggtgaaatccagagtaagagtactagacagttcaacaagccacatctaatggcacagatagaggatgtagctattttatacctttcataacatttgagagtaagatatccttcaggatgtgaagtgattattaagtactcatacctgaaatctgttgtcaagattagaactggggttcatgttaaaaaccttccatattacctgagggtacctgtggggaacagttccttcccctgtgtggtagtattttgttggaagagaatgtttatacaaaaaatgaaattcttccaacagcagagaaactctaaaaagtttgatagtacctatcaaagtgctgtacttctgtgatagagaacatctgatgtaccaatttagatctatttctttatactttttctaatcaattgcttaatagtactttggatgattatcacctttgccacttaaaatatataaatatcctttttacttcatgaggaaggaagaattttttgataattactgagttcagccttttgtgatgacttatattttggacttacattttaactttaaagaatgtcagatcccttctttgtcttactagttaaatcctcacctaatctcttgggtatgaatataaatgtgtgtcatcgttatattgttcagctagatgagcaagtatcttagggtagtaggtagcctggtggttttagaagtgtttggtgatttttatggagagagttttcctaagtggtggtttataggtggtatcagatattattagggcagctttttggggagtaatctcaggtctcccagagcagcagcatttttctcattgatataagtaagattcttaggagcttttcttatcacacaagatgcctgaatcgaatgtgagaattgaaggcatttcttctgcataaacaaagaattctacctgctggacagaaacctggaaagttctttggaattcgctgaattacagtttagtatgtcctgattacagagtgacaatatttatcaagcctttgttatattggattatcttctctcttaaaatacaactgtattataattgaaatgacagcccaaaattggatggtttaccaaaaccaatgaaagggatttcacacatcaatttttatttctgttttgaagagcacatgctatataataattgctagtagcaactgcagtaaaacaggtgataagttattttctctgaaaagatccagtcctagagcaggattcttcgatcattcatggcagagtgaaaaaggtttgtatggttcttgtccaaataactcagttcttaaaattcttaaaatgatcgtaaaccattatcctttaaaggtttatttgaagatgctgttaaagtacagaattttgtgtacaggtagatttttccgtccctcattaatagtgccttcttaattaatacagactggtgttagctataacaaaactccagtaaggccaaagaatcccaagttctttgtggaaaaaaaaaaaaaatcttttagggtcagattttcccttctaatatcattgaagatgatgttgcattgatttattcataaagtattttaactataggaactctagaagataatggttaggcaagtgattttttttttaaatatggttggcgtaagttgtattttgaaattcacttattttaaaatcgaagaggattgtaatcatggaaatagaatgtttgtatctacctgcccacattttcttaaaaagatatttcatatacagataatgaagaccaagctagtggctgcactgtaggtctgctgcttatttgtatttgttgtgcttctgtttatgttgtagaagctgaaattctagcaacatgcttcaattctgttattttgatacttatgaaaatgtattaggttttactatattgtgcttttgaaagccataactcttaagaactttgtttttgcatattgtttgctaattctttactttaataaacctcaaaacctgc

SEQ ID NO: 29141 - DNA, 1114 bp, Homo Sapiens
ccccgctgagactgagcagacgcctccaggatctgtcggcagctgctgttctgagggagagcagagaccatgtctgacatagaagaggtggtggaagagtacgaggaggaggagcaggaagagcaggaggaggcagcggaagaggatgctgaagcagaggctgagaccgaggagaccagggcagaagaagatgaagaagaagaggaagcaaaggaggctgaagatggcccaatggaggagtccaaaccaaagcccaggtcgttcatgcccaacttggtgcctcccaagatccccgatggagagagagtggactttgatgacatccaccggaagcgcatggagaaggacctgaatgagttgcaggcgctgatcgaggctcactttgagaacaggaagaaagaggaggaggagctcgtttctctcaaagacaggatcgagagacgtcgggcagagcgggccgagcagcagcgcatccggaatgagcgggagaaggagcggcagaaccgcctggctgaagagagggctcgacgagaggaggaggagaacaggaggaaggctgaggatgaggcccggaagaagaaggctttgtccaacatgatgcattttgggggttacatccagaaggcccagacagagcggaaaagtgggaagaggcagactgagcgggaaaagaagaagaagattctggctgagaggaggaaggtgctggccattgaccacctgaatgaagatcagctgagggagaaggccaaggagctgtggcagagcatctataacttggaggcagagaagttcgacctgcaggagaagttcaagcagcagaaatatgagatcaatgttctccgaaacaggatcaacgataaccagaaagtctccaagacccgcgggaaggctaaagtcaccgggcgctggaaatagagcctggcctccttcaccaaagatctgctcctcgctcgcacctgcctccggcctgcactcccccagttcccgggccctcctgggcaccccaggcagctcctgtttggaaatggggagctggcctaggtgggagccaccactcctgcctgcccccacacccactccacaccagtaataaaaagccaccacacactga

SEQ ID NO: 29142 - DNA, 4959 bp, Homo Sapiens
gagctgcagtcagatccggggatggagggagccggagaagaggagtgagaaggccggggaggcaggccctgctgtcttcctgcaggccggcagcctgctggcagtggaggaccaggccgtccaggaaaggaaggggtcaggaggtcgggcagggcctcagcaggttcagacaagtccccagaagggagctgcaggcgccctcgagtccaggccccaagcctggctccggttgtccaaagagggcctaggccaggcctctggtgcggaaactgagtcacagccagacctcagggcacggcctagacgcttacgagccaaagttaggggtagagagcagagacctccggggggtctcagggagtagggggcttcagggcctcccagtctagagccggattggcgagttagacgcttgtagatccaaggttggattggggtggggtctctgggacgttggatcgctacgcaaggattggggggattcaagtgcttagagatcgaagtctgccctgggtagggggagtcagacaattggaaagcctaggtagttatttggggaggggtctctacgccttggcgaagcgcacagctgcatctttttggcttgaggcctgaggccttgtcgagaagcttccgtgaaagggtgggccagccgggccacgagaaagaaagtgaataaatcaggaatataagtgggcggggggcccctgagaggggggtcgcaaagggtgagacatggccaccaggcgtttaaccgacgctttcttgttgttgcggaataattccatccaaaaccggcagctgttagccgagcaagtgagtagtcacatcacctccagccctctgcattcacgtagcattgctgcggagctggacgagcttgctgatgaccgtatggcactggtgtcaggcatcagcttagatccagaagcagcgattggtgtgacaaaacggccacctcctaagtgggtggatggagtggatgaaattcagtatgatgttggccggattaagcagaagatgaaagaattggccagccttcatgacaagcatttaaacagacccaccctggatgacagcagcgaagaggaacatgccattgagataactacccaagagatcactcagctcttccacaggtgccagcgtgccgtgcaggccctgccgagccgggcccgggcctgctccgagcaggaggggcggctgcttgggaacgtggtggcctcgctggcgcaggccctgcaggaactctccaccagcttccggcacgcacagtcaggctacctcaaacgcatgaagaatcgagaggaaagatcccagcattttttcgacacatcagtaccactaatggatgatggagacgataacactctttaccatcggggttttacagaggaccagttagttctggtggagcagaacacactgatggtggaagagcgggaacgagagattcgccagattgtacagtccatttctgacctgaatgaaatattcagggacttaggggcgatgattgtagaacagggtacagtccttgacagaattgactataacgttgaacagtcctgtatcaaaactgaagatggtttgaaacagcttcacaaggcagaacagtatcaaaagaagaatcggaagatgcttgtgattttaatattatttgtcatcatcattgtgctcattgttgtcctcgttggcgtgaagtctcgataagtggcattgggttttcgtgtgtgccgcgcgtgtggatctcccgggtgtgaggggcttggcctgcgccccgccagctgcccgcagaggtgcagcctcgaggaatctgagggcgtcggggcagcgaacctttgcatccacggactcctccttccctagtcctgctcaagcggtccggggaatgggtttttgtttttccttcattgttgagaatttaaggacctttgatactgctgcacaatagagattgagttctgggatcagttataatatatattttttttagaaagagaaaatgagctgagagtttacaggcactgcagaagctgttcagtattatatgtgtatatgctatttttttagcagccatgtctgagcagaatgttaacataatttttggaaaaattttctttaaaccatctggtttttaagaaatttggtaccaaaaattgatgagtagaggcaaaaatgccccttcatctttctctatatattttccagttgaaaacaaactaagaagtcctttaagaatttataatccgttccccattaacttaatttagcttttccatcactgttaatgatcagagtaacaaagtgtgaaaaataagaaaccatcattgatgttaattaacacatttagatgggccagttaaaacagcttcataagttttaaattaattgtaaatggaatattcctcatttaaaatttttgcactgcattttctactgtaaaccaaaagaggttactaagcaaaaccacctaaatttaagttggtgatttaaatgaatctcacattaaaagaaagcttgacagtgttatgaaagccaccagactcagccagtgtgtccccatgggtatccccagccatccttgctcaatccattacttatatactaactacataatgacctgttcaaaccagactctatttaatgaactgtgaatttacacagaggccattttaaatgggtcaccccatttaggattagtggatctcaaattattaaccaaacatcactccatttcaaagtaaaatattccaccagcgatttgatttattggctcttccattgccactgagcaatgcccaggaagcaggcacattgccaaggactgggggcatcttgactaggaagctcctcgtttgtgtgagcgtgggtcagaccgccaaagtaggacttcatcgtttacctacctattatcaatatggtgcttgaatatattcctataactgtagaacagtgtggaaagtgatggtaactttgaagttgttcatgttttattggctttgttttaattgacactagtagagttttaatggtctttgtgtaaattttaatggcttttccattgtttttgcttctcttaaaaagtttaagaagaatatgacctcattaaatgtgctgttttatttggaccagtcacacaaaatgtctctctagagttgactttaaagttgtttacagaaatttaaactcaattccagagattgaagttgtccaaacagctcatgggcttagtgtccaaacccctgcccagccttccctttccaagttggtgccacctccaggtagccattggtggttttcctattactgatgtggctgtggaatgataaggtcctagaggggccctggcatttcaggaagcggacctggtattccctgacaaacattgcttaggaaagagggccggagaataagaagccagcacctcatcagtcagccctgcaatgtgagacttccgtagctgttgagagtcactgcaggtgttctttcatcccatctgattttaacccatggttgagacgttccaagttagatctgctgctcttaggtgtggggctgtccacattagggaacttgcctcaaaaacagtccacagtggcaataccggacttctgttcaagctttttaaagtgctgagccttacaaacccctgaaggaaggtgaccctttaagagaggatcatctttttttatatttattttcaccaaatagggtgatgagggttggtttttgttccctcaacccatttgggtaaaataacggatctgattagaaactgttttaaggaggggctgggctcggtggctcacgcctgtaatcccagactttgagaggccaaggcggtcacgaggtcaggagttcgagaccagcctagccaacatggtgaaaccccgtctctacaaaaaatacaaaaattagccgggtgggacacgcctgtaatcccagctactcaagaggctgaggcaggagaatagcttgaacccgggaggcagaggttgcagtgagccgagatcacaccactgcactccagcctgggtgacagagcgaggctccgtctcaaaaaaaaaaaaaaaaaattgttttagcgctgggtttcccaaggtgggagagacagacccagcctggagctggcccctggcctgtgtgctgacttcttggggtcctcaaaccactgtatttttctgttgagcctgtacttggggagagatcagtagcatttgaggaagtaagagaaaagaatcatggtacctcagggtttctttccctttactcgctggcagccattgtctgtgggcacctcatgtttttccacactctactgggccgtggaggtaacgatcacccaggccagtctcctctgcctgggatgcgccctctgagaggaggcctagcagggcaggctccctctgggcatccctggatgcagcctctggacacatgcctcctttaaagtgtccgggtgcagctcaggttgagtggaggtagaaggagaaacagacatgtttaccacgcgttttccaaagctcctgatctttcccaagattgtaactgaaaactgctgtctcttgttttgttcgttttgggggtggtggtgctggctgggccatgcttgtgaagtgatgtgtgtctctgatttaacggattcactgttttctctgctaattgagagagcgttatttacattatttatttgttttgacacaagtgctttcagtgttttatcctagctaatggcttcttaaaggtaataaaacccttccaacgtaattggtcagataaaactttttttcttgtatgcttaaataaagcaattagtgaagcacttctatccaaaatgacttttttgtccttttttaaaaccaatttactgttactggaaactttttgtacaataaagcaatcacgcagattaaagaacatcctgcaatcctagtattaattttaaaaaaaaaaaaa

SEQ ID NO: 29143 - DNA, 3810 bp, Homo Sapiens
gggcacaggggagactaaaaaggccagggaagttggcctgccggaagttcccagggagaaggcagcgcgttgtacccgagattcagggtctggctctgcttcccaggctagagtgcatttggcgcgatcacagctcactgcagcctcgacctcctgagctcaagcgaacttcctgcctcagcctcctgagcttcctgagtagctgcgactacagaaaaaagaaatcctctttttagaacatctcttggtggtaccatcagaaatgtcttccttaagtggaaaagtccaaaccgttttgggccttgtagagccaagcaaactgggccgtaccctgacccatgaacacctggccatgacctttgactgctgttactgtccacctcccccgtgccaggaagctatttccaaagaacctatcgtgatgaaaaatttatattggattcagaaaaacgcctattcccataaagaaaaccttcaattaaatcaggagacagaagccataaaggaagaactgttgtattttaaagctaatggtggaggggctttggtggaaaacacaaccactgggattagccgagacacacagacgttgaagaggcttgcagaagagactggcgtccatatcatatctggagccgggttttatgtggatgcaactcactcctcagagaccagggccatgtcagtggagcagcttaccgatgtccttatgaatgaaattctccatggagctgatggaaccagtatcaagtgtggcattattggagaaattggttgctcctggcctttgactgagagtgaaagaaaggttctccaggccacagctcatgcccaggctcagcttggttgtcctgttattatccatcctggacggagctccagggcaccatttcagattatccgaatattgcaagaagcaggcgcagacatctccaaaacagtcatgtcacacctggataggactattcttgataagaaagagctcttggagtttgctcaacttggctgctacttggaatatgatctctttggtactgaactacttcattaccaactcggcccagatattgacatgcctgatgataacaaaagaattagaagggtgcgtctcctggtggaagagggctgtgaagatcgaattctggtagcacatgacatacatacgaaaacccggctgatgaaatatggaggtcacggctattctcatatactcaccaatgttgttcctaaaatgttgctgagaggcataactgagaatgtgcttgataagattctaatagagaaccctaagcaatggctaactttcaaataggatggttgcttatgaattcacaccttgagtataaaacttgcagagaacattcagcgatttccagtccactgtgagatattaatcagttacctaggactaatgacagatcatttccttctgatgagaactaggagggtttgccttctctgagaccagctattacaactgtgcctctagggagttactcagcctaattgagccctattattttaacttaacaaaataaatacagaagtacctatttctaaacaatgatttaaagtctatatcccctaagcggagttgttgtttttctccctaatctatcagctgcactacttgagaaaatttaaagtgtttctagttaaattatttccttcttgagcgatctaatgtttcttgtaatattgatgatcctactaattatcctgctgttctttaattaatgcttaatgaataatatggcactgtaaaatagcttctgcaacaagggaagttaaattttgagacttttttccccaaaggatactgactgtaatacaattaccaattcacaatgataaaaatattttgaaaggttaattttatactgtccacctatctatatattcttctactgaaatgattttgatatctttggctttccggtatctatttttgccatacattttgctgttttgcaaagtttgtataagaacacataacactactgaattataaaaattcaatcataaaagtcaaaatatattacataatatagtttaatgaatcattacatttataataacaaaggccacaatttaattaattggtaagatataatgcaaaaaaaaaaagagaaatgtttgccttatgtatattccctttatttcctttaccttttgtttttccttggacctaaacagagaaaataatgcttatgtatctgaagaaaaggtcagatctattggaaatgacagcccgatacttgagcctcctctttaaaaggtatccagccctgatattttgtgtaaataaaatgtttttaaaacctgttagttaaaacacttaggtgatgggcactgctgcttataaattcatcttttggttgaatcctcactatgctatttggtacctaaaaatattctccaaacccttgctgccagttcctctttgataaatatatagttaattcgaaataaaatccattgcaattcatttatgagttatcttacatatcacaaagaccaattagaattagtcattattcttgatgaagagtctgtttttaatcataaaaatcatgacagttactcagacccaggcatttcaacagagctaacaccaccttcagataggcacaccatgcataactcttgggaagttgagctttgctaaataaaagatatttctgctgatcaaagatgatcaagctttctgtgtattggaacagaaagtaacaaagaggaatgagccaggagaacaaactaattcctttaaataaataaaaaaaaaaaatgcaaatgtccttcaccagtaaagcaagcaaatttttaaaatctctgtttttgaaatctactcgtcaaagagttttcagaggcaatgaaaggggaacagatttttcattgtaatagtggaagttgtgtgatagttaggagatatcaacatgcatttttaatcttttccttagatgaaagagatggcttttggcagtgtgttctaaccagaaagaaaggatttgtattactctccaaatctactgtactgtcagcttcactccacctgagaaaaaagaaaaaaaaattgatagctcaaatgcatgtaattcataaacactgcaaaggagagccacttggtgtctgcagtcctcatattaacagtctgtcacagaatgcagttaaagtattgattggcatatggtaatagagcaaccatagccttaacttacagacctgtgaaataaagggcattttgacctaatacaattaattttctggataactcttaaagagaagtcattttaactgtttttgctactccatatattgtcattcaaaatatattttaacccaaaataagttaaataatttgtgcatgtttgtgtgtgtatatatgcatacacttttttatattaaaattttgaggctatacagccactgtgccctgtggaataaagccatatatataaatgttttatatgtatatgttttatacataaataaaacatttcatctaatatatatatgtgtgtgtgagtatatgtgtgcatgtttagcagatatttgtataaaatataaacactctgttgtcatataggctatatgcgaaattgttaattttaaaataacctcaggccacagacttgtagtaatcatttgaaggcctcacctagtgtccccttggtgacgtatgcagcagctcaaattaaacctttgtgcattgggttatgaataatcttttcttccaaagatggcaaaagcctcggtttgatttgatactaaagaataaatttctctgactttcaaaaaaaaaaaaaaaaa

SEQ ID NO: 29144 - DNA, 4579 bp, Homo Sapiens
aaatgtaatttgaagaaggcagaaggaacccatggctttagccggctgcccagattcctttttgcaccatccgtactaccaggacaaggtggagcagacacctcgcagtcaacaagacccggcaggaccaggactccccgcacagtctgaccgacttgcgaatcaccaggaggatgatgtggacctggaagccctggtgaacgatatgaatgcatccctggagagcctgtactcggcctgcagcatgcagtcagacacggtgcccctcctgcagaatggccagcatgcccgcagccagcctcgggcttcaggccctcctcggtccatccagccacaggtgtccccgaggcagagggtgcagcgctcccagcctgtgcacatcctcgctgtcaggcgccttcaggaggaagaccagcagtttagaacctcatctctgccggccatccccaatccttttcctgaactctgtggccctgggagcccccctgtgctcacgccgggttctttacctccgagccaggccgccgcaaagcaggatgttaaagtctttagtgaagatgggacaagcaaagtggtggagattctagcagacatgacagccagagacctgtgccaattgctggtttacaaaagtcactgtgtggatgacaacagctggacactagtggagcaccacccgcacctaggattagagaggtgcttggaagaccatgagctggtggtccaggtggagagtaccatggccagtgagagtaaatttctattcaggaagaattacgcaaaatacgagttctttaaaaatcccatgaatttcttcccagaacagatggttacttggtgccagcagtcaaatggcagtcaaacccagcttttgcaggaacccagacacctgcagctgctggccgacctggaggacagcaacatcttctccctgatcgctggcaggaagcagtacaacgcccctacagaccacgggctctgcataaagccaaacaaagtcaggaatgaaactaaagagctgaggttgctctgtgcagaggacgagcaaaccaggacgtgctggatgacagcgttcagactcctcaagtatggaatgctcctttaccagaattaccgaatccctcagcagaggaaggccttgctgtccccgttctcgacgccagtgcgcagtgtctccgagaactccctcgtggcaatggatttttctgggcaaacaggacgcgtgatagagaatccggcggaggcccagagcgcagccctggaggagggccacgcctggaggaagcgaagcacacggatgaacatcctaggtagccaaagtcccctccacccttctaccctaagtacagtgattcacaggacacagcactggtttcacgggaggatctccagggaggaatcccacaggatcattaaacagcaagggctcgtggatgggctttttctcctccgtgacagccagagtaatccaaaggcatttgtactcacactgtgtcatcaccagaaaattaaaaatttccagatcttaccttgcgaggacgacgggcagacgttcttcagcctagatgacgggaacaccaaattctctgacctgatccagctggttgacttttaccagctgaacaaaggagtcctgccttgcaaactcaagcaccactgcatccgagtggccttatgaccgcagatgtcctctcggctgaagactggaggaagtgaacactggagtgaagaagcggtctgtgcgttggtgaagaacacacatcgattctgcacctggggacccagagcgagatgggtttgttcggtgccagccgaccaagattgactagtttgttggacttaaacgacgatttgctgctgtgaacccagcagggtcgcctccctctgcgtcggccaaattggggagggcatggaagatccagcggaaagttgaaaataaactggaatgatcatcttggcttgggccgcttaggaacaagaaccggagagaagtgattggaaatgaactcttgccctggaataatcttgacaattaaaactgatatgtttactttttttgtattgatcacttttttgcactccttctttgttttcaatattgtattcagcctattgtaggagggggatgtggcgtttcaactcatataatacagaaagagttttgaatgggcagatttcaaactgaatatgggtccccaaatgttcccagagggtcctccacaccctctgccgactaccacggtgtggattcagctcccaaatgacaaacccagcccttcccagtatacttgaaaagctttcttgttaaaataaaaggtgtcactgtggtaggcatttggcatattttgtggactcagtcaagcaaccacagtctgttaatcatttctctatgctcagatgtcagatcctcttgttattagtgtgtcttgttctgcacagtgcaggagactttattcctttggaaaattcactgttccacaaacagcaggctgaatggcctcgcctctagattgacgtgggccagcctccttgagacacacctggcacccgtcatcggccagcggtggatgctgcataatccacctgggtacttcagccttgcgtttccacagccttcagcctgttctagaacgatcactgccttacccctgctgctgcagtggtgtgagtcgtttcacggctgatgtccctcgggggattaaaggatctaaagagaaaatggcacctggttgtcttcgtgctgtgtctcatgggtttccatagtgataaagacaaggaaacgctgcaggggccacaggcacaggctgatatttaaagatctttgcttgcagccctccgtcctgctgaaaacccccataagccagtgaacacagagcagctagaggctcctcctctgctggcttagggtcagaagtacctcacagtggttgtggacatggaagagttttgtcaacacaacactttgtccccgctccgggagatgagtcagatggtggcttgagttgtcacttggtcccctccgcccctcgggtggccccctttgccacgtccccttagcttagtgatcaggtgtgagagtggccatttccttacctttgatccctgtaaagcagaaaggactcctttgacaggcgacaaactactgtggtgagcagaatgatttcctttttcaagacaacacctgcctggcttctattaatgtgtgctggccatgatattgccccaaatccgccccactgaagtgttccctaaggaacagcatttctctgctcctcagtcaacccccgtagcctagagcagtgtcacaagcttcagtaaggccagtcagctggaagtcagtctaccgtatagtaacactgtatttcagtctacagaccacactctagttgttttccatgaaaggtatacaaatgaagaattttctagcaaaacatgtttttaaccatcagtgctcaattgcattttcttcctttcgcagccagtcagtctttcaaactattgacagtaagataattctcacgttcacacctggtggcaggcttcactgtagggacggacattgcagttacaccacgattccttcctcttcactggctcgaggtaaacccttttcaaggaaaaacaactctaggatttcttttttctgtgtacgtagaccagtcccatcagtgtataatctctctctcacacgcctctctccaatagacagcttgtatttgcagtatttcatatttataaatatgcgtttatttaaaaggagaacaaaagcttgactctgattcacagttttgtatgtagctggtttgacgtagtcttttgtattttccctgccgaagtgaattgttggagaatgtaaaccgcctccacgtggcggcagacttcctaaggccccagctcgctggcctcgcgctgggcggctgggaattccacctgagaacaagtcccgcaaaccggggacggaaggacatttgacttttatttttgtatttaattgacatgaatgtaaaggggacagctcagggttgttttggagcctgttgactttgtatctctgcctgtgattttcttttctaaatgaaactccatgtagcaaccaggacgaagttgagaaggaaaacgccaaatgctttggttattagagtttaataggtaagctctgttacactaggtgttagagttccagaatgttcttttgtttgctaaaccttgaagaaacatgtgcctcagcctagatgttttgtcttctcttttctgcacttaatacctgacagtatgaccgatctctgcgcctttctgggggcgggcaagctggcggtagatttgtgatgtcacagtgcaaactgcagtgactgtaaattggcctggcgtgtataaacgttttcagggaatgcagaaggtattaatgaagagacaaaacctttattccatgtgctttgcttcattctgtacatagctctttggctcgtgaacctaattgtaaactttcaggtatttttgtacaaataagggactgatgttctgtttcttgtaattagaaataaacattaatacagtgttcttcaaaaaaaaaaaaaaaaaa

SEQ ID NO: 29145 - DNA, 2898 bp, Homo Sapiens
agcaacatgcccgcagagaattcttccggaggcggtcacagacatctccgtgacgcagaacgagttagagcgtcccttggggtttccatggtgctgcccttagcctgcagtatctccacttcctctcccgcctgagcgccgggaacggaaaagcaggcggccggtcccagctgcgacgtagacgccgcgtgggggtggggttgggcgagtaggtgacgctctaggcgagctcgttggcctctctatggtgccgagcgcgcccgttcggacgttgcccctttaatcggcagagggcggtgcccaggaggtcccgcgagagctgcggggggcgggggggcggtgccgaggctgggggccggtggcggatggagcccgcgatggagccggagactctggaggcgcgaatcaatagagccacgaaccccctgaacaaggagctcgactgggccagcatcaacggcttctgcgagcagctcaacgaggactttgaggggcctccactcgccacccggctgctggcccacaagatccagtccccacaggagtgggaggcgatccaggccttgacggtgctggaaacatgcatgaagagctgcggcaagcggttccacgacgaagtgggcaagttccgctttctcaacgagctcatcaaggtcgtgtctcccaagtatctgggctctcggacatcggagaaggtgaagaacaagatcttggagctcctctacagctggacagtgggcctgcccgaggaggtgaaaatcgcagaggcctaccagatgctaaagaagcaggggattgtaaagtccgaccccaagcttccagatgacactacctttccccttcctcctccacggccgaagaatgtgatctttgaagatgaggagaaatccaagatgctggcccgcctgctgaagagctcccatcccgaagacctccgcgcagccaataagctcatcaaagagatggtgcaggaggaccagaagcggatggagaagatctcgaagagggtgaatgccatcgaggaggtgaacaacaatgtgaaactgctcacggagatggtgatgagccacagccagggcggcgcagcagctggcagcagcgaggacctcatgaaggaactgtaccagcgctgtgagcggatgcggcccacgctcttccgactggcgagtgacacagaggacaatgatgaggccttaggcctcagtgaccccacacccccttcaggcccaagcctggatggtaccggatggaacagcttccagtcgtcggatgccactgagcccccagcccctgctctggcccaggcccccagtatggaaagccgacccccagcgcagacatccctgccagcaagcagcggtctggacgacctagacctcctggggaagaccctcctgcagcagtcgctgcccccggaatcccagcaagtgcggtgggagaagcagcagccaaccccccggctcacactccgggacctgcagaataagagcagcagctgcagctcccccagctccagcgccaccagccttctccacaccgtgtccccagagccccccaggcctccgcagcagcccgtaccaaccgagctctcactggccagcatcactgtgcccctggagtccatcaaacccagcaacatcctgcccgtgactgtgtatgaccagcacggcttccgcatcctcttccattttgcccgggacccactgccagggcgctccgacgtgctggtggtggtggtttccatgctgagcaccgccccccagcccatccgcaacatcgtgttccagtcagctgtccccaaggttatgaaggtgaagctgcagccaccctcgggcacggagctgccagcttttaaccccatcgtccacccctcagcaatcacccaggtcctgctgcttgccaacccccagaaggagaaggttcgcctccgctacaagctcaccttcaccatgggtgaccagacctacaacgagatgggggatgtggaccagttccccccacctgaaacctggggtagcctctagaacagaggggctggggagaggaaggggcagagggaccggtcactgtccagcctggagggaggcattggtggccaaggacaccctttgttgcccatggccattcacccccaggcctggtgcttctccccacacccctgtaggcctcaagtgactcttccccctcctgctccggccccgcccctgctgagccaaacccagtaggaggctgggcctgggtttgtgccgctggggtctccatcaccgggacctggagagggaggggctgtgtagccttggaagaacttgggtcatggggaggaagcacagctgttggggaagggccaggacctcaggcccagccccaaccccagctggggtggggtcttccccacctgtctcttatgccttatgggaaggcccagccataactcgggggccatgctggagctggggaccagcttaggcctcctccataggaacccagtgactggggggtgacgcctacacccccagctatttgcactctggtgtgtggtttgactctgcttttcttccggattggccctgtggtcacagcctcagggggccaggctgggggaacctcacctggcccgtactcctgggggtttccctttgccattgggccccctgagggactgtgggggctcaagggtaatgccagaggcccatggccccagcgaggggctgtggggcacctagagttctcggtgtgtctccttcattcattggcctctgctggggcctcctatgggtgtcttacgtctgtccatccatctgtccgtggtcagaagtggggtcagtgtgtgagtgagagcaggagtatttatgaaaataaaacgtcgtttttcctggaaaaaaaaaaaaaaaaaaaaaa

SEQ ID NO: 29146 - DNA, 5721 bp, Homo Sapiens
agtcgtaactcggaagccggagcccagacgggcccgcggcgggggggtgggggctgcgcgggggcgggagtggcggaggtggccgcccctggcggcgggtttgtttatcccggggaagaagtttaggagcgggagatagggaaggagggcgggtcggggaggaaggatgcggttcggcggaggcggccgccacagggacttgccgccatcacccctgctgccaccaccgcagcctcgggctcccagggcggacacggccaccgcctcagcgggagaggagtctccaccaggactgaccgctgccgcccagcacgtccaggtaaggtactcaactgtgtggggtactacataaatcctgaaagactacaataaagtggtgatgtctcgggaacccaccccacctctacctggagatatgtctactggtcccatagcagaaagctggtgttacacacaggttaaagtagtaaaattttcctatatgtggaccattaataacttcagtttttgtcgagaggaaatgggtgaagtgttaaaaagttcaacattttcatctggcccaagtgacaaaatgaaatggtgcctgagggtaaacccaaagggattagatgatgaaagtaaagactacttgtccttatatttgcttttagtcagctgccccaaaagtgaagttcgagcaaaattcaaattttcccttctgaatgctaaaagggaagaaacaaaagcaatggaaagccaaagagcatatcgatttgtgcaagggaaggactggggttttaaaaaattcattagaagggactttttgcttgatgaagctaatggtcttttaccagatgacaagcttacattattttgtgaggtgagtgtggtccaagattcagtaaacatatcaggacatactaatacaaatactttgaaggtgcctgagtgtcgtctagcagaagatttaggtaatctctgggaaaacacaagatttacagactgcagttttttcgtgagaggacaagaatttaaagctcataaatctgtgcttgcagctcgatctccagtttttaacgccatgtttgaacatgaaatggaagaaagcaaaaagaatcgagtggaaataaatgatttagaccctgaagtttttaaagaaatgatgagattcatttacacagggagagcaccaaaccttgacaaaatggctgacaacttgttggcagctgcagacaaatatgcactggaacggctgaaggtcatgtgcgaagaagctttgtgtagtaacctctcagtagagaatgttgcagatacccttgtccttgcagatttgcacagtgcagaacagttgaaagcacaagccatagactttattaataggtgcagtgtacttcgacaacttgggtgtaaagatgggaaaaactggaacagcaaccaagcaaccgacataatggaaacatcagggtggaagtccatgattcagtctcaccctcatttagtagcagaagcctttcgagcactagcatctgcacagtgtccacagtttggcattccacgcaaacggctaaaacagtcctgaaatcttccatgaacagttgaaaaatggaattgactttcactcctccaggtccagaaggattctaatacacaaaccataagcaagagttgtttctgttattttgtccacagaacagaagctgaaaaagcatattgcttgcatttcaggtggataatttatggtttattcttcagctttaaattagactgattaattcacttcaaggccttaaattatcttcaatgacttctcttgttcatataatactttaattttttttattgtgccttgtcattttgaccaaggctatgcaggattgcactagctccataatgcagtaatattgataactgaagatactaagtttcaaaaggatcttccattattttgcaaaaagaaaaatgaattttatagggtttgtcctatgctatctcaaagtttaagttctctttaaaagcacttgtattggagattaccagtaatatctccaatctaagttctataaatatgggagaaccctcttaccttcaaggtaagttatggcaatacactgcttcaattctaatttatttttcatttcagggggcaaatatgcaatgagttggcctagatttttagtgacatttatgatgtttgtcttgtatgttaactgtccaacaaactgtgggtttattctaagtttacaattattgagaactgattgaggttaagatttcatgaagaaagcatgtattgtgtggaagtaatttttttttaatttatactgacctacatttatacgaagaattctgtacatgttaaaagtaaggatgaccaaatgcaaatttaatgagtgggccaattaagaaagatacatatgcacttttactgtgtaacttttgtatgctgaatggtacatatatttttttgcttttgagggaattaataaggtataattaattgtgtcttaacttttcaaagaaatttttagatggaggcaactgggatgtttgtgataatagatgagaaagacatccttgattgtagttaaattggtttggattacagatattcattattgaattgactcctattttctcacactttggaaaagacacctgaacaataaatgaatcctggatagtctactctccttcaaacaattaactgatacttgcctttgggagatgcatacaaaaggagagaacccttagactatgtcaggtcacactaggaacctcccctcactccccgtttttcttcattgtgtttcagttactgtactaacattgtggatgatactgaaattctgcataatgtgaacaggataaactatttataaactgcttttcatgggccagttctttattataaatgaattttagctttaaatgcatatacacgttcagtgtttgatagttgtgttcttaagggaggtttgttctggtgcattgtcctggagaagcagaagcagtcagtgtcggggtaccacatctgacttactgtggtggtgaccagtgtgcttcttaagggcaagatttatatttgaccacaagggaaaaagtgtgtcactggaaaaaaacgcatatacctatgtttgcaaacataactattcttcagattaaaatttgtataatttgtttatttaatgtttgaattcaggacaaaagaaaaaatgaagcttgaggtgttttcaaatagaccttatttttgctatctctttgttaggtgttaactgaagcaattcgaatatgtccagattcatttggattcatatttacattgaaaaaactcaactaagcatttgttatccacaacaacctagagtttaaaaagatcgtattttcacctgtcttcattactttctatgtagtttcattctttgtcgtggtaacttaaatttgaaattggaagaatctcttgggatagaagaaagattcttacctggtgatggaacttcatacttcatcctgtgtaagagtattatgggaagtagaaattcacttccttaaatccatcgtaagattgagcctcaagtttgcaatatacaattttaaaaatacacatacatacatacatatgtatacatttccagttttaagattttgcgagggtcttataagaaaacaaaaattccctcaggctatagaattatgttgtcatatatcagaaaagtactgatgtatccatttatatccaatgcgcaccaccggcacattgtgatttaattcaccgcttgaatctatatttctaaccacagtgacttcagtaaaaataccgtataatgaacatttcagcttcttcttacttactcgagagtttattgcaaatcttaaggattttattataaagattttttttttagtttggtagcacattttgtaccaaaaatgtcaaacactgtgctgtaagaatatccatgtttgtagaaatgtccacttttcagataatataatgcctaccattatactaacagaatcatatggtagttgatttatttttttatttattatgtatatttttggtattgtgggttcttgaggcaatgataaaaacacttaatgtattctgacatgagtgctctaatagcctccttctcctcatttttaaactgcatacattactttcaaaataggtatagatattctgtcccgccttttgagctattagcctgttcctgtttccctttgtcacctaagcaaggctttttctgagaaggtagtgaatggtttcaaatgttgcatactataagaataatcattgggtaactgttgtttagaccaacacttagaaatactatatttgtgccttttcatttttaattttaatgtgtgttgatatttggagcacaaataatgaaggtgccataatatggcttgccaatgttacctccttgaatagtcatgtgtcattgtcttgaattggtaattggagaaccttgcatgaaatatgtgatcgtgtgtgtgtgtgtgtatgcgcgtgtgtgtctgtgtgtttgtgtacatacctgtatttgcttggggcttgtgtgtggtatgttacaaagagtgaatttctggaaatagaaatcagttaaatgttgaaagttcaggttagcagaaatatttcatttaaatatgctttactttggaggacaattgattaacagaggaaatgataattttcaaaaatgtgatcaatttactgcatgatgaaatgtgaaaacagtgcctttttaggacatcaattataataaaattgttttaaaatattaacaaagatctcaaaaagttgtcatgaacattattcatttatttttaaactggatctaaataagagcttagatggccaaaattagaattaataatatacccatttaaattttgttcataaatttaaaatcttaatcagaattctttataaaatgtgggtcatagatatgacccagtgttactaaaatagaacagggattgtgaaaatccagctcaacatacttaagtatacttggcttagagccaagtatacttgaagaggtgaattattctgacttggacatgcatgctctttgatggataaaataaaaatattcaatttattcttacaaaagaaggtgggtgggtgagtgggttcgttttagtgttctcagattataaagacagctataaagacagcactttccgcacacaaagtgtattttacaaaccttttttatacaaattaatgagctctactttatttaagtgttcatggaatgatgtaaattttaggtccagttgaacaaatattgagtgcctatcatatgcaagactaactccttactaggaatgaaatcacacagtgtcttctgtttgcagtatgtgaactttatgtttgaaaagaaattattatatttaaatttttttgttgtcagagtttatcattgtatactgtaacccagtaaattttgcattcagttttaaaaaatgaagatgtaacttacctgagtctcatttttgaaaatgaaattctgcaaaaattatttaaaaattagttcttggggaaattgattttcaagattcaagtgtataaaaacttatattgaacttttcagcctcgtttttaattagctgatgttaatgataagatacataatacatgtatcttgttgctgaaaatattttttgcatttcaacacattgagttaaaataaagttgttactacttattcaagaaaaaaaaaaaaaaaa

SEQ ID NO: 29147 - DNA, 3505 bp, Homo Sapiens
aagcaagtgctgcagagggcagagggaagcatggcccagctgccccaccaccacgtcccagagcctgccttcaggaagctggtggaggacgcactgggccggacgagtaaccagcttcgctcctttcaagagacctttgagaaagtgcagccacctcccaccacacaactgctccttccagggtctgaacgccaggtgcaggctctcctgagcaggtatggccctgggaagctgtaccaggtgacaagcaacatcagtgggactgggactctggacctgactctgcctcggggccaaatcgtggccatccttcaaaacaaggacaccaaaggcaacagcggccgctggctggtggacaccgggggacatcgtgggtatgtgccggctgggaaactgcagctgtaccatgtggtccccagtgcagaggagctcagaaggcaggcggggctgaacaaagacccccgatgtctaacaccggagcccagcccagctctagtgccctctattcccaccgtgaaccaggtcatagccgcgtacccttttgtggccagaagcagccatgaagtgagcctgcaggcaggccagcctgtgaccatcctggaggcccaggacaagaaggggaaccctgagtggagcctggtggaagtgaatggacagaggggttatgtgccttctggcttcttggccagggctcggagcccagttctgtggggctggagtctgccctcttagggtaccctctttggagcctacattgccaaatgatgggggaggcttagaggctctgaccctggggggaaaagaagcaaaggaaaggtggaggtggaagggaagaccaggccagggtgggtgaagcacactcaggaggcagccagaagacatgggcgggcctcgcagagtgcttggtgtggtgggggcacaggaggctccagccaggactgctcattatgtctgcataaagaactcattccgacctggggtcacaatgcacttggacagcaggtcacagctgattggccaggactctccacaggttatggccagtcttagctgtgcctgcatccgggcctgcctgtgggcgtgggtcacacgggataatgttacctgcgtgctgtgtggttgcaggaagcgggttctggaggagtccagaactgcctggtcagacagttcacttcctacacatggtatcaggagacatcataaccaatgagtcagcttttatttctctatgctggaagctgagtttatcttgggcagtgacccactgggagccctctcaagtggggaagccatggatttatcggtgtagcagagaggttcccaagactcttgactggtcctgggagtgggtgtgaccaagtcatagttctggaatgtgtgtaggcaaattcagaggctgttccagggaagaggggattttgatactgtgttaggtgtggtgtgtgaggctgttggcagcaggtgaacagctactgctgtgttctcaggactagggaacaaaggggtatgcaaatcatagaggaaactctgggaaggcggtgataaggcctggtgggtggggaggttagggaatggcttgctttcctgtttctggttagaaggggagccagggggaacccccagtggtttcaggtggcccctgaggtcctggaggcagccgtggatgtgatgcaattggctgtgggaccttagatgtaggacacaacttcagtgttcccatccagaaagacctcactcacagggttgtgctgagaatgacgtggggctaagcatgcagagctccctgtaaactgtgaagtgtgatacaaatgtaaatgacagcagtgatctcggggtggcccccggcatgctgccctcccccacgcccatgcctgtggcagcaaaccttgttcatcagtatagctttctttcctgtaacccaggatctaccttggggggcttctcaatactgcattctatgtagccagcctctttaacttggtaagtgagccaccccattctagaacctggaaattggagcccctcaaaaacagttcctgttcaaggaggactgacctgctggggcaatgttgggtgcagtgcagtccctgcttggggtggtcatgtctaggctgttgctctgggcaaagataagttgcaagattcacagaaatgggaaaatgtgaccaagtgtgatcttaacaactgacaaagtttgtaaccaacccaagttagaatgtgtgtcaaacaggaggtagtttagatatgcttccaagaacatgtctgtgttataaccatagtgcctaagcagtgagctctggtttttgaagggcttttaagaaatatatacatgtctgtgtcagtctataacttgcctcctctgggcctgttaaagcatgaagactgcatgacacaagagaaatgcaagccctacggttcctttctcagcagcgaattcacttgagaggatgctcttgactcattctctctgctctttcctgctcagatttctgataaaaatagagagcataggggaacagataatgaaataggaaacccactcgtgggttccacagatacctaccgaaggcctactgtgtgctagaattgtagctcaggagttctcagtgtagctgctcactgaagttaccatggcaggtttcaactggcagaatccaggctccgtcccacccagagattctgatgaaattggtttagggtgtggctcgggcctcaggaattcagaaagcttcccaggtgcttccaatgtgcagccagggttagggacctctaccctagacacaaagtattggacagatagacctggtgccagagatggccatgagctgtaagctaggacgtgccccacctgagctctgcactagctagttcaaacaggcgctttaaaggcagtgtgaaaggggacagcctgttctgccaggtctcagaatgtatatttattaagtgccattaaaagggacctgaacaaaattggatgtcttgtaggcataagggaggaaaataaaatatacttggaaccaagtctatgtcatgaagggaaaataaaaatgtattcagtagcacgtgggttatggtttctcatagaccaggggataagattaaaagtcactgaagagtgggaaaatgcatgttgagaagatgagaatggcctgtattttctccaggggaatctgtgtaatgtgccttttccctctccaaatgcctagaaccatggcactgtgtcttatttatttaaccgttgggctgtctcatactaaacttgcaaagatatttgcctatgaactgaacaagacttccaggagttgaagtctggttcacaagggtaccccttgcctcctgtgatggagtgagaactcttaaacccctcaggccccaactcagttgtggagatgagggcaagattacaatatcaaaagaaagatgaatgaattcttggttaatatgacgaaccccagctcaatgagtaactgatgtgaactgctgggaataaaggacttcaaagatg

SEQ ID NO: 29148 - DNA, 861 bp, Homo Sapiens
acttccggaacaagcgtcgcgtttctgaggagaaactcttggtgagaattcccagagtgataatggctacctacagcctggcgaacgagagactacgcgctctggaagacattgaacgggaaatcggcgccatccttcagaatgcaggtactgtgatcctagaattgtccaaggaaaaaactaacgagcggctcctagaccggcaggcggcggccttcaccgcttcagtgcaacacgtggaggcggagctgtcagctcagatccgctacctcacccaggtggccacagggcagccccatgagggctccagctactcttcgaggaaggactgtcagatggctctgaagcgagtggactatgcccgcctcaagctcagtgatgtggctcgaacctgtgagcagatgctggagaactaggccagggagatggacccagagctgagagggagaccatcacctgtgccatgggacagaacctgggaacatgtagggtggggagtatgagcaccaacataccctgctggtcaaagtaccctaggacaaaggggcaaatggtgggcatggaaaaactgaagcccgagcctgcccacagctatgccttggcctctccagcagggtgctcctgctctgcactccagaaacaccctgacaggctcagagaggagatggaaactgacatacccaacccacttcctcaaacacttcatgctgctgccccagccttcccgcagacttggcctaatgaaaatacatacttcttcattcggagagacaaaacaagaactagagttttaatgataataaaagcaataataataaaagcaataacaagaaaaaaaaaaaaaaaaaaaaaaaaaaaaaa

SEQ ID NO: 29149 - DNA, 1764 bp, Homo Sapiens
gtggctgaggccggcagcagcgggcggcagctgcggcgcaaccggctccggagctgcctggcgcggccgggcgggcggcgccgctcaggctcgggctccggctgggcccggcgcggcctcggggctgcccatggggcgcggggggccgggccggtgacgccggacgcccatggacgcctctgaggagccgctgccgccggtgatctacaccatggagaacaagcccatcgtcacctgtgctggagatcagaatttatttacctctgtttatccaacgctctctcagcagcttccaagagaaccaatggaatggagaaggtcctatggccgggctccgaagatgattcacctagagtctaactttgttcaattcaaagaggagctgctgcccaaagaaggaaacaaagctctgctcacgtttcccttcctccatatttactggacagagtgctgtgataccgaagtgtataaagctacagtaaaagatgacctcaccaagtggcagaatgttctgaaggctcatagctctgtggactggttaatagtgatagttgaaaatgatgccaagaaaaaaaacaaaaccaacatccttccccgaacctctattgtggacaaaataagaaatgatttttgtaataaacagagtgacaggtgtgttgtgctctccgaccccttgaaggactcttctcgaactcaggaatcctggaatgccttcctgaccaaactcaggacattgcttcttatgtcttttaccaaaaacctaggcaagtttgaggatgacatgagaaccttgagggagaagaggactgagccaggctggagcttttgtgaatatttcatggttcaggaggagcttgcctttgttttcgagatgctgcagcagttcgaggacgccctggtgcagtacgacgaactggacgccctcttctctcagtatgtggtcaacttcggggccgggggtataaaatgtcctttccacaactcagtggcctgctggtgatgcttcgattctgtccctcgttagaatcagagtggacgtccctttgccttccatccaggggttatctttggaatgctcgagtgctcattgctgtgaacttataaaatgcccttgggtgttcatctttcttttgcacttttaaataatatcttaagctcctttacaattaaagaattagcacagtgaaaccatacacagagagaaacattggttattgtcctcagtgtttttcgctgatacttattttgatgaaagtgataccacgttatatagctgtttctctgtcgctcctttttgttactcacagcccatcctgggcatctctccaggttagcaggtggggtttggagttgtttttgttacaattggtattcctggcttgattccattacctggtgttggacattgggttcttttatgcttcttgccaccacaagcagtgctgtagtgggcatctctgccaggtgttctttttgagaacccttgtcaccatgtgtgaaggaaggagtaattttgaggagccctggtgtcagcaggagaacctggagggagatgaagtgtggggacggtcagttctagctgtgagcactgtcctcactctggaactcatcagtggcgccgatggatactggctcatagtgcttctgaagatcaggtctggatatctcactctcctgagatgccagtatagacacagaaccaaagcaaagtgtttactaagtaaaaaaataaaataaaaaaacacttctatttcttataaaaaa

SEQ ID NO: 29150 - DNA, 2020 bp, Homo Sapiens
gactgttctgaggagcggcccggacgcgcgccgcccccgcccgcgtttccccggcaacccgcggccgccgccatggacgcgctgttgggcacagggcctcgccgggctcgcggctgcctgggcgcggctggacccacgtcttcaggtcgcgcggcgcggaccccggcggcgccctgggcgcgcttctccgcctggctggagtgtgtgtgcgtggtcaccttcgacctggagctgggccaggcgctggagctggtgtatccgaacgacttccggctcacagacaaggagaaaagcagcatctgctacctgtcttttcccgactcgcactcaggctgccttggagacactcagttcagcttccgcatgcgccagtgtggagggcagaggagcccctggcatgccgacgacaggcactacaacagcagggcccctgtggcactgcagagggagccggcacactacttcggctacgtgtacttcaggcaggtgaaggacagctctgtgaagaggggctacttccagaagtctttggtgctggtgtcccgcttgccctttgtccggctgttccaagcgctgctaagcctcatcgcccccgagtactttgacaagctggcgccctgcctggaagcagtgtgcagtgagatcgaccagtggccggcgcctgcacctgggcagaccctgaacctacctgtcatgggcgttgttgtccaggtgcgcatcccatccagggtggacaagtccgagtccagtcctccgaagcagtttgaccaagagaacctgctgccagccccagtggttcttgctagcgtccacgagctggacctgttcaggtgcttccggcctgtgctgactcatatgcagacactgtgggagctcatgctcctcggggagcccctgctagtcctggcaccctcgcccgacgtgtcctcggagatggtgctggccttgaccagctgcctgcagcccctcaggttctgctgcgacttccgtccctacttcaccatccatgacagcgagttcaaggagttcaccacacgcacgcaggccccaccaaacgtggtcctgggagtcacaaaccctttctttatcaaaacactccagcactggccccacatcctccgagtcggggagcccaagatgtcaggagacctgcctaagcaagtcaagctgaaaaagccttcaaggttgaagaccctggacaccaagccaggcctctacaccgcttacacggcccacctccaccgcgacaaggcgctgctcaaacggctgctcaagggcgtgcagaagaagcggccgtcagatgtgcagagcgccctgctgcggcggcacctcctggagctcacccagagcttcatcatccccctggagcactacatggccagcctcatgcccctgcagaagagcatcacgccctggaagactcccccccagatccagcccttcagccaggatgacttcctgcgtagcctggagcatgctgggccccagctcacctgcatcctcaagggcgactggctgggtctctacaggcggtttttcaagtccccccattttgatggctggtaccggcagcggcacaaggagatggccctgaagctggaggccctgcacctggaggctatctgtgaggcgaacatcgagacctggatgaaagacaagtccgaggtggaggtcgtggacctggtcctgaaacttcgtgagaagctggtgcgggctcagggccaccagctccctgtgaaggaggctacgctgcagcgggcacagctgtacatcgagacggtcatcggctccctgcccaaagacctgcaggctgtcttgtgccctccctagaacaaagccaagggccacggtcccagggccctaggtctgcctgagcctcccactccccagtggtggcggcactgggccaagcacacactccccttccttggccccccgcccagactgcaggctccccttcctgcaccaccattgtctcagcagtaaaggcgacatttggaaccacaaaaaaaaaaaaaaa

SEQ ID NO: 29151 - DNA, 8129 bp, Homo Sapiens
cttcggcgttcgccccacggaccggcaggcggcggaccgcggcccaggctgaagctcagggccctgtctgctctgtggactcaacagtttgtggcaagacaagctcagaactgagaagctgtcaccacagtagcttggagctcggcggcacaaccagcaccatctggtcgcgatggtggacacggaaagcccactctgccccctctccccactcgaggccggcgatctagagagcccgttatctgaagagttcctgcaagaaatgggaaacatccaagagatttcgcaatccatcggcgaggatagttctggaagctttggctttacggaataccagtatttaggaagctgtcctggctcagatggctcggtcatcacggacacgctttcaccagcttcgagcccctcctcggtgacttatcctgtggtccccggcagcgtggacgagtctcccagtggagcattgaacatcgaatgtagaatctgcggggacaaggcctcaggctatcattacggagtccacgcgtgtgaaggctgcaagggcttctttcggcgaacgattcgactcaagctggtgtatgacaagtgcgaccgcagctgcaagatccagaaaaagaacagaaacaaatgccagtattgtcgatttcacaagtgcctttctgtcgggatgtcacacaacgcgattcgttttggacgaatgccaagatctgagaaagcaaaactgaaagcagaaattcttacctgtgaacatgacatagaagattctgaaactgcagatctcaaatctctggccaagagaatctacgaggcctacttgaagaacttcaacatgaacaaggtcaaagcccgggtcatcctctcaggaaaggccagtaacaatccaccttttgtcatacatgatatggagacactgtgtatggctgagaagacgctggtggccaagctggtggccaatggcatccagaacaaggaggcggaggtccgcatctttcactgctgccagtgcacgtcagtggagaccgtcacggagctcacggaattcgccaaggccatcccaggcttcgcaaacttggacctgaacgatcaagtgacattgctaaaatacggagtttatgaggccatattcgccatgctgtcttctgtgatgaacaaagacgggatgctggtagcgtatggaaatgggtttataactcgtgaattcctaaaaagcctaaggaaaccgttctgtgatatcatggaacccaagtttgattttgccatgaagttcaatgcactggaactggatgacagtgatatctccctttttgtggctgctatcatttgctgtggagatcgtcctggccttctaaacgtaggacacattgaaaaaatgcaggagggtattgtacatgtgctcagactccacctgcagagcaaccacccggacgatatctttctcttcccaaaacttcttcaaaaaatggcagacctccggcagctggtgacggagcatgcgcagctggtgcagatcatcaagaagacggagtcggatgctgcgctgcacccgctactgcaggagatctacagggacatgtactgagttccttcagatcagccacaccttttccaggagttctgaagctgacagcactacaaaggagacgggggagcagcacgattttgcacaaatatccaccactttaaccttagagcttggacagtctgagctgtaggtaaccggcatattattccatatctttgttttaaccagtacttctaagagcatagaactcaaatgctgggggtaggtggctaatctcaggactgggaagattacggcgaattatgctcaatggtctgattttaactcacccgatgttaatcaatgcacattgctttagatcacattcgtgatttaccatttaattaactggtaacctcaaaattcgtggcctgtcttcccattcaccccgcttttgactattgtgctcctttataattctgaaaactaatcagcactttttaacaatgtttataatcctataagtctagatgtatccaaaggtgaagtatgtaaaaagcagcaaaatatttatttcaaagacttcacttctgtttcctgaatctaaagaaagacaacatgctgctttttaatcataggatggagaattttaaagaactgtttgggccaggcacagtcgctcatacttgtaatcccagcactttgggaggccgaggcgggtggatcacaaggtcagcagatcgagaccatcctggccaacatggtgaaaccctgtctctactaaaaatacaaaaattagccgggtgtggtggcacatgcctgtaatcccagctactcgggaagctgaggcaggagaattgcttgaaccagggagttggaggttgcagtgagctaagactgcaccactgcactccagcctggtgacagaacgagactctgtcttaaaaacaaacaaacaaaaaaaaaatctgttagataagctatcaaaatgcagctgttgttttgtttttggctcactgttttcgtggttgtaactaatatgtggaaaggcccatttccaggtttgcgtagaagagcccagaaaacagagtctcaagacccccgctctggactgtcataagctagcacccgtggtaagcgggacgagacaagctcccgaagcccgccagcttcctgctccactcagctccgtccagtcaacctgaacccacccagtccagctgtctgtgggaatggtggtgttcttagggacagactgacaccttacttgtcagtgttcctccgggccccatttggcagctcccgtatcttttgttatgttgcttttaaagatatgatgttttattgttttaactcttggtgacagtagatgctctctggagcgcagacgaggcacatgtgtcttcatagcctgggctgggtgggagccagtcaccctgcggatcgagagagggggtagagtcttcttcaaatggcagttttacttcaaatggcagatttcacaagagttggttattttttacaatggtttaggttgttaagtctcctttgtatgtaaggtagttttttcaacatctaaaatttttgttttagccttcaaaaccaacttaccaacctcagtccagctgggaaggcagcgttgattatggtagtttgtcaagaatatatggacctggaaacactttctctctctgtccacctggtagataaattgtcctgttgagaatttttagatctggactggaactgccaggaccaccgcctccagggagtcgctgggcacctggaggtatcgtcgatgcctctcccccatctttagaaaatttggctcttctgaggtcattattattttaagaatgattaggattgataagggtcccatgaccagcattatgaaaatgcgagagtgggaaggacacagtgtgagacttccactagaaaaaagtgaaagttagggttaggacatccttttttaaaaattacaaatttagtccgttttggtttttgtaatcaggctaggcacagtggctcacacatggaatcccagcactttgggaggccgaggtgggaggatcacttgagcccaggagttcgagaccagcctaggcaacatagcaagaccctgtctgtacacaaaatttaaaaattagttcatcggggtggcacacatcagtagtcccagctactctgcaggctgaggtgggaggattgcttgaacccaggaggtcgaggctgcagtgagctgtgatctcaccactgcattccagcctgggtgacagagttagattccaccctctcccaccccggcaaaaaaaaaaaaaaaagatgcaatcaaaggggctgttggccagcaatggcagcagcagcggcgggcagtctgcccaagtgtcttaggaaccaaaagcaaataaaagtgtttccatatatgccaccagccaagtggccatcctaattcagaaagaagctagcctttgagtgtctgtcatggtgcatccgtttcagtattatttcctaaaatgagaagcccctgtgtcaacaagatccaggggctggagcccaatgccaagcctgtgttgtccccagcgaccctgcagctgctcgctctgatgtaccctgtgccattcaaggagatgtggtccaggaaagtgagcctcatggttttcagagaagtcattgttctgtttacattttcataaaacctgtttaaaatagctccccgtctcaggctttcagcagtaacagtgagctgactggcaagttcgatgttagctcccgggacactcagcagcgatggtgagcattttggtttccttaaggcccagcaagacttccagggacatctctggtgaagccagaatggagacacccgtgacctcaggctgaaagtcactcgacattggtctcttgtgttgatagggaaggaaatcaggcattcctatttctttaaataacaaaaccactaattgccactcaatgctggaatattttgggtcacctaatcatagatttctcagggcatcaatactcaaatataggctgattatgccccagttcaaatgggaactattaacagagtgcatttcttgcttgctgggtttcaacagacatcagccaaaagaacaaaagagatgtcaggacagattccaggagtgtcggagcacatgtgtggcacccgctccctctggcagcgaatgtaggaagtcgccaaatttacccactcttcaacaagtcattgtttaaacacggtttttcattttctcaacttttaatagcaaaaagtgccaaagtcctcagagacctaacagccttggtctaccgtgctgaccagggtgaaggcacggcgagggactcctcccagacgtgcctcttgtgtgccagctggctgtggctcgggagcagacgcaggcctctccattgtccaggggagcctggcggcgcatccctcctctcccacctcctggcacttccagctgggtgtcccacatgttggattccgtccccaccacacttccagagaccggagaactgtgcagggcctaaggccgtttggatgaattgtcaaaacaagatgcttccagttacagcggcaggagcgggactgggagcacgggctgacggctgctggtgcctttcttcccacctcgcttgcctgtttccgcttgacccttcctccagctccgatgagaagagtataaagcatcttcctaacgggtgtgtttgctatacgaacataatggacgtgaagtggggcagaaacccagaactcagcattcaaggatgcccaggagagctgtccctgttttaaagagctgtgttttgttttgtttcgcatttagagagcagacaaggcacccttctgctgcgctgatacgtttcttacactgggccattttagacccccagggaaacagccttcctggagcgttgtctggaggttccagggacagggcagcctcccagagccgagcaagagctcaaggtacaaatgagagatttgctataccgtgagaagtcaacaacttagccaccacttccccgcaatggaccatgtaacaaatacctcagcaggccctgcaaaaggccatgctagagctgaggcgcacagcctgtggcctctgtagttagggcaggtgggatggagactccttgagtgcacacacctgagcctgcccacacacaggggagcagcatctcgtatgacgtctggaaggaacttcggttgtgtaaagggagccttgaagatacgtgcaaaaggtgctaccccaatttggtgaaactgacattgggcacgtcttgggcttaggagaagcggccgatggtcccggcctgcagtgacaaacccccctccccgcaccgcccccagcaccccctctcctcttcacctcttcctgctggccacgaggaagccacttcctcagagagaccctaccagatgcggatggaaacagatgcaccaaagcaagccctgatgaaaccgcgacttcctaaggtctgtctcctctgaacttgcacctgggcctctctgtgtttggttccaagcacttcccacctcaaactcccattttcaaaccactgtatctctgcgcacatctgctacttaccagccgcatacatgatggagggttttttggtcctgatccagtggccacacctgtctttgaaatgtctcactgaactccagttttaaaatagattcattgcttcaacacagcaagcccaatgcacccagctaagactggcttgaccgacagcctggcctttggtggggggcttcctggggcctggggaaagctggccaccttcaacagctggtacctcttcaacagtgtggcctttcaaaatgcagatgccaccaggagaacatgcccacagctcaccacctatggatgccatggctctgggcagctttcaaagcaggttcctgtggtctcctcagctgtttgagggggtaacagcaaatcagcctccattttaaaatgaaaacaccagcctccagatgtagggcctgctgggtgttgctagccgctggtccccaggcacggtgcactttctccacctcctgcagcctccctgttgtttctagactcttgcacctggtgagtgcaaggataggtgacccaggggcctgcagccttgtcctcagctcccatctcctggactgccagcctcaccctctgcagttagcatggttggcctgatgcagggatcccgagggattactttttagaccttctttcacattcagaaaagtagtatagattcaggagaggcaagaaaattatgctgtccatagaagtcacccatgaagactgatgccaccacctgaaggctcatgattgttaaaaatgtccacgggaacctctcgtccacaggaggtttgtctcaacacttcccatttttacggcattggcattgccaagcatggggaagtatctgctcttctcatgttaaaagtggcccagcttttcttaactcagtccaagctgacttgtttagctgcactggaatttcttaccaaccaaatatttgcatcgagcaaagggggctgtgtgcacctccctaatggcagcgatgatggctgctgtcattcaagcccatcttcagacgtcacagtctggaagtgaaatgtccacaaacatctgtggcagaaaaggctatacggaccacccagttgtgctgcagctttacagagcaaggaagggttgtggcaaataaatgattaacctgcctcgactgtgctgagggcaacaaaggccatctcaccaaaggattattcgatgccattaaatcatcccgtgaccttcctgcttccgagtccatggcctttgcccagggcatgtactcccctgagaggccttctgcctagaaagatctatgactgggttccaaagttgaggcctaggtttttgctgggatttagatattttcaggcaccattttgacagcattcaggaaaacggttattgaccccatagactagggtaagaataaaggcaataaatttggtctgactcagaatataggagatccatatatttctctggaaaccacagtgtacactaaaatgtgaaattgaaggttttgttaaaaagaaaaagataatgagcttcatgctttgtttaattacataatgatttccattacgctatttctgtgaaatgcagcaggttcttaaacgttatttcagtggcatgggctggaagcttatcacaaaaagccatgtgtgtggccttatcagaacagaaagagacaggctggtgcccaaggctgctgcctgctccaccttttgccagctctggacatctgaggacgtcccggcagatctggaatggggccctcaactgaccatttgcttctcagaatttcagtttgagacatgagaggtataatcagttacttttctccccccagagaaacccttttgtgaggggagaggagctatggtatgtggttcagctgaaacacatacaactgcatccttttggagtcctttgccaacaaaaacagaccaacagaccagatggtgtccatgttcaatatcatgtcttgatggacgcagctgatgacctcaaatacttgagtggtctcatggctgttagatggattatttgaaaaaaaaaaaaaaaaa

SEQ ID NO: 29152 - DNA, 8497 bp, Homo Sapiens
gcattgttctaagatacgtaagtgaacaaaacccatgacaccctcgtctatgagagctgatcctctggcagggacagacaggtcatgagtggagtgatggagcagctggcctggtgacttagccgccttcaggtacagtaggaggagcaagcccagggcagttctagccaggcacggtggctcacacctgtaatcctaacacttggaaggctgaggtaggaggactgcttgatcctaggaggcagaggttgcaaggagccgaaattgtgccactgtactccagcctgggcaacatagcaagaccctgtcattcatagttctggaggctgggaagttcaagatcaaagtgccagcagattcagtgtcatgtgaggacgtgcttcctgcttcatagataagagtgccacacccccctgtcccagtgcactggggctgtggatcccttcaaagctgagattgcctgtctgtggtctccagcgttaagcacagtcattagctcagcttggagctcggcggcacaaccagcaccatctggtcgcgatggtggacacggaaagcccactctgccccctctccccactcgaggccggcgatctagagagcccgttatctgaagagttcctgcaagaaatgggaaacatccaagagatttcgcaatccatcggcgaggatagttctggaagctttggctttacggaataccagtatttaggaagctgtcctggctcagatggctcggtcatcacggacacgctttcaccagcttcgagcccctcctcggtgacttatcctgtggtccccggcagcgtggacgagtctcccagtggagcattgaacatcgaatgtagaatctgcggggacaaggcctcaggctatcattacggagtccacgcgtgtgaaggctgcaagggcttctttcggcgaacgattcgactcaagctggtgtatgacaagtgcgaccgcagctgcaagatccagaaaaagaacagaaacaaatgccagtattgtcgatttcacaagtgcctttctgtcgggatgtcacacaacgcgattcgttttggacgaatgccaagatctgagaaagcaaaactgaaagcagaaattcttacctgtgaacatgacatagaagattctgaaactgcagatctcaaatctctggccaagagaatctacgaggcctacttgaagaacttcaacatgaacaaggtcaaagcccgggtcatcctctcaggaaaggccagtaacaatccaccttttgtcatacatgatatggagacactgtgtatggctgagaagacgctggtggccaagctggtggccaatggcatccagaacaaggaggcggaggtccgcatctttcactgctgccagtgcacgtcagtggagaccgtcacggagctcacggaattcgccaaggccatcccaggcttcgcaaacttggacctgaacgatcaagtgacattgctaaaatacggagtttatgaggccatattcgccatgctgtcttctgtgatgaacaaagacgggatgctggtagcgtatggaaatgggtttataactcgtgaattcctaaaaagcctaaggaaaccgttctgtgatatcatggaacccaagtttgattttgccatgaagttcaatgcactggaactggatgacagtgatatctccctttttgtggctgctatcatttgctgtggagatcgtcctggccttctaaacgtaggacacattgaaaaaatgcaggagggtattgtacatgtgctcagactccacctgcagagcaaccacccggacgatatctttctcttcccaaaacttcttcaaaaaatggcagacctccggcagctggtgacggagcatgcgcagctggtgcagatcatcaagaagacggagtcggatgctgcgctgcacccgctactgcaggagatctacagggacatgtactgagttccttcagatcagccacaccttttccaggagttctgaagctgacagcactacaaaggagacgggggagcagcacgattttgcacaaatatccaccactttaaccttagagcttggacagtctgagctgtaggtaaccggcatattattccatatctttgttttaaccagtacttctaagagcatagaactcaaatgctgggggtaggtggctaatctcaggactgggaagattacggcgaattatgctcaatggtctgattttaactcacccgatgttaatcaatgcacattgctttagatcacattcgtgatttaccatttaattaactggtaacctcaaaattcgtggcctgtcttcccattcaccccgcttttgactattgtgctcctttataattctgaaaactaatcagcactttttaacaatgtttataatcctataagtctagatgtatccaaaggtgaagtatgtaaaaagcagcaaaatatttatttcaaagacttcacttctgtttcctgaatctaaagaaagacaacatgctgctttttaatcataggatggagaattttaaagaactgtttgggccaggcacagtcgctcatacttgtaatcccagcactttgggaggccgaggcgggtggatcacaaggtcagcagatcgagaccatcctggccaacatggtgaaaccctgtctctactaaaaatacaaaaattagccgggtgtggtggcacatgcctgtaatcccagctactcgggaagctgaggcaggagaattgcttgaaccagggagttggaggttgcagtgagctaagactgcaccactgcactccagcctggtgacagaacgagactctgtcttaaaaacaaacaaacaaaaaaaaaatctgttagataagctatcaaaatgcagctgttgttttgtttttggctcactgttttcgtggttgtaactaatatgtggaaaggcccatttccaggtttgcgtagaagagcccagaaaacagagtctcaagacccccgctctggactgtcataagctagcacccgtggtaagcgggacgagacaagctcccgaagcccgccagcttcctgctccactcagctccgtccagtcaacctgaacccacccagtccagctgtctgtgggaatggtggtgttcttagggacagactgacaccttacttgtcagtgttcctccgggccccatttggcagctcccgtatcttttgttatgttgcttttaaagatatgatgttttattgttttaactcttggtgacagtagatgctctctggagcgcagacgaggcacatgtgtcttcatagcctgggctgggtgggagccagtcaccctgcggatcgagagagggggtagagtcttcttcaaatggcagttttacttcaaatggcagatttcacaagagttggttattttttacaatggtttaggttgttaagtctcctttgtatgtaaggtagttttttcaacatctaaaatttttgttttagccttcaaaaccaacttaccaacctcagtccagctgggaaggcagcgttgattatggtagtttgtcaagaatatatggacctggaaacactttctctctctgtccacctggtagataaattgtcctgttgagaatttttagatctggactggaactgccaggaccaccgcctccagggagtcgctgggcacctggaggtatcgtcgatgcctctcccccatctttagaaaatttggctcttctgaggtcattattattttaagaatgattaggattgataagggtcccatgaccagcattatgaaaatgcgagagtgggaaggacacagtgtgagacttccactagaaaaaagtgaaagttagggttaggacatccttttttaaaaattacaaatttagtccgttttggtttttgtaatcaggctaggcacagtggctcacacatggaatcccagcactttgggaggccgaggtgggaggatcacttgagcccaggagttcgagaccagcctaggcaacatagcaagaccctgtctgtacacaaaatttaaaaattagttcatcggggtggcacacatcagtagtcccagctactctgcaggctgaggtgggaggattgcttgaacccaggaggtcgaggctgcagtgagctgtgatctcaccactgcattccagcctgggtgacagagttagattccaccctctcccaccccggcaaaaaaaaaaaaaaaagatgcaatcaaaggggctgttggccagcaatggcagcagcagcggcgggcagtctgcccaagtgtcttaggaaccaaaagcaaataaaagtgtttccatatatgccaccagccaagtggccatcctaattcagaaagaagctagcctttgagtgtctgtcatggtgcatccgtttcagtattatttcctaaaatgagaagcccctgtgtcaacaagatccaggggctggagcccaatgccaagcctgtgttgtccccagcgaccctgcagctgctcgctctgatgtaccctgtgccattcaaggagatgtggtccaggaaagtgagcctcatggttttcagagaagtcattgttctgtttacattttcataaaacctgtttaaaatagctccccgtctcaggctttcagcagtaacagtgagctgactggcaagttcgatgttagctcccgggacactcagcagcgatggtgagcattttggtttccttaaggcccagcaagacttccagggacatctctggtgaagccagaatggagacacccgtgacctcaggctgaaagtcactcgacattggtctcttgtgttgatagggaaggaaatcaggcattcctatttctttaaataacaaaaccactaattgccactcaatgctggaatattttgggtcacctaatcatagatttctcagggcatcaatactcaaatataggctgattatgccccagttcaaatgggaactattaacagagtgcatttcttgcttgctgggtttcaacagacatcagccaaaagaacaaaagagatgtcaggacagattccaggagtgtcggagcacatgtgtggcacccgctccctctggcagcgaatgtaggaagtcgccaaatttacccactcttcaacaagtcattgtttaaacacggtttttcattttctcaacttttaatagcaaaaagtgccaaagtcctcagagacctaacagccttggtctaccgtgctgaccagggtgaaggcacggcgagggactcctcccagacgtgcctcttgtgtgccagctggctgtggctcgggagcagacgcaggcctctccattgtccaggggagcctggcggcgcatccctcctctcccacctcctggcacttccagctgggtgtcccacatgttggattccgtccccaccacacttccagagaccggagaactgtgcagggcctaaggccgtttggatgaattgtcaaaacaagatgcttccagttacagcggcaggagcgggactgggagcacgggctgacggctgctggtgcctttcttcccacctcgcttgcctgtttccgcttgacccttcctccagctccgatgagaagagtataaagcatcttcctaacgggtgtgtttgctatacgaacataatggacgtgaagtggggcagaaacccagaactcagcattcaaggatgcccaggagagctgtccctgttttaaagagctgtgttttgttttgtttcgcatttagagagcagacaaggcacccttctgctgcgctgatacgtttcttacactgggccattttagacccccagggaaacagccttcctggagcgttgtctggaggttccagggacagggcagcctcccagagccgagcaagagctcaaggtacaaatgagagatttgctataccgtgagaagtcaacaacttagccaccacttccccgcaatggaccatgtaacaaatacctcagcaggccctgcaaaaggccatgctagagctgaggcgcacagcctgtggcctctgtagttagggcaggtgggatggagactccttgagtgcacacacctgagcctgcccacacacaggggagcagcatctcgtatgacgtctggaaggaacttcggttgtgtaaagggagccttgaagatacgtgcaaaaggtgctaccccaatttggtgaaactgacattgggcacgtcttgggcttaggagaagcggccgatggtcccggcctgcagtgacaaacccccctccccgcaccgcccccagcaccccctctcctcttcacctcttcctgctggccacgaggaagccacttcctcagagagaccctaccagatgcggatggaaacagatgcaccaaagcaagccctgatgaaaccgcgacttcctaaggtctgtctcctctgaacttgcacctgggcctctctgtgtttggttccaagcacttcccacctcaaactcccattttcaaaccactgtatctctgcgcacatctgctacttaccagccgcatacatgatggagggttttttggtcctgatccagtggccacacctgtctttgaaatgtctcactgaactccagttttaaaatagattcattgcttcaacacagcaagcccaatgcacccagctaagactggcttgaccgacagcctggcctttggtggggggcttcctggggcctggggaaagctggccaccttcaacagctggtacctcttcaacagtgtggcctttcaaaatgcagatgccaccaggagaacatgcccacagctcaccacctatggatgccatggctctgggcagctttcaaagcaggttcctgtggtctcctcagctgtttgagggggtaacagcaaatcagcctccattttaaaatgaaaacaccagcctccagatgtagggcctgctgggtgttgctagccgctggtccccaggcacggtgcactttctccacctcctgcagcctccctgttgtttctagactcttgcacctggtgagtgcaaggataggtgacccaggggcctgcagccttgtcctcagctcccatctcctggactgccagcctcaccctctgcagttagcatggttggcctgatgcagggatcccgagggattactttttagaccttctttcacattcagaaaagtagtatagattcaggagaggcaagaaaattatgctgtccatagaagtcacccatgaagactgatgccaccacctgaaggctcatgattgttaaaaatgtccacgggaacctctcgtccacaggaggtttgtctcaacacttcccatttttacggcattggcattgccaagcatggggaagtatctgctcttctcatgttaaaagtggcccagcttttcttaactcagtccaagctgacttgtttagctgcactggaatttcttaccaaccaaatatttgcatcgagcaaagggggctgtgtgcacctccctaatggcagcgatgatggctgctgtcattcaagcccatcttcagacgtcacagtctggaagtgaaatgtccacaaacatctgtggcagaaaaggctatacggaccacccagttgtgctgcagctttacagagcaaggaagggttgtggcaaataaatgattaacctgcctcgactgtgctgagggcaacaaaggccatctcaccaaaggattattcgatgccattaaatcatcccgtgaccttcctgcttccgagtccatggcctttgcccagggcatgtactcccctgagaggccttctgcctagaaagatctatgactgggttccaaagttgaggcctaggtttttgctgggatttagatattttcaggcaccattttgacagcattcaggaaaacggttattgaccccatagactagggtaagaataaaggcaataaatttggtctgactcagaatataggagatccatatatttctctggaaaccacagtgtacactaaaatgtgaaattgaaggttttgttaaaaagaaaaagataatgagcttcatgctttgtttaattacataatgatttccattacgctatttctgtgaaatgcagcaggttcttaaacgttatttcagtggcatgggctggaagcttatcacaaaaagccatgtgtgtggccttatcagaacagaaagagacaggctggtgcccaaggctgctgcctgctccaccttttgccagctctggacatctgaggacgtcccggcagatctggaatggggccctcaactgaccatttgcttctcagaatttcagtttgagacatgagaggtataatcagttacttttctccccccagagaaacccttttgtgaggggagaggagctatggtatgtggttcagctgaaacacatacaactgcatccttttggagtcctttgccaacaaaaacagaccaacagaccagatggtgtccatgttcaatatcatgtcttgatggacgcagctgatgacctcaaatacttgagtggtctcatggctgttagatggattatttgaaaaaaaaaaaaaaaaa

SEQ ID NO: 29153 - DNA, 3219 bp, Homo Sapiens
actgtaggcaccaccgggcgccgaatggctgttttctaactgggatcctcggtgacgtatggctgcctgccccttggcagctgtctttatggaccagtaggcagagcgaaattgacgctgacaagacttttgcatcttggaagggactgtaatctactgtagtgaagaacagagcctctcaatcagacgggtgtaaataagagacggaggggagtccaaaagaaaaggaagaggaggaaaaacaagtgtgtgttggggggaacagggggaaaagcatttttggtggatggtatgaagccagccatggaaactgcagccgaggaaaatactgaacaaagccaagagagaaaagtgaacagcagagctgaaatggaaattggcaggtaccactggatgtacccaggctcaaagaaccaccagtaccatcccgtgccaaccctgggggacagggctagccccttgagcagtccaggctgctttgaatgctgcatcaagtgtctgggaggagtcccctacgcctccctggtggccaccatcctctgcttctccggggtggccttattctgcggctgtgggcatgtggctctcgcaggcaccgtggcgattcttgagcaacacttctccaccaacgccagtgaccatgccttgctgagcgaggtgatacaactgatgcagtatgtcatctatggaattgcgtcctttttcttcttgtatgggatcattctgttggcagaaggcttttacaccacaagtgcagtgaaagaactgcacggtgagtttaaaacaaccgcttgtggccgatgcatcagtggaatgttcgttttcctcacctatgtgcttggagtggcctggctgggtgtgtttggtttctcagcggtgcccgtgtttatgttctacaacatatggtcaacttgtgaagtcatcaagtcaccgcagaccaacgggaccacgggtgtggagcagatctgtgtggatatccgacaatacggtatcattccttggaatgctttccccggaaaaatatgtggctctgccctggagaacatctgcaacacaaacgagttctacatgtcctatcacctgttcattgtggcctgtgcaggagctggtgccaccgtcattgccctgatccacttcctcatgatactgtcttctaactgggcttacttaaaggatgcgagcaaaatgcaggcttaccaggatatcaaagcaaaggaagaacaggaactgcaagatatccagtctcggtcaaaagaacaactcaattcttacacataaatgtttgccagagtgtttcggccgacgtatttacagctctgacaaatcatcagacagctgctctgcagtacagatgtgtatcccaccaaactaatgtagatgtacaaacacttcactgtctgtctcaagctgctgggatgtatctctaggaaaaccttccagtgggtaaatctttttctttagaacaaatattggaggtttcatgttagccattttaaaaggcaacactttgacaaaatgatcgttcatactttgggaatttgtggcatgttcacatttattgctagggcaattctaccaagacactcaatggaatatgtcacactccttaatagggacctgtgactccttaataaggacctgtgacatgcccagcatcaagggataagaccgtaaattcacatatatgccatctgtcctcaagtgttatctacataggaaataaaatggaattgatgtaaagttccatttctgacagctgacatttattaaactttggatcaaagataatgtgattcttatgattgatttctcaaactagcttttccctcccaagtccaggacccattaatttcctgagccaatcagaaatatatttttcaataatgctaaaattagctacaattctgctgaccctactattaaagaatctggatgctggactcactgacaagctttccagaagcaattttataacagatttcattttaacaaaatactgatccaattttcattattcttgagaaatgtcagctttgccttaatgagtatttgctttaaatttctaagaatttatatcataactagagacccaaatatctttcacagaattttgttccataaatgtttttcttaattattaagaagtgttaccttattaaaatgaccaccattctaaaccatttttcagtggtctggatacgaagtttacagtttcataccaactatctaaaacctaattgcaaattgaccacagacctctaacctcctacttttatagacttgaatacttaagtaatttaaattagggttggtatttcatttttttcttatctaaatcttagtttcctggaataataaagtttgatgttcagcaagagaactgcttgagtttaagccattttcaaaagaaacttgccttttacattattgtgttccagaacattaagtgactgtaggtactgggtattagtgatggtaaactttgtgttgctctttatgaaatgatccatataactgttgggtgcatcagtgcttttcaaaggggctgcttactatagggttaactatgtatattcattgttaagagttaacttgtggtttggctgtttcctggattttataacatacatgtgcagaaatgtattcaaatgaaaggaagcatacctttatcaagatgctattaaaattgaacatcaagtataatatttcatttggattctcttttttggttaatgcctaaaaatgcctatttgggatttttttttttttttaaattaagagaagctctcttctgtgtagaacagttgttccaaaatagcttagtgttttgttttcctgttgcatgacagatttaactattctttccagcagtggaggtgctgtcagagtccagtgttctagaagaggcagtgtctaaagcctaattttacttttctaattctggtagctattaccaggaatttttgaaagttttgtttaagtagtctaatattttttatgtaaagagcattaaattttgctatgtataaatttttgtaacctaacagtgaatcaatattttctatcagtgccaagggcttcctgtagttctattcaagtgttacaataaatatttgtagataatagtcaatacttgtgtatgcttattttaaagatctatttaggtggaaatagttgtggatgtactaagagtaatgaaataaaattatagcttcaaaa

SEQ ID NO: 29154 - DNA, 2128 bp, Homo Sapiens
gggggtcccatcgggcccgccctcgcacgtcactccgggacccccgcggcctccgcaggttctgcgctccaggccggagtcagagactccaggatcggttctttcatcttcgccgcccctgcgcgtccagctcttctaagacgagatgccgtcgggcttccaacagataggctccgaagatggggaaccccctcagcagcgagtgactgggaccctggtccttgctgtgttctctgcggtgcttggctccctgcagtttgggtacaacattggggtcatcaatgcccctcagaaggtgattgaacagagctacaatgagacgtggctggggaggcaggggcctgagggacccagctccatccctccaggcaccctcaccaccctctgggccctctccgtggccatcttttccgtgggcggcatgatttcctccttcctcattggtatcatctctcagtggcttggaaggaaaagggccatgctggtcaacaatgtcctggcggtgctggggggcagcctcatgggcctggccaacgctgctgcctcctatgaaatgctcatccttggacgattcctcattggcgcctactcagggctgacatcagggctggtgcccatgtacgtgggggagattgctcccactcacctgcggggcgccctggggacgctcaaccaactggccattgttatcggcattctgatcgcccaggtgctgggcttggagtccctcctgggcactgccagcctgtggccactgctcctgggcctcacagtgctacctgccctcctgcagctggtcctgctgcccttctgtcccgagagcccccgctacctctacatcatccagaatctcgaggggcctgccagaaagagtctgaagcgcctgacaggctgggccgatgtttctggagtgctggctgagctgaaggatgagaagcggaagctggagcgtgagcggccactgtccctgctccagctcctgggcagccgtacccaccggcagcccctgatcattgcggtcgtgctgcagctgagccagcagctctctggcatcaatgctgttttctattattcgaccagcatcttcgagacagcaggggtaggccagcctgcctatgccaccataggagctggtgtggtcaacacagtcttcaccttggtctcggtgttgttggtggagcgggcggggcgccggacgctccatctcctgggcctggcgggcatgtgtggctgtgccatcctgatgactgtggctctgctcctgctggagcgagttccagccatgagctacgtctccattgtggccatctttggcttcgtggcattttttgagattggccctggccccattccttggttcatcgtggccgagctcttcagccagggaccccgcccggcagccatggctgtggctggtttctccaactggacgagcaacttcatcattggcatgggtttccagtatgttgcggaggctatggggccctacgtcttccttctatttgcggtcctcctgctgggcttcttcatcttcaccttcttaagagtacctgaaactcgaggccggacgtttgaccagatctcagctgccttccaccggacaccctctcttttagagcaggaggtgaaacccagcacagaacttgagtatttagggccagatgagaacgactgaggggccaggcaggggtgggagagccagctctctctacccggcccagagaccccttcctttcctctgcagcactttaaccctctcttccctattatttccgggtggaaaagaatccctgcagcctggtagaattgggaagctgggggaagggtggtctgagcaccccctcattcccctcgtgtgactctcttggattatttatgtgttgtggtttggccgtggccatcagggtgggccactctcccctccctcttccttcccccatcccctttcctccccaccttccccagactcagctccagaataccttcttcgctgctagagaagggggattggagggaagacaggtctagactttctcagtgggacaaaccagagcagagagcaggacaggagacaagaaatccagtttcccaccaccttggactcctcccacaatctgggactttcact

SEQ ID NO: 29155 - DNA, 2318 bp, Homo Sapiens
gcacagaagcgagtccgactgtgctcgctgctcagcgccgcacccggaagatgaggctcgccgtgggagccctgctggtctgcgccgtcctggggctgtgtctggctgtccctgataaaactgtgagatggtgtgcagtgtcggagcatgaggccactaagtgccagagtttccgcgaccatatgaaaagcgtcattccatccgatggtcccagtgttgcttgtgtgaagaaagcctcctaccttgattgcatcagggccattgcggcaaacgaagcggatgctgtgacactggatgcaggtttggtgtatgatgcttacctggctcccaataacctgaagcctgtggtggcagagttctatgggtcaaaagaggatccacagactttctattatgctgttgctgtggtgaagaaggatagtggcttccagatgaaccagcttcgaggcaagaagtcctgccacacgggtctaggcaggtccgctgggtggaacatccccataggcttactttactgtgacttacctgagccacgtaaacctcttgagaaagcagtggccaatttcttctcgggcagctgtgccccttgtgcggatgggacggacttcccccagctgtgtcaactgtgtccagggtgtggctgctccacccttaaccaatacttcggctactcgggagccttcaagtgtctgaaggatggtgctggggatgtggcctttgtcaagcactcgactatatttgagaacttggcaaacaaggctgacagggaccagtatgagctgctttgcctggacaacacccggaagccggtagatgaatacaaggactgccacttggcccaggtcccttctcataccgtcgtggcccgaagtatgggcggcaaggaggacttgatctgggagcttctcaaccaggcccaggaacattttggcaaagacaaatcaaaagaattccaactattcagctctcctcatgggaaggacctgctgtttaaggactctgcccacgggtttttaaaagtcccccccaggatggatgccaagatgtacctgggctatgagtatgtcactgccatccggaatctacgggaaggcacatgcccagaagccccaacagatgaatgcaagcctgtgaagtggtgtgcgctgagccaccacgagaggctcaagtgtgatgagtggagtgttaacagtgtagggaaaatagagtgtgtatcagcagagaccaccgaagactgcatcgccaagatcatgaatggagaagctgatgccatgagcttggatggagggtttgtctacatagcgggcaagtgtggtctggtgcctgtcttggcagaaaactacaataagagcgataattgtgaggatacaccagaggcagggtattttgctgtagcagtggtgaagaaatcagcttctgacctcacctgggacaatctgaaaggcaagaagtcctgccatacggcagttggcagaaccgctggctggaacatccccatgggcctgctctacaataagatcaaccactgcagatttgatgaatttttcagtgaaggttgtgcccctgggtctaagaaagactccagtctctgtaagctgtgtatgggctcaggcctaaacctgtgtgaacccaacaacaaagagggatactacggctacacaggcgctttcaggtgtctggttgagaagggagatgtggcctttgtgaaacaccagactgtcccacagaacactgggggaaaaaaccctgatccatgggctaagaatctgaatgaaaaagactatgagttgctgtgccttgatggtaccaggaaacctgtggaggagtatgcgaactgccacctggccagagccccgaatcacgctgtggtcacacggaaagataaggaagcttgcgtccacaagatattacgtcaacagcagcacctatttggaagcaacgtaactgactgctcgggcaacttttgtttgttccggtcggaaaccaaggaccttctgttcagagatgacacagtatgtttggccaaacttcatgacagaaacacatatgaaaaatacttaggagaagaatatgtcaaggctgttggtaacctgagaaaatgctccacctcatcactcctggaagcctgcactttccgtagaccttaaaatctcagaggtagggctgccaccaaggtgaagatgggaacgcagatgatccatgagtttgccctggtttcactggcccaagtggtttgtgctaaccacgtctgtcttcacagctctgtgttgccatgtgtgctgaacaaaaaataaaaattattattgattttatatttc

SEQ ID NO: 29156 - DNA, 3119 bp, Homo Sapiens
cgcggtatctgcatcgggcctcactggcttcaggagctgaataccctcccaggcacacacaggtgggacacaaataagggttttggaaccactattttctcatcacgacagcaacttaaaatgcctgggaagatggtcgtgatccttggagcctcaaatatactttggataatgtttgcagcttctcaagcttttaaaatcgagaccaccccagaatctagatatcttgctcagattggtgactccgtctcattgacttgcagcaccacaggctgtgagtccccatttttctcttggagaacccagatagatagtccactgaatgggaaggtgacgaatgaggggaccacatctacgctgacaatgaatcctgttagttttgggaacgaacactcttacctgtgcacagcaacttgtgaatctaggaaattggaaaaaggaatccaggtggagatctactcttttcctaaggatccagagattcatttgagtggccctctggaggctgggaagccgatcacagtcaagtgttcagttgctgatgtatacccatttgacaggctggagatagacttactgaaaggagatcatctcatgaagagtcaggaatttctggaggatgcagacaggaagtccctggaaaccaagagtttggaagtaacctttactcctgtcattgaggatattggaaaagttcttgtttgccgagctaaattacacattgatgaaatggattctgtgcccacagtaaggcaggctgtaaaagaattgcaagtctacatatcacccaagaatacagttatttctgtgaatccatccacaaagctgcaagaaggtggctctgtgaccatgacctgttccagcgagggtctaccagctccagagattttctggagtaagaaattagataatgggaatctacagcacctttctggaaatgcaactctcaccttaattgctatgaggatggaagattctggaatttatgtgtgtgaaggagttaatttgattgggaaaaacagaaaagaggtggaattaattgttcaagagaaaccatttactgttgagatctcccctggaccccggattgctgctcagattggagactcagtcatgttgacatgtagtgtcatgggctgtgaatccccatctttctcctggagaacccagatagacagccctctgagcgggaaggtgaggagtgaggggaccaattccacgctgaccctgagccctgtgagttttgagaacgaacactcttatctgtgcacagtgacttgtggacataagaaactggaaaagggaatccaggtggagctctactcattccctagagatccagaaatcgagatgagtggtggcctcgtgaatgggagctctgtcactgtaagctgcaaggttcctagcgtgtacccccttgaccggctggagattgaattacttaagggggagactattctggagaatatagagtttttggaggatacggatatgaaatctctagagaacaaaagtttggaaatgaccttcatccctaccattgaagatactggaaaagctcttgtttgtcaggctaagttacatattgatgacatggaattcgaacccaaacaaaggcagagtacgcaaacactttatgtcaatgttgcccccagagatacaaccgtcttggtcagcccttcctccatcctggaggaaggcagttctgtgaatatgacatgcttgagccagggctttcctgctccgaaaatcctgtggagcaggcagctccctaacggggagctacagcctctttctgagaatgcaactctcaccttaatttctacaaaaatggaagattctggggtttatttatgtgaaggaattaaccaggctggaagaagcagaaaggaagtggaattaattatccaagttactccaaaagacataaaacttacagcttttccttctgagagtgtcaaagaaggagacactgtcatcatctcttgtacatgtggaaatgttccagaaacatggataatcctgaagaaaaaagcggagacaggagacacagtactaaaatctatagatggcgcctataccatccgaaaggcccagttgaaggatgcgggagtatatgaatgtgaatctaaaaacaaagttggctcacaattaagaagtttaacacttgatgttcaaggaagagaaaacaacaaagactatttttctcctgagcttctcgtgctctattttgcatcctccttaataatacctgccattggaatgataatttactttgcaagaaaagccaacatgaaggggtcatatagtcttgtagaagcacagaaatcaaaagtgtagctaatgcttgatatgttcaactggagacactatttatctgtgcaaatccttgatactgctcatcattccttgagaaaaacaatgagctgagaggcagacttccctgaatgtattgaacttggaaagaaatgcccatctatgtcccttgctgtgagcaagaagtcaaagtaaaacttgctgcctgaagaacagtaactgccatcaagatgagagaactggaggagttccttgatctgtatatacaataacataatttgtacatatgtaaaataaaattatgccatagcaagattgcttaaaatagcaacactctatatttagattgttaaaataactagtgttgcttggactattataatttaatgcatgttaggaaaatttcacattaatatttgctgacagctgacctttgtcatctttcttctattttattccctttcacaaaattttattcctatatagtttattgacaataatttcaggttttgtaaagatgccgggttttatatttttatagacaaataataagcaaagggagcactgggttgactttcaggtactaaatacctcaacctatggtataatggttgactgggtttctctgtatagtactggcatggtacggagatgtttcacgaagtttgttcatcagactcctgtgcaactttcccaatgtggcctaaaaatgcaacttctttttattttcttttgtaaatgtttaggtttttttgtatagtaaagtgataatttctggaattagaaaaaaaaaaaaaaaaaaa

SEQ ID NO: 29157 - DNA, 3106 bp, Homo Sapiens
gcggccgcgctccggccgctttgtcgaaagccggcccgactggagcaggacgaagggggagggtctcgaggccgagtcctgttcttctgagggacggaccccagctggggtggaaaagcagtaccagagagcctccgaggcgcgcggtgccaaccatggagcgggccggccccagcttcgggcagcagcgacagcagcagcagccccagcagcagaagcagcagcagagggatcaggactcggtcgaagcatggctggacgatcactgggactttaccttctcatactttgttagaaaagccaccagagaaatggtcaatgcatggtttgctgagagagttcacaccatccctgtgtgcaaggaaggtatcagaggccacaccgaatcttgctcttgtcccttgcagcagagtcctcgtgcagataacagtgtccctggaacaccaaccaggaaaatctctgcctctgaatttgaccggcctcttagacccattgttgtcaaggattctgagggaactgtgagcttcctctctgactcagaaaagaaggaacagatgcctctaacccctccaaggtttgatcatgatgaaggggaccagtgctcaagactcttggaattagtgaaggatatttctagtcatttggatgtcacagccttatgtcacaaaattttcttgcatatccatggactgatatctgctgaccgctattccctgttccttgtctgtgaagacagctccaatgacaagtttcttatcagccgcctctttgatgttgctgaaggttcaacactggaagaagtttcaaataactgtatccgcttagaatggaacaaaggcattgtgggacatgtggcagcgcttggtgagcccttgaacatcaaagatgcatatgaggatcctcggttcaatgcagaagttgaccaaattacaggctacaagacacaaagcattctttgtatgccaattaagaatcatagggaagaggttgttggtgtagcccaggccatcaacaagaaatcaggaaacggtgggacatttactgaaaaagatgaaaaggactttgctgcttatttggcattttgtggtattgttcttcataatgctcagctctatgagacttcactgctggagaacaagagaaatcaggtgctgcttgaccttgctagtttaatttttgaagaacaacaatcattagaagtaattttgaagaaaatagctgccactattatctctttcatgcaagtgcagaaatgcaccattttcatagtggatgaagattgctccgattctttttctagtgtgtttcacatggagtgtgaggaattagaaaaatcatctgatacattaacaagggaacatgatgcaaacaaaatcaattacatgtatgctcagtatgtcaaaaatactatggaaccacttaatatcccagatgtcagtaaggataaaagatttccctggacaactgaaaatacaggaaatgtaaaccagcagtgcattagaagtttgctttgtacacctataaaaaatggaaagaagaataaagttataggggtttgccaacttgttaataagatggaggagaatactggcaaggttaagcctttcaaccgaaatgacgaacagtttctggaagcttttgtcatcttttgtggcttggggatccagaacacgcagatgtatgaagcagtggagagagccatggccaagcaaatggtcacattggaggttctgtcgtatcatgcttcagcagcagaggaagaaacaagagagctacagtcgttagcggctgctgtggtgccatctgcccagacccttaaaattactgactttagcttcagtgactttgagctgtctgatctggaaacagcactgtgtacaattcggatgtttactgacctcaaccttgtgcagaacttccagatgaaacatgaggttctttgcagatggattttaagtgttaagaagaattatcggaagaatgttgcctatcataattggagacatgcctttaatacagctcagtgcatgtttgctgctctaaaagcaggcaaaattcagaacaagctgactgacctggagatacttgcattgctgattgctgcactaagccacgatttggatcaccgtggtgtgaataactcttacatacagcgaagtgaacatccacttgcccagctttactgccattcaatcatggaacaccatcattttgaccagtgcctgatgattcttaatagtccaggcaatcagattctcagtggcctctccattgaagaatataagaccacgttgaaaataatcaagcaagctattttagctacagacctagcactgtacattaagaggcgaggagaattttttgaacttataagaaaaaatcaattcaatttggaagatcctcatcaaaaggagttgtttttggcaatgctgatgacagcttgtgatctttctgcaattacaaaaccctggcctattcaacaacggatagcagaacttgtagcaactgaattttttgatcaaggagacagagagagaaaagaactcaacatagaacccactgatctaatgaacagggagaagaaaaacaaaatcccaagtatgcaagttgggttcatagatgccatctgcttgcaactgtatgaggccctgacccacgtgtcagaggactgtttccctttgctagatggctgcagaaagaacaggcagaaatggcaggcccttgcagaacagcaggagaagatgctgattaatggggaaagcggccaggccaagcggaactgagtggcctatttcatgcagagttgaagtttacagagatggtgtgttctgcaatatgcctagtttcttacacactgtctgtatagtgtctgtatttggtatatactttgccactgctgtatttttatttttgcacaacttttgagagtatagcatgaatgtttttagaggactattacatattttttgtatatttgttttatgctactgaactgaaaggatcaacaacatccactgttagcacattgataaaagcattgtttgtgatatttcgtgtactgcaaagtgtatgcagtattcttgcactgaggtttttttgcttgggg

SEQ ID NO: 29158 - DNA, 2843 bp, Homo Sapiens
gcttccacatgtgtcaagcggctggctcagcccagagtccctgtctcccgcccgccggcccgagccgccgcccctcccccgcctcccgtgcgcccgggacaatcctcgccttgtctgtggcgccggcatctggagctttctgtagcctccggatacgcctttttttcagggcgtagccccagccaagctgctccccgcggcggccgcacagcagcccgagcgccccctttccggagctcccctccggagctgggatccaggcgcgtagcggagatcccaggatcctgggtgctgtctgggcccgctccccaccatgacctcctcggggcctggaccccggttcctgctgctgctgccgctgctgctgccccctgcggcctcagcctccgaccggccccggggccgagacccggtcaacccagagaagctgctggtgatcactgtggccacagctgaaaccgaggggtacctgcgtttcctgcgctctgcggagttcttcaactacactgtgcggaccctgggcctgggagaggagtggcgagggggtgatgtggctcgaacagttggtggaggacagaaggtccggtggttaaagaaggaaatggagaaatacgctgaccgggaggatatgatcatcatgtttgtggatagctacgacgtgattctggccggcagccccacagagctgctgaagaagttcgtccagagtggcagccgcctgctcttctctgcagagagcttctgctggcccgagtgggggctggcggagcagtaccctgaggtgggcacggggaagcgcttcctcaattctggtggattcatcggttttgccaccaccatccaccaaatcgtgcgccagtggaagtacaaggatgatgacgacgaccagctgttctacacacggctctacctggacccaggactgagggagaaactcagccttaatctggatcataagtctcggatctttcagaacctcaacggggctttagatgaagtggttttaaagtttgatcggaaccgtgtgcgtatccggaacgtggcctacgacacgctccccattgtggtccatggaaacggtcccactaagctgcagctcaactacctgggaaactacgtccccaatggctggactcctgagggaggctgtggcttctgcaaccaggaccggaggacactcccgggggggcagcctcccccccgggtgtttctggccgtgtttgtggaacagcctactccgtttctgccccgcttcctgcagcggctgctactcctggactatccccccgacagggtcacccttttcctgcacaacaacgaggtcttccatgaaccccacatcgctgactcctggccgcagctccaggaccacttctcagctgtgaagctcgtggggccggaggaggctctgagcccaggcgaggccagggacatggccatggacctgtgtcggcaggaccccgagtgtgagttctacttcagcctggacgccgacgctgtcctcaccaacctgcagaccctgcgtatcctcattgaggagaacaggaaggtgatcgcccccatgctgtcccgccacggcaagctgtggtccaacttctggggcgccctgagccccgatgagtactacgcccgctccgaggactacgtggagctggtgcagcggaagcgagtgggtgtgtggaatgtaccatacatctcccaggcctatgtgatccggggtgataccctgcggatggagctgccccagagggatgtgttctcgggcagtgacacagacccggacatggccttctgtaagagctttcgagacaagggcatcttcctccatctgagcaatcagcatgaatttggccggctcctggccacttccagatacgacacggagcacctgcaccccgacctctggcagatcttcgacaaccccgtcgactggaaggagcagtacatccacgagaactacagccgggccctggaaggggaaggaatcgtggagcagccatgcccggacgtgtactggttcccactgctgtcagaacaaatgtgtgatgagctggtggcagagatggagcactacggccagtggtcaggcggccggcatgaggattcaaggctggctggaggctacgagaatgtgcccaccgtggacatccacatgaagcaggtggggtacgaggaccagtggctgcagctgctgcggacgtatgtgggccccatgaccgagagcctgtttcccggttaccacaccaaggcgcgggcggtgatgaactttgtggttcgctaccggccagacgagcagccgtctctgcggccacaccacgactcatccaccttcaccctcaacgttgccctcaaccacaagggcctggactatgagggaggtggctgccgcttcctgcgctacgactgtgtgatctcctccccgaggaagggctgggcactcctgcaccccggccgcctcacccactaccacgaggggctgccaacgacctggggcacacgctacatcatggtgtcctttgtcgacccctgacactcaaccactctgccaaacctgccctgccattgtgcctttttagggggcctggcccccgtcctgggagttgggggatgggtctctctgtctccccacttcctgagttcatgttccgcgtgcctgaactgaatatgtcaccttgctcccaagacacggccctctcaggaagctcccggagtccccgcctctctcctccgcccacaggggttcgtgggcacagggcttctggggactccccgcgtgataaattattaatgttccgcagtctcactctgaataaaggacagtttgtaaaaaaaaaaaaaaaaaa

SEQ ID NO: 29159 - DNA, 6491 bp, Homo Sapiens
ccgccccggcgcccaggctcggtgctggagagtcatgcctgtgagccctgggcacctcctgatgtcctgcgaggtcacggtgttcccaaacctcagggttgccctgccccactccagaggctctcaggccccaccccggagccctctgtgcggagccgcctcctcctggccagttccccagtagtcctgaagggagacctgctgtgtggagcctcttctgggacccagccatgagtgtggagctgagcaactgaacctgaaactcttccactgtgagtcaaggaggcttttccgcacatgaaggacgctgagcgggaaggactcctctctgcctgcagttgtagcgagtggaccagcaccaggggctctctagactgcccctcctccatcgccttccctgcctctccaggacagagcagccacgtctgcacacctcgccctctttacactcagttttcagagcacgtttctcctatttcctgcgggttgcagcgcctacttgaacttactcagaccacctacttctctagcagcactgggcgtccctttcagcaagacgatggctgtgctcaggcagctggcgctcctcctctggaagaactacaccctgcagaagcggaaggtcctggtgacggtcctggaactcttcctgccattgctgtttcctgggatcctcatctggctccgcttgaagattcagtcggaaaatgtgcccaacgccaccatctacccgggccagtccatccaggagctgcctctgttcttcaccttccctccgccaggagacacctgggagcttgcctacatcccttctcacagtgacgctgccaagaccgtcactgagacagtgcgcagggcacttgtgatcaacatgcgagtgcgcggctttccctccgagaaggactttgaggactacattaggtacgacaactgctcgtccagcgtgctggccgccgtggtcttcgagcaccccttcaaccacagcaaggagcccctgccgctggcggtgaaatatcacctacggttcagttacacacggagaaattacatgtggacccaaacaggctcctttttcctgaaagagacagaaggctggcacactacttcccttttcccgcttttcccaaacccaggaccaagggaactaacatcccctgatggcggagaacctgggtacatccgggaaggcttcctggccgtgcagcatgctgtggaccgggccatcatggagtaccatgccgatgccgccacacgccagctgttccagagactgacggtgaccatcaagaggttcccgtacccgccgttcatcgcagaccccttcctcgtggccatccagtaccagctgcccctgctgctgctgctcagcttcacctacaccgcgctcaccattgcccgtgctgtcgtgcaggagaaggaaaggaggctgaaggagtacatgcgcatgatggggctcagcagctggctgcactggagtgcctggttcctcttgttcttcctcttcctcctcatcgccgcctccttcatgaccctgctcttctgtgtcaaggtgaagccaaatgtagccgtgctgtcccgcagcgacccctccctggtgctcgccttcctgctgtgcttcgccatctctaccatctccttcagcttcatggtcagcaccttcttcagcaaagccaacatggcagcagccttcggaggcttcctctacttcttcacctacatcccctacttcttcgtggcccctcggtacaactggatgactctgagccagaagctctgctcctgcctcctgtctaatgtcgccatggcaatgggagcccagctcattgggaaatttgaggcgaaaggcatgggcatccagtggcgagacctcctgagtcccgtcaacgtggacgacgacttctgcttcgggcaggtgctggggatgctgctgctggactctgtgctctatggcctggtgacctggtacatggaggccgtcttcccagggcagttcggcgtgcctcagccctggtacttcttcatcatgccctcctattggtgtgggaagccaagggcggttgcagggaaggaggaagaagacagtgaccccgagaaagcactcagaaacgagtactttgaagccgagccagaggacctggtggcggggatcaagatcaagcacctgtccaaggtgttcagggtgggaaataaggacagggcggccgtcagagacctgaacctcaacctgtacgagggacagatcaccgtcctgctgggccacaacggtgccgggaagaccaccaccctctccatgctcacaggtctctttccccccaccagtggacgggcatacatcagcgggtatgaaatttcccaggacatggttcagatccggaagagcctgggcctgtgcccgcagcacgacatcctgtttgacaacttgacagtcgcagagcacctttatttctacgcccagctgaagggcctgtcacgtcagaagtgccctgaagaagtcaagcagatgctgcacatcatcggcctggaggacaagtggaactcacggagccgcttcctgagcgggggcatgaggcgcaagctctccatcggcatcgccctcatcgcaggctccaaggtgctgatactggacgagcccacctcgggcatggacgccatctccaggagggccatctgggatcttcttcagcggcagaaaagtgaccgcaccatcgtgctgaccacccacttcatggacgaggctgacctgctgggagaccgcatcgccatcatggccaagggggagctgcagtgctgcgggtcctcgctgttcctcaagcagaaatacggtgccggctatcacatgacgctggtgaaggagccgcactgcaacccggaagacatctcccagctggtccaccaccacgtgcccaacgccacgctggagagcagcgctggggccgagctgtctttcatccttcccagagagagcacgcacaggtttgaaggtctctttgctaaactggagaagaagcagaaagagctgggcattgccagctttggggcatccatcaccaccatggaggaagtcttccttcgggtcgggaagctggtggacagcagtatggacatccaggccatccagctccctgccctgcagtaccagcacgagaggcgcgccagcgactgggctgtggacagcaacctctgtggggccatggacccctccgacggcattggagccctcatcgaggaggagcgcaccgctgtcaagctcaacactgggctcgccctgcactgccagcaattctgggccatgttcctgaagaaggccgcatacagctggcgcgagtggaaaatggtggcggcacaggtcctggtgcctctgacctgcgtcaccctggccctcctggccatcaactactcctcggagctcttcgacgaccccatgctgaggctgaccttgggcgagtacggcagaaccgtcgtgcccttctcagttcccgggacctcccagctgggtcagcagctgtcagagcatctgaaagacgcactgcaggctgagggacaggagccccgcgaggtgctcggtgacctggaggagttcttgatcttcagggcttctgtggaggggggcggctttaatgagcggtgccttgtggcagcgtccttcagagatgtgggagagcgcacggtcgtcaacgccttgttcaacaaccaggcgtaccactctccagccactgccctggccgtcgtggacaaccttctgttcaagctgctgtgcgggcctcacgcctccattgtggtctccaacttcccccagccccggagcgccctgcaggctgccaaggaccagtttaacgagggccggaagggattcgacattgccctcaacctgctcttcgccatggcattcttggccagcacgttctccatcctggcggtcagcgagagggccgtgcaggccaagcatgtgcagtttgtgagtggagtccacgtggccagtttctggctctctgctctgctgtgggacctcatctccttcctcatccccagtctgctgctgctggtggtgtttaaggccttcgacgtgcgtgccttcacgcgggacggccacatggctgacaccctgctgctgctcctgctctacggctgggccatcatccccctcatgtacctgatgaacttcttcttcttgggggcggccactgcctacacgaggctgaccatcttcaacatcctgtcaggcatcgccaccttcctgatggtcaccatcatgcgcatcccagctgtaaaactggaagaactttccaaaaccctggatcacgtgttcctggtgctgcccaaccactgtctggggatggcagtcagcagtttctacgagaactacgagacgcggaggtactgcacctcctccgaggtcgccgcccactactgcaagaaatataacatccagtaccaggagaacttctatgcctggagcgccccgggggtcggccggtttgtggcctccatggccgcctcagggtgcgcctacctcatcctgctcttcctcatcgagaccaacctgcttcagagactcaggggcatcctctgcgccctccggaggaggcggacactgacagaattatacacccggatgcctgtgcttcctgaggaccaagatgtagcggacgagaggacccgcatcctggcccccagcccggactccctgctccacacacctctgattatcaaggagctctccaaggtgtacgagcagcgggtgcccctcctggccgtggacaggctctccctcgcggtgcagaaaggggagtgcttcggcctgctgggcttcaatggagccgggaagaccacgactttcaaaatgctgaccggggaggagagcctcacttctggggatgcctttgtcgggggtcacagaatcagctctgatgtcggaaaggtgcggcagcggatcggctactgcccgcagtttgatgccttgctggaccacatgacaggccgggagatgctggtcatgtacgctcggctccggggcatccctgagcgccacatcggggcctgcgtggagaacactctgcggggcctgctgctggagccacatgccaacaagctggtcaggacgtacagtggtggtaacaagcggaagctgagcaccggcatcgccctgatcggagagcctgctgtcatcttcctggacgagccgtccactggcatggaccccgtggcccggcgcctgctttgggacaccgtggcacgagcccgagagtctggcaaggccatcatcatcacctcccacagcatggaggagtgtgaggccctgtgcacccggctggccatcatggtgcaggggcagttcaagtgcctgggcagcccccagcacctcaagagcaagttcggcagcggctactccctgcgggccaaggtgcagagtgaagggcaacaggaggcgctggaggagttcaaggccttcgtggacctgacctttccaggcagcgtcctggaagatgagcaccaaggcatggtccattaccacctgccgggccgtgacctcagctgggcgaaggttttcggtattctggagaaagccaaggaaaagtacggcgtggacgactactccgtgagccagatctcgctggaacaggtcttcctgagcttcgcccacctgcagccgcccaccgcagaggaggggcgatgaggggtggcggctgtctcgccatcaggcagggacaggacgggcaagcagggcccatcttacatcctctctctccaagtttatctcatcctttatttttaatcacttttttctatgatggatatgaaaaattcaaggcagtatgcacagaatggacgagtgcagcccagccctcatgcccaggatcagcatgcgcatctccatgtctgcatactctggagttcactttcccagagctggggcaggccgggcagtctgcgggcaagctccggggtctctgggtggagagctgacccaggaagggctgcagctgagctgggggttgaatttctccaggcactccctggagagaggacccagtgacttgtccaagtttacacacgacactaatctcccctggggaggaagcgggaagccagccaggttgaactgtagcgaggcccccaggccgccaggaatggaccatgcagatcactgtcagtggagggaagctgctgactgtgattaggtgctggggtcttagcgtccagcgcagcccgggggcatcctggaggctctgctcccttagggcatggtagtcaccgcgaagccgggcaccgtcccacagcatctcctagaagcagccggcacaggagggaaggtggccaggctcgaagcagtctctgtttccagcactgcaccctcaggaagtcgcccgccccaggacacgcagggaccaccctaagggctgggtggctgtctcaaggacacattgaatacgttgtgaccatccagaaaataaatgctgaggggacacaaaaaaaaaaaaaaaaaaaaaaaa

SEQ ID NO: 29160 - DNA, 3089 bp, Homo Sapiens
agcagttcctcctaactcctgccagaaacagctctcctcaacatgagagctgcacccctcctcctggccagggcagcaagccttagccttggcttcttgtttctgctttttttctggctagaccgaagtgtactagccaaggagttgaagtttgtgactttggtgtttcggcatggagaccgaagtcccattgacacctttcccactgaccccataaaggaatcctcatggccacaaggatttggccaactcacccagctgggcatggagcagcattatgaacttggagagtatataagaaagagatatagaaaattcttgaatgagtcctataaacatgaacaggtttatattcgaagcacagacgttgaccggactttgatgagtgctatgacaaacctggcagccctgtttcccccagaaggtgtcagcatctggaatcctatcctactctggcagcccatcccggtgcacacagttcctctttctgaagatcagttgctatacctgcctttcaggaactgccctcgttttcaagaacttgagagtgagactttgaaatcagaggaattccagaagaggctgcacccttataaggattttatagctaccttgggaaaactttcaggattacatggccaggacctttttggaatttggagtaaagtctacgaccctttatattgtgagagtgttcacaatttcactttaccctcctgggccactgaggacaccatgactaagttgagagaattgtcagaattgtccctcctgtccctctatggaattcacaagcagaaagagaaatctaggctccaagggggtgtcctggtcaatgaaatcctcaatcacatgaagagagcaactcagataccaagctacaaaaaacttatcatgtattctgcgcatgacactactgtgagtggcctacagatggcgctagatgtttacaacggactccttcctccctatgcttcttgccacttgacggaattgtactttgagaagggggagtactttgtggagatgtactaccggaatgagacgcagcacgagccgtatcccctcatgctacctggctgcagccccagctgtcctctggagaggtttgctgagctggttggccctgtgatccctcaagactggtccacggagtgtatgaccacaaacagccatcaaggtactgaggacagtacagattagtgtgcacagagatctctgtagaaagagtagctgccctttctcagggcagatgatgctttgagaacatactttggccattaccccccagctttgaggaaaatgggctttggatgattattttatgttttagggacccccaacctcaggcaattcctacctcttcacctgaccctgcccccacttgccataaaacttagctaagttttgttttgtttttcagcgttaatgtaaaggggcagcagtgccaaaatataatcagagataaagcttaggtcaaagttcatagagttcccatgaactatatgactggccacacaggatcttttgtatttaaggattctgagattttgcttgagcaggattagataagtctgttctttaaatttctgaaatggaacagatttcaaaaaaaattcccacaatctagggtgggaacaaggaaggaaagatgtgaataggctgatggggaaaaaaccaatttacccatcagttccagccttctctcaaggagaggcaaagaaaggagatacagtggagacatctggaaagttttctccactggaaaactgctactatctgtttttatatttctgttaaaatatatgaggctacagaactaaaaattaaaacctctttgtgtcccttggtcctggaacatttatgttccttttaaagaaacaaaaatcaaactttacagaaagatttgatgtatgtaatacatatagcagctcttgaagtatatatatcatagcaaataagtcatctgatgagaacaagctatttgggcacaacacatcaggaaagagagcaccacgtgatggagtttctccagaagctccagtgataagagatgttgactctaaagttgatttaaggccaggcatggtggtttacgcctataatcccagcattttgggactccgaggtgggcagatcacttgagctcaggagctcaagatcagcctgggcaacatggtgaaaccttgtctctacataaaatacaaaaacttagatgggcatggtgctgtgtgcctatagtccactacttgtggggctaaggcaggaggatcacttgagccccggaggtcgaggctacagtgacccaagagtgcactactgtactccagccagggcaagagagcgagaccctgtctcaataaataaataaataaataaataaataaataaataaaaacaaagttgattaagaaaggaagtataggccaggcacagtggctcacacctgtaatccttgcattttggaaggctgaggcaggaggatcactttaggcctggtgtgttcaagaccagcctggtcaacatagtgagacactgtctctaccaaaaaaaggaaggaagggacacatatcaaactgaaacaaaattagaaatgtaattatgttatgttctaagtgcctccaagttcaaaacttattggaatgttgagagtgtggttacgaaatacgttaggaggacaaaaggaatgtgtaagtctttaatgccgatatcttcagaaaacctaagcaaacttacaggtcctgctgaaactgcccactctgcaagaagaaatcatgatatagctttccatgtggcagatctacatgtctagagaacactgtgctctattaccattatggataaagatgagatggtttctagagatggtttctactggctgccagaatctagagcaaagccatcccccctcctggttggtcacagaatgactgacaaagacatcgattgatatgcttctttgtgttatttccctcccaagtaaatgtttgtccttgggtccattttctatgcttgtaactgtcttctagcagtgagccaaatgtaaaatagtgaataaagtcattattaggaagttcaaaaaaaaaaaa

SEQ ID NO: 29161 - DNA, 3410 bp, Homo Sapiens; identical to SEQ ID NO: 22701

SEQ ID NO: 29162 - DNA, 1939 bp, Homo Sapiens
aatgaccatgtgtagcggagcgaggctggccctgctggtctatgggataatcatgcacagcagcgtctacagctcacctgccgccgccggactccggttccccgggatcaggccagaggaagaggcgtacggcgaggacggaaacccgctgccagacttcggtggctcggagccgccgggcgcagggagccccgcctccgcgccgcgcgccgccgccgcctggtaccgcccggccgggagaagagatgtcgcccacgggatccttaacgaggcctaccgcaaagtgctggaccagctgtccgccgggaagcacctgcagtcgctcgtggcccggggcgtgggtgggagcctcggcggcggcgcgggggacgacgcggagccgctctccaagcgccactcggacgggatcttcacggacagctacagccgctaccggaaacaaatggctgtcaagaaatacttggcggccgtcctagggaagaggtataaacaaagggttaaaaacaaaggacgccgaatagcttatttgtagcgatgggttaccagctaccctgtgtatacagccctgacgcaatgaaaagtcgttttccaaactgactcaacagtcatcgctcgtgtgttctatccaaacatgtatttatgtaatgaagtaaagccattaaatgaatattttgataataatattgtttttctttctacaaagcactagagaatgcacagatatactttgtggaccaattattgatatatattataaatatatataaagaatatatatatatatatatatataaagtatagagagaagttcatacaaagcgtgcacaaggattgaaaattcgcccgagctgtttatgtttttataaaaataaatagaaaagtagacaatcattgttttgaatattactcctatttttgtaaactggaattaaaaggatagtatttttatccatgacaggcctgaagatattactacttaccatttgctactgtacataaacaatgatgccctgctccagggagattttgaggtaaagatatggagaattgctgaagggcattctttcccagtgagtctctggggcaggctgcttcaatcccagcctaactcaactgggctctgtccccctggttgggtggcaattccaatatttctgctttctttgattctccttttatgtgtagttgtctctcttcagactctcagcccagaagaaaattctcctgataaaacaacagctcgatccaaattgtgcttctccccagaattcacgcctctccctaggagaagagttgaggaactgtacagaaaagggcggcttcgttagaccgctctcttttctgtacttcctgagtggccagggaatctaatatccccaaattagggcaattggaacaaagtgaaggacatagaggtatattggaagaggcagagcctgaggtggtaggaggacgaccctggaaatggactggtttgagattgccccaggtctgggaagctgagggcaaatccagtcccagtggtcctgactttgggcgctgggtattggaaatggatgcaaagtacaatgtgtttttctccagtgctgtccatgcttctcatcttgtgaaatggccaggatcctctcctttgaaacctgctctgtaggagctacccttttcctttgtggttttatggagacctctccttcctaccctcctgcactgtttaagtactgtttaccatttttcattcacttctcttaaacttgtgaatgcttctcacttttttttttgtttgatgcaggcacttattgtaaattttagaaacccctctgtagccactagtaagtaattatgcactaaatatgaaccctttgtttcttgtttattgagtttgtaggtaaaatgtatttttctacattattgcttattgcttagtaaaatttatttcataaaa

SEQ ID NO: 29163 - DNA, 4175 bp, Homo Sapiens
gcgcgcgggcagctcacttccgcccggcaggtgacagccgcggggctccgagccgccggcagcccggacgcaccgggagagcgagaggtggaggccgcggacattttggtgccaagccgaaccgagccggggcgccgggagctattgggacctgcggaagcctggctacagataagggaccaaaatgactgactcaaaatatttcaccacgaccaagaaaggggagatcttcgagctgaaggcagagctcaacagtgacaagaaggagaagaagaaggaggcagtgaagaaagtgattgcatcgatgaccgtgggcaaagatgtcagtgccctcttccccgatgtggtcaactgcatgcagacggacaacctggagctgaagaagctagtatacctctacttgatgaattacgccaagagtcagcctgacatggccattatggccgtcaacacctttgtgaaggactgtgaggaccccaaccccctcatccgagccctggcagtgcggaccatgggctgcatccgcgttgacaagatcacagagtacctgtgcgagccactccggaagtgcctgaaggacgaggatccatatgtgcgcaagacagcagctgtgtgcgtggccaagctccacgacatcaacgcccagctggtggaggaccagggcttcctggacacccttaaagacctcatctccgactctaaccccatggtggtggccaatgcagtggcagcgctctcagaaattgccgagtctcaccccagcagcaacctgctcgatctgaacccacagtccatcaacaagctgctgacagccctcaatgagtgcaccgagtggggccagatcttcatcctggactgcctcgccaactatatgcccaaggacgaccgcgaggcccagagcatctgtgagcgggtcacccccaggctctcccatgccaactccgctgtggtgctctctgctgtgaaggtgctgatgaagttcatggagatgttgtctaaggacttggactactacggcacactgctcaagaagctggccccacccctggtcacactgctgtcagccgagccagagctgcagtatgtggccctgcgcaacatcaatctcatcgtgcagaaaaggcctgagatcctgaagcatgagatgaaggtgttcttcgtgaagtacaacgaccctatctacgtgaagctggagaagctggacatcatgatccgcctggcctctcaggccaacatcgcccaggtgttggcagagctgaaagagtacgcaacagaagtggatgtggactttgtacggaaggctgtgcgtgctattggccgctgcgccatcaaggtggagcaatctgcggagcgctgtgtgagcacgctgctcgacctcatccagaccaaggtcaactatgtggtccaggaggccatcgtggtcatcaaggacatcttccgcaagtaccccaacaagtatgagagtgtgattgccacactgtgtgagaatctggactccctggatgagcctgaggcccgggctgccatgatctggattgtgggcgagtacgcggaacggatcgacaacgcagatgagctgctggagagcttcctcgagggcttccatgacgagagcacacaggtccagctgcagctgctgacagccattgtgaaactctttctaaagaagccaacagagacccaggagctggtgcagcaggtcctcagtttggccactcaggactcagataacccagacctgcgggaccgtggctacatctactggcgcctgctgtccacggacccggtggcagccaaggaggtggtgttggctgagaagccactcatctctgaagagacggacctcatcgagcccacactgttagacgagcttatctgctacatcggcacgctggcttccgtctaccataagcctcccagtgcctttgtggaggggggccggggcgtcgtgcacaagagcctgccacctcgcacggcctcgagtgagagcgcagagagccctgagacagcccctactggagcacctcctggggagcagccagatgtcatccccgcccagggcgacctgctgggtgacctcctcaacctggacctcggccccccagtgagcggcccacccctggccacctcctcggtgcagatgggagctgtggaccttcttggcggtggccttgacagcctgatgggggatgagcctgaagggattgggggcaccaacttcgtggcacctccaacagcagcagtaccagccaatcttggagcacccatcggcagtggcctgagtgacctctttgacctgaccagtggcgtgggcaccctgtcaggatcatatgtggcccccaaagcagtctggctcccagccatgaaggctaaggggctggagatctcaggcaccttcacccgccaggtgggctccatctccatggacctgcagctgaccaacaaggccttgcaggtcatgaccgactttgccatccagttcaaccgcaacagctttggcctggcccccgccacccccctccaggtccacgcgccactcagccccaaccagacagtggagatctccctgcctctcagcacggtgggctcggtcatgaagatggagcctctgaacaacctccaggtggccgtgaagaacaacatcgatgtcttctacttcagcaccttgtacccactgcacatcctctttgtggaggacgggaagatggaccggcagatgttcctggccacatggaaggatattcccaatgagaatgaggcccagttccagatcagagactgccccctcaatgcagaggctgcgagcagcaagctgcagagcagcaacatcttcactgtcgccaagaggaacgtggagggccaggacatgctctaccagtccctgaagctgaccaacggcatctgggtgctggcggagctgcggatccagccgggcaaccccagctgcacggacttagagctgtccctgaagtgtcgagcaccagaggtgtcccagcacgtgtaccaggcctacgagaccatcctcaagaactgagaccccggccagcgcccaccccagccttctgcccgccccatcgaggaggcccctcgggggcagcacatcttcctcctcgcaggagggaccaggcggggctccaggccactcagtgggctccctggtcctgatggcagaacccacccgatccctggggtagggcaccaccccctcctggggtgagagcgcagtgcactcccgtgctctgggacacccctgctcctgtggctgtgatgtggggttaagtgaggtggggaccaaaggaaacagagccagagcagccacagaagctgtgcctgaagggtgagtgtggagcttgcccctccggctcacagccccggcagcccctggctccttggtctctccggttggtgttaaagggccctccactgccacctctcatgggatggaccctgccaacctggcctgggtgtgcagggaggggttccccttggtaccaggagagctgctcacttagggcctggggctcaaggagctgtaggtgccggcagaggggcagagctaggctgggaggagcccagggcctgcaccacccacttgcaaccaccaggctggtgccctgcagctgtgccagttgggccacagcctcccgagtgctgacccacatggtcaagaccaggcagaagctcccagagcccctgtctcgggctccccaccgactggcagctgcactatccccaactccccacttctgccccaagggtggtcactgcctgtgatacattcctcagtgtcgcctctgagcccaggcctcctgccacaaagactgggccgagagatggggctgggtaagcgggtgcgcctcctgtttgggtttcttcggggtttctctgtagtgtctgctgccctcctcctggcctcccaggtttcagttgtgtctgacagagcattaggttttcctgttactgctgtgtaataataaagaaagattcggcttttggcaatcacggacacttttttcccctccaccgaatgtcaggattgaaagctgcctccgagtggttggggatggttttctgaccctacggtaactagatctaatatatatcatcagaaaatatatattgtatgtttactcttattttcagaaagagaaaatgaataaaaatgatgacatcaa

SEQ ID NO: 29164 - DNA, 6853 bp, Homo Sapiens
gctctgccaggagcagtcgcctcctccttggcaaatagtcctcggcagggtccgagttcttggataattcgagagaaaaggcacgataagttgcagtacgaggacacggaaacgaccaggagaggaggacagggagcgaagtttcctcaatagtgtgtgaagttagttaaaaactccctccttcctcaggatccctccgcctgcggtagcggtggtgaggccgagggagccgccattttggatgttcggttcctgctgccactgctgccgccgcccccggagctgctggtttcattcgaggtttcgggccgaggatgccagcccccatcagattgcgggagctgatccggaccatccggacagcccgaacccaagctgaagaacgagaaatgatccagaaagaatgtgctgcaatccggtcatcttttagagaagaagacaatacataccgatgtcggaatgtggcaaaattactgtatatgcacatgctgggctaccctgctcactttggacagttggagtgcctcaagcttattgcctctcaaaaatttacagacaaacgcattggctatttaggggcaatgctgctgttagatgaaagacaagatgtccatcttctcatgaccaactgtatcaagaatgatcttaatcatagcacgcaattcgtacaggggttagcactttgtaccctcggctgcatgggctcctcagagatgtgcagagatcttgcaggagaggtagagaagctcctgaaaacctccaactcttacttaagaaaaaaggcagcactgtgtgctgttcatgtcatcaggaaagttcctgaacttatggagatgtttttaccagcaacaaaaaatttattgaatgagaagaaccatggtgtcctccacacatctgtagtcctcctcacagaaatgtgtgagcgaagcccagacatgcttgcgcatttcagaaagtctctgcagcttgtgccccaattagttcgtattttaaagaacctcatcatgtccggatattcaccagaacatgatgtttctggtatcagtgacccctttttgcaggtacgaattttgcggttattaagaattttaggacgaaatgatgatgattcaagtgaagctatgaatgatatattagcacaggttgccactaatactgagactagtaaaaatgtaggaaatgctattctttatgaaacggttttgactatcatggatattaagtcagagagtggattgcgagtcctagccataaatatcctgggtcgtttcttattgaacaatgacaagaatattagatatgtggctctgacatctttgttgaagactgtacagacagatcataatgcagtacagaggcacagaagcacaattgtggactgtcttaaagatttggatgtctcaataaaacggcgtgcaatggaattgagttttgccctggtaaatgggaataatatccgaggcatgatgaaagaattactttattttctggattcgtgtgagccagaatttaaagcagactgtgcatctggaatctttcttgctgcagaaaagtatgcaccttccaaacgatggcatatagacacaattatgcgtgttttgacaacggcaggaagttatgttcgtgatgatgcagtccccaatttaatccagttaataactaatagtgtggagatgcatgcctatactgtccagcgcctgtacaaagcaattcttggtgattattctcaacaacctttggtacaagtggctgcatggtgtataggtgaatatggtgatcttcttgtatctggccagtgtgaagaggaagagcctattcaggtaacagaggatgaagtgttggatattttagaaagtgtcctaatctctaatatgtccacctctgtgacacgaggttatgccctcactgccattatgaagctttccactcgattcacttgtactgtaaaccgaattaagaaagtggtttccatctacggaagcagcattgatgtggaactccagcagagggcagtagaatataatgcacttttcaagaaatatgaccacatgaggtctgccctacttgagagaatgcctgtcatggaaaaagtgaccacaaatggccctactgagattgtgcagacaaatggagagacagaaccagctccactagagaccaaaccgccaccctctgggccacagcccaccagccaggccaatgatttattggatttgttgggaggaaatgacataacacctgttattccaactgcgcctacaagcaaaccatcttctgctggtggagaacttcttgatttgctgggagacatcaaccttacaggtgctccagctgctgctcctgcccctgcctcagtcccacagatatcccagccccccttcttgttggatgggctttcatcacagcctctcttcaatgatattgctgcaggcatcccctccatcacagcatacagtaagaatggcttgaagatagaattcacctttgaacggtcaaataccaaccccagtgtaacagtgataacgatacaggcctccaacagcacagagctagatatgacggactttgttttccaagctgcagtaccaaagacattccagctgcagctcttgtctcctagcagcagcattgtcccagcatttaacacggggaccatcacacaagtcattaaagttctgaaccctcagaagcaacagctgcgaatgcggatcaagcttacatataatcacaagggctcagcaatgcaagatctagcagaggtgaacaactttccccctcagtcctggcaatgagggtttggcaccattctcattctttatcccactcaatcaaaggaactctgggaaggaggttgtgattgctggcaagtcccccccaactgtaccacgggcatgaggagctgaagagaactgctgaggaggattttcctaaagttactgctgaccttgaagcattgttaaagactaatgtcctctcctccactgttgaggctggctgcttctggaggctactttgcactcttcctcttctcctttttccgcacttctccacccctcccacatttacagccagaatcaacattccctgggcccctgaggaaataagcagctggtctggaggagaggactgcaatccatggcgaaaaaacactcactttgtctctgcagcaaagagttgccccttctttctactgttgtttctctgtggactgggcaaggtggggtatttattcctcactagctgggttaccatcttcaggcacttttaacatctggcattcggaatggaaatgtaataatggacattagggagccctgcctttttctactggttcccccaatgtttgaaagaggcattaggctcctggtagccttttctgtgcattgctgtatacacacagacacacacatgtatgtttgttaccaagaactggtcagaccttgcgagtttatttgtaaacactggacagatggagttaaaaagagcttttgttgagatttggcatgaaggatatggtgctctatttgtaatagaaacttccaaggctcttccagctcccctttctcgccattctttagctgtagtcatgaatagtctccatgattttcaaaattgattccctttaaagtgcaaaatggtcaccttctaaaagatatattcatagttattaatgaccctattcccaccacaaattttaaagtgctcctaagcccataacttgcctgtttgaactatggtaatgggtggaagaggagttcaccagtttcaaagatcagactctgtatcaaaagtacctttgcccttaggaagagtgagtattggagtcatcttatctattactccaaacctccctttttatttcttgagcctggcttggaccttggcattccgtttgaattccttctaactggaacatttgtgttgtatctgtaacactggcactgaaataaagaccacacggttaaagaaatctttccatattgtactttatggtgttggagtgaagccttgtagcttccatacccctatgtcagaggaggtcttacggacaccatagggtaggaatagcctttcctcagtctgagaaattggtctcttttaaaagacgaatctcatgaatattcacatcaaagacttgagctttttaaactagtgagagtgccaagtgctttttagaaaggacccatatgttatcaaactttgaaattgagttgctggaatgaagtagaggtgactctctctgtggtacacattgaatgtactatgtatgttcaagtattcaggcgccatgtcttatatactgaagaaagaaaaagtgaggcccaccttgctcttacaatgtttgcaattgttactgtattgaatacagtataatgactactatggcttcaatcttaaacctggaaacaaatatccctttttttccccttcatttcaccaagcctttacttaaaatcttcagtgtcttgtcaaatctagctctgtatcagatgctggaatattcctaacatttgacaaactggagttgaactaaaggctccacgggaaagtttctggtcttactagtgtgtatgagcaagatctgctaaaacttactccactgggtaaatggttgactgagtcaagaacaggataatatctcctgcatagttttcagtaatgtaagtgtggactagtgcatatttcagacaactgctctgcctgtgcaatgaaaaatagcctttaagggtttctttgcagactgatttcattggatggatacttaatgctgtgaaacatgataggattaacataatgttggtggatttcttgaatagaatttgtcttaacattcctctttgtgtagaggctttattttctctcttatatttgtagctaaccagctcaggtttttttatttgaactgggttgaatctctgaagaaatctgttcaagaccatgctataagacactgtcagctaatggagctgggaagggtctactctgctgacagagcatttccttgggtgatcatagtttcgaggtagagtttatgatcattcatagctttgtctagaaggagtaaaatatcatggccttaacacaaagggtgctgcgtagaatatgaattgattttggaatcagaacacaagcaccatactgaaggactagcagccaaataactgcctaggatactgatggttgtgaagactgtttcaaatgattggatctttgaaagcttcagcgtgccttagtttctaggatcagaattagttttcctctcacttggccttgcagctaaatggagaaatgtttcaatttctttgaatacttgcacatttcaataattcctttcccgagtataaccactcaagggggagcaaatttggatggatttacgacttcacaggcattgtgaggaaagagcattttccaaggctgttttgataaccctggggtgataagcagtgagccctcacacacttactttgacaatttcacatgcacttgtacttcattatttccctcttcaagagtcgtttctattctagtttctgccccatcccggggaatcctaaaggagaattaattcatctaagtaatctcaaaaaactgtaggaagggtgctctccctgagaagcttctcccacagtgctttggtgctgttaccttgaggtggtttggacagtcacggaagttttaggctgtgcatagtgatcatctgttaattttaaggtctttatcatttaaagaaacattcctcagtgtaacatttgggaggggattctttcctcttgctagtttaaaggtgtgatttgtactccttgtttgtcccattcatatatgaaaatagacttttaaaactgtccaacactaatggtttatataacatgcttcccattttttttatgtcgtagaaattggaagttagggagtactgctttcaaggttcaacttcattatcttctgcattggaaaatatttgggccatgagaactaggggaaaggagtttgaatgtgtctatttttttctagtgaatgtattttaaccacagtgtcctaaactgagaaaactagagaggaaaaagtgggtgttcatgaactttgtagttgggagagtggttttacatgtctgtgtattcatgactttgggagtgggtaggatcattggagagagaattgcacagaaagtcctgaagtttaaaacacttttgaccagctttggctcgggagagtggggctgcttgtagaactggaagtgaataactttttcaagcaatatcagtgagtgggtcccatcgacagggttccaggacctggaacactttaacagaaggaaatgccgaagcagcttgcacagttgctttacagacttccaagaggctgattctggcttcaagatggagccttggagttggtttttttttttttttttttcttccctcaaagaacctgcggttgcgctttgtgtgttttgtttttgttttccatttgggggccccatgggaaagagcttctgaactctttcctttatgaactcccactgtgttcctataaaggcccttttctttcttagtgttgtaagttacattttcattatgccccatcacatcttctttactgtaaaaatattaaaaagctgtttccaagtgggacagctaatgaagctctaattattgcagacatatttttgagatgtaaaaaaaaaaatttaaagttaaatgataagtcttagaggcgagtgaggaataaaatggatgtaaacatttacatgggatgcattagaattctgctgtgtgtactgtcttttggttgaaacaaattatgaacagtgactaataataaaaagtcaatacccaaaaaaaaaaaaaaa

SEQ ID NO: 29165 - DNA, 3453 bp, Homo Sapiens
gggccgccgcagaggcccggccgcagcgcagggaagcctgggggccagaggtcgccgctgccgccatgccgctgctcttcctcgagcgcttcccctggcccagcctccgcacctacacgggcctcagcggcctggccctgctgggcaccatcatcagcgcctaccgcgcgctcagccagcccgaggccggccccggcgagccggaccagctaacggcctcgctgcagcctgagccgccggcgcccgcccggccgagcgccgggggaccccgggcccgcgatgtggcccagtacctgctctcagacagcctcttcgtgtgggttctagtaaataccgcttgctgtgttttgatgttggtggctaagctcatccagtgtattgtgtttggccctcttcgagtgagtgagagacagcatctcaaagacaaattttggaattttattttctacaagttcattttcatctttggtgtgctgaatgtccagacagtggaagaggtggtcatgtggtgcctctggtttgccggacttgtctttctgcacctgatggttcagctctgcaaggatcgatttgaatatctttccttctcgcccaccacgccgatgagcagccacggtcgagtcctgtccctgttggttgccatgctgctttcctgctgtggactggcggccgtctgctccatcaccggctacacccacggaatgcacaccttggctttcatggctgcagagtctcttcttgtgacagtgaggactgctcatgtgattttacgatacgtaattcacctctgggacctcaaccacgaagggacgtgggaaggaaaggggacgtatgtctattacacagactttgtcatggagctcactctcctgtccctggacctcatgcaccatattcacatgttgttatttggcaacatctggttatccatggccagcctggtcatctttatgcagctgcgttacctgtttcatgaggtgcaacgtcgaattcgtcggcacaagaactatctacgtgtggttggaaacatggaggccaggtttgcagttgcaactccagaggagctggctgtcaacaatgacgactgtgccatctgttgggactccatgcaggctgcgcggaaactgccctgtggacatcttttccacaactcctgtcttcgttcctggctagaacaagacacctcctgtccaacatgcagaatgtctcttaatattgccgacaataatcgtgtcagggaagaacatcaaggagagaacttggatgagaatttggttcctgtagcagcagccgaagggagacctcgcttaaaccaacacaatcacttcttccatttcgatgggtctcggattgcgagctggctgccgagtttttcggttgaagtgatgcacaccaccaacattcttggcattacgcaggccagcaactcccagctcaatgcaatggctcatcagattcaagagatgtttccccaggttccataccatctggtactgcaggacctccagctgacacgctcagttgaaataacaacagacaatattttagaaggacggattcaagtaccttttcctacacagcggtcagatagcatcagacctgcattgaacagtcctgtggaaaggccaagcagtgaccaggaagagggagaaacttctgctcagaccgagcgtgtgccactggacctcagtcctcgcctggaggagacgctggacttcggcgaggtggaagtggagcccagtgaggtggaagacttcgaggctcgtgggagccgcttctccaagtctgctgatgagagacagcgcatgctggtgcagcgtaaggacgaactcctccagcaagctcgcaaacgtttcttgaacaaaagttctgaagatgatgcggcctcagagagcttcctcccctcggaaggtgcgtcctctgaccccgtgaccctgcgtcgaaggatgctggctgccgccgcggaacggaggcttcagaagcagcagacctcctagcgctcccttgccttcctcagctgcctcctgcgccctgtgcccgactgactggaggaggcctgtcccaattctgcccgctccatggaaaagcgggcttgactgcattgccgctgtataaagcatgtggtcttatagtgtttggacagctgataaatttaatccttctttgtaatactttctatgtgacatttctcttccccttagaaacactgcaaattttaactgtaggtatgatctcttctggtgttgactggactgcttggggtgggggacgatcaggaggaagtgagcagtcgcctgcctgcagcaggcagcttctactcctgcctcatgcatacgtcccacaaatgcaggtgtcctgagcaccacacccagtgggaagagtgtgggggaggcgcacagtgtgagcccgcccccacgtcgtggggtaacatctgttatcaaactgctgtcgttgttgtggaagcatgtagactgtgccagaggccagacccacgggctcatgcacccctgagccagcagggcatcttggaaaaggaactcttggttcgatacctggagcagaggaggggaaagtccagggctatagggtgtgatgaagtcacccctttctgtcccactacatctgggactgactttccgagcctccagtccaaagccggcttgatttccgtgaactctggtgctcctgcatctcatgagtgtgccccatgggtcccctcccctctcagcatttccttgtcccgtctggacctggggagtggttaggcagcaagctttggtttatggttttcattcattggtgaagtaaattaggcagtgctaaagcctgtgggtttggtccttgaacaagatgtgggccttgcaagatgggagagtaaaccttgaagggctttattaaagaaataaaaaagaacttttgtatcttttatcctgggagcactgcgttttcctagctgtgttattcctggtttaattcagcagagaaggtaaggtgtgaacctacctgccttggagagggcccaggtcccaaatctcttcaaattcttcacatgtttaactttaaggatttgaaccatgaagtcataggttacagacctcagttttatgccccattggattacttttttttttttttttttttttttttttttactctttgaaagctttgttttgtggtagtccttttgggaagaatccagtattatctacaattattggcaaagtttaaatgtattttacataacggaaagtttttagaatgttgaaaagtaattgaaaaaggtgataggtaaatttttaggcaaagataatttatttcaataaatctttcaaaagccttaccttgaaatgctgttagtaaatttctgtgatttttttttttaatttgttttgctgagagcatagctatttgtttttattgtaaaacaataataataataaaaagcaaactcta

SEQ ID NO: 29166 - DNA, 5072 bp, Homo Sapiens
ggagctccatgccactccccgcctgggccactgctttgttttcttctaatgtttttcctctacctgggttggctgtttcttcattcatatttgagaagaatcacctcctaattaaatgtagcacttcgctctctccctacatgaaggctgtcttggttacccgactaggcaacgcgcattggtatcaaattaccgaaagtctacaccggagcagtcctcatatttacatacaaataactcaggggcttgcatttatgtcaccattctgtcctgctagaggcttgccagaggagtttttaatccaatcagaaggagctttaaaaggatgtctgcgaagtggtcaaaaggatcttaacctcaattaagtggggttttttaaaaagattttttggggggcctgaaattttgaaaatcttcgaactctgagtggggaaagatgtataattcctcaattgcctacgaggatatcaagatgctgagaggaattcagcggtggtgaagagagtggatacaaaccagggattggtttccttgagctgttttggaggttgattctaaatcactgcttaaggaattcctggaaacatcaggaaaacatttgatcatccaagcctagtggaaatggctttaccgcagagtgaagatgcaatgaccggggacacagacaaatatcttgggccacaggaccttaaggaattgggtgatgattccctgcctgcagagggttacatgggctttagtctcggagcgcgttctgccagcctccgctccttcagttcggataggtcttacaccttgaacagaagctcctatgcacgggacagcatgatgattgaagaactccttgtgccatccaaagagcagcatctaacattcacaagggaatttgattcagattctcttagacattacagctgggctgcagacaccttagacaatgtcaatcttgtttcaagccccattcattctgggtttctggttagctttatggtggacgcgagagggggctccatgagaggaagccgtcatcacgggatgagaatcatcattcctccacgcaagtgtacggcccccactcgaatcacctgccgtttggtaaagagacataaactggccaacccaccccccatggtggaaggagagggattagccagtaggctggtagaaatgggtcctgcaggggcacaatttttaggccctgtcatagtggaaatccctcactttgggtccatgagaggaaaagagagagaactcattgttcttcgaagtgaaaatggtgaaacttggaaggagcatcagtttgacagcaaaaatgaagatttaaccgagttacttaatggcatggatgaagaacttgatagcccagaagagttagggaaaaagcgtatctgcaggattatcacgaaagatttcccccagtattttgcagtggtttcccggattaagcaggaaagcaaccagattggtcctgaaggtggaattctgagcagcaccacagtgccccttgttcaagcatctttcccagagggtgccctaactaaaagaattcgagtgggcctccaggcccagcctgttccagatgaaattgtgaaaaagatccttggaaacaaagcaacttttagcccaattgtcactgtggaaccaagaagacggaaattccataaaccaatcacaatgaccattccggtgcccccgccctcaggagaaggtgtatccaatggatacaaaggggacactacacccaatctgcgtcttctctgtagcattacagggggcacttcgcctgctcagtgggaagacatcacaggaacaactcctttgacgtttataaaagattgtgtctcctttacaaccaatgtttcagccagattttggcttgcagactgccatcaagttttagaaactgtggggttagccacgcaactgtacagagaattgatatgtgttccatatatggccaagtttgttgtttttgccaaaatgaatgatcccgtagaatcttccttgcgatgtttctgcatgacagatgacaaagtggacaaaactttagagcaacaagagaattttgaggaagtcgcaagaagcaaagatattgaggttctggaaggaaaacctatttatgttgattgttatggaaatttggccccacttaccaaaggaggacagcaacttgtttttaacttttattctttcaaagaaaatagactgccattttccatcaagattagagacaccagccaagagccctgtggtcgtctgtcttttctgaaagaaccaaagacaacaaaaggactgcctcaaacagcggtttgcaacttaaatatcactctgccagcacataaaaagattgagaaaacagatagacgacagagcttcgcatccttagctttacgtaagcgctacagctacttgactgagcctggaatgagtccacagagtccatgtgaacggacagatatcaggatggcaatagtagccgatcacctgggacttagttggacagaactggcaagggaactgaatttttcagtggatgaaatcaatcaaatacgtgtggaaaatccaaattctttaatttctcagagcttcatgttattaaaaaaatgggttaccagagacggaaaaaatgccacaactgatgccttaacttcggtcttgacaaaaattaatcgaatagatatagtgacactgctagaaggaccaatatttgattatggaaatatttcaggcaccagaagttttgcagatgagaacaatgttttccatgaccctgttgatggttatccttcccttcaagtggaactggaaacccccacagggttgcactacacaccacctacccctttccagcaagatgattattttagtgatatctctagcatagaatctccccttagaacccctagtagactgagtgatgggctagtgccttcccaggggaacatagagcattccgcagatggacctccagtcgtaactgcagaagacgcttccttagaagacagcaaactggaagactcagtgcctttaacagaaatgcctgaagcagtggatgtagatgagagccagttggagaatgtatgtctgagttggcagaatgagacatcaagtggaaacctagagtcctgcgctcaagctcgaagagtaactggtgggttactagatcgactggatgacagccctgaccagtgtagagattccattacctcatatctcaaaggagaagctggcaaatttgaagcaaatggaagccatacagaaatcactccagaagcaaagacaaaatcttactttccagaatcccaaaatgatgtaggaaaacagagtaccaaggaaactctgaaaccaaaaatacatggatctggtcatgttgaagaaccagcatcaccactagcagcatatcagaaatctctagaagaaaccagcaagcttataatagaagagactaaaccctgtgtgcctgtcagtatgaaaaagatgagtaggacttctccagcagatggcaagccaaggcttagcctccatgaagaagaggggtccagtgggtctgagcaaaagcagggagaaggttttaaggtgaaaacgaagaaagaaatccggcatgtggaaaagaagagccactcgtaacagcgaacggtcagtcaaggatcataagtttttactgccagtattgagaaattcgtggaagaaatgtcagcaggaagtaaaaattcaccgagaagtgtgtgtgtgttcgctgcttccacacattaatggcatgattttttttatgcaaaaagaaaagaaaagaaaaccacccacattttaatttagcatgagccaatttacagagcatggaaatcactttcatttccggattggcgcgtgtgcaattagcaatgcagtgtatatacaagaagccatgctgttaacagtttatctcaagtaatttggtgtcatttacaaaaggaagaaattcctgccatcagaagggacagaaggagatggaatgatcaaatcacagagaaacactaaaattactaaatctacaacagctcgccttatttttcttggacccaaactgtcagggtataaacactatttgtttcttttttaaaacatcgatagttttgctgtaaataataacactgtataaattctaacagaaaaatagaataaaatgttgataaggcactgcctcttagaacacaaacagaatattgcaaatgcatttaacaaataggggtctcaagtgacttcaccctagaagaggagggagggattctgggtgggggtgactcttcactgattcttgtatattagcaattataatgtttgtatatgcaaaactgctagcttgattttaaaaaaaaacaaatctttaaaatctgctgcaaatttaaataattcccaaaatgaggaattctgtagttctgtgaaaaatttttttcttcagaatactaatattttgatgcatgtgtatcaccttattttgattaaatcttttccaattttgcaaacactacagtatactgcaacacaaaagattttatctgtaaacacaaagcccttcatctaatatttgttgctattgccaatttttcaatgaaatgacctaaaaacaacaaaaaaaaataacctatacggtagttgctttagggggtggggggatgctatctgttagtgcttaaaagggggtaaatgcttgccgctttagaggtggatggtgctcataaaaggccccagtcgggggtatttaaaaaggactgaacagaaatccttagctagtagaatggcagcacgctgtaaaattattactgtattgtgtactggctataagatgtagacacctttcagtaagccaatcatttgtaaccattctagcagtgtcatattaggttaataaggctgctgtgttttaaagggcatttttatttgggttttggtgaaattctttaatttgttgattatattcacataaaatcagcattcattgacacatagctctaatgacatatgtatgaaaaaccatacactggatgacctagtcgattatttaagcataaaataaattgtgttaaactcttcaccta

SEQ ID NO: 29167 - DNA, 7042 bp, Homo Sapiens
aagaagaggtagcgagtggacgtgactgctctatcccgggcaaaagggatagaaccagaggtggggagtctgggcagtcggcgacccgcgaagacttgaggtgccgcagcggcatccggagtagcgccgggctccctccggggtgcagccgccgtcgggggaagggcgccacaggccgggaagacctcctccctttgtgtccagtagtggggtccaccggagggcggcccgtgggccgggcctcaccgcggcgctccgggactgtggggtcaggctgcgttgggtggacgcccacctcgccaaccttcggaggtccctgggggtcttcgtgcgccccggggctgcagagatccaggggaggcgcctgtgaggcccggacctgccccggggcgaagggtatgtggcgagacagagccctgcacccctaattcccggtggaaaactcctgttgccgtttccctccaccggcctggagtctcccagtcttgtcccggcagtgccgccctccccactaagacctaggcgcaaaggcttggctcatggttgacagctcagagagagaaagatctgagggaagatggatgcaaaagctcgaaattgtttgcttcaacatagagaagctctggaaaaggacatcaagacatcctacatcatggatcacatgattagtgatggatttttaacaatatcagaagaggaaaaagtaagaaatgagcccactcaacagcaaagagcagctatgctgattaaaatgatacttaaaaaagataatgattcctacgtatcattctacaatgctctactacatgaaggatataaagatcttgctgcccttctccatgatggcattcctgttgtctcttcttccagtgtaaggacagtcctgtgtgaaggtggagtaccacagaggccagttgtttttgtcacaaggaagaagctggtgaatgcaattcagcagaagctctccaaattgaaaggtgaaccaggatgggtcaccatacatggaatggcaggctgtgggaagtctgtattagctgcagaagctgttagagatcattcccttttagaaggttgtttcccagggggagtgcattgggtttcagttgggaaacaagacaaatctgggcttctgatgaaactgcagaatctttgcacacggttggatcaggatgagagtttttcccagaggcttccacttaatattgaagaggctaaagaccgtctccgcattctgatgcttcgcaaacacccaaggtctctcttgatcttggatgatgtttgggactcttgggtgttgaaagcttttgacagtcagtgtcagattcttcttacaaccagagacaagagtgttacagattcagtaatgggtcctaaatatgtagtccctgtggagagttccttaggaaaggaaaaaggacttgaaattttatccctttttgttaatatgaagaaggcagatttgccagaacaagctcatagtattataaaagaatgtaaaggctctccccttgtagtatctttaattggtgcacttttacgtgattttcccaatcgctgggagtactacctcaaacagcttcagaataagcagtttaagagaataaggaaatcttcgtcttatgattatgaggctctagatgaagccatgtctataagtgttgaaatgctcagagaagacatcaaagattattacacagatctttccatccttcagaaggacgttaaggtgcctacaaaggtgttatgtattctctgggacatggaaactgaagaagttgaagacatactgcaggagtttgtaaataagtctcttttattctgtgatcggaatggaaagtcgtttcgttattatttacatgatcttcaagtagattttcttacagagaagaattgcagccagcttcaggatctacataagaagataatcactcagtttcagagatatcaccagccgcatactctttcaccagatcaggaagactgtatgtattggtacaactttctggcctatcacatggccagtgccaagatgcacaaggaactttgtgctttaatgttttccctggattggattaaagcaaaaacagaacttgtaggccctgctcatctgattcatgaatttgtggaatacagacatatactagatgaaaaggattgtgcagtcagtgagaattttcaggagtttttatctttaaatggacaccttcttggacgacagccatttcctaatattgtacaactgggtctctgtgagccggaaacttcagaagtttatcagcaagctaagctgcaggccaagcaggaggtcgataatggaatgctttacctggaatggataaacaaaaaaaacatcacgaatctttcccgcttagttgtccgcccccacacagatgctgtttaccatgcctgcttttctgaggatggtcagagaatagcttcttgtggagctgataaaaccttacaggtgttcaaagctgaaacaggagagaaacttctagaaatcaaggctcatgaggatgaagtgctttgttgtgcattctctacagatgacagatttatagcaacctgctcagtggataaaaaagtgaagatttggaattctatgactggggaactagtacacacctatgatgagcactcagagcaagtcaattgctgccatttcaccaacagtagtcatcatcttctcttagccactgggtcaagtgactgcttcctcaaactttgggatttgaatcaaaaagaatgtcgaaataccatgtttggtcatacaaattcagtcaatcactgcagattttcaccagatgataagcttttggctagttgttcagctgatggaaccttaaagctttgggatgcgacatcagcaaatgagaggaaaagcattaatgtgaaacagttcttcctaaatttggaggaccctcaagaggatatggaagtgatagtgaagtgttgttcgtggtctgctgatggtgcaaggataatggtggcagcaaaaaataaaatctttttgtggaatacagactcacgttcaaaggtggctgattgcagaggacatttaagttgggttcatggtgtgatgttttctcctgatggatcatcatttttgacatcttctgatgaccagacaatcaggctctgggagacaaagaaagtatgtaagaactctgctgtaatgttaaagcaagaagtagatgttgtgtttcaagaaaatgaagtgatggtccttgcagttgaccatataagacgtctgcaactcattaatggaagaacaggtcagattgattatctgactgaagctcaagttagctgctgttgcttaagtccacatcttcagtacattgcatttggagatgaaaatggagccattgagattttagaacttgtaaacaatagaatcttccagtccaggtttcagcacaagaaaactgtatggcacatccagttcacagccgatgagaagactcttatttcaagttctgatgatgctgaaattcaggtatggaattggcaattggacaaatgtatctttctacgaggccatcaggaaacagtgaaagactttagactcttgaaaaattcaagactgctttcttggtcatttgatggaacagtgaaggtatggaatattattactggaaataaagaaaaagactttgtctgtcaccagggtacagtactttcttgtgacatttctcacgatgctaccaagttttcatctacctctgctgacaagactgcaaagatctggagttttgatctccttttgccacttcatgaattgaggggccacaacggctgtgtgcgctgctctgccttctctgtggacagtaccctgctggcaacgggagatgacaatggagaaatcaggatatggaatgtctcaaacggtgagcttcttcatttgtgtgctccgctttcagaagaaggagctgctacccatggaggctgggtgactgacctttgcttttctccagatggcaaaatgcttatctctgctggaggatatattaagtggtggaacgttgtcactggggaatcctcacagaccttctacacaaatggaaccaatcttaagaaaatacacgtgtcccctgacttcaaaacatatgtgactgtggataatcttggtattttatatattttacagactttagaataaaatagttaagcattaatgtagttgaactttttaaatttttgaattggaaaaaaattctaatgaaaccctgatatcaactttttataaagctcttaattgttgtgcagtattgcattcattacaaaagtgtttgtggttggatgaataatattaatgtagctttttcccaaatgaacatacctttaatcttgtttttcatgatcatcattaacagtttgtccttaggatgcaaatgaaaatgtgaatacataccttgttgtactgttggtaaaattctgtcttgatgcattcaaaatggttgacataattaatgagaagaatttggaagaaattggtattttaatactgtctgtatttattactgttatgcaggctgtgcctcagggtagcagtggcctgctttttgaaccacacttaccccaagggggttttgttctcctaaatacaatcttagaggttttttgcactctttaaatttgctttaaaaatattgtgtctgtgtgcatagtctgcagcatttcctttaattgactcaataagtgagtcttggatttagcaggcccccccaccttttttttttgtttttggagacagagtcttgctttgttgccaggctggagtgcagtggcgcgatctcggctcaccacaatcgctgcctcctgggttcaagcaattctcctgcctcagcctcccgagtagctgggactacaggtgtgcgcacatgccaggctaatttttgtatttttagtagagacggggtttcaccatgttggccgggatggtctcgatctcttgacctcatgatctacccgccttggcctcccaaagtgctgagattacaggcgtgagccaccgtgcctggccaggccccttctcttttaatggagacagggtcttgcactatcacccaggctggagtgcagtggcataatcatacctcattgcagcctcagactcctgggttcaagcaatcctcctgcctcagcctcccaagtagctgagactacaggcacgagccaccacacccagctaatttttaagttttcttgtagagacagggtctcactatgttgtctaggctggtcttgaactcttggcctcaagtaatcctcctgcctcagcctcccaaagtgttgggattgcagatatgagccactggcctggccttcagcagttctttttgtgaagtaaaacttgtatgttggaaagagtagattttattggtctacccttttctcactgtagctgctggcagccctgtgccatatctggactctagttgtcagtatctgagttggacactattcctgctccctcttgtttcttacatatcagacttcttacttgaatgaaacctgatctttcctaatcctcacttttttcttttttaaaaagcagtttctccactgctaaatgttagtcattgaggtggggccaattttaatcataagccttaataagatttttctaagaaatgtgaaatagaacaattttcatctaattccatttacttttagatgaatggcattgtgaatgccattcttttaatgaatttcaagagaattctctggttttctgtgtaattccagatgagtcactgtaactctagaagattaaccttccagccaacctattttcctttcccttgtctctctcatcctcttttccttccttctttcctttctcttcttttatctccaaggttaatcaggaaaaatagcttttgacaggggaaaaaactcaataactagctatttttgacctcctgatcaggaactttagttgaagcgtaaatctaaagaaacattttctctgaaatatattattaagggcaatggagataaattaatagtagatgtggttcccagaaaatataatcaaaattcaaagattttttttgtttctgtaactggaactaaatcaaatgattactagtgttaatagtagataacttgtttttattgttggtgcatattagtataactgtggggtaggtcggggagagggtaagggaatagatcactcagatgtattttagataagctatttagcctttgatggaatcataaatacagtgaatacaatcctttgcattgttaaggaggttttttgtttttaaatggtgggtcaaggagctagtttacaggcttactgtgatttaagcaaatgtgaaaagtgaaaccttaattttatcaaaagaaatttctgtaaatggtatgtctccttagaatacccaaatcataattttatttgtacacactgttaggggctcatctcatgtaggcagagtataaagtattaccttttggaattaaaagccactgactgttataaagtataacaacacacatcaggttttaaaaagccttgaatggcccttgtcttaaaaagaaattaggagccaggtgcggtggcacgtgcctgtaatcccagctccttgggaggctaagacaggaggattccttgagccctggagtttgagtccagcctgggtgacatagcaagaccctgtcttaaaagaaaaatgggaagaaagacaaggtaacatgaagaaagaagagatacctagtatgatggagctgcaaatttcatggcagttcatgcagtcggtcaagaggaggattttgttttgtagtttgcagatgagcatttctaaagcattttcccttgctgtatttttttgtattataaattacattggacttcatatatataatttttttttacattatatgtctcttgtatgttttgaaactcttgtatttatgatatagcttatatgatttttttgccttggtatacattttaaaatatgaatttaaaaaatttttgtaaaaataaaattcacaaaattgttttgaaaaacaaaaaaaaaaaaaa

SEQ ID NO: 29168 - DNA, 3778 bp, Homo Sapiens
ggcggcggcggcggcggcggcagctgcggcgggagaagatggtggcgctggaggcagcagcggctggagcggagctttattcccaggcttggcaccagcgctgtcactagcgccgcctgctcccgcgggcccgcggacccagctgtcaggcaagcccagtggagcaaaatgagagcgcagtgagccgggcccagcttctctcctagccgttccgactcccaccatgaaccacttggaggggtctgcggaggtggaggtgaccgacgaggcggcaggtggggaggtgaacgagtcggtggaggccgacctggagcaccccgaggtggaagaggaacagcagcagccgccgcagcagcagcactatgtgggccgccaccagcgcgggcgagccctcgaggacctccgcgcccagctcggccaggaggaagaggagcgcggggaatgcctggcgcgctcagccagcacggagagcggcttccacaaccacacggacaccgccgagggcgacgtgatcgccgcggcccgcgacggctacgatgcggagcgcgcgcaggaccccgaggacgagagcgcctatgctgtgcagtaccggcccgaggccgaggagtacacggagcaggcagaggccgagcacgccgaggccacgcaccgccgcgcgctgcccaaccacctgcacttccactcgctggagcacgaggaagccatgaatgcggcctactcaggctacgtctacacgcaccggctcttccaccgcggtgaggacgagccctactccgagccctatgccgactacggcggcctccaggagcacgtgtacgaggagataggggacgcgcccgagctggacgcacgcgacggcctgcggctctacgagcaggagcgcgacgaggcggccgcgtaccgccaggaggccctgggcgcgcggctgcaccattacgacgagcgctccgacggcgagtccgacagccccgagaaggaggccgagttcgcgccctacccgcgcatggacagctacgagcaggaggaggacatcgaccagatagtggccgaggtgaagcagagcatgagctcgcagagcctcgacaaggcagccgaggacatgcctgaggccgagcaggacctggagcgtccccctaccccggccgggggtcgccccgacagccccgggctgcaggcgccggcggggcagcagcgggcggtgggccccgcgggcggcggcgaggcggggcagcggtacagcaaggagaagcgcgatgccatctcgctggccatcaaggacatcaaggaggccatcgaggaggtgaaaaccaggaccatccgttcgccttacacccccgacgagcccaaagagcccatctgggtcatgcgccaggacattagccccaccagggactgtgacgaccagaggccgatggacggagattctccgtctcctggcagctcctcccccttgggtgcagagtcatcaagcacatctcttcaccccagtgaccctgtggaagcgtccactaataaagagtcaagaaaaagcttggcttcattcccaacctacgttgaagttccgggaccctgcgaccccgaagacttgatcgatggaatcatttttgccgccaattaccttggctccactcagctgctctcagacaaaactccttccaaaaacgtgcgcatgatgcaggcccaggaagccgtaagcaggatcaagatggcccagaaattagccaaaagcaggaagaaggctcctgaaggcgaatctcagccaatgactgaagtggatctcttcatttctacccagagaatcaaagtgctgaacgccgacacacaggagacaatgatggaccaccctctgaggaccatttcctacattgcggacattgggaacatcgttgtgctgatggcccgccggcggatgcctcgctccaactcccaggagaacgtggaagcgtcccacccatcccaggatgggaaaaggcagtacaagatgatctgccacgtcttcgagtctgaggatgctcagctgattgcacagtccatcggacaggcatttagcgtggcataccaggaattcctcagggccaatgggattaaccccgaagatctcagccagaaggagtatagtgacctgctcaatacccaggacatgtacaacgatgacctgatccacttctccaagtcggaaaactgtaaagatgttttcatagagaagcagaaaggagaaatcctaggtgtggtgattgtggagtctggctggggatccatcctccccaccgtgatcattgccaacatgatgcatggtggccctgcggagaaatctgggaagctgaatatcggtgaccagatcatgtccattaatggcaccagcctggtgggcctgcctctgtccacctgccagagcattattaagggcttaaagaatcagtcccgagtcaagctgaatatcgtgagatgtcctccggtgaccaccgtgttaatcagaagaccagaccttcgctaccagctcggtttcagcgtccagaatggaattatctgcagcctcatgcgagggggaatagctgagagaggaggcgtccgtgtggggcaccggatcattgaaatcaatggacagagcgtcgtggccaccccccacgagaagatcgtccacattctctccaatgctgttggggagattcatatgaagacaatgccagccgcgatgtacaggctgctgacggcccaggagcagcctgtttacatctgaccgcggccacacgcggtggcatgcatggaggactctcctcttcgtggttgtgtttctcgtgctgcatccctgtgtccactgagactttcccctctcgcgcccagcatttggttttacacaggaagagaagaatccacaaggacctctttactctctccgatttgcttttttttttttttttttttcaataccagggaagtttcgtatgcactcccttgaggatggagagcagccagcacccacctggtactgacccaggaccatcctggagggctttctgggtgtgtccagggggtgggctgtcactgcttgagggagaatcctcccttcccaggaggtgcagacttcttaaaaggagctcgcggggcagcaaagcagctgattcagcagtgcctaaaacccagttgctgatccctgctctctgagtttatctgtgggaatgtggtagtacccagggccagcccacgtcattaaggttatgcactgcctgccatgtagttggggcaccatacattatttcttcccagaatctctgagccaaccttaaacctcttctattgctagttctaatttcaacgtatgtgtgttttctaatacgagccttctcaccccaggataaaaggggaaataactgccttgggcaaggacaccatagtgtcacagagagcttggcaattcatggggcatctgaagctttaccaggttgtcctcaagttatcaaccattagataaacacaggcaggtactgtctgcttctctctctctcacacacacacacacacacacagtcccatttgcatatcacccttccctgctcccaccaccagtgagacaagctgaagattaggcacacagatcccctggaaacccacctctctggaaggccccttccctggcaggtggccaggcaggcgggggctgctcagcctcatcctgagagacctgccctctctgcgctgaggcccagcccctccagcaccactttggcttaaagcatcctcctcctggactcccctccctgccgaacacacatcccaggag

SEQ ID NO: 29169 - DNA, 8413 bp, Homo Sapiens
tttccagattggggctcgggccgcgcctcctccgggaccctccccttggaccgagccgatcgccgcggggcagttcgggccggctgtcctggcgcgaaaaggtggacaagtcctattttcaagagaagatgacttttaacagttttgaaggatctaaaacttgtgtacctgcagacatcaataaggaagaagaatttgtagaagagtttaatagattaaaaacttttgctaattttccaagtggtagtcctgtttcagcatcaacactggcacgagcagggtttctttatactggtgaaggagataccgtgcggtgctttagttgtcatgcagctgtagatagatggcaatatggagactcagcagttggaagacacaggaaagtatccccaaattgcagatttatcaacggcttttatcttgaaaatagtgccacgcagtctacaaattctggtatccagaatggtcagtacaaagttgaaaactatctgggaagcagagatcattttgccttagacaggccatctgagacacatgcagactatcttttgagaactgggcaggttgtagatatatcagacaccatatacccgaggaaccctgccatgtatagtgaagaagctagattaaagtcctttcagaactggccagactatgctcacctaaccccaagagagttagcaagtgctggactctactacacaggtattggtgaccaagtgcagtgcttttgttgtggtggaaaactgaaaaattgggaaccttgtgatcgtgcctggtcagaacacaggcgacactttcctaattgcttctttgttttgggccggaatcttaatattcgaagtgaatctgatgctgtgagttctgataggaatttcccaaattcaacaaatcttccaagaaatccatccatggcagattatgaagcacggatctttacttttgggacatggatatactcagttaacaaggagcagcttgcaagagctggattttatgctttaggtgaaggtgataaagtaaagtgctttcactgtggaggagggctaactgattggaagcccagtgaagacccttgggaacaacatgctaaatggtatccagggtgcaaatatctgttagaacagaagggacaagaatatataaacaatattcatttaactcattcacttgaggagtgtctggtaagaactactgagaaaacaccatcactaactagaagaattgatgataccatcttccaaaatcctatggtacaagaagctatacgaatggggttcagtttcaaggacattaagaaaataatggaggaaaaaattcagatatctgggagcaactataaatcacttgaggttctggttgcagatctagtgaatgctcagaaagacagtatgcaagatgagtcaagtcagacttcattacagaaagagattagtactgaagagcagctaaggcgcctgcaagaggagaagctttgcaaaatctgtatggatagaaatattgctatcgtttttgttccttgtggacatctagtcacttgtaaacaatgtgctgaagcagttgacaagtgtcccatgtgctacacagtcattactttcaagcaaaaaatttttatgtcttaatctaactctatagtaggcatgttatgttgttcttattaccctgattgaatgtgtgatgtgaactgactttaagtaatcaggattgaattccattagcatttgctaccaagtaggaaaaaaaatgtacatggcagtgttttagttggcaatataatctttgaatttcttgatttttcagggtattagctgtattatccattttttttactgttatttaattgaaaccatagactaagaataagaagcatcatactataactgaacacaatgtgtattcatagtatactgatttaatttctaagtgtaagtgaattaatcatctggattttttattcttttcagataggcttaacaaatggagctttctgtatataaatgtggagattagagttaatctccccaatcacataatttgttttgtgtgaaaaaggaataaattgttccatgctggtggaaagatagagattgtttttagaggttggttgttgtgttttaggattctgtccattttcttttaaagttataaacacgtacttgtgcgaattatttttttaaagtgatttgccatttttgaaagcgtatttaatgatagaatactatcgagccaacatgtactgacatggaaagatgtcaaagatatgttaagtgtaaaatgcaagtggcaaaacactatgtatagtctgagccagatcaaagtatgtatgtttttaatatgcatagaacaaaagatttggaaagatatacaccaaactgttaaatgtggtttctcttcggggagggggggattgggggaggggccccagaggggttttataggggccttttcactttctacttttttcattttgttctgttcgaattttttataagtatgtattacttttgtaatcagaatttttagaaagtattttgctgatttaaaggcttaggcatgttcaaacgcctgcaaaactacttatcactcagctttagtttttctaatccaagaaggcagggcagttaacctttttggtgccaatgtgaaatgtaaatgattttatgtttttcctgctttgtggatgaaaaatatttctgagtggtagttttttgacaggtagaccatgtcttatcttgtttcaaaataagtatttctgattttgtaaaatgaaatataaaatatgtctcagatcttccaattaattagtaaggattcatccttaatccttgctagtttaagcctgcctaagtcactttactaaaagatctttgttaactcagtattttaaacatctgtcagcttatgtaggtaaaagtagaagcatgtttgtacactgcttgtagttatagtgacagctttccatgttgagattctcatatcatcttgtatcttaaagtttcatgtgagtttttaccgttaggatgattaagatgtatataggacaaaatgttaagtctttcctctacctacatttgttttcttggctagtaatagtagtagatacttctgaaataaatgttctctcaagatccttaaaacctcttggaaattataaaaatattggcaagaaaagaagaatagttgtttaaatattttttaaaaaacacttgaataagaatcagtagggtataaactagaagtttaaaaatgcttcatagaacgtccagggtttacattacaagattctcacaacaaacctattgtagaggtgagtaaggcatgttactacagaggaaagtttgagagtaaaactgtaaaaaattatatttttgttgtactttctaagagaaagagtattgttatgttctcctaacttctgttgattactactttaagtgatattcatttaaaacattgcaaatttattttatttatttaattttctttttgagatggagtcttgcttgtcacccaggctggagtgcagtggagtgatctctgctcactgcaacctccgccttctgggttcaagcgattctcgtgcctcagcttcctgagtagctggaattacaggcaggtgccaccatgcccgactaatttttttttatttttagtagagacggggtttcaccatgttggccaggctggtatcaaactcctgacctcaagagatccactcgccttgccctcccaaagtgctgggattacaggcttgagccaccacgcccggctaaaacattgcaaatttaaatgagagttttaaaaattaaataatgactgccctgtttctgttttagtatgtaaatcctcagttcttcacctttgcactgtctgccacttagtttggttatatagtcattaacttgaatttggtctgtatagtctagactttaaatttaaagttttctacaaggggagaaaagtgttaaaatttttaaaatatgttttccaggacacttcacttccaagtcaggtaggtagttcaatctagttgttagccaaggactcaaggactgaattgttttaacataaggcttttcctgttctgggagccgcacttcattaaaattcttctaaaacttgtatgtttagagttaagcaagactttttttcttcctctccatgagttgtgaaatttaatgcacaacgctgatgtggctaacaagtttattttaagaattgtttagaaatgctgttgcttcaggttcttaaaatcactcagcactccaacttctaatcaaatttttggagacttaacagcatttgtctgtgtttgaactataaaaagcaccggatcttttccatctaattccgcaaaaattgatcatttgcaaagtcaaaactatagccatatccaaatcttttccccctcccaagagttctcagtgtctacatgtagactattccttttctgtataaagttcactctaggatttcaagtcaccacttattttacattttagtcatgcaaagattcaagtagttttgcaataagtacttatctttatttgtaataatttagtctgctgatcaaaagcattgtcttaatttttgagaactggttttagcatttacaaactaaattccagttaattaattaatagctttatattgcctttcctgctacatttggttttttcccctgtccctttgattacgggctaaggtagggtagagtgggtgtagtgagtgtatataatgtgatttggccctgtgtattatgatattttgttatttttgttgttatattatttacatttcagtagttgttttttgtgtttccattttagtggataaaatttgtattttgaactatgaatggagactaccgccccagcattagtttcacatgatataccctttaaacccgaatcattgttttatttcctgattacacaggtgttgaatggggaaaggggctagtatatcagtaggatatactatgggatgtatatatatcattgctgttagagaaatgaaataaaatggggctgggctcagtggctcacgcctgtaatcccagcactttgggaggctgaggcaggtggatcacgaggtcaggagatcgagaccatcctggctaacacggtgaaaccccgtctctactaaaaaacagaaaattagccgggcgtggtggcgggcgcctgtagtcccagctactcgggaggctgaggcaggagaatggtgtgaacccgggaggcagagcttgcagtgagccgagatctcgccactgcactccagcctgggcaacagagcaagactctgtctcaaaaaaaaaaaaaaaagaaataagaaaatgggaagcaatatttgacatagttctttttagtcaaatctacttgttaaaaaaagggtagcagtttattcatctgtgaaaggaaaataatacttatcttacaaggttgcaagagctcaaggagaccatgtatgtaaagttcctgctgtaaatatgaactcccatcctaatacccttttacctctctgtgggtttgtcttgacctggaaatttgggctaaaacttagaaaaaattcttacatgataactcagtgatgcttactcatagtttttggtgtttctcatagataagatataaatcagctgggcgcggtggctcatgcctgtaatcccagcactttgggaggccgaggcgggcagatcacctgaggtcgggaggtcgagaccagcctgaccaacatggagaaaccccgtctctactaaaaatacaaaattagctgggcgtggtggctcatgcctgtaatcccagctacttgggaggctgaggcaggagaatcgcttgaacccaggaggcggaggttgtggtgagcgaagatcgtgccattgcactccagcctgggcaacaagagcaaaactctgtctcaaaaaaaaaaaaagatataaatcacaataaataaataggtcaatacaaatgttagccaggcgtggtggcacatgcccatagtcgcagctactctggaggcagaggcaggaggatcacttgagcccatgaatttgaggcagcagtgagctatgattgtgccactgtactccagtctgggtgacagagtgagaccccatctctaaataaataggtcaaacccttaaaaatatttaaattcttaaaaaattgaaaagattattcttctcaaatttagttgagctttctaagagaagcaattggctttttcccacttcaataatcattttcagtttgactcatacagttaacacaatgtgaatttcttcctcagcataacagagttatagaatgacagggctggaagtgaccttagagagtatccagttctttcattttacaggtgaggcaactgagactcaaaggtgatgtaatttgtgcaaagattatagctaattagtagcagagccctgactgggacatagtttgaaggtgaaaaacttcaccaagctacctttcttgaaaggtccaaatgtttatgttttcaactactctttccactgtaccataactttcactacatattaaatgacactttataactaatataataggacaatcatcaatgcatatatagccagcccttcatatctgtgggttttgcatccatggattcaaccaaggaggaattgaaaacactgagaaaaaaaaaaaagaccacacaataaaaaaaaaaaatacaaaataatacaaagaaaaagccaaaattgtcatactgttgttaagcaacagtataacaactatttacatagcattaaggttggtgcaaaaatgcaaaaaaaaaaaaagcaattatttttaaaccaacctaatatattgtattaggtattaaagtcatctggacatgaattaaagtatatgatgccagcctggacaaaaggcaaaaccctgtctctacaaaaaatacaaaaattagctgggcatggtggtgtgtgcctgtagtcctggctactccggagcctgaggtgggaggatcgcttgagtctgggaggcagaggctgcattgagctatgatcatggcactgcattccagcctgggtgacagtgcaagaccttgtctcagaataaataaagtatgtgatgaagatgtgcatacattatatgcaaatactgttttttttttttttaatttaaacagtctcactgtgttgcccaggatggagtgcaatggcacaatcttggctcatggcaaactctgcctcgcaagcagctgggactacaggcatgctccacggtgcccagttaattttttttgtattcttagtagagacagggtttcaccatgttggccaggctagtcttgaatttctgacctcaagtgattcatctcccaaagtgctgggattacaggcgtgagccaccacggccggctaatttttgtattttttagtagtgactggtttcgcggtgttgaccaggctggtctcgaactcctgatctcaggtgatctgcctgcctcggcctcacaaagtgctgggattacaggtgtgaaccactgctcccggccttgtgtgattttatctaagggacttaagcgtcctcaggtcctagggggtcgtgaaaccaaaaccccagggatagcaagggacaattgtatcttcaaagtagacaaatggcgccgggcacggtggctcacgcctgtaatcccagcagtttccgaggctgaggcaggcggctcacctgaggtcaggagttggagaccagcctggccaacatgctgaaaccctgtctgtacaaaaatacaaaaatagctgggcatggtggcgcatgcctgtagtcccagctactagagcgactgaggcaggagaattgcttgaacctgggaggcggaggttgcagggagccaagatggcgccaccgcactccagcctaggtgatagagtgagactccctctcaaaaacaaaacaaaacaaaaaaattagacaaatgctacattaatgtttgggtggtcagattctactttgaatctgaagtttgcagatatgcctatagatttttggagtttaccactttcttattctgtatcattaatgtaatattttaaattactatatatgttaccatttttctggatttagtaagaaatttgcagttttggtttgatgtaacaagggttttaatgtaatttatgttagattttgcatttttttcattactgttatattttaacctgactgactgatctaattgtattagtattgtgaataatcatgtgaaatgttttgagacagagtactatatttgtgaatataattttatggtttttttcacttagaacctttctgtgtggaaaactaagaaaattgctttctgctgtataatctggcattcattgtagattaaagcttatttttctgtgaataaaacgtattcaataaaatactattctttaaaatta

SEQ ID NO: 29170 - DNA, 5165 bp, Homo Sapiens
gggaagccagacggttaacacagacaaagtgctgccgtgacactcggccctccagtgttgcggagaggcaagagcagcgaccgcggcacctgtccgcccggagctgggacgcgggcgcccgggcggccggacgaagcgaggagggaccgccgaggtgcgcgtctgtgcggctcagcctggcgggggacgcggggagaatgtggactgggtagagatgaacgagacttttctcagatgttggatatttgcttggaaaaacgtgtgggtacgaccttggctgcccccaagtgtaactccagcactgtgaggtttcagggattggcagaggggaccaaggggaccatgaaaatggacatggaggatgcggatatgactctgtggacagaggctgagtttgaagagaagtgtacatacattgtgaacgaccacccctgggattctggtgctgatggcggtacttcggttcaggcggaggcatccttaccaaggaatctgcttttcaagtatgccaccaacagtgaagaggttattggagtgatgagtaaagaatacataccaaagggcacacgttttggacccctaataggtgaaatctacaccaatgacacagttcctaagaacgccaacaggaaatatttttggaggatctattccagaggggagcttcaccacttcattgacggctttaatgaagagaaaagcaactggatgcgctatgtgaatccagcacactctccccgggagcaaaacctggctgcgtgtcagaacgggatgaacatctacttctacaccattaagcccatccctgccaaccaggaacttcttgtgtggtattgtcgggactttgcagaaaggcttcactacccttatcccggagagctgacaatgatgaatctcacacaaacacagagcagtctaaagcaaccgagcactgagaaaaatgaactctgcccaaagaatgtcccaaagagagagtacagcgtgaaagaaatcctaaaattggactccaacccctccaaaggaaaggacctctaccgttctaacatttcacccctcacatcagaaaaggacctcgatgactttagaagacgtgggagccccgaaatgcccttctaccctcgggtcgtttaccccatccgggcccctctgccagaagactttttgaaagcttccctggcctacgggatcgagagacccacgtacatcactcgctcccccattccatcctccaccactccaagcccctctgcaagaagcagccccgaccaaagcctcaagagctccagccctcacagcagccctgggaatacggtgtcccctgtgggccccggctctcaagagcaccgggactcctacgcttacttgaacgcgtcctacggcacggaaggtttgggctcctaccctggctacgcacccctgccccacctcccgccagctttcatcccctcgtacaacgctcactaccccaagttcctcttgcccccctacggcatgaattgtaatggcctgagcgctgtgagcagcatgaatggcatcaacaactttggcctcttcccgaggctgtgccctgtctacagcaatctcctcggtgggggcagcctgccccaccccatgctcaaccccacttctctcccgagctcgctgccctcagatggagcccggaggttgctccagccggagcatcccagggaggtgcttgtcccggcgccccacagtgccttctcctttaccggggccgccgccagcatgaaggacaaggcctgtagccccacaagcgggtctcccacggcgggaacagccgccacggcagaacatgtggtgcagcccaaagctacctcagcagcgatggcagcccccagcagcgacgaagccatgaatctcattaaaaacaaaagaaacatgaccggctacaagacccttccctacccgctgaagaagcagaacggcaagatcaagtacgaatgcaacgtttgcgccaagactttcggccagctctccaatctgaaggtccacctgagagtgcacagtggagaacggcctttcaaatgtcagacttgcaacaagggctttactcagctcgcccacctgcagaaacactacctggtacacacgggagaaaagccacatgaatgccaggtctgccacaagagatttagcagcaccagcaatctcaagacccacctgcgactccattctggagagaaaccataccaatgcaaggtgtgccctgccaagttcacccagtttgtgcacctgaaactgcacaagcgtctgcacacccgggagcggccccacaagtgctcccagtgccacaagaactacatccatctctgtagcctcaaggttcacctgaaagggaactgcgctgcggccccggcgcctgggctgcccttggaagatctgacccgaatcaatgaagaaatcgagaagtttgacatcagtgacaatgctgaccggctcgaggacgtggaggatgacatcagtgtgatctctgtagtggagaaggaaattctggccgtggtcagaaaagagaaagaagaaactggcctgaaagtgtctttgcaaagaaacatggggaatggactcctctcctcagggtgcagcctttatgagtcatcagatctacccctcatgaagttgcctcccagcaacccactacctctggtacctgtaaaggtcaaacaagaaacagttgaaccaatggatccttaagattttcagaaaacacttattttgtttcttaagttatgacttggtgagtcagggtgcctgtaggaagtggcttgtacataatcccagctctgcaaagctctctcgacagcaaatggtttcccctcacctctggaattaaagaaggaactccaaagttactgaaatctcagggcatgaacaaggcaaaggccatatatatatatatatatatatctgtatacatattatatatacttatttacacctgtgtctatatatttgcccctgtgtattttgaatatttgtgtggacatgtttgcatagccttcccattactaagactattacctagtcataattattttttcaatgataatccttcataatttattatacaatttatcattcagaaagcaataattaaaaaagtttacaatgactggaaagattccttgtaatttgagtataaatgtatttttgtcttgtggccattctttgtagataatttctgcacatctgtataagtacctaagatttagttaaacaaatatatgacttcagtcaacctctctctctaataatggtttgaaaatgaggtttgggtaattgccaatgttggacagttgatgtgttcattcctgggatcctatcatttgaacagcattgtacataacttgggggtatgtgtgcaggattacccaagaataacttaagtagaagaaacaagaaagggaatcttgtatatttttgttgatagttcatgtttttcccccagccacaattttaccggaagggtgacaggaaggctttaccaacctgtctctccctccaaaagagcagaatcctcccaccgccctgccctccccaccgagtcctgtggccattcagagcggccacatgacttttgcatccattgtattatcagaaaatgtgaagaagaaaaaaatgccatgttttaaaaccactgcgaaaatttccccaaagcataggtggctttgtgtgtgtgcgatttgggggcttgagtctgggtggtgttttgttgttggtttttgttgctttttttttttttttttttttaatgtcaaaattgcacaaacatggtgctctaccaggaaggattcgaggtagataggctcaggccacactttaaaaacaaacacacaaacaacaaaaaacgggtattctagtcatcttggggtaaaagcgggtaatgaacattcctatccccaacacatcaattgtattttttctgtaaaactcagattttcctcagtatttgtgtttttacattttatggttaatttaatggaagatgaaagggcattgcaaagttgttcaacaacagttacctcattgagtgtgtccagtagtgcaggaaatgatgtcttatctaatgatttgcttctctagaggagaaaccgagtaaatgtgctccagcaagatagactttgtgttattctatcttttattctgctaagcccaaagattacatgttggtgttcaaagtgtagcaaaaaatgatgtatatttataaatctatttataccactatatcatatgtatatatatttataaccacttaaattgtgagccaagccatgtaaaagatctactttttctaagggcaaaaaaaaaaaaaaaaaaaaaagaacactcctttctgagactttgcttaatacttggtgacctcacaatcacgtcggtatgattgggcacccttgcctactgtaagagaccctaaaaccttggtgcagtggtggggaccacaaaacaaccagggaggaagagatacatcattttttagtattaaggaccatctaagacagctctattttttttttgccactttatgattatgtggtcacacccaagtcacagaaataaaaaactgactttaccgctgcaatttttctgttttcctccttactaaatactgatacattactccaatctattttataattatatttgacattttgttcacatcaactaatgttcacctgtagaagagaacaaatttcgaataatccagggaaacccaagagccttactggtcttctgtaacttccaagactgacagctttttatgtatcagtgtttgataaacacagtccttaactgaaggtaaaccaaagcatcacgttgacattagaccaaatacttttgattcccaactactcgtttgttctttttctccttttgtgctttcccatagtgagaatttttataaagacttcttgcttctctcaccatccatccttctcttttctgcctcttacatgtgaatgttgagcccacaatcaacagtggttttattttttcctctactcaaagttaaaactgaccaaagttactggctttttactttgctagaacaacaaactatcttatgtttacatactggtttacaatgttatttatgtgcaaattgtcaaaatgtaaattaaatataaatgttcatgctttaccaaaaa

SEQ ID NO: 29171 - DNA, 1999 bp, Homo Sapiens
gagggaggggccgccggggaagaggaggaggaaggaaagaaagaaagcgagggagggaaagaggaggaaggaagatgcgagaaggcagaggaggagggagggagggaaggagcgcggagcccggcccggaagctaggtgagtgtggcatccgagctgagggacgcgagcctgagacgccgctgctgctccggctgagtatctagcttgtctccccgatgggattcccgtccaagctatctcgagcctgcagcgccacagtccccggccctcgcccaggttcactgcaaccgttcagaggtccccaggagctgctgctggcgagcccgctactgcagggacctatggagccattccgtagtgccatcccgagcaacgcactgctgcagcttccctgagcctttccagcaagtttgttcaagattggctgtcaagaatcatggactgttattatatgccttgttttctgtcaagacaccatgattcctggtaaccgaatgctgatggtcgttttattatgccaagtcctgctaggaggcgcgagccatgctagtttgatacctgagacggggaagaaaaaagtcgccgagattcagggccacgcgggaggacgccgctcagggcagagccatgagctcctgcgggacttcgaggcgacacttctgcagatgtttgggctgcgccgccgcccgcagcctagcaagagtgccgtcattccggactacatgcgggatctttaccggcttcagtctggggaggaggaggaagagcagatccacagcactggtcttgagtatcctgagcgcccggccagccgggccaacaccgtgaggagcttccaccacgaagaacatctggagaacatcccagggaccagtgaaaactctgcttttcgtttcctctttaacctcagcagcatccctgagaacgaggcgatctcctctgcagagcttcggctcttccgggagcaggtggaccagggccctgattgggaaaggggcttccaccgtataaacatttatgaggttatgaagcccccagcagaagtggtgcctgggcacctcatcacacgactactggacacgagactggtccaccacaatgtgacacggtgggaaacttttgatgtgagccctgcggtccttcgctggacccgggagaagcagccaaactatgggctagccattgaggtgactcacctccatcagactcggacccaccagggccagcatgtcaggattagccgatcgttacctcaagggagtgggaattgggcccagctccggcccctcctggtcacctttggccatgatggccggggccatgccttgacccgacgccggagggccaagcgtagccctaagcatcactcacagcgggccaggaagaagaataagaactgccggcgccactcgctctatgtggacttcagcgatgtgggctggaatgactggattgtggccccaccaggctaccaggccttctactgccatggggactgcccctttccactggctgaccacctcaactcaaccaaccatgccattgtgcagaccctggtcaattctgtcaattccagtatccccaaagcctgttgtgtgcccactgaactgagtgccatctccatgctgtacctggatgagtatgataaggtggtactgaaaaattatcaggagatggtagtagagggatgtgggtgccgctgagatcaggcagtccttgaggatagacagatatacacaccacacacacacaccacatacaccacacacacacgttcccatccactcacccacacactacacagactgcttccttatagctggacttttatttaaaaaaaaaaaaaaaaaaatggaaaaaatccctaaacattcaccttgaccttatttatgactttacgtgcaaatgttttgaccatattgatcatatattttgacaaaatatatttataactacgtattaaaagaaaaaaataaaatgagtcattattttaaaggt

SEQ ID NO: 29172 - DNA, 11537 bp, Homo Sapiens
caggcaccttttttgatccagtcaaggaagaggatttgttgttttcgaaatcagagtgaaggaagcaccgaagcgaaacttaaggaatcctgccttcccggagccgcgggcgatgcgactagggctgccgggcgccgccgccgcccgtccggcttcgtccttcccggcagtcgggaactagttctgaccctcgccccccgaccccggatcgaatccccgccctccgcaccctggatatgttttctcccagacctggatatttttttgatatcgtgaaactacgagggaaataatttgggggatttcttcttggctccctgctttccccacagacatgccttccgtttggagggccgcggcaccccgtccgaggcgaaggaacccccccagccgcgagggagagaaatgaagggaatttctgcagcggcatgaaagctctgcagctaggtcctctcatcagccatttgtcctttcaaactgtattgtgatacgggcaggatcagtccacgggagagaagacgagcctcccggctgtttctccgccggtctacttcccatatttcttttctttgccctcctgattcttggctggcccagggatgacttcctcgctgcagcggccctggcgggtgccctggctaccatggaccatcctgctggtcagcactgcggctgcttcgcagaatcaagaacggctatgtgcgtttaaagatccgtatcagcaagaccttgggataggtgagagtagaatctctcatgaaaatgggacaatattatgctcgaaaggtagcacctgctatggcctttgggagaaatcaaaaggggacataaatcttgtaaaacaaggatgttggtctcacattggagatccccaagagtgtcactatgaagaatgtgtagtaactaccactcctccctcaattcagaatggaacataccgtttctgctgttgtagcacagatttatgtaatgtcaactttactgagaattttccacctcctgacacaacaccactcagtccacctcattcatttaaccgagatgagacaataatcattgctttggcatcagtctctgtattagctgttttgatagttgccttatgctttggatacagaatgttgacaggagaccgtaaacaaggtcttcacagtatgaacatgatggaggcagcagcatccgaaccctctcttgatctagataatctgaaactgttggagctgattggccgaggtcgatatggagcagtatataaaggctccttggatgagcgtccagttgctgtaaaagtgttttcctttgcaaaccgtcagaattttatcaacgaaaagaacatttacagagtgcctttgatggaacatgacaacattgcccgctttatagttggagatgagagagtcactgcagatggacgcatggaatatttgcttgtgatggagtactatcccaatggatctttatgcaagtatttaagtctccacacaagtgactgggtaagctcttgccgtcttgctcattctgttactagaggactggcttatcttcacacagaattaccacgaggagatcattataaacctgcaatttcccatcgagatttaaacagcagaaatgtcctagtgaaaaatgatggaacctgtgttattagtgactttggactgtccatgaggctgactggaaatagactggtgcgcccaggggaggaagataatgcagccataagcgaggttggcactatcagatatatggcaccagaagtgctagaaggagctgtgaacttgagggactgtgaatcagctttgaaacaagtagacatgtatgctcttggactaatctattgggagatatttatgagatgtacagacctcttcccaggggaatccgtaccagagtaccagatggcttttcagacagaggttggaaaccatcccacttttgaggatatgcaggttctcgtgtctagggaaaaacagagacccaagttcccagaagcctggaaagaaaatagcctggcagtgaggtcactcaaggagacaatcgaagactgttgggaccaggatgcagaggctcggcttactgcacagtgtgctgaggaaaggatggctgaacttatgatgatttgggaaagaaacaaatctgtgagcccaacagtcaatccaatgtctactgctatgcagaatgaacgcaacctgtcacataataggcgtgtgccaaaaattggtccttatccagattattcttcctcctcatacattgaagactctatccatcatactgacagcatcgtgaagaatatttcctctgagcattctatgtccagcacacctttgactataggggaaaaaaaccgaaattcaattaactatgaacgacagcaagcacaagctcgaatccccagccctgaaacaagtgtcaccagcctctccaccaacacaacaaccacaaacaccacaggactcacgccaagtactggcatgactactatatctgagatgccatacccagatgaaacaaatctgcataccacaaatgttgcacagtcaattgggccaacccctgtctgcttacagctgacagaagaagacttggaaaccaacaagctagacccaaaagaagttgataagaacctcaaggaaagctctgatgagaatctcatggagcactctcttaaacagttcagtggcccagacccactgagcagtactagttctagcttgctttacccactcataaaacttgcagtagaagcaactggacagcaggacttcacacagactgcaaatggccaagcatgtttgattcctgatgttctgcctactcagatctatcctctccccaagcagcagaaccttcccaagagacctactagtttgcctttgaacaccaaaaattcaacaaaagagccccggctaaaatttggcagcaagcacaaatcaaacttgaaacaagtcgaaactggagttgccaagatgaatacaatcaatgcagcagaacctcatgtggtgacagtcaccatgaatggtgtggcaggtagaaaccacagtgttaactcccatgctgccacaacccaatatgccaatgggacagtactatctggccaaacaaccaacatagtgacacatagggcccaagaaatgttgcagaatcagtttattggtgaggacacccggctgaatattaattccagtcctgatgagcatgagcctttactgagacgagagcaacaagctggccatgatgaaggtgttctggatcgtcttgtggacaggagggaacggccactagaaggtggccgaactaattccaataacaacaacagcaatccatgttcagaacaagatgttcttgcacagggtgttccaagcacagcagcagatcctgggccatcaaagcccagaagagcacagaggcctaattctctggatctttcagccacaaatgtcctggatggcagcagtatacagataggtgagtcaacacaagatggcaaatcaggatcaggtgaaaagatcaagaaacgtgtgaaaactccctattctcttaagcggtggcgcccctccacctgggtcatctccactgaatcgctggactgtgaagtcaacaataatggcagtaacagggcagttcattccaaatccagcactgctgtttaccttgcagaaggaggcactgctacaaccatggtgtctaaagatataggaatgaactgtctgtgaaatgttttcaagcctatggagtgaaattattttttgcatcatttaaacatgcagaagatgtttaaaaataaaaaaaaaactgctttatcctcctgtcagcaccccctcccacccctgcaacaaagacttgctttaaatagatttcagctatgcagaaaaatttagcttatgcttccatatttttaaattttgttttttaagttttgcacttttgtttagtctcgctaaagttatatttgtctgttatgaccacagagttatatgtgtgtgtatcaaaagtggtctcaaaatatttttttaagaaaaaaagcaaaaacaatgtattgctgataatcagtttggaccagtttcttaaggtcattaaaacagaagcaaattaagacaggtttgactgcagtggtgtctggtatccatgttttatttctgggcacaagctagtttttatgttgatacgttcctgaacatattatcttgttggacatcttttctcttgtgttttgtttgaatgtgcaatagtttataggccacaaataagctttcttgtaagctctcttcctaacagggcacatattcttccataatataaacacttttctgccccatctcccatacttttgaaggtcagttctatgacagtgaattttgcacaggagaagcagctacctgatttcttactttctctctccttatcatggagaatacagaaacattgtctgaaagggctctaaagaaggaactaccaaaacctgacttgaaatgccatttcttttaaccttccaaatcctaaatgtttccttcaaggcatcttaataaacttatttgcttctggttttgggagttcataagagagaatagaacaaaatacaggacatcaaatattagccatttcccattttattttatttttctatgtaggttcatgttccatgttcatttatttaagaaatacatttttattggtaagcttatagagctacacttatggaatttttaagtaggtaaataaatggttaagacaaaatagtgttatagccttcattctctgaataggccatctttgactcataaaattacccttactgtttattataacttcagaagtaatttatagttctgaacctatagtatcttttaccctgttcccaagcaaagactggtgactttatctgaaaatgattcctcttcccatgacctaaaacactgtgaggaaaaatcattcaagtggcatgccaagtccctatgaaggaagggctgctatcaaacctaccttttttgagcaaactgagactaaacttctctcttttcaaaattgtgttatcttccttaatcctattttcataatttttccttttgccagtttttcacattatctttgatatgtgagcaacatttattatttacattagagtataccttttagtaataaaatgacttgaaatcatattatttttaaaagccctttgcttctttcattacttataatctcctctaaaacaacctctgcatgttttttttaaataaagcactttctgtcaaataatggacttttttctaaacagaaattattttctattaatttgcaaactgatgatttcacttttttttacttttttttcgattatcagagtacttagtaaatgttatatagtttagttctaagatagttccagggattaaaaggttaagaggaaaacacaaatcaccaaatttctgatttatgtttttatctcctgaacaatattttctcactcatattcctctatcttatcacttagctaaagacagcctaaatttcccaattttctgtccaaaatatttgtgatttacttgtatataagccttctcatttgccatgtgctgtgatcttacaagttagatgttactatacctaccatttattcagctggattgctgaacacagttctggattcatagaattaagaatatcttgttagtgcccaggatttccacgttttgtgttttattggcccttttctttattcagccccttaatctattttcagtcttctggcacgtaatttttttcacagttattattcttctattaacaaattatttttatctttcctagtacattttcacttagttctcttgcccttaaatatctttcacatgcattttaggatattcttttcaaatatttgtaggacaactttgaatcaaaataaattatgttccttctccaatttgaagcattgaggataaatgaccatttgaggtctaactgatcttttcctgccagaagagttatcttacgttctgctatatttgtatttgggccagttgattgtaggttgtccaacattttttaatattgggaaaattatgataaaatgctttaaaaattaatatgccagattaaaataactgaatagtttactatttcattcaagcatgtttaaaacaaataatttcctttcaccagtttttcttagtaaactcctgaaaaagtaggaaaggtggaaagtatatatcatttttataaattttaaattgtacatcagacttttaaaatctgtaatatacaagcaagcaaaattattttaaatgacttaattgtatgctaatactcatctgataataaatgcttcttaaagttgacatttaactgctatcacaaagttttatatgtagaaaagtggggtccttttgaataaaagatcattcaactaaaaatattaaaatttatttcactggatggtaatgtaaccttaaaagcatcataataggtaaagtctaatattagttcccttaacaaaatcctaactgtataccagaattaggtcactgaaagaacttgatttgaattacgtttagacaaaaatgatttaattgtaaattcttaaaactttctaaatgcataattggcaaaaaaaaaaacccactgttaccagtgtaggaagttacaagaaggcacatactgaatgctgaagtatacatatgctatttctcttaaacctcagagcaaccatatgagcattgtaattaatattcccattttacagatgaggaaactgaagctaagagaagctaagtaatatgcccaaggtccacatctagtaacagacaaagctgggatttcagtctatgtctgcctctctccacatctctttcatccataccacactgcctacatgccatatgacaggatgtgtaatgggctaacgtttatttaaaaagttcaggccaggtgcagtggcttatgcctataatccccgcactttgggaggccgagccgggtggatcatgaggtcagacgttcaacaccagcctggccaagatggtgaaaccccgtctctattaaaaatattttttaaaaattaactgagcgtggtggtgggcgcctgtagtcccagctactcaggaggctaaggcaggagaatctcttgaacccgagaggtggaggttgcagtgagctgagatcgcgccactgcactgcagcctaggcgacagagcaagactgcctcaaaaaaaaaacataaaaattcagtcactatactctggcacaattttcatttgtatatgagccaaaccacataccttaatgatttgggaagttaggcaaatatgagatatgtagacatatctatgctgattgttgcttgagaaataattactaattctagacaaaactcaatcctgtatcttccatcatgaatcttaaaatcatttcacttcactcctaacatttcttacattgcagaactaatggtaaagtaaattttacggaaaaagttaagatagctttgggaacagagacctttccctaaattgattccatagcagatttgggggaattaacaaagaatttcagtctcatcaatcctttgaatccatcttcaaaacttctgcttttaataactttagaaaatttactaatctatagaactaattgagtaggatataggaaggatacaaggatataatgtcctttttataaaagtttagtatagcttctttacatgtatccacttgttccagaaaatgtgcattggttctgaatgtgaaaatatttaaagagagaaaggaacactcaagtaagtgtgggcttcagtgggaattatcacaaaacattggcaagtatttttatttaaattattttcaaatttgacttctacagccaagtggaattggtaggctgtagctgttacactgaaatttctagtctttgtaagtgcctcctgaaagtcatttaaaatggaaaaatatttcaatgagcttttccttttttcatatttatggacatgaatattttattggagatcattaactcctagaatttgagattatatttccatacaacattttataaagttatgttgaacttactacctgttatgtgcaggttattatgtaactattcacagattgcttcatatattgctttatcttcccatctaacttcttaaagttaaaatccggacacacatgttgattatctagaccagtcattctggaaattgtaacactcccacataaaccccaggagactttttcagaatgcaatgtttctaaatgtactgttactggcagtttactctccagcatataaggttgcattttaacttttagattatgaactgtgcaaactttacccaaaactatcttgcatgattccctcctaaatatattccttgattaagtaaatctggcaaatcactgtttgagctagttacataaaatttgttatcaagagaaggcttttctacaagtttccagattaacataaagaaaagagggaatcacagggcatttaagtgcaccttcccattactttccttaaatcacctcatagttaggctgggcgcggtggctcacgcctgtaatcccagcactttgggaggccgagacggtggatcacgaggtcaggggactgagatcatcctggctaacacgatgaaacctcatctctactaaaaatacaaataattagccaggcatggtggcacgcgcctgtagtcccagctactcgggaggcagagacaggagaatcgtttgcacccgggaggcggaggttgttgcagtgagccgagatcgcgccaatgcactccagcctgggctacagagtgagactccatctcaaaaaaaaacaaaaaaaatcacctcatagtttatgtctgacttactccaaacctcagttatctgatttgtagtctgtgtcaggaaagttttcttcatatctattctgtctccctcctctttgattttaaatttttttcttttacccagtaggacaaaaaagagcagttggtcatcatccccaatattcttagtcttcagtatgcttcaggcctctcaatgaacacttaagtctcaattcttcagacaaaattgcttaagctcttctcctcagtcctattttaatgactttatatttaagaatatagaattatattttcttttatattcaaattcattactccagttaagtaatagtttgatagtttgatagaatcgagagttaagatgtttctatttgaaagtggattcaaccatcagaccaccagcaaatcggcacttaatttttgtgttatctaacattttctattgtggaattttatgattttatattctcattagttataactaaaaagccatgcacacagaattgtatatcattttgccattaaaattttttaacatattgcagcaagcttagttttatgattgagccacaaccttttacatattttttgtatgaaatattaaacactaaatgcaagattaactttcaaaagcaaaccctacattaatcaggtattatctatggacatttttgtagaccacttttgaaatacttattattttgcaacatagactggactatacaactttcatttaacttttaggtgactgatttaagttgagtgtgcatatagagaaaaacctagaaatttatctcatggcagatacatttgaaagtacttcagaagaatttatgctgtatattaaaactaggctcaaaataaatctatcgtatctttaaaagtccaattctgttattactgtgatgtttgtagtgttactattaaacattgtgaacatacacatttttaaaacaacttgaaacccattttaaaatctgggtaagagagaaggaatcttcagaacaaaatcacatcattagggtgtccagtttatgattgaatttttaagcaaattactgtatttgaaactacaacttgatttggttttcagttttaaaaggcaacatgtgggttttatccattttatttatacctttagatttcagaaacatcttcatgttttagatgcattctacagacatcatgttacttaaaaactcagggcccctttcatccctttgtacactgaaaaagttcaattgttagcaagtaagcaattagatccagttgaatatttaaagtgtttgttgcacagttcatttaatgtttcatcttatttgactttttcacatagatataatatcagatttcattaattataaaaagttgcccagttctgtaattactgaacagagggaatgactcaactaattggctacatgttgcaacaaatttaggcctttagagttgaagcactgacttaaaacgacttacatttctgttctttggtcaaatgaccatacatgatatgggacaaattgtttcattttgtttgttttttaataagggaacttggtaaagtagttcctgtcagataggattttctcaagagacaatttaacgttataaagccttctaaaagtgaactaaatattttataactttagtaatagcttggatggttttgagaaaataacctgtatttatcacattgtcaaacagaatttttctttgaatcagacaagttcaagctctaaattgatgtgctatatacttaaaatcctaggaagttatctgtaaccagtctcttgtctcaggctcttcaccttgttaccaatcctcgtaagtatgtaaaggaaacatatttttaaagaagcttaacagtaagaaaaaattactaaaagatgcaattcaaagataggtcccagtttaacactgaattgcttgacttctgtggcttttctttttctggccacatttatttatttaagcaatttttgtatgccttgttatttcatttccatagagattatattgtatcagtgtttatgtaagctggaatcatcctcagttttttgctgataatttttcaaataaagatacatggataattgtaaaatacactaactcttagggtgttgtagtagctgaaacatggagatgcgtagctgtcatgctttttctgaatggacaggagaaacataagctacggagtattcacttctgaggatgcttttccggaaaaagaaaggctagaaaatactcgcacttcctcagaaccctctttcttgttaacgggtatcttttgttggtgtgttttgctcttacattacagatagactatcatatatgactttatgaataatttcagttattttgcttttgtataagctgtctgaagccttgctatgctgtataagttgtgtttgatggatcagtgtgagtataaaataaagcaaatcacttttcttttgtattatctatggatgccactatgaaagctgacattaagccactaaagagttttctatgaataagtgtaagtaaatgctttgatatatataaacctaaataaaaagattgtattgatacagagacattggagaaggagattttaaggcagttctttaggtttaaaaaggcttgctgtaaaatggtgcgttattccgtttattaaagatcatattaatgacaataaaaaaaaaaaaaaaaa

SEQ ID NO: 29173 - DNA, 1884 bp, Homo Sapiens
agtgccctctgtccactgctctgggccattccccaatcccccctcccacttgagcccctaactcagaatctgggacccaggggcccctccctaccccagctaacctcttctggaccaggagagccaacccagatcccactacctccatgagtgctacagacaggatggggcccagagctgtgccgggtctgcggctggcactgctgttgctgctggtgctagggacacccaagtcaggggtacaggggcaggaagggctggacttccctgagtacgatggtgtggaccgtgtgatcaatgtcaatgcaaagaactacaagaatgtgttcaagaagtatgaggtgctggcactcctctaccatgaaccccccgaggatgacaaggcctcacaaagacaatttgagatggaggagctgatcctggagttagcagcccaagtcctagaagacaagggtgttggcttcgggctggtagactctgagaaggatgcagctgtggccaagaaactaggcctaactgaagtggacagcatgtatgtattcaagggagatgaagtcattgagtacgatggcgagttttctgctgacaccatcgtggagtttctgcttgatgtcctagaggaccctgtggaattgattgaaggtgaacgagagctgcaggcgtttgagaatattgaggatgagatcaaactcattggctacttcaagagcaaagactcagagcattacaaagccttcgaggatgcagctgaggagtttcatccctacatccccttcttcgccaccttcgacagcaaggtggcaaagaagctgaccctgaagctgaatgagattgatttctacgaggccttcatggaagagcctgtgaccatcccagacaagcccaatagcgaagaggagattgtcaacttcgtggaggagcacaggagatcaaccctgaggaaactgaagccggagagtatgtatgagacctgggaggatgatatggatggaatccacattgtggccttcgcagaggaagctgatcctgatggtttcgagttcttagagactctcaaggctgtggcccaagataacactgaaaacccagatcttagcatcatctggattgaccctgatgacttccccctgctggtcccatactgggagaagacgtttgacatcgacttgtcagccccacaaataggagtcgtcaatgttactgatgcggatagcgtatggatggaaatggacgatgaggaggacctgccttctgctgaggagctggaggactggctggaggatgtcctggagggcgagatcaacacagaggacgatgacgatgatgatgatgactagttgctatggcaaccatctttcagccccactggtcttttcatgctctctcctgccttcccttgtccttccctgagttcctccagggagactaggttattctctgccatagagctaactggggtctatatgctgggtgctgagacactgatccccctcatttgatgagcaaatgagctacttttccctagacaccaggccagctctctcttatctgacttctgtttcttatcccataacttacttgtatctattatgtgtctcttccatcactctccatactctttcttgtgattctcctctagccatatatatgggccccatctctgttctgttccctccatctatgcacagctttcccccactctctctaatcctgtatctttctgactgtcctgtccttggccagaaggaagggagaatactgtgtttgggactgtatctcagcaatcacttgttaatgtatttgggtcaaatgagaggcctcaataaagacatctggggcagcatgaaaaaaaaaaaaaaaaaaaaaaaaaaaaaaaaggaattc

SEQ ID NO: 29174 - DNA, 3332 bp, Homo Sapiens
ctccctccaggaaggccgttgtcttccctgggacgacttgccagctctgaggcatgacagtacgggcccccagaagggtgaccaggaggccctcctcgtcccagctgccggcgtcgccgcccactgcagggcccgggctgtgactcgtggggacggttccctgcgccccggcgggggaggtgggcggggaggggcggcggggcgccggggcggggctcgggacggccgggctgggagctggagcccacagcgggaagcggccgccgcccgggcctcgcagggctaggcgaggcgagggggggcggggccgggcgctacgggaaggggaggccgcgcggaccgggagccgcaccgcgccagccgggctgcagcggccgcgcaccaaggctgcgatggggctggagacggagaaggcggacgtacagctcttcatggacgacgactcctacagccaccacagcggcctcgagtacgccgaccccgagaagttcgcggactcggaccaggaccgggatccccaccggctcaactcgcatctcaagctgggcttcgaggatgtgatcgcagagccggtgactacgcactcctttgacaaagtgtggatctgcagccatgccctctttgaaatcagcaaatacgtaatgtacaagttcctgacggtgttcctggccattcccctggccttcattgcgggaattctctttgccaccctcagctgtctgcacatctggattttaatgccttttgtaaagacctgcctaatggttctgccttcagtgcagacaatatggaagagtgtgacagatgttatcattgctccattgtgtacgagcgtaggacgatgcttctcttctgtcagcctgcaactgagccaggattgaatacttggaccccaggtctggagattgggatactgtaatacttctttgttattataacataaaagcaccactgttctgttcatttcctagctgttctaattaagaaaactattaagatgagcaaccacatttagaaatgtttattgacaggtcttttcaaataatgcttttctaattaatagccaaagatttcatatctaactttgtaaccagaattatacagtaagttgacaccacttagatttaaaggcagacagttttgctttagtacaatagtatacattttataatgatgaacttataatgattaagggacatttctataaaaatactacaatagttttatgcacaacttcccattaaaaatgagatttcttatttgtttgtctgtttttactctgggagtaatactttttaaattacctttacatatatagtcactggcatactgagaatatacaatgatcctggaaattgcagtaacaaaagcacacaacgattatagtaactataagatacaataaaacaaataaatatgaaagtagattcatgaaaatgtattcctttaaaatattgttttcctacaggcctatttaacaagatgtttcattttactgtatattttgtagttaatataaatgttgctctaatcagattgcttaaaagcatttttattatatttatgttgttgaactaatatatgaaataagtaaatgtagctcccacaaggtaaacttcattggtaagattgcactgttctgattatgtaagcatttgtacatcttctttggaaataaaagataaaagagcgatacacaaagctttcttttctaacttttccaagcaaaatctaaaatgttttatgacatttttctggctgtgatcttaaaataattcatatctaaatagtattttgtctaggagatgctttctctctagtagttagaaattaaatctgtgtcagcattcctattaatgtctcactttactttcaagtaatattggtgctatttaacattttacagtaaatgttacttctgatactttagtacaatttcaactacagtgattcatgtagagagacaggggagttgtcaacttgggctactgaactacatgcataaactaaaaactaacagctacaaacttttaagatttctctaatattggtatgtaacacaggataaagttattcttgtcattttgaactgtagagtcctatttcagtgtgatgaatcactgttgctttgaaaaatctcattatttctgggccgggcatggtggctcacccctgtaatcccagcactttgggaggccaaggcgggtggatcatgaggtcaggagatcaagaccatcctggccaacatggtgataccccgtctctactaaaaatacaaaaaaattagttgggcatggtggcatgcacctgtagtcccagctacctgggaggctgaggcaggagaattgcttgaacctgggaggcagaggttgcagtgagccaaaatcatgccactgcactcccgcctggcaacagagcaagagtctgtctcaaaaaaaaaaagaaaaaaagaaaaaaagaaaaaagaaaaatctcattatttcaaaatgatagacatataccaaaaacaagtctataatgtgagtagttactaaaatttacacatcttaaaagtgtgtaaatgcttaaatttcagaattaccatcagaacctcaattgacattcctttgaatacgctaataagtgacaaataagattaataagatttttcaaaatcgccaggactggtgaatataaatgatgattgaactggaataatattggggaccaaatcaaatgaatgattaaattatgaagctcatatccttttgaaggtagttgcaaagagacatttcaaaactgccctaggccattgcagcatccttagatgggacgcataatcattaccttaaagcatcaccactcattttgaccatatagattttattatgttagtttaaaaggtcaatcagcctcatgactttatagttatgtcttgtatttaaaaacattttttatacatttggttatgttgataaaccaaaaacatttgattaataaaatatctatttgaataaattatgagctatcctttcaaacagctattggcaagttttaaacccaaaatatatacacatagttctgtaataaaactgtttgacttctcaagtaacatgacttccttatttctgaacagtactggttactttcaaaatgaatttttattgagattttccattaactatttttttcaaagactcaaattttgtaccaagtaaatccaggctttatgtacaaacatgttgtttgttttatttggggctgggggaggtatatgatgagcagacttctcggaattcataataaattttctaaaagcctaaaaaaaaaaaaaaaaaaaaaaaaaaaaaaaa

SEQ ID NO: 29175 - DNA, 1323 bp, Homo Sapiens
gtggaggttgctgctatgagagagaaaaaaaaaaacagccacaatagagattctgccttcaaaggttggcttgccacctgaagcagccactgcccagggggtgcaaagaagagacagcagcgcccagcttggaggtgctaactccagaggccagcatcagcaactgggcacagaaaggagccgcctgggcagggaccatggcacggccacatccctggtggctgtgcgttctggggaccctggtggggctctcagctactccagcccccaagagctgcccagagaggcactactgggctcagggaaagctgtgctgccagatgtgtgagccaggaacattcctcgtgaaggactgtgaccagcatagaaaggctgctcagtgtgatccttgcataccgggggtctccttctctcctgaccaccacacccggccccactgtgagagctgtcggcactgtaactctggtcttctcgttcgcaactgcaccatcactgccaatgctgagtgtgcctgtcgcaatggctggcagtgcagggacaaggagtgcaccgagtgtgatcctcttccaaacccttcgctgaccgctcggtcgtctcaggccctgagcccacaccctcagcccacccacttaccttatgtcagtgagatgctggaggccaggacagctgggcacatgcagactctggctgacttcaggcagctgcctgcccggactctctctacccactggccaccccaaagatccctgtgcagctccgattttattcgcatccttgtgatcttctctggaatgttccttgttttcaccctggccggggccctgttcctccatcaacgaaggaaatatagatcaaacaaaggagaaagtcctgtggagcctgcagagccttgtcgttacagctgccccagggaggaggagggcagcaccatccccatccaggaggattaccgaaaaccggagcctgcctgctccccctgagccagcacctgcgggagctgcactacagccctggcctccacccccaccccgccgaccatccaagggagagtgagacctggcagccacaactgcagtcccatcctcttgtcagggccctttcctgtgtacacgtgacagagtgccttttcgagactggcagggacgaggacaaatatggatgaggtggagagtgggaagcaggagcccagccagctgcgcctgcgctgcaggagggcgggggctctggttgtaaaacacacttcctgctgcgaaagacccacatgctacaagacgggcaaaataaagtgacagatgaccaccctgcaaaaaaaaaaaaaaaaaa

SEQ ID NO: 29176 - DNA, 2031 bp, Homo Sapiens
ccggctccccgcactctccgggtccacgcatcgtcctcccgcgcgcccgcccgcccatggccgggaaggtgcggtcactgctgccgccgctgctgctggccgccgcgggcctcgccggcctcctactgctgtgcgtccccacccgcgacgtccgggagccgcccgccctcaagtatggcatcgtcctggacgctggttcttcacacacgtccatgtttatctacaagtggccggcagacaaggagaacgacacaggcattgtgggccagcacagctcctgtgatgttccaggtgggggcatctccagctatgcagacaacccttctggggccagccagagtcttgttggatgcctcgaacaggcgcttcaggatgtgcccaaagagagacacgcgggcacacccctctacctgggagccacagcgggtatgcgcctgctcaacctgaccaatccagaggcctcgaccagtgtgctcatggcagtgactcacacactgacccagtacccctttgacttccggggtgcacgcatcctctcgggccaggaagagggggtgtttggctgggtgactgccaactacctgctggagaacttcatcaagtacggctgggtgggccggtggttccggccacggaaggggacactgggggccatggacctggggggtgcctctacccagatcacttttgagacaaccagtccagctgaggacagagccagcgaggtccagctgcatctctacggccagcactaccgagtctacacccacagcttcctctgctatggccgtgaccaggtcctccagaggctgctggccagcgccctccagacccacggcttccacccctgctggccgaggggcttttccacccaagtgctgctcggggatgtgtaccagtcaccatgcaccatggcccagcggccccagaacttcaacagcagtgccagggtcagcctgtcagggagcagtgacccccacctctgccgagatctggtttctgggctcttcagcttctcctcctgccccttctcccgatgctctttcaatggggtcttccagcccccagtggctgggaactttgtggccttctctgccttcttctacactgtggactttttgcggacttcgatggggctgcccgtggccaccctgcagcagctggaggcagccgcagtgaatgtctgcaaccagacctgggctcagcagctgctgagtcgcggctacggcttcgacgagcgcgccttcggcggcgtgatcttccagaagaaggccgcggacactgcagtgggctgggcgctcggctacatgctgaacctgaccaacctgatccccgccgacccgccggggctgcgcaagggcacagacttcagctcctgggtcgtcctcctgctgctcttcgcctccgcgctcctggctgcgcttgtcctgctgctgcgtcaggtgcactccgccaagctgccaagcaccatttaggggccgacgggggcagctgccccatccctcccccaacccctgtatccccaccccgtactcccacccctcccacaacccctgtacctcccacccctgtatccccacccctccacccacccctctcccaacctctctccccgcccctgtatcctgcattcctccacccaccctctatcccccaccgctccaccccaccactgtcttctccatccttccaccccaccctcagcgtctctgcccctaaggcagcccaggaaataggaactgagactctggtacccacaggagcctgggtgggcaaagagcgctcaatccagctccttgaacccctccagcccgcttcagcctgggcatcactgcaggccccgtgctcctcctcctcctcctcagggctgggtctccagagagtggggccttggtcctgagaatcagcccttagaggctccttctgtgtagtctgggtctgtactggggagggtcacagcccacgggctggcagccagcccagcacctacttgtaaaaattttgtaataaaaagtttttcctagagacgtg

SEQ ID NO: 29177 - DNA, 8025 bp, Homo Sapiens
cggcgctgctggaagatggcgagcggccgggacgagcggccgccttggcggctagggcggctcctgttgctcatgtgcctgctgctgctggggagctcggcccgggcggctcacatcaagaaggcggaggcgactaccacaactacgagcgcgggcgccgaggcggccgagggccagttcgaccgctactaccacgaagaggagttggagtcggcgctgagggaggcggcggccgcgggcctccccggcctggcccgcctctttagcatcggccgctcggtggaaggccggccgctgtgggtgcttcgcctcaccgccggcctggggtcgctaatccctgagggcgacgcggggcctgacgctgccgggcccgacgctgcggggccgctgctgcccggccggccccaggtgaagctggtgggcaacatgcatggcgacgagaccgtgtcgcgccaggtgttgatctacttggcccgcgagctggcggccggctaccgccgcggggacccgcgcctggtccgcctgctcaacaccaccgacgtgtacctgctgcccagcctcaaccccgatggcttcgagcgtgcccgcgagggcgactgtggcttcggcgacggcggcccgtccggggccagcggccgcgacaatagtcgcggccgcgacctcaaccgaagctttcccgaccagtttagcaccggcgaaccccccgccctggacgaggtgcccgaggtgcgcgccctcatcgagtggatccgcaggaacaagtttgtgctttctggaaatctgcatggtggctcagtggtagcaagctatccttttgatgattctccagaacataaggccactggaatctatagcaaaacctcagatgatgaagtatttaaatacttggcaaaagcttatgcttcaaaccaccccataatgaaaactggtgagcctcattgtccaggagatgaagacgagactttcaaagatggaatcacaaacggcgcacattggtatgatgtggaaggtggtatgcaagattacaattatgtgtgggccaactgttttgagatcacattagaactgtcttgttgcaagtacccacctgcttcacagcttcgacaggaatgggagaacaatcgtgagtctttgatcacattgattgaaaaggttcacattggagtgaaaggatttgttaaagattccataacaggatctgggttagagaatgcaaccatctcagtggctggtattaatcataatatcacaacaggcagatttggtgatttctaccgattacttgttcctggaacttacaaccttacagtagttttaactgggtatatgccattgactgttactaatgtagtggtgaaagaaggaccagccacagaggtggatttttctcttaggccaactgtaacttcagtaatccctgacacgacagaggctgtatcaactgctagcacagttgctatacctaatattctttctggaacatcatcctcctaccagccaattcagccaaaggactttcaccaccaccatttccctgatatggaaatcttcttgagaaggtttgccaatgaatatcctaacattacccggctttattccttgggaaaatcagtagagtcaagagaactttatgtgatggagatatctgataatccgggtgtccatgaaccaggtgaaccagaatttaagtacattggaaatatgcatggaaatgaagtggttggaagagaactgctgttgaacctcatagaatacctttgtaagaactttggaacagaccctgaagtcacagatttggttcataacactagaattcaccttatgccatccatgaatcctgatgggtatgaaaagtcccaggaaggagattcaataagtgtaattggcagaaacaacagcaacaactttgacctgaaccgaaatttcccagaccagtttgttcagatcacagatcctacgcaaccagaaactattgctgtaatgagctggatgaagtcctatccatttgtactttcagcaaacctgcatggaggttctttggtggttaactacccttttgatgatgatgaacaaggacttgccacatatagtaaatcaccagatgatgctgtgttccaacaaatagcactttcttattccaaggaaaattcccagatgtttcaaggtagaccttgcaagaatatgtatcctaatgaatattttcctcatggaataacaaatggagctagttggtataatgtgccaggaggaatgcaggactggaactatttacaaacaaattgctttgaagtgactattgaactaggttgtgtgaaatatccacttgagaaagagctgccaaacttttgggaacagaatcgaagatcactaatccagtttatgaaacaggttcatcagggcgtcagaggatttgttctagatgccacagatggcaggggtatattaaatgccaccattagtgttgctgagattaatcacccagtgactacttacaaaactggagattactggcgtctcttggttccaggaacttataaaatcacagcatctgctcgagggtataatccagttaccaagaatgtgactgtcaagagtgaaggcgctattcaggtcaacttcacacttgttcgatcctcaacagattcaaacaatgaatcaaagaaaggaaaaggggctagcagcagcaccaatgatgccagtgatccaactactaaagagtttgaaactttaattaaagacctttcagcggagaatggtttggaaagcctcatgttacgctcctcctcaaatctggctctggctctttatcgataccattcctacaaagacttatcagagtttctgagaggacttgtaatgaactatccacatattacaaatcttaccaatttgggacagagcactgaatatcgtcacatttggtcccttgaaatctccaataagcccaatgtatctgagcctgaagaaccaaagattcgttttgttgctggtatccatggaaatgcgccagttggaactgaactgcttttggctctggcagaatttctctgcctgaactacaaaaagaacccagctgttacccaattggttgacaggactaggattgtgattgtcccttctctaaatccagatgggcgagagagagctcaagagaaagactgtacttcaaaaataggacaaacaaatgctcgtggcaaagatttggatacagacttcacaaataatgcctcccaacctgagaccaaagccatcattgaaaatttgattcaaaaacaggactttagtctttctgttgccttagatggtggttccatgctggtcacatatccttatgacaagccagtacagacagtggaaaataaagagactctgaagcatttggcatctctttatgcaaataatcatccatccatgcacatgggtcagcccagttgcccaaataaatcagatgagaatattccaggaggagtaatgcgtggagcagaatggcatagtcacctgggcagcatgaaggattatagtgtcacctatggccattgtccggaaatcacagtatacacaagctgctgttactttcctagtgctgcacgactcccttccttgtgggcagacaataagagatctcttcttagtatgttagtggaggttcacaagggagttcatggatttgttaaagataagactggaaagccaatctctaaagcagtcattgtacttaatgaaggaataaaggtacaaacaaaagagggaggttatttccatgtactcttagcgccaggtgtccataacattattgccatcgctgatgggtaccagcaacaacattcacaggtctttgtgcatcatgatgcagctagttctgtggtgatagtctttgacacagataaccggatatttggtttgccaagggagcttgtggtaactgtatcaggtgctactatgtcggcattgatcctaacagcttgcattatttggtgcatctgctcaatcaagtctaatagacacaaggatggctttcatcggctcaggcagcatcatgatgagtatgaagatgaaattcgcatgatgtctaccggctccaagaagtccctcctaagccatgagttccaggatgaaacagacactgaagaggaaacattatattctagcaaacattgaaaaacacattttgcatatctcccagcataagtaccaagcaaaattacagttcctcttgggagaacactgcattaagaagagagactctcttgcttcttcaaagagctttgggaaattaaattgctaaatttgtattctctgtgaatttcactggcagttttgaacttcccttccttaaagtactctaaacctttaaaaaaaaatctgatttatgcagcagagatgggacagccactttttctttttaatttaagatgagctatttggagcttatgtaataatggcataaagccaactagaggatgttgtattttgcacatcagatgtttactagtggctttagtatttttctttgttttaaatggccaaaagaatccagaaacattaaggcagggacagcagtcagaatcgacataaagctttaaaaactcaaggttttttcaacctactgaggagtacttttctctagttgttaaatagctggagtttttcttattcaggtttaatggaggttgaattgatttttaaacacatataacagtaggaaatgaataaatgggcttctgcatttggctttctacctgttccaaggctagatcggaactggtagactacgctgtaagcaggatttcactacctctcttaaggtttagcaaacttctaaatagcccattttaagggagaacttactaactttattgtgaaaggtctaaatgcccacttgaatgaagctgagagagagatctagcaaaagctaaaactcatgttgtctatctttgaacttggtaaaaacccacaggtgctgctgcttatatctgtgaagcactagcttattctaggaatgcctgattctttaatattgcctaaatcggaacctttttctatgttgcacacatggttttcagatgacccagccatctacaagatctgaattctactgaaaatatctagaaatgtggaagagacctacttgcacattcttaacctgtatttgaacacaaaatatctatacttcatgctccagcccaagcctataccctgtaatagcatactattattgaaatcgcttgaccggtcttgttcacataggcctctgggagtgatttggttctttgccctaatgtttcatttgacggtctctttttgatcaaccaatttttctaaaagttcagtcgaaagcttttaagtatagcttcctcccttgaaaaaaaatgtaaactatgactgctgagtgataaaacactgtggtgtgaaagtgtcatcttcactgccaatcaggcaaagaccggaaagatttgcattttattatgtctgtcttatcatgcaatggaaatgatgctttttgtaagtatgcatcttaccaatgatgtaacggtttaatacctttgaatgttttaataaccaagttgctgctgaacttatactaaatcaggggaccaaaaaacttgctcttatcttctcaaattgtattctatatccattaatgtatcagttatcccaaagccttcaggtggaggggtttaccaccttcctaggtcgttcaaccaggttttgtgaggaatgcattcaaagtggctttataaaagaagattttctttagcaagaataatgaggtcatgtcatttgttaataagtatctgtgataaatccgtggttcaaggttaagccattctggtattctggtattagcaactgtaaattctgccacctcatacatggaacagagcttgtgggatgctaatagttagtgaagtatacatgatttaatttctaataatctttatgttttctttaaggatggtggtgtattgctctttttcagctttatttttaagagtacagtcaggaaaccaacaaggggcctaagagtggctgcccctgcttgggacattacagcaagtgaaacaaagttaatgtgacaagctttgctttgttatcattggtcttcactagaggataccttttacatgtacttctctcttggatcaaatatgtctttaactgtacatctcagtggctggaggccatgccttttaagcatgtgtaaaatttttaaagaaatgaacatacacatagttattttagtaatatttcctgaaagaaaaaccaaattctgctataagtcttgatcttcaatgaacttttaaataatgcatttagctggaaaacaagactttcccagcttgtattacctagaagcgtgaatgtataggatacctgactactaagactatattctcagccctgccctgtcttttatttgcgggtctaatctaatattagaatatattaaccgcttaaggcattgaagccatatgggatggggaatgcatttcttcagtgtttctccgagagactttccatttccttggagttatggcggcaagtaagtatcatagtattaagaaatttgcctaaatctgagttgtgcctttctttactcacaaggcatgggctttgtcctggtgatcagtttgtaagccttcttccttcccagctccttaataaaagcaaagtgattgagtaggtaatgttcaaagtgtctgcctgtgtacatgtacttgtattgattatgtagttcagtaagatgtgcccaagtcatttcagaaagaaagacccttcagttttgatgcattttgctgaacacttgggtagtgagtgggatcctatccagttgaggaatgcttgcaatgctcattgaagggatttgctttgggactttgtcatcttccagaaaggaaacatattgtatatttggcccagtgtgattgattgctttatctttggtaacttttacttgaatgggatttgctgaattaatgactattgaatttaaaactaattatgagttgacaaataaataaaaggtagtgtttatgtctgagcttattgtgtttgagctaacaccaggttactcagtaaccatgacctgctcctccatttccatttattctcaacattaaatagttttatcttgttgttgccagaaatgcacttgtgccaggtattgtccctgctgtatgaaaagcttcttggcaatgaattctgtaatagtgccctacattatggttttctggtggaattgttttaacagtgacaacccaggatttccaatatatttttgttttattgttattaccaaaaattccactatgattgatgttcagtgattttctatagcaacttttttggtaactctttgggtttctgatttgttttagctaaaattttggggatatgatttgggtctttgattaatgtcagctgaacttggatttctagttcatgaagaaatctctcccaatacccatttatcctatttttagcaataattcgttaatgattccacttgattttcagaatattgtcctggttgattttgatttgacagcatacattatgaaatttgaaagtaggttaccattttgaggcagttggatataaattatgtaaatatgtatgattatgatttttataaatggcataacatgagtgtactaactaccttctatgctggccatgctacagattttctggaggtatgacaatagtatttttttatgctcagattaaaaatcagcttttcacctctccagtttttccaagtgatactcccagttctagagcaatctacagctgtttatgtgaggtgcccaacacccattcatctcaagtgcttcagtctttggtttatttcatgcactgtgccttcaaaatgaaatttttaaaagggactttaaatgaagttgaatagtagtttttaaaagtcaatttgtaatttatgtgaaatctaactgtaatgaggtcctttctgttttttatatgtaaacagatctactaatcctgtataaaagttattttacgatg

SEQ ID NO: 29178 - DNA, 2943 bp, Homo Sapiens
ccgaaagagaaaacaggccgcgcgggcggcagaggagccgggcgccgcaatggacgtgcgggcgctgccgtggctgccgtggctgctgtggctgctgtgccggggcggcggcgatgcggactcccgcgcccccttcaccccgacctggccgcggagccgcgagcgtgaagccgccgccttccgggaaagtcttaatagacatcgatacttgaattctttatttcccagtgaaaactccaccgccttctatggaataaatcagttttcctatttgtttcctgaagagtttaaagccatttatttaagaagcaaaccttccaagtttcccagatactcagcagaagtacatatgtccatccccaatgtgtctttgccgttaagatttgactggagggacaagcaggttgtgacacaagtgagaaaccagcagatgtgtggaggatgctgggccttcagcgtggtgggggcagtggaatctgcttatgcaataaaggggaagcccctggaagacctaagtgtccagcaggtcattgactgttcgtataataattatggctgcaatggaggctctactctcaatgctttgaactggttaaacaagatgcaagtaaaactggtgaaagattcagaatatccttttaaagcacaaaatggtctgtgccattacttttctggttcacattctggattttcaatcaaaggttattctgcatatgacttcagtgaccaagaagatgaaatggcaaaagcacttcttacctttggccctttggtagtcatagtagatgcagtgagctggcaagattatctgggaggcattatacagcatcactgctctagtggagaagcaaatcatgcagttctcataactgggtttgataaaacaggaagcactccatattggattgtgcggaattcctggggaagttcttggggagtagatggttatgcccatgtcaaaatgggaagtaatgtttgtggtattgcagattccgtttcttctatatttgtgtgacatgttgggcagatcaagagacagctacaaaaatgaaggttttcataatgcaatgtaacatagtacttcaaagtattattcaacttcaagtttcagcaactacctacaaaagattctaaggcctagtagtatttaaactaagtttcagaatgttcccttcttgtagagagatggacaaccaaagtcagtgggacaaactccagcacagaagcctgcgaggaagcctatggaatagtttcctgtcctgagacgaaattcagattaggagatattttaggcccctgcaactggggaaggctactgtttgtttttgtttgcttattatttatttgtttgtttattgtgagatatttcaggtgggatcaaagaggtcataagaatttattttcttttgtggggtgtaactactagctttagattacccctatacacaagaatggccaacctaaaattatgtgtgtcttgtacagttagttatattagcagccctctgagatggcgtatctatcggaaggatttcaaacaccaattgctttacctgaacaaatggtgcttaccctttgaacagcagagtgaccacgtagaaggaaggaaaagggcaaaatcgcttcagttaaactgaaattaaatgaacaataaggcaactatataagtaacttctagtagcattgcctgagagacaaattattgtttgataattttcattgtgaataggaatccaatagatcatattgcttactttgttctttttatactatagaataatattttgttctctagtatatcaaaataccaaaatattatctcatattttctccctctttctcttactctttaccaagttttcctggtggcttggcttccctgactaaagaattaagtctcatttttactttccatttctattttcttaccacttggttggctccctttgtctctgtacctttaccaacattaggatctcacctctttcttcctcccttaattcataagcaccactcctatcaaagtcccatctcttaaccctgggtatcaaacaaactgtgagttttccagaatctgtttcccagttttcccctcagctttcctggtctcccatccgaactgcttctttgtgcacctcttgttctttctcttggctcccagtcttgattcctgtgatcactcttgcatcactaattgcacaagtgatttcaggtgcaattctgattagcctgcgtccacacagtgatcgatgatcctatgtgcctagaaaggacactgtgtgctgctcatgacctgcaacaggaaaaaagccatttcttgttagcagtgtaagaaccttagagcaaaggagttgaccttctgattgaatataagcacaaccatattaaatgaatcaatacaagaaaattatttctgatactatgtatgtacatatttcttctctaaaatgtatcattcttttctaatgtatatgatctaacaaaaatgaaacatgaaatgcagtagcaaccactaaaaaaaaaaattcaaggacatctaactttttctctcacttttgccctttgtttatccttccctgtgattagataaacaaaataaaaaacaaaatgctgtatttctcttcttacgccagtcagaaccaatccgaaaagaatgtgtgttgactcaggtttggagttatttcaggaagacagatattgaccttttaattgataaatattcttattatcctggaatgccagaaaagaactatgtcctgcttgtctagtttgtattcgctgactttctatgtgatatagatgcatttgtaatactctttttcaagtgctaaaggatttctaaaatttcaaactgattaatatgtttctgctgttctggattttgatgacatttacaataaaacaacctacatttgactttggtttaaaaagaaaaaaaaaaaa

SEQ ID NO: 29179 - DNA, 2046 bp, Homo Sapiens
catggcgtggagacacctgaaaaagcgggcccaggatgctgtgatcatcctggggggaggaggacttctcttcgcctcctacctgatggccacgggagatgagcgtttctatgctgaacacctgatgccgactctgcaggggctgctggacccggagtcagcccacagactggctgttcgcttcacctccctggggctccttccacgggccagatttcaagactctgacatgctggaagtgagagttctgggccataaattccgaaatccagtaggaattgctgcaggatttgacaagcatggggaagccgtggacggactttataagatgggctttggttttgttgagataggaagtgtgactccaaaacctcaggaaggaaaccctagacccagagtcttccgcctccctgaggaccaagctgtcattaacaggtatggatttaacagtcacgggctttcagtggtggaacacaggttacgggccagacagcagaagcaggccaagctcacagaagatggactgcctctgggggtcaacttggggaagaacaagacctcagtggacgccgcggaggactacgcagaaggggtgcgcgtactgggccccctggccgactacctggtggtgaatgtgtccagccccaacactgccgggctgcggagccttcagggaaaggccgagctgcgccgcctgctgaccaaggtgctgcaggagagggatggcttgcggagagtgcacaggccggcagtcctggtgaagatcgctcctgacctcaccagccaggataaggaggacattgccagtgtggtcaaagagttgggcatcgatgggctgattgttacgaacaccaccgtgagtcgccctgcgggcctccagggtgccctgcgctctgaaacaggagggctgagtgggaagcccctccgggatttatcaactcaaaccattcgggagatgtatgcactcacccaaggccgagttcccataattggggttggtggtgtgagcagcgggcaggacgcgctggagaagatccgggcaggggcctccctggtgcagctgtacacggccctcaccttctgggggccacccgttgtgggcaaagtcaagcgggaactggaggcccttctgaaagagcagggctttggcggagtcacagatgccattggagcagatcatcggaggtgaggacagcgtctgacgggaagcctgatctggaaccttcccaaggactcaggcaagcctttgtggctggatcatgagaggagggactccatcttgagccatgtcccccagccatggcatggctgcactgtaaacgccaatcggggggtcaccaggatcaaccgcaggctttcttcagtcccttggtcagaccataaactgcatttttgattctttgtggattcaaaccctaggatccatcagtcttgcaaggacattgaatattaggaggaaaaagtcatggaaaaaataaagccatttagaacctgggtttcaacgctagccctttctggtttgccataggccctgccaagatactgcaggtccatccaggcctctgctatctgcatctgcagtgggcttcccaggaacttgactgtctttcatttgatctttatttttgtttatttaatattttaaactttattttaaaaatatttcaaacataagggcggggtgtggtggctcatgcctgtaatcccagcactttgggaggccgaggcgggcggatcacctgaggccaggagttggagaccatccaggccaccatggtgaaaccctgtctctaccaaaaatacaaaaaattagccagatattgtggcaggcacttttaatcccagctactcgggaggctgaggcaggagaattgcttgaacctgggaggcggaggttgcagtgagccaagattgcaccagtgcactccagcttgggcgacagatcaagactctgtcacacacaaaacaaacgaacaaattttcccgtttctctctgtccctttctctataacatggataaaatattcacgtcttatgtatttatta

SEQ ID NO: 29180 - DNA, 14220 bp, Homo Sapiens
gcggccgccttctcatcgctcctggaaggtcccgagcgcgacaccatgtcggagcccgggggcggcggcggcgaggacggctcggccggattggaagtgtcggccgtgcagaatgtggcggacgtgtcggtgctgcagaagcacctgcgcaagctggtgccgctgctgctggaggacggcggcgaggcgccggccgcgctggaggcggcgctggaggagaagagcgccctggagcagatgcgcaagttcctttcggacccgcaggtccacacggtgctggtggagcgctccacgctcaaagaggacgtcggtgatgaaggagaagaagaaaaagaattcatttcctataacatcaacatagacattcattatggggttaaatccaatagcttggcattcattaaacgtactcccgtgattgatgcagataaacccgtgtcttctcagctccgggtccttacactcagtgaagactcgccctacgaaactttgcattctttcattagcaatgcagtggctcctttttttaagtcctacattagagagtctggcaaggcagacagggatggtgataaaatggctccttcagttgaaaagaagattgcagaactcgaaatgggactccttcacttgcagcaaaatattgaaattccggagatcagcctgccgattcatccaatgatcacaaatgttgcaaaacagtgttatgagcgtggagaaaagccaaaagttacagactttggtgataaggttgaagacccaacatttcttaatcagttacaatctggagttaaccgctggatccgagaaattcaaaaagtgaccaaactggatcgagatcctgcatcaggaactgccttacaggaaattagtttttggctaaacttggaacgtgcgttataccgcatccaggagaaacgggagagcccggaagttctcctgactctggatatcttgaaacatggcaagcgcttccatgccaccgtcagttttgacactgacacaggtctaaaacaggctttggaaactgtgaatgactacaatcctctgatgaaagatttccctctgaatgatttgctgtctgccacggagctggacaaaataagacaggcgcttgttgccattttcacacatttgagaaagatccgaaacacaaaatatcctattcagagggcactgcgtttggtggaggcaatttcaagagacttgagttctcaattactcaaagtattgggcactaggaaattgatgcatgttgcttatgaagaatttgaaaaagttatggtagcatgctttgaagtttttcagacttgggatgatgagtatgagaaacttcaggtattgttgagagacatcgtcaaaagaaaaagggaagaaaatctgaagatggtgtggcgtatcaaccctgcccacaggaagctgcaggcccgccttgaccagatgagaaaatttagacgccagcatgaacagctaagagctgttatcgtcagggtcctgaggccacaggtcacggcagttgcacaacagaatcaaggagaggtccctgaaccccaagatatgaaagtggctgaggttctctttgatgctgcagatgcaaatgccattgaggaagtaaaccttgcttatgagaacgtcaaggaagtggatggactggatgtttccaaagagggcacggaagcctgggaggctgctatgaagaggtacgatgagaggatcgacagagtggagacccggatcaccgctcgccttcgggatcagcttggcacagccaagaatgccaacgagatgtttaggattttctccaggtttaatgcactgtttgtcaggcctcacatccgtggggccattcgcgaataccagacccagctgatccagcgcgtgaaagatgacattgagtctcttcacgacaagttcaaggtccagtacccacagagtcaggcttgtaagatgagtcacgttcgtgacttgccccctgtgtcagggtctatcatctgggctaaacagatcgacaggcagctgacggcctacatgaagcgggtggaagatgtccttggcaagggctgggagaatcacgtggaggggcagaagctgaagcaggatggagacagcttccgcatgaagctcaacacgcaggagatctttgatgactgggcaaggaaggtgcagcagcgcaacctcggtgtctcggggcgcattttcaccatcgaaagtactcgggttcggggccgaactggaaatgtgcttaagctgaaagttaactttcttcctgagattatcacactatccaaagaagtccggaacctcaaatggcttggtttccgcgtcccactggcgattgtgaacaaagcccatcaagcaaaccagctttacccgtttgccatctcactgatcgagagcgttcgtacctatgaacggacctgcgagaaggtggaggagcggaacaccatttcccttttggtggctggcttgaaaaaggaagtgcaggccctgatcgcagaaggcattgcgttggtgtgggagtcctacaaacttgacccatatgtacagcgcttagcagagactgtcttcaacttccaagaaaaggtggatgatctgctgatcattgaagaaaaaatagacctagaagtccgttccttggaaacttgtatgtatgaccataagacattctcggaaatcttgaacagagtccagaaagcagtggatgacttaaatctgcactcctattccaatttgcccatctgggtcaacaagcttgacatggagattgaaagaatattgggcgtccgtctgcaagctggcctgagagcttggacgcaggttcttcttggacaagctgaagataaagcagaagttgacatggacacagatgctccacaagttagtcacaagcctggtggagagccaaagatcaaaaatgtcgttcatgagctaagaataaccaatcaggtaatctacttgaatccaccaattgaagagtgcagatacaagctgtatcaggaaatgtttgcctggaagatggttgtactgtctctccccaggatccagagtcagaggtaccaggtgggtgtacattacgaattgactgaggaagagaaattctatcggaatgctttaacacggatgcctgatggccctgttgccctggaagagtcgtattctgctgtcatgggcattgtatctgaagttgaacagtatgtcaaggtttggcttcagtatcagtgtttatgggatatgcaagctgaaaacatctataacagacttggagaagatctcaacaaatggcaggctctcctggtccaaataaggaaggccagaggaacctttgacaatgcagaaaccaagaaagagtttggaccagtagttatagattatggcaaggtacaatctaaggtgaacttgaaatatgactcttggcataaggaggttcttagcaaatttgggcagatgctaggatcaaacatgacggaattccattcccagatctcaaagtcccgccaagagttggagcagcactcagtagacacggccagcacctccgatgcagtgaccttcatcacctatgtgcagtctttgaaacggaagatcaagcagtttgagaagcaagttgagctctaccgcaatggccagcgcttactggaaaagcaaaggttccagttcccaccttcctggctttatattgacaacatcgagggagagtggggagccttcaatgacatcatgcggcgaaaggactctgccattcagcagcaggtggcaaacctgcaaatgaagattgtccaggaggatcgggccgtggaaagccgcaccaccgacctgctgactgactgggagaagaccaagcctgtcacgggcaaccttcgcccagaagaggcacttcaggctctcaccatatatgaggggaagtttggtaggctgaaggacgacagagagaagtgtgcaaaggccaaggaggcgctggaattgacagatactgggcttctcagtggcagtgaagagcgcgtgcaggtggccttagaagaattacaggacctcaaaggcgtttggtcagaactttctaaggtttgggagcaaatcgatcagatgaaggagcaaccctgggtttcagtacagcctcgaaagcttcgacaaaatttggatgccctcctgaaccagctgaaaagcttccctgcccggttgcgacagtatgcgtcctatgagtttgttcagaggcttctgaaaggttacatgaagataaatatgctggtgattgaactgaaatccgaagcacttaaagaccgccattggaaacagctcatgaaaaggcttcacgttaattgggttgtttctgagctaacccttggccaaatctgggatgttgacttgcagaaaaatgaagcgattgtcaaggatgtactgcttgtggcacaaggggagatggctttggaagaatttttgaagcagataagagaagtgtggaatacttatgaactagacttggttaattatcagaacaagtgccgcttgatccgtggctgggatgacctcttcaacaaggtcaaagaacacatcaacagcgtctcggccatgaagctctctccgtattacaaggtttttgaagaggatgctctcagctgggaagataagctgaacaggatcatggctctctttgatgtgtggattgatgtgcagaggcggtgggtctacctggaaggtatcttcacaggcagtgcagatatcaagcacctgctgccagtggaaacccagcggtttcagagcatcagcactgagtttttggctctaatgaaaaaagtgtccaagtctccccttgttatggatgttctgaacatccagggagtacagaggtctctggaaagattggcagacctgctaggaaagatccagaaagcattgggagaatatctggaaagagagcggtcatctttccccaggttctattttgtgggtgatgaagatttgcttgaaatcattggaaacagcaagaatgtcgctaaattacagaaacacttcaagaagatgtttgctggagtttcgagcatcatcctgaacgaggataactctgttgttttgggtatttcatctcgggaaggagaggaggttatgtttaaaactcctgtgtcaattactgaacatcccaaaatcaatgagtggctcacattggtagaaaaggagatgagagtcaccctggccaaactgcttgctgagtctgttacggaagttgagatttttggtaaagcaacttcaattgacccaaatacctacatcacttggattgataaataccaggcccagcttgtggttttgtcagcccagatagcctggtctgagaacgtggagaccgcactgagcagcatgggcggaggtggagatgccgcgcccttgcactctgtgctgagcaatgtggaggtcaccctcaatgtgttagcagactctgtcctcatggagcagcccccactccgaaggcggaagctagaacacttgattacagagttggttcaccagagagatgttacaaggtccttgatcaaaagcaagattgacaacgccaaatcttttgaatggctcagccagatgcgattttactttgaccctaagcaaactgatgtgttacagcagttgtcaattcaaatggcaaatgccaaatttaactatggctttgagtacctgggtgttcaggacaaactggtccagacccccctcactgaccgctgctatttgacaatgacacaagccttggaggccaggctggggggttccccatttggacctgctggaactgggaaaacagagtctgtcaaagctcttggccatcagcttggacggtttgttttagttttcaactgtgatgaaacctttgatttccaggcaatgggccggatctttgtgggcctttgccaggtgggtgcctggggctgctttgacgagttcaaccgcctggaggagcggatgctctcggctgtgtcccagcaggtgcagtgcatacaggaagcactgcgtgaacattccaaccccaactacgacaagacctctgcccccattacttgtgagctgctgaacaaacaagtcaaggtgagcccggacatggccatcttcatcaccatgaaccctggctacgcgggccggtctaaccttcctgacaacttgaagaagctgttccggagcttggccatgaccaagcccgaccggcagttaatcgcccaggtcatgctgtactcacagggtttccgcactgctgaagtgcttgccaacaaaatcgtcccgttttttaaactatgcgatgagcagctctcttcccaaagccattatgacttcggtcttcgggctttgaagagtgtgctggtgagtgcaggcaatgtgaagagagagagaatccagaagataaagagggagaaagaggaacgaggggaagcagttgatgaaggagaaattgctgaaaatctccctgaacaagagattctgatacagagcgtctgtgagacgatggtgccaaagctggtggcagaggacatcccgctgctcttcagcctcctgtcggacgtgttccctggagtccagtatcacaggggtgagatgactgcccttcgagaggagctgaagaaagtgtgtcaggagatgtatttgacatatggagatggagaagaagttggtggaatgtgggttgaaaaggttctccagctctatcagatcacccagatcaatcatggcctgatgatggtggggccctcgggaagtgggaagagcatggcctggcgtgtcctgctgaaggcattggagagactcgagggtgtggaaggtgtggcccatatcatcgaccccaaggccatcagcaaagaccacctctacggaaccctggaccccaacaccagggaatggacagatgggctcttcacacacgtgctgagaaagatcatcgacagcgtgagaggcgagctgcagaagcgccagtggatcgtcttcgatggcgatgtggatccagagtgggttgagaacttgaactcagtgctggatgacaataagctcctaactttgcccaatggagagcgcctcagtcttccacccaatgtgagaataatgtttgaggtacaggacttgaaatacgcgaccttggccacagtgtcgcgctgcggcatggtctggttcagtgaggatgtgctgagcaccgacatgatcttcaacaacttcctggccaggctgcgcagcatcccgctggatgaaggggaggatgaggcacagcggcggcgtaagggcaaagaggatgagggggaggaggccgcttcccccatgctgcagatccaaagagatgcagctacgatcatgcaaccgtacttcacgtccaacggcctggtcaccaaggcgctagagcacgccttccagctggagcacatcatggacctaacacgcctgcgctgcctgggctcgctcttctccatgctgcaccaggcctgccgcaacgtggcgcagtataacgccaaccatcccgacttccccatgcagatcgagcagctggagcgctacattcagcgatatctggtttatgccatactctggtccctgtctggagacagccggctaaaaatgagagcagagctgggtgaatacatcagaagaatcacgaccgtgcctctgcccactgcgcccaacatacccattatcgattatgaggtgtccatcagcggagaatggtctccgtggcaggccaaggtgcctcagattgaagtggagacgcacaaggtggcagcccctgatgtcgtcgtgccaacgctggacacagtccgccacgaagccctcttgtacacttggctggccgaacacaagcccctggtcttgtgtggccctcctgggtctggcaagaccatgacactcttcagcgccctccgggccttgcctgacatggaggtggtgggtctcaacttctccagtgctactactccagagctgcttctgaagacttttgatcactactgcgagtacaggcgcacacctaatggggtggttttggctcctgttcaacttggaaagtggctggtgttgttctgtgatgaaatcaacttgccagatatggataaatatgggacccagagggtcatatccttcatcagacagatggtggagcacggaggcttttaccgtacctcagatcaaacatgggtgaagctggagagaatccagtttgttggggcttgtaatccccccacagaccctggaagaaagcccctctcacacaggttcctgcgccacgtgcctgtcgtgtatgtggattacccgggccccgcctccctcacacagatctacggcaccttcaaccgcgccatgctgaggctcattccatccctgcggacgtatgcagagccgctcactgctgccatggtggagttctacaccatgtctcaggagagattcacccaggatacacaacctcactatatctattcaccccgtgaaatgactaggtgggtgagaggcatctttgaagcgctgagacctctggagaccctgcctgttgaaggcctcattcggatttgggcacatgaagctctgcgtctcttccaagatagactcgtagaggatgaggagaggcgttggactgatgagaacatcgacacggttgctctgaagcacttccctaacatcgacagagagaaggcaatgagccgacccatcttgtacagcaactggctgtcaaaggattacatcccagtagaccaagaagagttaagagattatgtcaaagctaggctgaaggtcttttatgaagaagaacttgatgttccgctggtgctgtttaatgaagtcctagaccacgtgctgaggattgacagaatattccgtcaacctcaaggccacttgcttctgattggtgttagtggagcaggaaaaactaccctgtctcgtttcgtcgcctggatgaacggtttgagtgtgtaccagattaaggtccataggaagtacacaggggaagactttgatgaagatctacggacagtgttgagacgttctggctgtaaaaatgaaaagatagcatttataatggatgaatctaatgtgttagattctggattcctggagcgaatgaatacccttctggccaatggagaggtgcctggtctctttgaaggagacgagtatgccaccttgatgacgcagtgcaaagagggggcacagaaggaaggcctgatgctggactcgcacgaggagctctacaagtggttcactagccaggttatccgcaacctccacgtcgtgttcaccatgaacccgtcctcggagggactcaaggaccgggcagctacatcaccagcacttttcaacaggtgtgtgttgaattggtttggagactggtccaccgaagcactgtatcaggttggcaaagaattcacaagtaagatggatctggagaagccaaattacatcgtgcctgattacatgccagttgtgtatgataagctgccgcagccaccatcccatcgggaagccattgtgaacagctgtgtgtttgttcatcagactcttcaccaggcgaatgctcggctagcaaagcgaggcggcagaacgatggccatcacccctcgccactacctggacttcatcaatcactatgccaacctgttccacgagaagcggagcgagctggaggagcagcagatgcacttgaacgtggggctcaggaagatcaaagagacagtcgaccaggtagaagaactgcgtcgtgacttgaggataaagagccaagagctggaggtgaagaatgcagcagccaatgacaagctgaaaaagatggtgaaagaccagcaggaggctgaaaagaagaaggttatgagccaagaaatccaggaacagctgcataagcagcaggaggtaattgcagacaaacagatgagtgtcaaagaagatcttgataaggtggaacctgccgtcattgaggcccagaatgctgtgaagtcgatcaagaagcagcacctggtggaggtgaggtccatggccaaccctcctgctgctgtgaagctggcgctggagtccatctgcctgctgctgggggaaagcaccacagactggaagcagatccgctccatcatcatgcgggagaacttcatccccaccatcgtcaacttctctgcagaggagatcagtgacgccataagggagaagatgaagaaaaattacatgtccaatccaagttacaattatgaaattgtgaatcgggcttccctggcttgcggccctatggtgaaatgggcaattgcacagcttaactatgcagacatgttaaagagagtggagcccctacgcaatgagctgcagaagctggaagatgacgccaaggacaaccagcagaaggccaacgaggtggagcagatgatccgagacctggaagccagcatcgcccgctacaaggaggaatacgccgtcctgatctcagaggcccaggccatcaaggcagacctggcagctgtcgaggcaaaagtaaaccggagcactgctcttctgaagagcttgtctgctgaacgtgaacgatgggaaaaaacaagtgaaactttcaaaaaccagatgtccaccattgctggggactgtctcttgtcagctgcgttcattgcctacgcgggttactttgaccagcagatgcgtcagaacttgttcactacctggtcccatcacctacagcaagccaacatccagttccgtacagatattgccaggacggaatacctttccaatgctgatgagcgtcttcgctggcaggccagctccttgcctgctgatgacctttgcacagaaaatgccatcatgctgaaacgattcaataggtatccgctgatcattgacccctctggacaggccacagaattcattatgaatgaatataaggatcgtaagatcacacggaccagcttcctggatgacgccttcagaaagaacttagagagtgcactgagattcggtaacccccttctggtccaggatgtggaaagctacgatccagttttgaacccggtgctgaaccgtgaagtgcggcgaacaggggggagagtgctgatcactctcggggaccaggacatagacctgtcgccatcgtttgtcatcttcctgtccacccgggatccaactgtcgagttcccaccagatctctgttcccgggttacttttgtaaacttcacagttacccgtagcagtttacaaagccagtgtctaaatgaagtacttaaagcagaaagacctgatgtggacgagaaacgatctgatcttcttaaacttcaaggggaatttcagctccgtttgcgtcagctggaaaaatctctactacaagctctgaacgaggtgaaagggcgcattttggatgacgacacgatcataaccactctggagaacctgaagagagaggctgcagaggtcaccaggaaagttgaggagacggacattgtcatgcaggaggtggagaccgtgtcccagcagtacctcccgctctccaccgcctgcagcagcatctacttcaccatggagtccctcaagcagatacacttcttgtaccagtactccctccagtttttcctggacatttatcacaacgtcctatacgagaacccgaacctgaagggtgtcaccgaccacacacagcgcctgtccattataacaaaggacctcttccaggtggcgtttaaccgagtggctcgaggcatgctgcatcaggaccacattacctttgccatgctgctggcaagaatcaaactgaagggcaccgtgggggagcccacctacgatgcagaattccagcacttcttgagaggaaatgagattgtcctgagtgctggctccacccccaggatccagggcctgactgtggagcaggcggaggcggtggtgaggctgagctgccttcccgcgtttaaggacttgattgcaaaggttcaggcagacgagcaatttggcatctggctggacagcagctccccggagcagactgtgccctacctctggagtgaagaaacacctgcaacacccattggccaggccatccaccgcctgctcctgatccaggctttccggcccgatcgcctgttggccatggcccacatgtttgtttcaacaaaccttggggagtctttcatgtccatcatggagcagccgctcgacctgacccacattgtgggcacagaggtgaagcccaacactcctgtcttaatgtgctctgtgcctggttatgatgccagtggacatgtcgaggaccttgcagccgagcagaacacgcagatcacttcaattgcaatcggctctgcagaaggctttaaccaagcagataaggcaataaacaccgctgtaaagtcgggcaggtgggtgatgctgaagaatgtgcatctggccccagggtggctgatgcagctggagaagaagttgcattccctgcagccgcatgcctgcttccgactcttcctcaccatggagatcaaccccaaggtgcctgtgaatctgctccgtgcgggccgcatctttgtgttcgagccaccgccaggggtgaaggccaacatgctgaggacgttcagcagcattcccgtctcacggatatgcaagtctcccaacgagcgtgcccgcttgtacttcctgctggcctggtttcatgcgatcatccaagaacgcttacgatacgcaccactggggtggtcaaagaagtatgaatttggagagtctgacctgcggtcagcttgcgatacggtggacacgtggctggatgacacggccaagggcaggcagaacatctcaccggataagatcccgtggtctgcactaaagaccttaatggcccagtccatttatggcgggcgcgtggacaacgagtttgaccagcgtctgctcaacaccttcctggagcgcctgttcacaaccaggagtttcgacagtgagtttaagctggcatgcaaggtcgacggacataaagacattcaaatgccagatggcatcaggcgagaggagtttgtgcagtgggtggagttgctccccgacacccagacgccctcctggctgggcctgcccaacaacgccgagagagtcctccttaccacacagggtgtggacatgatcagtaaaatgctgaagatgcagatgttggaggatgaggacgacctggcctacgcagagactgagaagaagacgaggacagactccacgtccgacgggcgccctgcctggatgcggacactgcacaccaccgcgtccaactggctgcacctcatcccccagacgctgagccacctcaagcgcaccgtggagaatatcaaggatcctttgttcaggttctttgagagagaagtgaagatgggcgcaaagctgcttcaggacgttcgccaggaccttgcagatgtcgtccaggtgtgcgaaggaaagaagaagcagaccaactacttgcgcacgctgatcaacgagctagtgaaagggatcttgcctcggagctggtcccactacacggtgcctgccggcatgaccgtcatccagtgggtgtccgacttcagcgagaggatcaaacagctgcagaacatctcactggcagctgcatctggtggcgccaaggagctaaagaacatccacgtgtgcctgggtggcctgttcgtgcctgaggcgtacatcactgccaccaggcagtatgtggcccaggccaacagctggtccctggaggagctctgcctggaagtcaacgtcaccacctcacagggcgccacccttgacgcttgcagcttcggagtcacgggtttgaaacttcaaggggccacgtgcaacaacaacaagctgtcactgtccaatgccatctcaaccgcccttcccctgacgcagctgcgctgggtcaagcagacaaacaccgagaagaaggccagtgtggtaaccttacctgtctacctgaacttcacccgtgcagacctcatcttcaccgtggacttcgaaattgctacaaaggaggatcctcgcagcttctacgagcggggtgtcgcagtcttgtgcacagagtaaacttttctagctgcccctttctgtaatagtgaaagttggtatttaacatttattcatttttaaaatatttggaaggtctgagcttgtgaaaagaaagtggttggtctgaggttggaggaagctgaatggaatctgacggttgggagtggtggaaattggaaggataccaggaggtatttgggaaggccaatggcgtggctcctttgaggaaataaaacactaagcatgagccgg

SEQ ID NO: 29181 - DNA, 6762 bp, Homo Sapiens
gaatggaaaatggcggcctagacgcggagtttcctgcccgacccgcggcggctccggcggcgccatgacgcgctgggtgcccaccaagcgcgaggagaagtacggcgtggctttttataactatgatgccagaggagcggatgaactttctttacagatcggagacactgtgcacatcttagaaacatatgaagggtggtaccgaggttacacgttacgaaaaaagtctaagaagggtatatttcctgcttcatatattcatcttaaagaagcgatagttgaaggaaaagggcaacatgaaacagtcatcccgggtgacctccccctcatccaggaagtcaccacgacactccgagagtggtccaccatctggaggcagctctacgtgcaagataacagggagatgtttcgaagtgtgcggcacatgatctatgaccttattgaatggcgatcacaaattctttctggaactctgcctcaggatgaactcaaagaactgaagaagaaggtcacagccaaaattgattatggaaacagaattctagatttggacctggtggttagagatgaagatgggaatattttggatccagaattaactagcacgattagtctcttcagagctcatgaaatagcttctaaacaagtggaggaaaggttacaagaggaaaaatctcaaaagcagaacatagatattaacagacaagccaagtttgctgcaaccccttctctggccttgtttgtgaacctcaaaaatgtggtttgtaaaataggagaagatgctgaagtcctcatgtctctatatgaccctgtggagtccaaattcatcagtgagaactacctggttcgctggtccagttcaggattacctaaagacatagacagattacataatttgcgagccgtgtttactgacctcggaagcaaagacctgaaaagggagaaaatcagttttgtctgtcagattgttcgcgtgggtcgcatggagctgagggacaacaacaccaggaaactgacctcggggttgcggcgaccttttggagtggctgtgatggatgtaacagatataataaatggaaaagtagatgatgaagataagcagcatttcattccctttcagccggtggcaggggagaatgacttccttcagactgttataaacaaagtcatcgctgccaaagaagtcaaccacaaggggcagggtttgtgggtaacattgaaattacttcctggagatatccatcagatccgaaaagagtttccgcatttagtggacaggaccacagctgtggctcgaaaaacagggtttccggagataatcatgcctggtgatgttcgaaatgatatctatgtaacattagttcaaggagattttgataaaggaagcaaaacaacagcgaagaacgtggaggtcacggtgtctgtgtacgatgaggatgggaaacgattagagcatgtgattttcccgggtgctggtgatgaagcgatttcagagtacaaatctgtgatttactaccaagtaaagcagccacgctggtttgagactgttaaggtggccattcccatcgaggacgttaaccgcagtcaccttcggtttaccttccgccacaggtcatcacaggactctaaggataaatctgagaaaatatttgcactagcatttgtcaagctgatgagatacgatggtaccaccctgcgagacggagagcacgatcttatcgtctataaggccgaagcgaagaagctggaagatgctgccacgtacttgagtctgccctccacgaaggcagagttggaagaaaagggccactcggccaccggcaagagcatgcagagccttgggagctgcaccattagcaaggactccttccagatctccacgctcgtgtgctccaccaaactgactcagaacgtggaccttctggggctcttgaaatggcgctccaacaccagcctgctgcagcagaacttgaggcagctgatgaaagtcgatggtggtgaagtagtgaagtttcttcaggacacgttggatgccctcttcaacatcatgatggagaactcagagagtgagacttttgacacgttagtctttgatgctctggtatttatcattggactgattgctgatagaaaatttcagcattttaatcctgttttggaaacttacattaagaaacactttagtgcaacgttagcctacacgaagttgacaaaagtgttgaagaactacgtggacggtgctgagaagccgggagtaaatgagcagctgtacaaagccatgaaagcgctagaatccatcttcaagttcatcgtgcgctccaggatcctgttcaatcaactgtatgaaaacaagggagaggctgacttcgtggaatctttgctgcagctcttcaggtccatcaatgacatgatgagcagcatgtcagaccagaccgtccgggtgaagggggcagcactgaaatacttaccaacgatcgtcaacgatgtgaaattggtgtttgatcccaaagagctcagcaaaatgtttactgaattcatcctcaatgttcccatgggcttgctgaccatccagaaactctactgcttgatcgaaatcgtccacagtgacctcttcacacagcatgactgcagagagatcctgcttcccatgatgaccgatcagctcaagtaccatctggagagacaggaggacctggaggcctgctgtcagctgctcagccacatcctggaggtgctgtacaggaaggacgtggggccaacccagaggcacgtccagattatcatggagaaacttctccggaccgtgaaccgaaccgtcatttccatgggacgagattctgaactcattggaaacttcgtggcttgcatgacagctattttacgacaaatggaagattaccattatgcccacttgatcaagacttttgggaaaatgaggactgatgtggtagatttcctaatggaaacattcatcatgtttaagaacctcattggaaagaacgtttaccccttcgactgggtgatcatgaacatggtgcaaaataaagtcttcctgcgagcaattaatcagtatgcagatatgctgaacaaaaaatttctggatcaagccaactttgagctacagctgtggaacaactactttcacctggctgttgctttccttactcaagagtccctgcaactggagaatttttcaagtgccaagagagccaaaatccttaacaagtacggagatatgaggagacagattggctttgaaatcagagacatgtggtacaaccttggtcaacacaagataaagttcattccagaaatggtgggcccaatattagaaatgacattaattcccgagacggagctgcgcaaagccaccatccccatcttctttgatatgatgcagtgtgaattccattcgacccgaagcttccaaatgtttgaaaatgagatcatcaccaagctggatcatgaagtcgaaggaggcagaggagacgaacagtacaaagtgttatttgataaaatccttctggaacactgcaggaagcacaaatacctcgccaaaacaggagaaacttttgtaaaactcgttgtgcgcttaatggaaaggcttttggattatagaaccatcatgcacgacgagaacaaagaaaaccgcatgagctgcaccgtcaatgtgctgaatttctacaaagaaattgaaagagaagaaatgtatataaggtatttgtacaagctctgtgacctgcacaaggagtgtgataactacaccgaagcggcttacaccttgcttctccatgcaaagcttcttaagtggtcggaggatgtgtgtgtggcccacctcacccagcgggacgggtaccaggccaccacgcagggacagctgaaggagcagctctaccaggaaatcatccactacttcgacaaaggcaagatgtgggaggaggccattgccttgggcaaggagctagccgagcagtatgagaacgaaatgtttgattatgagcaactcagcgaattgctgaaaaaacaggctcagttttatgaaaacatcgtcaaagtgatcaggcccaagcctgactattttgctgttggctactacggacaagggttccccacattcctgcggggaaaagttttcatttaccgagggaaagagtatgagcgccgggaagattttgaggctcggctcttaactcagtttccaaacgccgagaaaatgaagacaacatctccaccaggcgacgatattaaaaactctcctggccagtatattcagtgcttcacagtgaagcccaaactcgatctgcctcctaagtttcacaggccagtgtcagagcagattgtaagtttttacagggtgaacgaggtccagcgatttgaatattctcggccaatccggaagggagagaaaaacccagacaatgaatttgcgaatatgtggatcgagagaaccatatatacaactgcatataaattacctggaattttaaggtggtttgaggtcaagtctgttttcatggtggaaatcagccccctggagaatgccattgagaccatgcagctgacgaacgacaagatcaacagcatggtgcagcagcacctggatgaccccagcctgcccatcaacccgctctccatgctcctgaacggcatcgtggacccagctgtcatggggggcttcgcaaactacgaaaaggccttctttacagaccggtacctgcaggagcaccctgaggcccatgaaaagatcgagaagctcaaggacctgattgcttggcagattccttttctggccgaagggatcagaatccatggagacaaagtcacggaggcactgaggccgttccacgagaggatggaggcctgtttcaaacagctgaaggaaaaggtggagaaagagtacggcgtccgaatcatgccctcaagtctggatgatagaagaggcagccgcccccggtccatggtgcggtccttcacgatgccttcctcatcccgccctctgtctgtggcctctgtctcttccctctcatcggacagcaccccttccagaccaggctccgacgggtttgccctggagcctctcctgccaaagaaaatgcactccaggtcccaggacaagctggacaaggatgacctggagaaggagaagaaggacaagaagaaggaaaaaaggaacagcaaacatcaagagatatttgagaaagaatttaaacccaccgacatttccctgcagcagtctgaggctgtgatcctttcggaaacgataagtcccctgcggccccagagaccgaagagccaggtgatgaacgtcattggaagcgaaaggcgcttctcggtgtccccctcgtcaccgtcctcccagcaaacaccccctccagttacaccaagggccaagctcagcttcagcatgcagtcgagcttggagctgaacggcatgacgggggcggacgtggccgatgtcccaccccctctgcctctcaaaggcagcgtggcagattacgggaatttgatggaaaaccaggacttgctgggctcgccaacacctccacctccccctccacaccagaggcatctgccacctccactgcccagcaaaactccgcctcctccccctccaaagacaactcgcaagcagacatcggtggactccgggatcgtgcagtgacgtcgcaaggctctctggaaagagtgtgctgcccctccccatctccatgccctctccttctgtgtcccctgagtctgctgtttacctcattgggcctgtgatgttaacatttcgtgcgactgctttttcttcaaaggagttcagttctcaccatggagtgagtggcctttagcgtcatggagcaaggtgggtctgggaggtagatatgggtccgggatgtgctatcgtagttatcagagttgggggcctctgagtgtgtctggctctgagagagtctgagtcttgcccaaacattctttctttttgtgccaaatgacttgcatttgcaaagagctcaattgctctgagctcagccaagtaggagaggctaggccatcactcttaggaagctgtgtagtgatgatgtataagaatcctcctcactgtcatgggatgttgtatccagcccctccttgttccagccggtggtgtgacttcgttggttgaggtgtgtctccaacctacatcagaccatgaagttcaacccctccagggaagctcctgatttcccctgcataattgaaaataggatatttctcagctattgaacagttactaatttatggggtggaaacagcattaagaatactgaatcaaatggaaaaacaaatgaatacaggaagataagtgttcgttcttttctgaaaaagagtatgtgtaccacaagagctggttttaattgggtgaattgtttttgtcctcattctgtacagaaatttgtatatatgatggttcttagaacttgttttaatttttgtggtccttctgtttattataataggcgtccaccaatgattatccatatgtgttcttaatttttaactgctggaagtgttaaaacacacacacacacacacacacattttttttttgagaactccaaagtcctgaaaattttggtggacaatgatttttaaaaaactaactttgtataacctaatatttgtattctctcatctatatttttttattcactataatcatgatactcttctaatagacttaaaagttaatcattgacaacgaaaaataaaatgttattttaaaagaaaaaaaaaaaa

SEQ ID NO: 29182 - DNA, 5066 bp, Homo Sapiens
gcaccattcactccacctgatctcggggcgctgtgcgctgaggaaggcgcgggcgagccggagcagaagaaggagggagggagccagccgctgcagccaccaccgccaccatgtcctaccaaggcaagaagaacatcccgcggatcacgagtgaccgtctccttatcaagggaggcagaatcgtcaatgatgatcagtccttttatgctgatatttacatggaagatggcttaataaaacaaattggagacaatctgattgttcctggaggagtgaagaccattgaagccaatgggaagatggtgatccctggaggcatcgatgtccatactcacttccagatgccatataagggaatgaccacagtagatgacttcttccaagggacaaaggcggccttagcaggtggcaccaccatgatcattgaccatgtggtgcctgagcctgagtccagcctgactgaggcctatgagaaatggagagagtgggctgatgggaagagttgctgtgactatgccctgcatgtggacatcacccactggaatgacagcgtcaagcaggaagtgcagaacctcatcaaggacaaaggggttaactccttcatggtttatatggcttataaggatttgtatcaagtatctaacacagagctctatgagatcttcacctgcctgggagagctgggggccattgctcaagttcatgctgagaatggggatatcattgcccaggagcaaacccgcatgttggaaatggggataactggcccagaaggccatgtactgagcaggccagaagagctggaagctgaggctgtgttccgtgccatcaccattgccagccaaaccaattgccctctctacgtcacaaaggtcatgagcaagagtgcagctgacctcatctcacaagccaggaaaaaaggaaatgtagtctttggtgagcccatcactgccagcctcggcatagatggaacccattattggagcaagaactgggccaaggcggctgcatttgtgacatccccacccctgagccctgacccaactactccggactacatcaactccttgctggccagcggggatctgcagctatctgggagtgcccactgcaccttcagcactgcccagaaagcaattgggaaggacaacttcacagccattcctgagggcaccaatggtgtggaggagcggatgtctgtcatctgggacaaggctgtggccacagggaaaatggacgaaaaccagttcgtggctgtgacaagcacaaacgctgccaagatcttcaacctgtatccccgcaagggaagaatatctgtgggttctgacagcgacctcgtcatctgggatccagatgctgtgaagatcgtctctgccaagaaccaccagtctgcggcagagtacaacatctttgaagggatggagctgcgcggggctcctctggttgtcatctgccagggcaagatcatgctggaagatggcaacctgcacgtgacccagggggctggccgcttcataccctgcagcccgttctccgactatgtctacaagcgcattaaagcacggaggaagatggcagacctgcatgccgtcccaaggggcatgtacgatgggcctgtgtttgacctgaccaccacccccaaaggtggcacccccgcaggctctgctcggggctctcctactcggccgaacccacctgtgaggaatcttcatcagtcgggatttagcctgtcaggcacccaagtggatgagggggttcgctcagccagcaagcgcatcgtggcgcccccaggcggccgttctaatatcacatctctgagttaagcaagccttcctcaaagagaggggcagaagcaagaagagattgttttgaagccaaaatggtacaccgatatttaagaaggaaagcgaatccaaacggttgtgatctaaagaatcaataagcctcaagccttatgtttctccaatgttacgctcgcttgcctagctttacgaatattgctttgttttctgtttatgcatagccttgatttgtttgactcccctccccccatttacatgcatgcaatcagacaggccactaaggtaaaagagtctgctctatcatagtgttgagagcgtgtgtagtgctgcatcttatgacaaggggacagacaagctgggacgtcagggaaatgaacaaaagggacgcaggttatttggggtgagtgggtggtgggagcctggagcaaggtggagggtgcagaggggctggggtagggcatgtaggagggaggtgggtgggtcaggtgagtggaaggggtgttgtatattgtgttgatgacgtacgttatttccatggaagatagccgctgtggcagctgtcacatcaccacagctccctagggtctgccgagaaggcaggcagtctttgggttctgttctttgtcacgtcccctacaagtaaattttgtttctttgaacgtttattaaaatgccaagacccaaccatttcttccacctgcttgattgtgccagtgtttgctcaggcctctttcttagtgttgctttcaaatccttctctttcctgggttgggaaggccaggcagggacagagcaaatgacacttctcttcctcttgccctccctgcctctttggtgctcttaaaagccagcagctgagaacatagcacaggcccacgtggtgagggcacccacagcttaaagacgcttccttctaaacacggcgaggtcacctctcactcttctgtctttgcaaaccgagaagagtggcatgcttctggcatcccaagtcaggattttagctcagatgaggcagaatgaagggcctctcttacaggcagtttgtgtttgattctctcgatcctggcacatccatgataaataggagtttttgaaagttggttttattaggtgttccctaatttttaccgtaataggtcatctcagcttatatgaaagtcaagtggggaactgggaaagccaaagtcagtcttgagcagagggagcacattttgtggacctggttccacctttccattccaaaccacctgtttccccttccattagcagaaactctgggggaactttgtgtctcagtcctagaatctccccaagtgagtggaagtgacatgatgcagtcttcctcatggggcacctgaaagaaattagtgtgggtgcttcgatctaccttgtctgtcagagttgaatatctctttccctatcatgctgcttctgaaaattcagttttggagcaagtcctgtgagcaagataagaatctatagaaccaagatgctcattttcagaagaaatatgttcaacctgggatcagacttccatgctctggggaatccaagtggtagcacctgtaaccctgtgtactaagtgctttgaagagaagagcaggcctcagacaccttttaattgcttaggagaaaccattgtctctgactgcaggtttgaataagttgaagaccagagaaaagtacacactgggctacaaaggaatttggagatagccaaggaacaggatttcccctagcaagctaccttctgttcaaatcatgaaaaaagactatttccccttagaatagggaagcttgctattttaaagctcttgtagtgcttttcttttaagggagatgtagtaaaagggaaaatgtagctcttagtttacacttcaaagatgtgggggtctttcagagaactaagaataacagttttatgtgcagagagagtttgccagatctgaagcatatacctcattgactaggctgttactttgggataggttgcagtaccagccacagccagcagatagaggaaaagacacacataaactcgcttctgagcgtccacttctgcactctctgctctgctgttactcagcccctgagtctgactcatctctgcacaacctctctgtgccatgaagataagtcttccatggccaaatcggtcatccgcactgcccttgggacttccgaagtgaaccattccaccagaacctttgattctgcacaagatttccttgctctgggaacaacccccaaatgcccttgggaggaacaacatgagctcaggaagcctctctttcttcacttaccattactaactctccaagcatagaaatccctgggaattgcgagaataactcccactattttaaaatttatattcagatttgtttcgtttcataagacacatcaaacaggcctatacaaaaggtttaggaaaagaaaacaatggtgagtcccggccctcttcgaattcactggcacctcatgcaagtgtaggaaggcacgctggatcgtctatctgattccaaagctgtcctttgccatctcatcccttggcctgccccccaaccctgaggatgcccctgccatccccccaacctcctcatattgcctctgaacccagatggcaatccatcccggttctctctgagggccacgggcttgggtagtggaaagggtgtttgggaaattgttaaatcagttacccgtagtagagctatttcttgtacttctaagttttctagaagtggaaggattgtagtcatcctgaaaatgggtttacttcaaaatccctcagccttgttcttcacgactgtctatactgagagtgtcatgtttccacaaagggctgacacctgagcctggattttcactcatccctgagaagccctttccagtagggtgggcaattcccaacttccttgccacaagcttcccaggctttctcccctggaaaactccagcttgagtcccagatacactcatgggctgccctgggcagccagcattcattgtaagttccctctttgaaaactggtgtgtgggtgttcagttctgtgtctggtgggtatggacagacagtaatctcctgtgatctgtgctagctgtgaggcagctctggaacgtgaagagctgtttggtttgaaccgtgaacaaaactgtgttttgagtttagctgacattaaagaaaaaagttcatcacgtgactgttaatgtaaacctggttattaaaataactatgaaattaccaaaaaaaaaaaaaaaaaa

SEQ ID NO: 29183 - DNA, 6166 bp, Homo Sapiens
ttgagcacaaggggaagaatgaacacagctttttattgaagttaaaggttactttggagtttgtttggaaatgtgtaaggtcaaatactatagttttcagcatatgtagtacttcagaggaagaattaaggggcatgttggtgcatttaactacaaaaccaggtggcaggttgctgctctctccttcagaaccccgctctgaggaaagctaaggaagagaacaggacgtctgagtgtgtgactgagaatgattgaagatagtgggaaaagaggaaataccatggcagaaagaagacagctgtttgcagagatgagggctcaagatctggatcgcatccgactctccacctacagaacagcatgcaagcttaggtttgttcagaagaaatgcaatttgcacctggtggacatatggaatgtcatagaagcattgcgggaaaatgctctgaacaacctggacccaaacactgaactcaacgtgtcccgcttagaggctgtgctctccactattttttaccagctcaacaaacggatgccaaccactcaccaaatccatgtggagcagtccatcagcctcctccttaacttcctgcttgcagcgtttgatccggaaggccatggtaaaatttcagtatttgctgtcaaaatggctttagccacattgtgtggagggaagatcatggacaaattaagatatattttctcaatgatttctgactccagtggggtgatggtttatggacgatatgaccaattccttcgggaagttctcaaactacccacggcagtttttgaaggtccttcatttggttacacagaacagtcagccagatcctgtttctcccaacagaaaaaagtcacgttaaatggtttcttggacacgcttatgtcagatcctcccccgcagtgtctggtctggttgcctcttctgcatcgactagcaaatgtggaaaatgtcttccatccggttgagtgttcctactgccacagtgagagtatgatgggatttcgctaccgatgccaacagtgtcacaattaccagctctgtcaggactgcttctggaggggacatgccggtggttctcatagcaaccagcaccaaatgaaagagtacacgtcatggaaatcacctgctaagaagctgactaatgcattaagcaagtccctgagctgtgcttccagccgtgaacctttgcaccccatgttcccagatcagcctgagaagccactcaacttggctcacatcgttgatacttggcctcccagacctgtaaccagcatgaacgacaccctgttctcccactctgttccctcctcaggaagtccttttattaccaggagctctcctcccaaggacagtgaagtagagcagaacaaactgctggctagggctgctccagcttttctgaagggcaaagggatacagtacagcctgaatgtggcagacaggctagctgatgaacatgttctcatcgggttgtatgtcaacatgctccggaacaacccctcatgcatgcttgagagttcaaaccggcttgatgaagaacacaggctaattgccaggtatgcggcaaggctggcagcagagtcctcttcgtctcagccacctcagcagagaagtgctcctgacatctctttcaccatcgatgcgaataagcagcaaaggcagctgattgctgagctagaaaacaagaacagagaaatcttacaggagatccagagacttcggctagagcatgaacaagcttctcagcccacgccagagaaggcacagcaaaaccccaccctgctggcagaactccggctcctcagacagcgcaaagatgagctggaacagagaatgtctgctctccaggagagccggagagagctaatggtccagttggagggtctcatgaagctactaaagactcagggggcaggctctccccgctcctcccccagccacaccatcagcaggccaattcccatgcccatccggtcagcgtcagcctgctccaccccgacgcacacgccgcaggactccctcacaggagtagggggagatgtacaagaggcatttgcacaaagttcaagaagaaacttaaggaatgacttgctagtggctgcagattccatcactaacactatgtcctctcttgtgaaagagctgaattctgaggttgggagtgaaacagagagtaatgtggattctgaatttgcacggactcagtttgaggatcttgttccctcaccaacctctgaaaaggcttttctagcgcaaatccatgcccgaaaacctgggtacattcacagtggagctaccacaagtaccatgcgtggcgacatggttacggaggatgcagatccctatgtgcagcctgaagatgaaaactatgaaaatgactctgtccggcagctggagaatgagctccagatggaggaatacctgaaacagaagctgcaagatgaagcttatcaggtcagcttgcaaggttgaatgcaatatccttttatcacactcctctcaagcaagctatagtcagacagatgatgaaagtaacatgaaaactggtgatgatggagagccctgtggccacacagaggaggaagacagcagcctggcagcagcctcaccgaagagaggaaccaccacacccagcagctcctgacagacccccacccctaaagatgtgtcctgatgactatagtgcagctaactttttgttctcagatttgtagtgcataggtgtgtgtttcaagaaggaaaaaaaaagacttctgttcaaagttaacttatcagctacatcctctgtaacgtggttcatccctggttaaaaagcaaacaaacacaggctgaaaacccatgctgctgttatacacaatggcagtattaacaagcattttaaacctttgcacatgatattgaacctgttcagtttacaatgacaatattaatactgtttatagctagaagtttgatttctgaattctttgagattttagcaaaacagtttattatacactgtacatttttttcacagcaattggaaaaaaacaaccacttgcaatcattcaataaccctgaagaatttggttcctgagtgtacaaactcagagcccggaagccaagaagggtccttggcctgcacggtctgtagttgactccaagtctctgtgagcagtgacttgaaccaaacacaccaggaataatccattctttggggcctctttccaactcgaggttgttttctttcaagatactctaatcagccatagaatttagtgtaaatatttttttttccaaatagatatcatattcaaaaaaggcagcattcaaattatatagaatctagtttttaaaatcagcacagatcttcttaaaaactgtgaactatgttttgaaatactcgttactaaagctgtttataaaccacaggtgccataagatccccaaacggactaaagttatctctgctcttccatggtcttgttcctctcgttttggctttaggaagcatgtctttaacagcaccgctcgttcacaagttcccccatcaagttgtttggaggccttcagctttaaatgtacaggcttaaagtgcgcttgcaaacgtttgctctcctttttttctgaatgttgattgccttagctggccacctggtgttctgcatgtagccttctgtggtcatgtgaaaggagacaggctcttctaagttgagttgggatttttgcactcagtgaaaagctgaagtgcaaaagagctatcaaagacaagaggataaaagactgggatagtcttttccaaggaccctctttagagggccctaaagacctcctttgggaattctggggaaaaagaaaaagtaatcttctacttgcttcaagatttgatttttttaaaaaagcctgcgacctattcaatacattatgcttaaattagcagtttctctggaattcctgtctctcctttaaaagaaaggagagaacattttagaacaatagttctcaaagtgtgttccccggacaagcagcatctgcaacacttaggaaggtcttcgaaatactaatttgtaagccccacctcaggcctactgaatcagaagctctgggggttgggtccagaagtctgttttagtcaaccctctaggtgattctgatgctcgctaaaggttgagaactactgctttagaatgaagtcgtataataaagtctctgaaaaggccttattcagaataagcaagaaaggttctgtgattcacttttgcttctggggctggcaaaaaccttctctgaacccacacaccaagttcgtagttggtaggtgcccagccaagtcctgacatcttcatgccccctctgcagagggcggctgtacgatgttcacatgtctgcgtttggtcagacatcatctccttggctgccctttgaaaccaaatcacttgccttggggataaagtgctcaattggcattagtgagaagcccatcctatcccttgacatacttaatcatatatctctccagagaactcacctgacaaatgtctctgagcacaggctgacaccaaagtggcacaactgcacagttctcagatttctttgcacagattgatttttattgcgggttttgttggggtgtcttaatgttcatctcttttccactgcccatcctctgtgaacccatacctctctagatggagcaggtggccactggtgcctcatactcagtattgaaaaccactacatcccagctacctataatgctgtcagctcaaaatcatagccaggtagttcttgaactcagaacttaaatcctgcacgtggcactccaccactgactggaccgagctggcatatgttgtttctttgtgtttctacatcaaaatgttcgtctaagatttgaactgttctgctgataaccttccccgttgtcatagctatttcattgccaaccaactccatcacatggttgttgatatcgtcatataaagccattgcaaggactctggaaactgccgccaatgaccaatttctgactaaccagccaccttttctctctcttagctccacgtcagcactgagaccagactcgagcacccctgtcctgtaagcgagacaaaatggcgtgtgttattttggggttttgtgttttttggtgggtttctttccttggctctccagatttacttttggggcctgttctaagtgcaaacccagcaagtttcacttgtcctgtccattagatacaactacatcttgcgggggttgtttctttcttgttccacaatgaattgcacatccatctccatcagagctgatagcctgttaataagcactggtctaacacagccaaccctcctccacagcgccatattaatggaggaggggaggaaggtgaaatctactgcatgggattcaggaaacagttgtggttggtcaggacggaagttggggtaagtttggttggtcagagggagttgtgctggagattgtgaaaaatgggttcttgaatgatctactataaggcagggaaggttcatttgtaagtagtaatgtgaactgaattgcattaagagtgtgtggcctttgttgtgatatactatgtattttcttatatgcatgagccaaactgttgcatcataatttagcactgatgtctgcttttattttgatcatctttgtccacccttattagttcttggctgttaaccgtagatagatcttgtaaatccagcaacctttggttgctgcattccccttggttcgattccacgcaaggagccacaagtgagaactccactgtccttagaagaaagggcatttttacttttgaaccaaaaagagaaaaaaaaatcagaagtgttgcatcttgaggcgaattaactgtaagacatttttaattatgactactgcaatttgacaccatttgaaataatcaattcagagacactaaagatttcacaatattcattggtattgtaaaaaaaaaatactattgtatggatttttgtattgctgttaagtattgttttgtgtgtgtgtgtgtgtgtgtgtgttggaacctcctggggacatgttatattttgaagtgattaaactatttaattgtgtgtctatattttggagtggaataatttcttcattaaaaaatgtttttaaaaacactaaaaaaaaaaaaaaaaaaaa

SEQ ID NO: 29184 - DNA, 10531 bp, Homo Sapiens; identical to SEQ ID NO: 23388

SEQ ID NO: 29185 - DNA, 6075 bp, Homo Sapiens
ggtcgtgcgcgctgaggaggagccgctgccgccgtcgccgtcgccgccaccgccgccaccgctaccgaggccgagcggagccgttagcgccgcgccgccgccgcctcccgcccgccccggagcagccccgggcccgcccgcccgcatccagatttttgaaaaatacaatgtctaatggttatgaagaccacatggccgaagactgcaggggtgacatcgggagaacgaatttgatcgtcaactacctccctcagaacatgacccaggatgagttacgaagcctgttcagcagcattggtgaagttgaatctgcaaaacttattcgggataaagtagcaggacacagcttgggctatggctttgtgaactacgtgaccgcgaaggatgcagagagagcgatcaacacgctgaacggcttgaggctccagtcaaaaaccattaaggtgtcgtatgctcgcccgagctcagaggtgatcaaagacgccaacttgtacatcagcgggctcccgcggaccatgacccagaaggacgtagaagacatgttctctcggtttgggcggatcatcaactcgcgggtcctcgtggatcagactacaggtttgtccagaggggttgcgtttatccggtttgacaaacggtcggaggcagaagaggcaattaccagtttcaatggtcataaacccccaggttcctctgagcccatcacagtgaagtttgcagccaaccccaaccagaacaaaaacgtggcactcctctcgcagctgtaccactcgccagcgcgacggttcggaggccccgttcaccaccaggcgcagagattcaggttctcccccatgggcgtcgatcacatgagcgggctctctggcgtcaacgtgccaggaaacgcctcctccggctggtgcattttcatctacaacctggggcaggatgccgacgaggggatcctctggcagatgtttgggccgtttggtgccgtcaccaatgtgaaagtgatccgcgacttcaacaccaacaagtgcaaagggtttggctttgtgaccatgacaaactatgaagaagccgcgatggccatagccagcctgaacggctaccgcctgggggacaaaatcttacaggtttccttcaaaaccaacaagtcccacaaataactcgctcatgcttttttttgtacggaatagataattaagagtgaaggagttgaaacttttcttgttagtgtacaactcattttgcgccaattttcacaagtgtttgtctttgtctgaatgagaagtgagaaggtttttatactctgggatgcaaccgacatgttcaaatgtttgaaatcccacaatgttagaccaatcttaagtttcgtaagttatttcctttaagatatatattaaacagaaatctaagtagaactgcattgactaaccagtccctctggatggtggtgaacctgaagcatgctttaacctctaagactgtctaacacgcgtttcattcaatgtctccacagactgggtagcaaaaaaatcaccttttagttttagtttttaatctaaagatgttagacagatgctgagtgtgcgttttctcaaccgcttcaacattgtaagcgatgtatgctttggttgacaggaagttccttttccaggcaggtcccgttgccacctcctgctcactcagtcccgggctctgccgagtggtcctgggaatggcggcgggcccgtccagcgtgggccaccactggggccgggggccacgggctgcatgctgggcgggccctccagagaaggacacaaacgtgtttcgtaagcccaggcaccaatgggaatggaccaaagagtttcagggaaactccagtatattccagagtcagatctaagctccaggcacgcctgaagatgtgttgctactctgacatcccgagtttctgtccacacattgcatgcacagcgccccacacattggatactgttgttcacgataatttctcccgttttccagagcatttaacatagcttggaggcgtaaaatggctctgtattttaataacacagaaacatttgagcattgtatttctcgcatcccttctcgtgagcgcttagacctttttctattttagtcggattttgttttggaattttgcttttgtatgaacactcagcagaaaagtacttacttcttgccagttatctattaaccaaaacctttgatttgtagttttaaagattaaccctcaaagttctcttcataactgccttgacattttgggttgttctgttctgttaattttcttttgcttttttgtgttttttgtttgtttttacttttgcatttaagaccattaaatttgattttgttttgctcgaattttgttttgttttttattttaccttttctttctttttggctagggaaggtgcaggtggcccagcattcagggaggagtcgtaagatcttaagaaaccaatccttgcctcaagcaaaagcatttctgaatctgtgacgcaagaatgtgcagttacaggctggtggcttttaaaccaggagcccggaggaagggtgaaagagaaagcctgtgaaataggcagggccagatcacccaaaactcctcaggactgggatctggcgtttataaataactagtttacagagagaatcacaaacaggataacttagtaccagcagtttttaaccttgacgtgagactaaaacgtgaccgtaggctgttttttagttattgctctcatgagatgatggctgtatttatctgtttatttatacctatttatgtatttatttattgaagtgtgaaattgagcaataggcaggcaccaccgtccccagagcaggtcagcgtctcgagaggcccctggacaattgaggatgcccatcccctcccctttccctgatcttttactgaggggctgtgtgcgcgatccttgcaaattgatgatgttgccatccgtacccaggctgtgtctcataaaagtcggcctggtgccagagaggacctcctttctcccacagaatcccagatcctcaggaaaagccaaaaccgaggcccattgcccggattcgacacaaaagagggtccctgctctgttgcccgagagcagtctgcatcctgggaccagaatgctttcctggaaaaagaagcctttcaggtttccctgggccagcatcttctgatggaaggtgggagccaacacccttctgatggaaggtgggagccaacacccttctgatggaaggtgggagccaacacccttctgatggaaggtgggagccaacacccttctgatggaaggtgggagccaacacccttctgatggaaggcgggattcccgcttctgaaactccccctggagtctcactcccacacatgcccatagctagcattcaacagagaactctgtcttaagcttcaactgtgaaaatgatgacgggcttgtagcacctcagcttctttcctcgcccccttttatctgaatcctatcaattattctgatgctgggacaggtgagaagaaactgtgaagtatatgagcctttgaaagttccctgaagtttctcagttcaggaacattctcattgtatgtggtctccgctgtttgaacagccttctagctaaaaaattccaaagcctttatttgggagtcttagcttgcaagcttgtggaaggatttagcttaacaactgtcactcctgaaaagcaatctctgttccatcaaggttctagttgctggccctgtgtcctcaaagttcattacatcttatcaaggcctgtttgcaaaggggagatcccttttcttaaaaaaggctcaacccaaaagaaaccatttcttaaaaaattttacatagatcagttgtatttctatttagcaaaaatgagtgctctgcttttatttgggaatttcgatgaaaaagcgttcagagtagataatgttcatttatcaaaaatctggtttgggaaataccaaagaggctttgattgaattcccttttgacccgtgtgtaacttcctctggtagttagaccccaggcagctccgaatttgtgaacctgcttcctgatgaattctcccttgttcccccttggctctgccattatttcgttttcagtgtaatttgccaagccgcagttttctgtgctggctgtgcctctagtcgcagctctgtgactgattccctcccgggtgctgagtcccctccccggccaccatcctgcgtgaatatcctgaaattcatgggcttcctcgggggcccgcccgcaggtggtgctgggtgggttccgccaccttctcctggaaggtgagccttttcctggccaagggcagctgccttaacctctgagagtctgcgcttggccttagtcctggagacccagcctccagggactgaaccgtgctgctgttgggagccaagaccggccctttggagccggcagcccaggggtccctgctggatcagagaaatagaagcacccgaagacggttagtggcaattccttgacccggtttgcttccaaatgaaggccatttgtccaccaggcattgaaaagacatgacttacccagtccggcatcggacttgaaaaatcgaaattgacatcactcagctgttacatttcacatccgattcagcccccttttatttccatgtgcttttcgcagccttcctgtgttggatgaaagagaataagaattcagctgacaggaggcctctatcctgtccctccaccccaccctccacctcaatcccctcccatcttccccagacctacctcacctactaggacctgaggcagctccttagcagagacccctggggtttagctgactctgggggtcaggggttcctgtccccaaacttcgcaagacagccctgaagtcacaagtgctttcttttaagtggcattggcaattggcgtgtaatgatggcagtagaatctgaatctcggatcccaggcagggttcacatttccaaacctttttgatttcccctgacctctaatggctggatcctatttttctacaacctttcagtgacatcgttcaggtttctttcttggccatttaaaaaaacaaattttttttttctcacttgtaagtcaccgccagtacctaagttaggctaacggagactttgacaggactggatttttcttccaccagaagagaagccttttccgttggtttggggccacctctttgaccatgaccatgtgatgttccgtttacagtgacttgctttgggggaggggaggctctcttaaccgattcccatgttgtacagtagatggttagaccttttgtatattagtgtgttttaagttattgatttgttttatataaaataatttatttttcaggtgccatttttcattttaactttgtttttacatgggtttgttttcaataaagtctgacactggtgtccaaaagtcaacaataaaatgaatcccattgtgttcttttgaagatgcctatgtaacttttaagctttttaaattattttcagaaaaaaaaaaagaaaagcccttatcagttttccatcagcccattgcctttttattttttttttttaatccttgtgaataaatgttctttagtgttttaggaggaaaaagcaaacctagattttgataacccagaagacttcagattaataaagaagctttgaaagaagaccatttttcaaaattttagtgaagtgtgaatattttttgtcaatggctttctcaaagagaatgaaacttttgcaccattttcagagtttttatagagatgccaaattgatatatttacatgtaatggaaacatgaaaaagttttattaaacaattgttcatagctgtgtagacattttaattcagtttccaaagctctcaaaaaatcgtatttttgaagtacggagtgatgcggtttggggcgtggcttacagttccaacgactcaattgtcccgatactcagttctttctacaggtatcaggttcgtgttaaacgctgtatgttaactatgactggaattctgtgatattttggtaataaatgaagtgggatcattgcgaaaaaaaaaaaaaaaaaa

SEQ ID NO: 29186 - DNA, 4793 bp, Homo Sapiens
gagctcctcaatcagagtagagaagttagaggggggcgggcgacttggttttgaagtcttagctgaacagtcacccctcctctccttggcaaaaaggattcctttagaacctccgaggctcctggatttctcccttcgcaaatggagccgcatactgcattcccccgctctttcggatcgctaagcatgtttcatgagggtcgctgtccccgggtggaatgcggccgtatgcacgcgcctccctgcacacgcacacacacgcacacttacaataagtgtctgcaggaggagtgtcctgcgcgccagctctgcgtttaagacaggaagctgccgggttaccgagtcaaatgggagtgacactattcctctccatcagcaaggaaagcggaccacaaaagtccctttgtatctcggcagctcatttaatattatttatgcattttgtgcaaggaattgtgggatttcgccccacggtaaacaatatggaaatcttaaaaatagcgatcttcctgtgcgtgtccacctacgcgccccggggtgacctggcggggctgtcgccgggtgactcacacccctgaaccgcgaagcgacagggaaagcgcgggcgagcgcaggagacgcggtcgggggtctctccgggttcctgggctcccgcacccggagcgggggacgcggccgctttaaggggaggaggggcggcgggctgctcctgtcacccagcggcggccggagcgtcacgtgggcgcgcggcgccgcggccattggcccgaggcacgtgtccaggagaccggcctgcgacgtcactcgagggggctctgttaaaaataagaacaaaaatccagagtgaaagtgtctcaggttgcgccgagtggcctggaaatttccgagcccgcgcggaggccgaggcggcgagggcggcggacggccggggagcgcgggcggcccagcccggcccagcccggcccggccgggccctggcctcgcgtctctcacccatgcgactcgggccgcggagctctgcggggctcggcgggggcgcggccgcacgccggtggggcgccccggcccgcagcggggcggcggccgcgaggagggggcctccatgtgcgtgcgggcggtggcgggcgcgctgaccgcgggcgcccggcaccctcgagggccggctagggcgtgcgggcggggacggccgggcggcggcggcggccggagccggcccgggcgggcgtgagcgccggggaacgcgctgcctgcatgcgcgcagctctcgccccgggcggcccaggcggcggcgccggagcccgaggcggccggacgcggagaggagcggggagcccgggaggcggcccgcgtccccgccggaccactgcgactgtctagaccccggctgcgcggcgaagtcgaggacttggctctgttgaatctctcatcgtctgggcgagcggggcggctcgtggtgtttctaacccagttcgtggattcaaaggtggctccgcgccgagcgcggccggcgacttgtaggacctcagccctggccgcggccgccgcgcacgccctcggaagactcggcggggtgggggcgcgggggtctccgtgtgcgccgcgggagggccgaaggctgatttggaagggcgtccccggagaaccagtgtgggatttactgtgaacagcatggaggagaatgaccccaagcctggcgaagcagcggcggcggtggagggacagcggcagccggaatccagccccggcggcggctcgggcggcggcggcggtagcagcccaggcgaagcggacaccgggcgccggcgggctctgatgctgcccgcggtcctgcaggcgcccggcaaccaccagcacccgcaccgcatcaccaacttcttcatcgacaacatcctgcggcccgagttcggccggcgaaaggacgcggggacctgctgtgcgggcgcgggaggaggaaggggcggcggagccggcggcgaaggcggcgcgagcggtgcggagggaggcggcggcgcgggcggctcggagcagctcttgggctcgggctcccgagagccccggcagaacccgccatgtgcgcccggcgcgggcgggccgctcccagccgccggcagcgactctccgggtgacggggaaggcggctccaagacgctctcgctgcacggtggcgccaagaaaggcggcgaccccggcggccccctggacgggtcgctcaaggcccgcggcttgggcggcggcgacctgtcggtgagctcggactcggacagctcgcaagccggcgccaacctgggcgcgcagcccatgctctggccggcgtgggtctactgtacgcgctactcggaccggccttcttcaggtcccaggtctcgaaaaccaaagaagaagaacccgaacaaagaggacaagcggccgcgcacggcctttaccgccgagcagctgcagaggctcaaggccgagttccagaccaacaggtacctgacggagcagcggcgccagagcctggcgcaggagctgagcctcaacgagtcacagatcaagatttggttccagaacaagcgcgccaagatcaagaaggccacgggcaacaagaacacgctggccgtgcacctcatggcacagggcttgtacaaccactccaccacagccaaggagggcaagtcggacagcgagtagggcggggggcatggaggccaggtctcagtccgcgctaaacaatgcaataatttaaaatcataaagggccagtgtataaagattataccagcattaatagtgaaaatattgtgtattagctaaggttctgaaatattctatgtatatatcatttacaggtggtataaaatccaaaatatctgactataaaatatttttttgagttttttgtgtttatgagattatgctaattttatgggtttttttcttttttgcgaagggggctgcttagggtttcacctttttttaatcccctaagctccattatatgacattggacacttttttattattccaaaagaagaaaaaattaaaacaacttgctgaagtccaaagattttttattgctgcatttcacacaactgtgaaccgaataaatagctcctatttggtctatgacttctgccactttgtttgtgttggcttggtgaggacagcaggaggggcccacacctcaagcctggaccagccacctcaaggccttggggagcttaggggacctggtgggagagaggggacttccagggtccttgggccagttctgggatttggccctgggaagcagcccagcgtaccccaggcctgctctgggaagtcggctccatgctcaccagcagccgcccaggcccgcagcctcacccggctccctctcctcaccctcctgcacctaactccctcctccttctcctttttcctcctcttcctccttcctccttcctcctgctcctcctttcttcttctttttcttctcctcctcctccttccttcctcctcctccttctctttcctcctcctcctcaccaagggcccaaccgtgtgcatacatcgtctgcgtctgtggtctgtgtcgctgtccccagtcccaccgcagtcctgccgcaggcctaaccctcctgccctgggcactgcctccatgcagaagcgcttcgaggttctggggctaaaggcctggggtgtgtggcctaaagcccaagagcggtggggcgaccctccttttggcttggccccaggaatttcctgtgactccaccagccatcatgggtgccagccagggtcccagaaatgaggccatggctcactgtttctgggctggcagaaggctctgtagagggagatggcatcatctatcttcctttcctttttcttttcttccctatttttttctttttttcctttatttttttcttttcttggagtggctgcttctgctatagagaacattcttccaagataaatatgtgtgttacacatatgtctgtatgcatgtgaacacacacacacacacacacacacacacaccaggcgcgcccgagtccacagttctgaaacatgtggctaccttgtctttcaaaagaactcagaatcctccaggatctagaagaaggaagaaagtgtgtaaataatcatttcttatcatcactttttgtcttttcttgttttttaaaatatacattttatttttgaaggtgtggtacagtgtaaattaaatatattcaatatatttcccaccaagtacctatatatgtatataaacaaacacattatctatatataacgccacactgtcttctgtttagtgtatggggaaagaccaatccaactgtccatctgtggctgggacagccagggggtgtgcccacggctgacccaggggtgtgcacacggctgagctgggagtcccgctggtctccctgaggactgagggtgaacttcgctctttgccttaaacctctttatttcattgcagtaatagttttacgttgtacataatagtgtaaacctttttaaaaaggaaagtataaaaacaaaagttgtaatttaaaagtctgaataaccatctgctgcttaggaaactcaatgaaatgacatgcctttttagcaggaagcaaagttggtttctgttttttgttttctttgttgttttagtttataaaacatgtgcattttacagttcagtatcaaatatttataatcttatgagaaatgaatgaatgtttctatttacaactgtgcttatcaaaattgtgaacacccccacccccgcatttttgtgtgttgaaattcttgaaggttacattaaataaa

SEQ ID NO: 29187 - DNA, 8765 bp, Homo Sapiens
ggacagcgccgaggaggaagaggttgatggcggcggcggagctccgagagacctcggctgggcaggggccggccgtggcgggccggggactgcgcctctagagccgcgagttctcgggaattcgccgcagcggacgcgctcggcgaatttgtgctcttgtgccctcctccgggcttgggcccaggcccggcccctcgcacttgcccttaccttttctatcgagtccgcatccctctccagccactgcgacccggcgaagagaaaaaggaacttcccccaccccctcgggtgccgtcggagccccccagcccacccctgggtgcggcgcggggaccccgggccgaagaagagatttcctgaggattctggttttcctcgcttgtatctccgaaagaattaaaaatggccgagaatgtggtggaaccggggccgccttcagccaagcggcctaaactctcatctccggccctctcggcgtccgccagcgatggcacagattttggctctctatttgacttggagcacgacttaccagatgaattaatcaactctacagaattgggactaaccaatggtggtgatattaatcagcttcagacaagtcttggcatggtacaagatgcagcttctaaacataaacagctgtcagaattgctgcgatctggtagttcccctaacctcaatatgggagttggtggcccaggtcaagtcatggccagccaggcccaacagagcagtcctggattaggtttgataaatagcatggtcaaaagcccaatgacacaggcaggcttgacttctcccaacatggggatgggcactagtggaccaaatcagggtcctacgcagtcaacaggtatgatgaacagtccagtaaatcagcctgccatgggaatgaacacagggatgaatgcgggcatgaatcctggaatgttggctgcaggcaatggacaagggataatgcctaatcaagtcatgaacggttcaattggagcaggccgagggcgacagaatatgcagtacccaaacccaggcatgggaagtgctggcaacttactgactgagcctcttcagcagggctctccccagatgggaggacaaacaggattgagaggcccccagcctcttaagatgggaatgatgaacaaccccaatccttatggttcaccatatactcagaatcctggacagcagattggagccagtggccttggtctccagattcagacaaaaactgtactatcaaataacttatctccatttgctatggacaaaaaggcagttcctggtggaggaatgcccaacatgggtcaacagccagccccgcaggtccagcagccaggcctggtgactccagttgcccaagggatgggttctggagcacatacagctgatccagagaagcgcaagctcatccagcagcagcttgttctccttttgcatgctcacaagtgccagcgccgggaacaggccaatggggaagtgaggcagtgcaaccttccccactgtcgcacaatgaagaatgtcctaaaccacatgacacactgccagtcaggcaagtcttgccaagtggcacactgtgcatcttctcgacaaatcatttcacactggaagaattgtacaagacatgattgtcctgtgtgtctccccctcaaaaatgctggtgataagagaaatcaacagccaattttgactggagcacccgttggacttggaaatcctagctctctaggggtgggtcaacagtctgcccccaacctaagcactgttagtcagattgatcccagctccatagaaagagcctatgcagctcttggactaccctatcaagtaaatcagatgccgacacaaccccaggtgcaagcaaagaaccagcagaatcagcagcctgggcagtctccccaaggcatgcggcccatgagcaacatgagtgctagtcctatgggagtaaatggaggtgtaggagttcaaacgccgagtcttctttctgactcaatgttgcattcagccataaattctcaaaacccaatgatgagtgaaaatgccagtgtgccctccctgggtcctatgccaacagcagctcaaccatccactactggaattcggaaacagtggcacgaagatattactcaggatcttcgaaatcatcttgttcacaaactcgtccaagccatatttcctacgccggatcctgctgctttaaaagacagacggatggaaaacctagttgcatatgctcggaaagttgaaggggacatgtatgaatctgcaaacaatcgagcggaatactaccaccttctagctgagaaaatctataagatccagaaagaactagaagaaaaacgaaggaccagactacagaagcagaacatgctaccaaatgctgcaggcatggttccagtttccatgaatccagggcctaacatgggacagccgcaaccaggaatgacttctaatggccctctacctgacccaagtatgatccgtggcagtgtgccaaaccagatgatgcctcgaataactccacaatctggtttgaatcaatttggccagatgagcatggcccagccccctattgtaccccggcaaacccctcctcttcagcaccatggacagttggctcaacctggagctctcaacccgcctatgggctatgggcctcgtatgcaacagccttccaaccagggccagttccttcctcagactcagttcccatcacagggaatgaatgtaacaaatatccctttggctccgtccagcggtcaagctccagtgtctcaagcacaaatgtctagttcttcctgcccggtgaactctcctataatgcctccagggtctcaggggagccacattcactgtccccagcttcctcaaccagctcttcatcagaattcaccctcgcctgtacctagtcgtacccccacccctcaccatactcccccaagcataggggctcagcagccaccagcaacaacaattccagcccctgttcctacacctcctgccatgccacctgggccacagtcccaggctctacatccccctccaaggcagacacctacaccaccaacaacacaacttccccaacaagtgcagccttcacttcctgctgcaccttctgctgaccagccccagcagcagcctcgctcacagcagagcacagcagcgtctgttcctaccccaacagcaccgctgcttcctccgcagcctgcaactccactttcccagccagctgtaagcattgaaggacaggtatcaaatcctccatctactagtagcacagaagtgaattctcaggccattgctgagaagcagccttcccaggaagtgaagatggaggccaaaatggaagtggatcaaccagaaccagcagatactcagccggaggatatttcagagtctaaagtggaagactgtaaaatggaatctaccgaaacagaagagagaagcactgagttaaaaactgaaataaaagaggaggaagaccagccaagtacttcagctacccagtcatctccggctccaggacagtcaaagaaaaagattttcaaaccagaagaactacgacaggcactgatgccaactttggaggcactttaccgtcaggatccagaatcccttccctttcgtcaacctgtggaccctcagcttttaggaatccctgattactttgatattgtgaagagccccatggatctttctaccattaagaggaagttagacactggacagtatcaggagccctggcagtatgtcgatgatatttggcttatgttcaataatgcctggttatataaccggaaaacatcacgggtatacaaatactgctccaagctctctgaggtctttgaacaagaaattgacccagtgatgcaaagccttggatactgttgtggcagaaagttggagttctctccacagacactgtgttgctacggcaaacagttgtgcacaatacctcgtgatgccacttattacagttaccagaacaggtatcatttctgtgagaagtgtttcaatgagatccaaggggagagcgtttctttgggggatgacccttcccagcctcaaactacaataaataaagaacaattttccaagagaaaaaatgacacactggatcctgaactgtttgttgaatgtacagagtgcggaagaaagatgcatcagatctgtgtccttcaccatgagatcatctggcctgctggattcgtctgtgatggctgtttaaagaaaagtgcacgaactaggaaagaaaataagttttctgctaaaaggttgccatctaccagacttggcacctttctagagaatcgtgtgaatgactttctgaggcgacagaatcaccctgagtcaggagaggtcactgttagagtagttcatgcttctgacaaaaccgtggaagtaaaaccaggcatgaaagcaaggtttgtggacagtggagagatggcagaatcctttccataccgaaccaaagccctctttgcctttgaagaaattgatggtgttgacctgtgcttctttggcatgcatgttcaagagtatggctctgactgccctccacccaaccagaggagagtatacatatcttacctcgatagtgttcatttcttccgtcctaaatgcttgaggactgcagtctatcatgaaatcctaattggatatttagaatatgtcaagaaattaggttacacaacagggcatatttgggcatgtccaccaagtgagggagatgattatatcttccattgccatcctcctgaccagaagatacccaagcccaagcgactgcaggaatggtacaaaaaaatgcttgacaaggctgtatcagagcgtattgtccatgactacaaggatatttttaaacaagctactgaagatagattaacaagtgcaaaggaattgccttatttcgagggtgatttctggcccaatgttctggaagaaagcattaaggaactggaacaggaggaagaagagagaaaacgagaggaaaacaccagcaatgaaagcacagatgtgaccaagggagacagcaaaaatgctaaaaagaagaataataagaaaaccagcaaaaataagagcagcctgagtaggggcaacaagaagaaacccgggatgcccaatgtatctaacgacctctcacagaaactatatgccaccatggagaagcataaagaggtcttctttgtgatccgcctcattgctggccctgctgccaactccctgcctcccattgttgatcctgatcctctcatcccctgcgatctgatggatggtcgggatgcgtttctcacgctggcaagggacaagcacctggagttctcttcactccgaagagcccagtggtccaccatgtgcatgctggtggagctgcacacgcagagccaggaccgctttgtctacacctgcaatgaatgcaagcaccatgtggagacacgctggcactgtactgtctgtgaggattatgacttgtgtatcacctgctataacactaaaaaccatgaccacaaaatggagaaactaggccttggcttagatgatgagagcaacaaccagcaggctgcagccacccagagcccaggcgattctcgccgcctgagtatccagcgctgcatccagtctctggtccatgcttgccagtgtcggaatgccaattgctcactgccatcctgccagaagatgaagcgggttgtgcagcataccaagggttgcaaacggaaaaccaatggcgggtgccccatctgcaagcagctcattgccctctgctgctaccatgccaagcactgccaggagaacaaatgcccggtgccgttctgcctaaacatcaagcagaagctccggcagcaacagctgcagcaccgactacagcaggcccaaatgcttcgcaggaggatggccagcatgcagcggactggtgtggttgggcagcaacagggcctcccttcccccactcctgccactccaacgacaccaactggccaacagccaaccaccccgcagacgccccagcccacttctcagcctcagcctacccctcccaatagcatgccaccctacttgcccaggactcaagctgctggccctgtgtcccagggtaaggcagcaggccaggtgacccctccaacccctcctcagactgctcagccaccccttccagggcccccacctgcagcagtggaaatggcaatgcagattcagagagcagcggagacgcagcgccagatggcccacgtgcaaatttttcaaaggccaatccaacaccagatgcccccgatgactcccatggcccccatgggtatgaacccacctcccatgaccagaggtcccagtgggcatttggagccagggatgggaccgacagggatgcagcaacagccaccctggagccaaggaggattgcctcagccccagcaactacagtctgggatgccaaggccagccatgatgtcagtggcccagcatggtcaacctttgaacatggctccacaaccaggattgggccaggtaggtatcagcccactcaaaccaggcactgtgtctcaacaagccttacaaaaccttttgcggactctcaggtctcccagctctcccctgcagcagcaacaggtgcttagtatccttcacgccaacccccagctgttggctgcattcatcaagcagcgggctgccaagtatgccaactctaatccacaacccatccctgggcagcctggcatgccccaggggcagccagggctacagccacctaccatgccaggtcagcagggggtccactccaatccagccatgcagaacatgaatccaatgcaggcgggcgttcagagggctggcctgccccagcagcaaccacagcagcaactccagccacccatgggagggatgagcccccaggctcagcagatgaacatgaaccacaacaccatgccttcacaattccgagacatcttgagacgacagcaaatgatgcaacagcagcagcaacagggagcagggccaggaataggccctggaatggccaaccataaccagttccagcaaccccaaggagttggctacccaccacagcagcagcagcggatgcagcatcacatgcaacagatgcaacaaggaaatatgggacagataggccagcttccccaggccttgggagcagaggcaggtgccagtctacaggcctatcagcagcgactccttcagcaacagatggggtcccctgttcagcccaaccccatgagcccccagcagcatatgctcccaaatcaggcccagtccccacacctacaaggccagcagatccctaattctctctccaatcaagtgcgctctccccagcctgtcccttctccacggccacagtcccagcccccccactccagtccttccccaaggatgcagcctcagccttctccacaccacgtttccccacagacaagttccccacatcctggactggtagctgcccaggccaaccccatggaacaagggcattttgccagcccggaccagaattcaatgctttctcagcttgctagcaatccaggcatggcaaacctccatggtgcaagcgccacggacctgggactcagcaccgataactcagacttgaattcaaacctctcacagagtacactagacatacactagagacaccttgtagtattttgggagcaaaaaaattattttctcttaacaagactttttgtactgaaaacaatttttttgaatctttcgtagcctaaaagacaattttccttggaacacataagaactgtgcagtagccgtttgtggtttaaagcaaacatgcaagatgaacctgagggatgatagaatacaaagaatatatttttgttatggctggttaccaccagcctttcttcccctttgtgtgtgtggttcaagtgtgcactgggaggaggctgaggcctgtgaagccaaacaatatgctcctgccttgcacctccaataggttttattattttttttaaattaatgaacatatgtaatattaatagttattatttactggtgcagatggttgacatttttccctattttcctcactttatggaagagttaaaacatttctaaaccagaggacaaaaggggttaatgttactttaaaattacattctatatatatataaatatatataaatatatattaaaataccagttttttttctctgggtgcaaagatgttcattcttttaaaaaatgtttaaaaaaaaaaaaaaactgcctttcttcccctcaagtcaacttttgtgctccagaaaattttctattctgtaagtctgagcgtaaaacttcaagtattaaaataatttgtacatgtagagagaaaaatgactttttcaaaaatatacaggggcagctgccaaattgatgtattatatattgtggtttctgtttcttgaaagaatttttttcgttatttttacatctaacaaagtaaaaaaattaaaaagagggtaagaaacgattccggtgggatgattttaacatgcaaaatgtccctgggggtttcttctttgcttgctttcttcctccttaccctaccccccactcacacacacacacacacacacacacacacacacacacacacactttctataaaacttgaaaatagcaaaaaccctcaactgttgtaaatcatgcaattaaagttgattacttataaatatgaactttggatcactgtatagactgttaaatttgatttcttattacctattgttaaataaactgtgtgagacag

SEQ ID NO: 29188 - DNA, 3620 bp, Homo Sapiens
ggctcggtcaccgcctcgctgtcgtcgcggcgcccccgccccgtcctctgtccgtaccgcccccggagccagggccgagtcctcgccatgccggcccggcggctgctgctgctgctgacgctgctgctgcccggcctcgggatttttggaagtaccagcacagtgacgcttcctgaaaccttgttgtttgtgtcaacgctggatggaagtttgcatgctgtcagcaagaggacaggctcaatcaaatggactttaaaagaagatccagtcctgcaggtcccaacacatgtggaagagcctgcctttctcccagatcctaatgatggcagcctgtatacgcttggaagcaagaataatgaaggcctgacgaaacttccttttaccatcccagaattggtgcaggcatccccatgccgaagttcagatggaatcctctacatgggtaaaaagcaggacatctggtatgttattgacctcctgaccggagagaagcagcagactttgtcatcggcctttgcagatagtctctgcccatcaacctctcttctgtatcttgggcgaacagaatacaccatcaccatgtacgacaccaaaacccgagagctccggtggaatgccacctactttgactatgcggcctcactgcctgaggacgacgtggactacaagatgtcccactttgtgtccaatggtgatgggctggtggtgactgtggacagtgaatctggggacgtcctgtggatccaaaactacgcctcccctgtggtggccttttatgtctggcagcgggagggtctgaggaaggtgatgcacatcaatgtcgctgtggagaccctgcgctatctgaccttcatgtctggggaggtggggcgcatcacaaagtggaagtacccgttccccaaggagacagaggccaagagcaagctgacgcccactctgtatgttgggaaatactctaccagcctctatgcctctccctcaatggtacacgagggggttgctgtcgtgccccgcggcagcacacttcctttgctggaagggccccagactgatggcgtcaccatcggggacaagggggagtgtgtgatcacgcccagcacggacgtcaagtttgatcccggactcaaaagcaagaacaagctcaactacttgaggaattactggcttctgataggacaccatgaaaccccactgtctgcgtctaccaagatgctggagagatttcccaacaatctacccaaacatcgggaaaatgtgattcctgctgattcagagaaaaagagctttgaggaagttatcaacctggttgaccagacttcagaaaacgcacctaccaccgtgtctcgggatgtggaggagaagcccgcccatgcccctgcccggcccgaggcccccgtggactccatgcttaaggacatggctaccatcatcctgagcaccttcctgctgattggctgggtggccttcatcatcacctatcccctgagcatgcatcagcagcagcagctccagcaccagcagttccagaaggaactggagaagatccagctcctgcagcagcagcagcagcagctgcccttccacccacctggagacacggctcaggacggcgagctcctggacacgtctggcccgtactcagagagctcgggcaccagcagccccagcacgtcccccagggcctccaaccactcgctctgctccggcagctctgcctccaaggctggcagcagcccctccctggaacaagacgatggagatgaggaaaccagcgtggtgatagttgggaaaatttccttctgtcccaaggatgtcctgggccatggagctgagggcacaattgtgtaccggggcatgtttgacaaccgcgacgtggccgtgaagaggatcctccccgagtgttttagcttcgcagaccgtgaggtccagctgttgcgagaatcggatgagcacccgaacgtgatccgctacttctgcacggagaaggaccggcaattccagtacattgccatcgagctgtgtgcagccaccctgcaagagtatgtggagcagaaggactttgcgcatctcggcctggagcccatcaccttgctgcagcagaccacctcgggcctggcccacctccactccctcaacatcgttcacagagacctaaagccacacaacatcctcatatccatgcccaatgcacacggcaagatcaaggccatgatctccgactttggcctctgcaagaagctggcagtgggcagacacagtttcagccgccgatctggggtgcctggcacagaaggctggatcgctccagagatgctgagcgaagactgtaaggagaaccctacctacacggtggacatcttttctgcaggctgcgtcttttactacgtaatctctgagggcagccacccttttggcaagtccctgcagcggcaggccaacatcctcctgggtgcctgcagccttgactgcttgcacccagagaagcacgaagacgtcattgcacgtgaattgatagagaagatgattgcgatggatcctcagaaacgcccctcagcgaagcacgtgctcaaacacccgttcttctggagcctagagaagcagctccagttcttccaggacgtgagcgacagaatagaaaaggaatccctggatggcccgatcgtgaagcagttagagagaggcgggagagccgtggtgaagatggactggcgggagaacatcactgaccccctccagacagacctgcgtaaattcaggacctataaaggtggttctgtcagagatctcctccgagccatgagaaataagaagcaccactaccgggagctgcctgcagaggtgcgggagacgctggggaccctccccgacgacttcgtgtgctacttcacgtctcgcttcccccacctcctcgcacacacctaccgggccatggagctgtgcagccacgagagactcttccagccctactacttccacgagcccccagagccccagcccccagtgactccagacgccctctgagcgagggcggcccctctgttctggtggccccagctgtgactgagggcctggtcaccacaattagagcttgatgcctcccggctttgcagggagaccaggcttcccaaaccaagtgccttgagctgcctgctctgcagcccacagaggacagtgctgaccccaggaagtgggagaagtggcccctcgtgacctacagggaactgggaagatgctggccccaaaagccttacggtcatgatgtctgcaaaggagggcctcagagacagcgcgagtagcacccccagccatctactggataaacttgcttcagactttttaaattcctgcttaatgtcagtctacaggcctttcaggaagggagaggagggaatcgtacattttgcttgcgtgctgggacagctaggctgagatgcaccaagtacagccttcactggagaccggaattgagaggtgggggatgctgaggagggggaggacggagttcagagggtgtcgtcctgcagtatgagatttctcattgatcacagatgtgcccagagtagcccaggtcactgttaactagtgtttctgcagaggcagcaggagccagcccggaattc

SEQ ID NO: 29189 - DNA, 8368 bp, Homo Sapiens
gcgatccgggcgccaccccgcggtcatcggtcaccggtcgctctcaggaacagcagcgcaacctctgctccctgcctcgcctcccgcgcgcctaggtgcctgcgactttaattaaagggccgtcccctcgccgaggctgcagcaccgcccccccggcttctcgcgcctcaaaatgagtagctcccactctcgggcgggccagagcgcagcaggcgcggctccgggcggcggcgtcgacacgcgggacgccgagatgccggccaccgagaaggacctggcggaggacgcgccgtggaagaagatccagcagaacactttcacgcgctggtgcaacgagcacctgaagtgcgtgagcaagcgcatcgccaacctgcagacggacctgagcgacgggctgcggcttatcgcgctgttggaggtgctcagccagaagaagatgcaccgcaagcacaaccagcggcccactttccgccaaatgcagcttgagaacgtgtcggtggcgctcgagttcctggaccgcgagagcatcaaactggtgtccatcgacagcaaggccatcgtggacgggaacctgaagctgatcctgggcctcatctggaccctgatcctgcactactccatctccatgcccatgtgggacgaggaggaggatgaggaggccaagaagcagacccccaagcagaggctcctgggctggatccagaacaagctgccgcagctgcccatcaccaacttcagccgggactggcagagcggccgggccctgggcgccctggtggacagctgtgccccgggcctgtgtcctgactgggactcttgggacgccagcaagcccgttaccaatgcgcgagaggccatgcagcaggcggatgactggctgggcatcccccaggtgatcacccccgaggagattgtggaccccaacgtggacgagcactctgtcatgacctacctgtcccagttccccaaggccaagctgaagccaggggctcccttgcgccccaaactgaacccgaagaaagcccgtgcctacgggccaggcatcgagcccacaggcaacatggtgaagaagcgggcagagttcactgtggagaccagaagtgctggccagggagaggtgctggtgtacgtggaggacccggccggacaccaggaggaggcaaaagtgaccgccaataacgacaagaaccgcaccttctccgtctggtacgtccccgaggtgacggggactcataaggttactgtgctctttgctggccagcacatcgccaagagccccttcgaggtgtacgtggataagtcacagggtgacgccagcaaagtgacagcccaaggtcccggcctggagcccagtggcaacatcgccaacaagaccacctactttgagatctttacggcaggagctggcacgggcgaggtcgaggttgtgatccaggaccccatgggacagaagggcacggtagagcctcagctggaggcccggggcgacagcacataccgctgcagctaccagcccaccatggagggcgtccacaccgtgcacgtcacgtttgccggcgtgcccatccctcgcagcccctacactgtcactgttggccaagcctgtaacccgagtgcctgccgggcggttggccggggcctccagcccaagggtgtgcgggtgaaggagacagctgacttcaaggtgtacacaaagggcgctggcagtggggagctgaaggtcaccgtgaagggccccaagggagaggagcgcgtgaagcagaaggacctgggggatggcgtgtatggcttcgagtattaccccatggtccctggaacctatatcgtcaccatcacgtggggtggtcagaacatcgggcgcagtcccttcgaagtgaaggtgggcaccgagtgtggcaatcagaaggtacgggcctggggccctgggctggagggcggcgtcgttggcaagtcagcagactttgtggtggaggctatcggggacgacgtgggcacgctgggcttctcggtggaagggccatcgcaggctaagatcgaatgtgacgacaagggcgacggctcctgtgatgtgcgctactggccgcaggaggctggcgagtatgccgttcacgtgctgtgcaacagcgaagacatccgcctcagccccttcatggctgacatccgtgacgcgccccaggacttccacccagacagggtgaaggcacgtgggcctggattggagaagacaggtgtggccgtcaacaagccagcagagttcacagtggatgccaagcacggtggcaaggccccacttcgggtccaagtccaggacaatgaaggctgccctgtggaggcgttggtcaaggacaacggcaatggcacttacagctgctcctacgtgcccaggaagccggtgaagcacacagccatggtgtcctggggaggcgtcagcatccccaacagccccttcagggtgaatgtgggagctggcagccaccccaacaaggtcaaagtatacggccccggagtagccaagacagggctcaaggcccacgagcccacctacttcactgtggactgcgccgaggctggccagggggacgtcagcatcggcatcaagtgtgcccctggagtggtaggccccgccgaagctgacatcgacttcgacatcatccgcaatgacaatgacaccttcacggtcaagtacacgccccggggggctggcagctacaccattatggtcctctttgctgaccaggccacgcccaccagccccatccgagtcaaggtggagccctctcatgacgccagtaaggtgaaggccgagggccctggcctcagtcgcactggtgtcgagcttggcaagcccacccacttcacagtaaatgccaaagctgctggcaaaggcaagctggacgtccagttctcaggactcaccaagggggatgcagtgcgagatgtggacatcatcgaccaccatgacaacacctacacagtcaagtacacgcctgtccagcagggtccagtaggcgtcaatgtcacttatggaggggatcccatccctaagagccctttctcagtggcagtatctccaagcctggacctcagcaagatcaaggtgtctggcctgggagagaaggtggacgttggcaaagaccaggagttcacagtcaaatcaaagggtgctggtggtcaaggcaaagtggcatccaagattgtgggcccctcgggtgcagcggtgccctgcaaggtggagccaggcctgggggctgacaacagtgtggtgcgcttcctgccccgtgaggaagggccctatgaggtggaggtgacctatgacggcgtgcccgtgcctggcagcccctttcctctggaagctgtggcccccaccaagcctagcaaggtgaaggcgtttgggccggggctgcagggaggcagtgcgggctcccccgcccgcttcaccatcgacaccaagggcgccggcacaggtggcctgggcctgacggtggagggcccctgtgaggcgcagctcgagtgcttggacaatggggatggcacatgttccgtgtcctacgtgcccaccgagcccggggactacaacatcaacatcctcttcgctgacacccacatccctggctccccattcaaggcccacgtggttccctgctttgacgcatccaaagtcaagtgctcaggccccgggctggagcgggccaccgctggggaggtgggccaattccaagtggactgctcgagcgcgggcagcgcggagctgaccattgagatctgctcggaggcggggcttccggccgaggtgtacatccaggaccacggtgatggcacgcacaccattacctacattcccctctgccccggggcctacaccgtcaccatcaagtacggcggccagcccgtgcccaacttccccagcaagctgcaggtggaacctgcggtggacacttccggtgtccagtgctatgggcctggtattgagggccagggtgtcttccgtgaggccaccactgagttcagtgtggacgcccgggctctgacacagaccggagggccgcacgtcaaggcccgtgtggccaacccctcaggcaacctgacggagacctacgttcaggaccgtggcgatggcatgtacaaagtggagtacacgccttacgaggagggactgcactccgtggacgtgacctatgacggcagtcccgtgcccagcagccccttccaggtgcccgtgaccgagggctgcgacccctcccgggtgcgtgtccacgggccaggcatccaaagtggcaccaccaacaagcccaacaagttcactgtggagaccaggggagctggcacgggcggcctgggcctggctgtagagggcccctccgaggccaagatgtcctgcatggataacaaggacggcagctgctcggtcgagtacatcccttatgaggctggcacctacagcctcaacgtcacctatggtggccatcaagtgccaggcagtcctttcaaggtccctgtgcatgatgtgacagatgcgtccaaggtcaagtgctctgggcccggcctgagcccaggcatggttcgtgccaacctccctcagtccttccaggtggacacaagcaaggctggtgtggccccattgcaggtcaaagtgcaagggcccaaaggcctggtggagccagtggacgtggtagacaacgctgatggcacccagaccgtcaattatgtgcccagccgagaagggccctacagcatctcagtactgtatggagatgaagaggtaccccggagccccttcaaggtcaaggtgctgcctactcatgatgccagcaaggtgaaggccagtggccccgggctcaacaccactggcgtgcctgccagcctgcccgtggagttcaccatcgatgcaaaggacgccggggagggcctgctggctgtccagatcacggatcccgaaggcaagccgaagaagacacacatccaagacaaccatgacggcacgtatacagtggcctacgtgccagacgtgacaggtcgctacaccatcctcatcaagtacggtggtgacgagatccccttctccccgtaccgcgtgcgtgccgtgcccaccggggacgccagcaagtgcactgtcacagtgtcaatcggaggtcacgggctaggtgctggcatcggccccaccattcagattggggaggagacggtgatcactgtggacactaaggcggcaggcaaaggcaaagtgacgtgcaccgtgtgcacgcctgatggctcagaggtggatgtggacgtggtggagaatgaggacggcactttcgacatcttctacacggccccccagccgggcaaatacgtcatctgtgtgcgctttggtggcgagcacgtgcccaacagccccttccaagtgacggctctggctggggaccagccctcggtgcagccccctctacggtctcagcagctggccccacagtacacctacgcccagggcggccagcagacttgggccccggagaggcccctggtgggtgtcaatgggctggatgtgaccagcctgaggccctttgaccttgtcatccccttcaccatcaagaagggcgagatcacaggggaggttcggatgccctcaggcaaggtggcgcagcccaccatcactgacaacaaagacggcaccgtgaccgtgcggtatgcacccagcgaggctggcctgcacgagatggacatccgctatgacaacatgcacatcccaggaagccccttgcagttctatgtggattacgtcaactgtggccatgtcactgcctatgggcctggcctcacccatggagtagtgaacaagcctgccaccttcaccgtcaacaccaaggatgcaggagaggggggcctgtctctggccattgagggcccgtccaaagcagaaatcagctgcactgacaaccaggatgggacatgcagcgtgtcctacctgcctgtgctgccgggggactacagcattctagtcaagtacaatgaacagcacgtcccaggcagccccttcactgctcgggtcacaggtgacgactccatgcgtatgtcccacctaaaggtcggctctgctgccgacatccccatcaacatctcagagacggatctcagcctgctgacggccactgtggtcccgccctcgggccgggaggagccctgtttgctgaagcggctgcgtaatggccacgtggggatttcattcgtgcccaaggagacgggggagcacctggtgcatgtgaagaaaaatggccagcacgtggccagcagccccatcccggtggtgatcagccagtcggaaattggggatgccagtcgtgttcgggtctctggtcagggccttcacgaaggccacacctttgagcctgcagagtttatcattgatacccgcgatgcaggctatggtgggctcagcctgtccattgagggccccagcaaggtggacatcaacacagaggacctggaggacgggacgtgcagggtcacctactgccccacagagccaggcaactacatcatcaacatcaagtttgccgaccagcacgtgcctggcagccccttctctgtgaaggtgacaggcgagggccgggtgaaagagagcatcacccgcaggcgtcgggctccttcagtggccaacgttggtagtcattgtgacctcagcctgaaaatccctgaaattagcatccaggatatgacagcccaggtgaccagcccatcgggcaagacccatgaggccgagatcgtggaaggggagaaccacacctactgcatccgctttgttcccgctgagatgggcacacacacagtcagcgtcaagtacaagggccagcacgtgcctgggagccccttccagttcaccgtggggcccctaggggaagggggagcccacaaggtccgagctgggggccctggcctggagagagctgaagctggagtgccagccgaattcagtatctggacccgggaagctggtgctggaggcctggccattgctgtcgagggccccagcaaggctgagatctcttttgaggaccgcaaggacggctcctgtggtgtggcttatgtggtccaggagccaggtgactacgaagtctcagtcaagttcaacgaggaacacattcccgacagccccttcgtggtgcctgtggcttctccgtctggcgacgcccgccgcctcactgtttctagccttcaggagtcagggctaaaggtcaaccagccagcctcttttgcagtcagcctgaacggggccaagggggcgatcgatgccaaggtgcacagcccctcaggagccctggaggagtgctatgtcacagaaattgaccaagataagtatgctgtgcgcttcatccctcgggagaatggcgtttacctgattgacgtcaagttcaacggtacccacatccctggaagccccttcaagatccgagttggggagcctgggcatggaggggacccaggcttggtgtctgcttacggagcaggtctggaaggcggtgtcacagggaacccagctgagttcgtcgtgaacacgagcaatgcgggagctggtgccctgtcggtgaccattgacggcccctccaaggtgaagatggattgccaggagtgccctgagggctaccgcgtcacctatacccccatggcacctggcagctacctcatctccatcaagtacggcggcccctaccacattgggggcagccccttcaaggccaaagtcacaggcccccgtctcgtcagcaaccacagcctccacgagacatcatcagtgtttgtagactctctgaccaaggccacctgtgccccccagcatggggccccgggtcctgggcctgctgacgccagcaaggtggtggccaagggcctggggctgagcaaggcctacgtaggccagaagagcagcttcacagtagactgcagcaaagcaggcaacaacatgctgctggtgggggttcatggcccaaggaccccctgcgaggagatcctggtgaagcacgtgggcagccggctctacagcgtgtcctacctgctcaaggacaagggggagtacacactggtggtcaaatgggggcacgagcacatcccaggcagcccctaccgcgttgtggtgccctgagtctggggcccgtgccagccggcagcccccaagcctgccccgctacccaagcagccccgccctcttcccctcaaccccggcccaggccgccctggccgcccgcctgtcactgcagctgcccctgccctgtgccgtgctgcgctcacctgcctccccagccagccgctgacctctcggctttcacttgggcagagggagccatttggtggcgctgcttgtcttctttggttctgggaggggtgagggatgggg

SEQ ID NO: 29190 - DNA, 3186 bp, Homo Sapiens
ggagtctcgcgaggatcttgtgacttatcgcggcatcgcccagcggttgccgggaaacggcgtggcttccgggggcgggcgccctggtcccggagtcgccgctgggcctgtccgctggcgtcatggcaccgaaaaagaaagggaagaaaggcaaagccaaaggcaccccgattgtcgatgggctcgctccagaggacatgagcaaggagcaggtggaggagcatgtcagccgcatccgggaggagctggaccgcgagcgggaggaacgaaactacttccagctggagcgggacaagatccacaccttctgggagatcacacggaggcagctggaggagaagaaggctgagctgcggaacaaagaccgggagatggaagaagccgaggagaggcaccaggtggagatcaaggtgtacaagcagaaagtgaagcacctgctatatgagcaccagaacaacctgacagagatgaaggctgagggcactgtagtcatgaagctggcacagaaagagcaccgcatacaggagagtgtgctgcgcaaggacatgcgggcactgaaggtggagctcaaggagcaggagctggccagtgaggtggtggtgaagaacctgcggctgaaacacaccgaggagatcaccaggatgcggaatgattttgagaggcaagttcgagaaattgaggccaagtatgataagaagatgaagatgctgagggacgaactcgacttgcggagaaagactgagctccacgaagtggaggagaggaagaatggccagatccacacgctgatgcagcgccacgaggaggccttcaccgacattaagaactactacaacgacatcaccctcaacaacctggccctcatcaactccctcaaggagcagatggaggacatgcggaagaaggaggaccacctggagagggagatggcagaggtgtctgggcagaacaagcgcctggcagaccctctccagaaggctcgggaggagatgagcgagatgcagaaacagctcgcaaactacgagagggacaagcagatcctgctttgcacaaaagcccgtttgaaagtcagggagaaagagctgaaagacctgcagtgggagcatgaagtgttagagcagcgattcaccaaggtgcagcaggagcgggacgagctctatcggaagttcaccgcagccatccaggaggtgcagcagaagacagggttcaagaacctcgtgctagaacgcaagctgcaggctctgagcgccgctgtggagaagaaggaggtgcagttcaacgaggtcctggctgcctctaacctggaccctgcagccctgacgctggtgtcccgcaagctggaggatgttcttgagtcgaagaacagcaccatcaaggacctgcagtatgagctggcccaggtctgtaaggcccataacgacctgctgcgcacgtatgaggcaaagctgctggccttcgggatccctctggacaacgtgggcttcaagcccttggaaacagctgtgatcggacagacgctgggccagggccccgcgggactggtgggcaccccgacgtagctgccccccctggggggccacagcccagagaaccagcctaggaacactcgggatgacaccccttatcacaccaaggacagcaagttttttagattttatcatcagcaaatgaaagcttttcacatgttcttgccatcctctttcctggctctgtggaggagaaccacctgcaggaccctcacccatggtgtccctgtcgctcccttccctgggtgccgcacgtccagcctgtgtccaggcctactccctggtctcacctccgaccacagtcggcggcaccttctcagagtgccccgcactcacctgggggttggggcaatgccgcgctgtgctgcctgtcttcgcgccactgttgtcccaccgaatggacagctttgcaggtgctggcactaacttcattgacacctgagtcacagctgcccagtgggattctccagggggccgggacttccctaggaagtggtgagccaatgctccctgatgagcacaaagcccgctctgttgagggctgggtgggtgcagccagcgtgcgggaacgggcaggcagcctcccgctgccagtcttcgctctaactccctcggtaggtgatgtaggaccaggggcacgtggaacttctgggccttgctggtgatggttaaaacaacctgagatggagaggccaggagagagtataaggggatagcagcaaaccacctatctggccccaacacacctgagagaattcagcagcccagactgagggtctgggatggggtgaaccttccgcaccagagggacactccacagaagccacagcccagtaagtcaggcgcttctgcggcggctccagtgtggggtgaggcagtgaggttaggcccagagagctggagttggctcagatgaaaacctctgtcaacaaagaggggatgaatcacccttggcccagcctccccacaaagcctgaccctgggcaggtgagtgacgggtgtgtcctcgtagagtctattgctgcctggacacctttcttttgggagctcaaagcaagtgagctcacctacctgccaccgcccaggaccagtctgcccactgcctaaatgatgcccggccagcaggacctggcctgcagatcccagtgagtcatgagcctcagccccctccagcccactggggctctcacctccacatgtgggtagaagctttcctgccccctcttcctctagtagccctcagtgtcgaaggtgagcttgtaggtgcctgccttcatctggtccaggacagtgaccatctgggtctgtgtagctggggagagaatgaggctgcagagatggggaccagaagccccccaccccagctttcctgggtctgcatcccagtgggcctcagacactgccctgccacctgtcagacttgggtgagcagacacagtgaggctgttaggtcctgcagttccagagcagtctagggacaccactgccctgtctttaggaaatcacaacacagagaagcaaaaagggaaaaagtctcccacaatttatcccatgagcaagaaccactttatagctggcatatatttttccagattttctctatgcataagtatatttgtttaaaaacttataaagtggattatactatttgtattgtttt

SEQ ID NO: 29191 - DNA, 5536 bp, Homo Sapiens
gcgcggggcgggagcttggtggagcaggagcggctgggcatcctcctgagactccggggtcagacgcccactccagcgctttctgcgcagcacaggcaccctcgcctgtcacgcctccctctcctcttcccgtctcccagcgtggatgagggcgcctgcagatcccggctagggcacggaccgcctaggccgagatttctttaaagcctcgtgcagcacatcattatcgctggatgcccggacatgtaatacacctgacagcatgtgaagtgctcagaatggggcaggatgtcacctggaatcagcactaagtgattcagactttccttacttttaaatgtgctgctcttcatttcaagatgccgttgcagctctgataaatgcaaactgacaaccttcaaggccacgacggagggaaaatcattggtgcttggagcatagaagactgcccttcacaaaggaaatccctgattattgtttgaaatgctgaggacgttgctgcgaaggagacttttttcttatcccaccaaatactactttatggttcttgttttatccctaatcaccttctccgttttaaggattcatcaaaagcctgaatttgtaagtgtcagacacttggagcttgctggggagaatcctagtagtgatattaattgcaccaaagttttacagggtgatgtaaatgaaatccaaaaggtaaagcttgagatcctaacagtgaaatttaaaaagcgccctcggtggacacctgacgactatataaacatgaccagtgactgttcttctttcatcaagagacgcaaatatattgtagaaccccttagtaaagaagaggcggagtttccaatagcatattctatagtggttcatcacaagattgaaatgcttgacaggctgctgagggccatctatatgcctcagaatttctattgcattcatgtggacacaaaatccgaggattcctatttagctgcagtgatgggcatcgcttcctgttttagtaatgtctttgtggccagccgattggagagtgtggtttatgcatcgtggagccgggttcaggctgacctcaactgcatgaaggatctctatgcaatgagtgcaaactggaagtacttgataaatctttgtggtatggattttcccattaaaaccaacctagaaattgtcaggaagctcaagttgttaatgggagaaaacaacctggaaacggagaggatgccatcccataaagaagaaaggtggaagaagcggtatgaggtcgttaatggaaagctgacaaacacagggactgtcaaaatgcttcctccactcgaaacacctctcttttctggcagtgcctacttcgtggtcagtagggagtatgtggggtatgtactacagaatgaaaaaatccaaaagttgatggagtgggcacaagacacatacagccctgatgagtatctctgggccaccatccaaaggattcctgaagtcccgggctcactccctgccagccataagtatgatctgtctgacatgcaagcagttgccaggtttgtcaagtggcagtactttgagggtgatgtttccaagggtgctccctacccgccctgcgatggagtccatgtgcgctcagtgtgcattttcggagctggtgacttgaactggatgctgcgcaaacaccacttgtttgccaataagtttgacgtggatgttgacctctttgccatccagtgtttggatgagcatttgagacacaaagctttggagacattaaaacactgaccattacgggcaattttatgaacaagaagaaggatacacaaaacgtacccttatctgtttccccttccttgtcagcatcgggaagatggtatgaagtcctctttggggcagggactctagtagatcttcttgtcagagaagctgcatggtttctgcagagcacagttagctagaaaggtgatagcattaaatgttcatctagagttaatagtgggaggagtaaaggtagccttgaggccagagcaggtagcaaggcattgtggaaagaggggaccagggtggctggggaagaggccgatgcataaagtcagcctgttcaaagtgctcagggacttagcaaaatgagaagatgtgacctgtgccaaaactattttgagaattttaaatgtgaccatttttctggtatgaataaacttacagcaacaaataatcaaagatacaattaatctgatattatatttgttgaaatagaaatttgattgtactataaatgatttttgtaaataatttatattctgctctaatactgtactgtgtagtgtgtctccgtatgtcatctcagggagcttaaaatgggcttgatttaacattgaaaaaaaattttttgtgttatttttgcttgaaacaacgcacacattttcaacaaccaaaaaatgacaatttctagtttagttaatttctacaaatcatcttatgttattagcaaggttaagacatcttttttaaaaaaattatagcttctaccaagagaaacactcaatttttctagagatttgcctctatcttcctttcctcagtcttcccagactgctatcaagctgtgtaaaaatttactttcactggaccctaaattattgtctctgctatctgactgccagtaattagtgcagaaaactaagacaggatgatacaggtttgaggggctggggagtgggaggggggagaaaaggaatgtatttaaacaatttccgatgcccatgatgagtttaaaaaccagcattgacaccatccccaaaattaaggctgtcgcttattgaatccacttgtgtccaacctcccaggattgttttatcctaatgtcacctgtatattcatttgaaaggacttggccctgttcttgggtcttcccgttacctgccccctgggtggtaagtttcctcctttctcaaccttccacgaggaggaaagaagtgtgcagtcattccacatggcctgttggaaggcctggggagggaactttgggtttgggacagatttttttttttgtttttggtatcattcacagcatacgatttttactctctccatcttcaccataagacagataatttggggttgctataatgctgtcacacatctcaaagtacattcaaatcttaaaaagaaattctcgtacttttgccatgttgatactgttcagcaaacaagctaccaggaactgtgaggctttgtcatttagcattagactttaaacaagaattaaaatcatgtgctgtatttttaaaatctagccaaattaaatagtacatgagaaattcagagtattagacagttttaaggcattcaactgagaaaactttatttgtcaaagtcagaaaacattttcatcttattgagagatatgtttttaaacttttatcatcatttgtaaatgtggaagttggtggattgctgtgtttttgcatgattagcatgggagtctgttggagcaagaggaacatgcttgttttgaaaactcgagatgatgagggtggtacatgcagtgtgttctctctttattggcttctaaaccagttttgtcctttaatgcatgtcaaatatttctcccatgcttctcttagcagaaaagtttttacctataagacagggcaccttttaactctaaaactagtgatactcagtgacatagactttgtcttataaacattttttcattttttattttgaaaaattgcaaatctacagcaaaagtaaaacagtagagtgaacaccatgtaaccctcacctggtgttaacattgtaccctatttgctttaagttgtatgtatttctgaacttggcaaaattggaaattaaaatttttaaaaattacaaatatacaaagttatttatcttagcacatttattatgtgtgactgcatctgatttatatttaaattggcaggttttgagggatttttttcttcatcataaatgtaaacataggattttagagtctatttccccaagcgccacattataactgtaaacttaccatcttctatgtagctgtgatatctcatctttctaaaatggaacttgttaaaaagtgttcaaacactatccctaatgcctgcggcagaatttatatacgatccattcattggggctcaaagtatcttttagacttttaaggacaatttacagcaaatgaaatttatgatgctgtgacaagaaatttaaagaatcaaaacgatggtttgaaaaggaaacctatgatacatgcaggagaagcaaaacccaagtgatttgtgagaaatatagaaattatttaaattactttatagtaattattaaacactaatttttgtactgtcattgaaggtgttttatagagaaatctgagaaatcacattcacaaattagaagtcaaacatggccaggcacagtggctcacacctgtaatcttcaggatttcaagaccagcctagccaacatgacgaaaccccatctctactgaaaatagaaaaaaaaattagccaggcttgcacctgtaatcccagttacctgggaggctgaggcaggagaatctcttgagcccaggaggcggaggttgcagtgagctgagatgccaccaccacaccagcctgggtgacagagtgaaactcgtatctccaaacaaacaaacaaaaagtccttaaacatatgtgaacaaaaattttgtgatggaaggattctagttaatgagtattgcatcaagatttacatctttcttactaaggaaaagagttaataaaaattgttctttattttacaggcagttactgaggctcttcccagatctcagtaaacagccactcagccttgaaaatggagtgttgttgtttctaaacatatatttatgtcatttattaagtacagttcacttaaataacataagtagattttctcttgtagtgatttgggtaggaagaggccatgtttcagttcgttttctctgtagggtcgattgaattggaccttttcagttgttcagaaaaataaaaataatttctcatattaaatacagacgctcctcaacttatgatgtgggtaggtcccagtaaacccattataatttgaaaatatcatattgaaaatgcatttaatatctcttacctgaaatcataacttagccaagcctaccttaaatgttctcagaacatttagcctgcagttgggcaaaaccatttaacacaaagcctattttataatgaagtgttgaatagctcatgttatttactgaatactgttgtgaaagtgaaaaacaatgattgtatgggtactcaaagtataatttctactgaatgcatatcacttgtgcactgttgtaaagctgaaaaaccgttaagcctctacgatttttaagtaagttggggaccatcagtttaaaataaatgcaatactatttcatgataaacatggtcactgtaagttttactcttttgaatgagggtgcgacagaatgcagttagaatcagttcatatcaccattaaaatcatccattcagaaaccaaaaaaaaaaaa

SEQ ID NO: 29192 - DNA, 3376 bp, Homo Sapiens
ggagagagagagagaggagagagaaagacacacgcacgcagagacacacggtcactggaattccattagaaaaaagtgagccgagcaagggttagcgggagaagatttttttgaatcttgtcttcgtcttggtgcgaaagaagcgactccagtctctcgtcctcgaagctccgactggattgttcttgggcgctgacacccgtctgtggatttcttttctatttgcattttattccgaccccctccctcgccgcttccttccagcccttcactcgcaaatcgcctctctccccacctccccaggcccctcctgggaagcgcaggggaattggacccgcggggactcacgccttcccggacgattggaggggagggctgaccccaggactgggctgttggcttagaaagccgatacacagatacgcgtatatttgattgtagcgggcaaggggggcgtcgagaggcagcagcccatcgcccgcctctcaccccaccccctccagccagaggcgagaatcgcaggactcgggatcttcatcgggtggactagctgggatctccgcattggatttggggctgattaccactgcttgcctattattattgttgttgttactactattatttttttttacccaagggagaaagacaaaaaaacggtgggatttatttaacatgatcttggcaaacgtcttctgcctcttcttctttctagacgagaccctccgctctttggccagcccttcctccctgcagggccccgagctccacggctggcgccccccagtggactgtgtccgggccaatgagctgtgtgccgccgaatccaactgcagctctcgctaccgcactctgcggcagtgcctggcaggccgcgaccgcaacaccatgctggccaacaaggagtgccaggcggccttggaggtcttgcaggagagcccgctgtacgactgccgctgcaagcggggcatgaagaaggagctgcagtgtctgcagatctactggagcatccacctggggctgaccgagggtgaggagttctacgaagcctccccctatgagccggtgacctcccgcctctcggacatcttcaggcttgcttcaatcttctcagggacaggggcagacccggtggtcagcgccaagagcaaccattgcctggatgctgccaaggcctgcaacctgaatgacaactgcaagaagctgcgctcctcctacatctccatctgcaaccgcgagatctcgcccaccgagcgctgcaaccgccgcaagtgccacaaggccctgcgccagttcttcgaccgggtgcccagcgagtacacctaccgcatgctcttctgctcctgccaagaccaggcgtgcgctgagcgccgccggcaaaccatcctgcccagctgctcctatgaggacaaggagaagcccaactgcctggacctgcgtggcgtgtgccggactgaccacctgtgtcggtcccggctggccgacttccatgccaattgtcgagcctcctaccagacggtcaccagctgccctgcggacaattaccaggcgtgtctgggctcttatgctggcatgattgggtttgacatgacacctaactatgtggactccagccccactggcatcgtggtgtccccctggtgcagctgtcgtggcagcgggaacatggaggaggagtgtgagaagttcctcagggacttcaccgagaacccatgcctccggaacgccatccaggcctttggcaacggcacggacgtgaacgtgtccccaaaaggcccctcgttccaggccacccaggcccctcgggtggagaagacgccttctttgccagatgacctcagtgacagtaccagcttggggaccagtgtcatcaccacctgcacgtctgtccaggagcaggggctgaaggccaacaactccaaagagttaagcatgtgcttcacagagctcacgacaaatatcatcccagggagtaacaaggtgatcaaacctaactcaggccccagcagagccagaccgtcggctgccttgaccgtgctgtctgtcctgatgctgaaactggccttgtaggctgtgggaaccgagtcagaatatttttgaaagctacgcagacaagaacagccgcctgacgaaatggaaacacacacagacacacacacaccttgcaaaaaaaaaattgtttttcccaccttgtcgctgaacctgtctcctcccaggtttcttctctggagaagtttttgtaaaccaaacagacaagcaggcaggcagcctgagagctggcccaggggtcccctggcaggggaaactctggtgccggggagggcacgaggctctagaaatgcccttcactttctcctggtgtttttctctctggacccttctgaagcagagaccggacaagagcctgcagcggaagggactctgggctgtgcctgaggctggctgggggcaggacaacacagctgcttccccaggctgcccactctggggacccgctgggggctggcagagggcatcggtcagcggggcagcggggctggccatgagggtccaccttcagccctttggcttcaaggatggagatggttttgccctccctctctgccctcgggtggggctggtgggtctgcagctggtgtgggaacttccccacggatggcggtggagggggttcgcaccgtgctgggctccccctgactgtagcacggagtgttggggctgggggccagctccaggagggcttgagagctcagcctgcctgggagagcccttgtggcgaggcattaaaacttgggcaccagcttctttctcggtggcagaaattttgaagtcagagagaaacggtcctttgttggcttctttgctttctcgtgggtcctttggcaggcctccctttggggagagggaggggagagaccacagccgggtgtgtgtctgcagcaccgtgggccctcaagctttcctgctgtcttctccctcctcctcctttcccctttctctttcctcatttcctagacgtacgtcaactgtatgtacataccggggctcctctcctaacatatatgtatatacacatccatatacatatattgtgtggtttcccctttctttcctttttttaagcaacaaaactatggaaataataccccaacagatgagcgaaaatgtattattgtaaagtttattttttttaatactgttgtctataatggggaaaaaggacattggccccgcagtgccctgccccagtcagcctggctgggctctggtgggggctcctgatccgcatccaagcttaaccaaggctccaataaacgtgctaggaagcaaaaaaaaaaaaaaaaaaaaaaaaaaaaaaaaaaaaaaaaaaaaaaaa

SEQ ID NO: 29193 - DNA, 3717 bp, Homo Sapiens
aggaagaagccagtgcaccagaccggcaaagagaagcgggagccgccgcggcagcgcggccgtggggtccgccgccgccgcatcggagcgggaggaggagcagcggggagggcgaggccgccgggccgagagccgtcccgcctgctctcggtcttctgccttcgcctccgcgcggtgcgtcggacccagggtctgtcacctgggcgccaggggccgccgccggggagccggagcgggcaggaccctccctccgccgactgcggcccgagagcgcccccgcggggtggagcggcagccgccttctgcgggcggctgagtgtccgtctcgcgcccggagcgggcgaccgccgtcagcccggaggaggaggaggaggaggagggggcggccatggggctgctgtcccagggctcgccgctgagctgggaggaaaccaagcgccatgccgaccacgtgcggcggcacgggatcctccagttcctgcacatctaccacgccgtcaaggaccggcacaaggacgttctcaagtggggcgatgaggtggaatacatgttggtatcttttgatcatgaaaataaaaaagtccggttggtcctgtctggggagaaagttcttgaaactctgcaagagaagggggaaaggacaaacccaaaccatcctaccctttggagaccagagtatgggagttacatgattgaagggacaccaggacagccctacggaggaacaatgtccgagttcaatacagttgaggccaacatgcgaaaacgccggaaggaggctacttctatattagaagaaaatcaggctctttgcacaataacttcatttcccagattaggctgtcctgggttcacactgcccgaggtcaaacccaacccagtggaaggaggagcttccaagtccctcttctttccagatgaagcaataaacaagcaccctcgcttcagtaccttaacaagaaatatccgacataggagaggagaaaaggttgtcatcaatgtaccaatatttaaggacaagaatacaccatctccatttatagaaacatttactgaggatgatgaagcttcaagggcttctaagccggatcatatttacatggatgccatgggatttggaatgggcaattgctgtctccaggtgacattccaagcctgcagtatatctgaggccagatacctttatgatcagttggctactatctgtccaattgttatggctttgagtgctgcatctcccttttaccgaggctatgtgtcagacattgattgtcgctggggagtgatttctgcatctgtagatgatagaactcgggaggagcgaggactggagccattgaagaacaataactataggatcagtaaatcccgatatgactcaatagacagctatttatctaagtgtggtgagaaatataatgacatcgacttgacgatagataaagagatctacgaacagctgttgcaggaaggcattgatcatctcctggcccagcatgttgctcatctctttattagagacccactgacactgtttgaagagaaaatacacctggatgatgctaatgagtctgaccattttgagaatattcagtccacaaattggcagacaatgagatttaagccccctcctccaaactcagacattggatggagagtagaatttcgacccatggaggtgcaattaacagactttgagaactctgcctatgtggtgtttgtggtactgctcaccagagtgatcctttcctacaaattggattttctcattccactgtcaaaggttgatgagaacatgaaggtagcacagaaaagagatgctgtcttgcagggaatgttttatttcaggaaagatatttgcaaaggtggcaatgcagtggtggatggttgtggcaaggcccagaacagcacggagctcgctgcagaggagtacaccctcatgagcatagacaccatcatcaatgggaaggaaggtgtgtttcctggactgatcccaattctgaactcttaccttgaaaacatggaagtggatgtggacaccagatgtagtattctgaactacctaaagctaattaagaagagagcatctggagaactaatgacagttgccagatggatgagggagtttatcgcaaaccatcctgactacaagcaagacagtgtcataactgatgaaatgaattatagccttattttgaagtgtaaccaaattgcaaatgaattatgtgaatgcccagagttacttggatcagcatttaggaaagtaaaatatagtggaagtaaaactgactcatccaactagacattctacagaaagaaaaatgcattattgacgaactggctacagtaccatgcctctcagccagcccgtgtgtataatatgaagaccaaatgatagaactgtactgttttctgggccagtgagccagaaattgattaaggctttctttggtaggtaaatctagagtttatacagtgtacatgtacatagtaaagtatttttgattaacaatgtattttaataacatatctaaagtcatcatgaactggcttgtacatttttaaattcttactctggagcaacctactgtctaagcagttttgtaaatgtactggtaattgtacaatacttgcattccagagttaaaatgtttactgtaaatttttgttcttttaaagactacctgggacctgatttattgaaatttttctctttaaaaacattttctctcgttaattttcctttgtcatttcctttgttgtctacattaaatcacttgaatccattgaaagtgcttcaagggtaatcttgggtttctagcaccttatctatgatgtttcttttgcaattggaataatcacttggtcaccttgccccaagctttcccctctgaataaatacccattgaactctgatggctgttatcaaaggaacttttctttgtttaaatttgctgatgcaggaattaagtttaaacacaactctatagaaagaaaggagattattacccagaattcacatgtagtgattattaaggacaatttttttttttaactaaaaaagttggcggcaggggtggggggtggcaatcatttttcttcctatacatacaaaggatattgtcaaaaatggcgttcttctcttgtggcctgttattctgattgctgctgtatacagttttgtcactctttagtttttagttaagcatactgatagactttcctctaaaagccattcactccagattttacctggggaatattctacatactgcttactttctctataaaactcatcaataaatcatgaaaggcactgagttttgtaaatcaggaccctaaatgtttaattgtaaataagtttcagataattattatagctttgcgttgaagtttgttgttttttttctcaactagttaagtcaactgcttctgaaataactctgtattgtagattatgcagatctttacaggcataaatatttaaactgtaatatgctaacttgaagagattgcaataaagctgcttcagctaaccctgtttatgtttaaatactagggtttgttctatattttatacatgcattttggatgattaaagaatgcctggttttcgtttgcaatttgcttgtgtaaatcaggttgtaaaaaggcagataaattgaaatgtttgtggtatgaggaaataaaagaatggaattagctttcattcagaaa

SEQ ID NO: 29194 - DNA, 1698 bp, Homo Sapiens
cccggccctccctgcacggcctcccgtgcgcccctgtcagactgtggcggccggtcgcgcggtgcgctctccctccctgcccgcagcctggagaggcgcttcgtgctgcacacccccgcgttcctgccggcaccgcgcctgccctctgccgcgctccgccctgccgccgaccgcacgcccgccgcgggacatggcacacgcaccggcacgctgccccagcgcccggggctccggggacggcgagatgggcaagcccaggaacgtggcgctcatcaccggtatcacaggccaggatggttcctacctggctgagttcctgctggagaaaggctatgaggtccatggaattgtacggcggtccagttcatttaatacgggtcgaattgagcatctgtataagaatccccaggctcacattgaaggaaacatgaagttgcactatggcgatctcactgacagtacctgccttgtgaagatcattaatgaagtaaagcccacagagatctacaaccttggagcccagagccacgtcaaaatttcctttgacctcgctgagtacactgcggacgttgacggagttggcactctacgacttctagatgcagttaagacttgtggccttatcaactctgtgaagttctaccaagcctcaacaagtgaactttatgggaaagtgcaggaaataccccagaaggagaccacccctttctatccccggtcaccctatggggcagcaaaactctatgcctattggattgtggtgaacttccgtgaggcgtataatctctttgcagtgaacggcattctcttcaatcatgagagtcccagaagaggagctaatttcgttactcgaaaaattagccggtcagtagctaagatttaccttggacaactggaatgtttcagtttgggaaatctggatgccaaacgagattggggccatgccaaggactatgtggaggctatgtggttgatgttgcagaatgatgagccggaggacttcgttatagctactggggaggtccatagtgtccgggaatttgtcgagaaatcattcttgcacattggaaaaaccattgtgtgggaaggaaagaatgaaaatgaagtgggcagatgtaaagagaccggcaaagttcacgtgactgtggatctcaagtactaccggccaactgaagtggactttctgcagggcgactgcaccaaagcgaaacagaagctgaactggaagccccgggtcgctttcgatgagctggtgagggagatggtgcacgccgacgtggagctcatgaggacaaaccccaatgcctgagcagcgcctcggagcccggcccgccctccggctacaatccccgcagagtctccggtgcagacgcgctgcggggatggggagcggcgtgccaatctgcgggtcccctgcggcccctgctgccgctgcgctgtcccggccgcaagagcggggccgccccgccgaggtttgtagcagccgggatgtgaccctccagggtttgggtcgctttgcgtttgtcgaagcctcctctgaatggctttgtgaaatcaagatgttttaatcacattcactttacttgaaattatgttgttacacaacaaattgtggggccttcaaattgtttttctcttttcatattaaaaatggtctttctgtgaactagcaaaaaaaaaaaaaaaaaaaaaaaaaaa

SEQ ID NO: 29195 - DNA, 1505 bp, Homo Sapiens
ctctgcgctgaggtgctgggacagccatggtttcagacgaagatgaattgaatcttctggttattgtagttgatgccaacccaatttggtggggaaagcaagcattaaaggaatctcagttcactttatccaaatgcatagatgccgtgatggtgctgggaaattcgcatttattcatgaatcgttccaacaaacttgctgtgatagcaagtcacattcaagaaagccgattcttatatcctggaaagaatggcagacttggagacttcttcggagaccctggcaaccctcctgaatttaatccctctgggagtaaagatggaaaatacgaacttttaacctcagcaaatgaagttattgttgaagagattaaagatctaatgaccaaaagtgacataaagggtcaacatacagaaactttgctggcaggatccctggccaaagccctttgctacattcatagaatgaacaaggaagttaaagacaatcaggaaatgaaatcaaggatattggtgattaaggctgcagaagacagtgcgttgcagtatatgaacttcatgaatgtcatctttgcagcacagaaacagaatattttgattgatgcctgtgttttagactccgactcagggctcctccaacaggcttgtgacatcacgggaggactgtacctgaaggtgcctcagatgccttctcttctgcagtatttgctgtgggtgtttcttcccgatcaagatcagagatctcagttaatcctcccacccccagttcatgttgactacagggctgcttgcttctgtcatcgaaatctcattgaaattggttatgtctgttctgtgtgtttgtcaatattctgcaatttcagccccatttgtactacgtgcgagacagcctttaaaatttctctgcctccagtgctgaaagccaagaaaaagaaactgaaagtgtctgcctgaggataaaatattttccccatcttttagagctgttaatagaaattatatagcagattctttgttgggaagactgaaaaaaataaagataggtataggataatttttaatatggtgaccttacagaaaatatttcccaaacatccttttcatcctgtgcttctggaggactgatttgtttgagggaatcattctatgcattatatcctaaaatattctatgactggtttctgtccatgtttgtggctttcatttttttaatgggatgactattagtcaaagtcagcttgtcatgactcatcataggctttctaacctactccctgaatccgggtcctcattgtgaaatgcatgccatacgaaatttgaacgtagctttggaaaaagggactatttgtggagtaatggcattaatcaacatagaacatcttatttgaatcaacagttaacttcagtagtcatgtgaataaaattcttattgtctaaattgagacagcctcagatatttgcagatatttactttttgtctgatatcagtacatatttggacaaagt

SEQ ID NO: 29196 - DNA, 3660 bp, Homo Sapiens
cggctgcgctcaccggtaggccccgctcgggttccgccgaagcccagcccccgcaggtcgcccctccgacgccggcgcgccgcaagggaggccagctcgctcgcagtggggaggtcgcggctccagtcctcgcgtccccgccgtggtcccggtgcctgtcccatcccgcgggcgcggccgttgcgggcggcgcggcccgggcgcgcgcggcgaatctgcggctgcgaatcggctggagcggggcctcgcgagagcggcgaggcctgggcggctgggcctgggcgggcggcgcgggctgctccggaggctcgggtggcttgagagtcttgggaggctccgggcgctgcccgcgcggtcgccggcatgacgggccgcgtgtgccgcggttgcggcggcacggacatcgagctggacgcggcgcgcggggacgcggtgtgcaccgcctgcggctcagtgctggaggacaacatcatcgtgtccgaggtgcagttcgtggagagcagcggcggcggctcctcggccgtgggccagttcgtgtccctggacggtgctggcaaaaccccgactctgggtggcggcttccacgtgaatctggggaaggagtcgagagcgcagaccctgcagaatgggaggcgccacatccaccacctggggaaccagctgcagctgaaccagcactgcctggacaccgccttcaacttcttcaagatggccgtgagcaggcacctgacccgcggccggaagatggcccacgtgattgctgcctgcctctacctggtctgccgtacggagggcacgccgcacatgctcctggacctcagcgacctgctccaggtgaatgtgtacgtgcttggaaagacgtttcttctcttggcaagagagctctgcatcaatgcgccggccatagacccgtgcctgtatattccacgctttgcgcacctgctggaattcggggagaagaaccacgaggtgtccatgactgccctgaggctcctacagaggatgaagcgggactggatgcacacaggccggcgcccctcgggcctctgcggagcagcgctcctggttgcagccagaatgcatgacttcaggaggactgtgaaggaggtcatcagtgtggtcaaagtgtgtgagtccacgctgcggaagaggctcacggaatttgaagacacccccaccagtcagttgaccattgatgagttcatgaagatcgacctggaggaggagtgcgaccccccctcgtacacagctgggcagaggaagctgcggatgaagcagcttgaacaagtcctgtcaaaaaaactggaggaggttgaaggtgaaatatccagttaccaggatgcaattgagattgaactagaaaacagccggccaaaggccaaggggggcctggccagcctggcaaaagatggctccaccgaggacaccgcgtccagcttgtgtggcgaggaggacacagaggacgaggagctggaagccgcggccagccacctgaacaaagacttataccgggagctccttggtggtgcccccggcagctcggaagcagcaggaagccccgagtggggcggcagacctccggccctggggtccctgctggaccccctccccactgcagccagcctgggcatctcagactccatccgcgaatgcatctcctctcagagcagcgaccccaaagatgcttcaggagacggtgagctggacctcagtggcattgatgacctggagattgacaggtacatcctgaatgagtcggaagcccgcgtgaaggccgagctgtggatgagggagaacgccgagtacctgcgggaacagagggaaaaagaagcaagaatagcgaaagagaaggagctcggcatctacaaggaacacaagcccaagaagtcttgcaagcgacgggagccaattcaggccagtaccgccagggaggccatcgagaagatgctggagcagaagaagatctccagcaagatcaattatagcgtgctccggggcctcagcagcgccggcgggggcagtccgcacagggaggatgcacagcccgagcatagcgccagtgccaggaagctgtcacgaaggaggacgccggccagcagaagtggggctgaccctgtgaccagtgtggggaaaaggttgaggcctctggtgtctacgcagccagcaaagaaggtggccacgggagaggctttgctcccaagctctcccaccctcggagctgagcctgccaggccccaggcggtgctggtggagagcgggcccgtgtcataccacgccgacgaggaggctgacgaggaggagcctgacgaggaggacggggagccctgcgtcagtgccctgcagatgatgggcagcaacgactatggctgtgatggcgatgaggacgacggctactgaagtgtggcctccaggcaggtgatgtcctggcagggggcctcgcgggtctcctcagcatcagacgggcttccaggaccgcagcaggcaggccccagcgccgagactcctggtgacaggtggcacctgtcccacagccctcgtcccatgtggaacttaccattgggattgtgtttctattcagcaagggaaaccggaccaagcgtctgcatgtgtgtgatcagatgtgggccgggtgtgtgcagggctgggtcccgctgcctgccgtcgactcatccaaggaccctccaaggctggcagtgtggtgttgctactattaaggaaacaggcttggggcagccccactgctggtccaagtgtgtggagggctgagtgtgctggccctgtgactcaggaccagctctggagtctccagcccaccctccgcaccgtcccctcctgagcagcactcggcgccagcagcctctgccagagtggaagccagagccctgcaggtgtccggcgcagccgtgggagctgaggatctggcacttgagaggcagcagctccttgaaggtcctctgcctccagctgtggccctgcatccagatacctgcctcgtccgaggcagacacccccacccctgcctcctccagacccccctccccgctgcctgcaccgcctggagcagcatgggggtcagacccctgctccagggccacttgagttgtgggcccaggagccctgcggctgccggcaggtgaactgagtgcccgacagctgagaccggcgcccacccgtcctgagcatagctctgtaggcagtgcgggcatagcctgcatagtgtcctggcgctgggagttccccgtggacagagccagagggcagtggcgctccctgtcagagctggatcaggccccccatcgaggagggagggcagacggaggcccgagagcctccccaggcctcttcgtgggaaggccccagtaccactcgtaggaggtctcagctctggcatggctgccccggatgtggccgagggggcttcaccctgtgtccttaggagggggtggccttgaggcagagccgtgcctcactgacccccaggggcctcatcctccccatggaatgggctgtatgtcctgccccaacttggcccgcagcaggccagacccccctacccccgcccagagctcagtagccagcctgggtcctgccagggcttctcgagggcttgggggaagaatagatttagtaaagcaggaagatctgttgttacttaacaga

SEQ ID NO: 29197 - DNA, 7913 bp, Homo Sapiens
ccttagccccgtgggccccacggagtgagcggcatgcagcacccccgggcctgtccagtgtcctctggcctgctgccctgcacccccagaaggccctgacgccctggggcacttctgctctgcacaggaccacgcgggggtttgccatggtgacataaaggggcgcggaggaaggaaggagcgtgaccagcctgtggactgcgcccctggctgggaggaaggactgggggcccagatcctccactcccagtgccccacaagggcgtcgcttcctaagtctctgtgaatttgttggtcagtggacgattctcgtgtctcctcctgtgtggggccttggggtagccagggcaggccgggcctccggtggccaaggtctcggaggccaggatgcctgccctggcatgcctccggaggctgtgtcggcacgtgtccccgcaggctgtccttttcctgctgttcatcttctgcctgttcagcgttttcatctcggcctactacctatatggctggaagcgaggcctggagccctcggcggatgcccccgagcctgactgcggggacccgccgcctgtggcccccagtcgcctgctgccactcaagcctgtgcaggcagccaccccttcccgcacagacccgttggtgctggtctttgtggagagcctctactcgcaactgggccaggaggtggtggccatcctggagtccagccgcttcaaataccgcacagagattgcgccgggcaagggtgacatgcccacgctcactgacaagggccgtggccgcttcgccctcatcatctatgagaacatcctcaagtatgtcaacctggacgcctggaaccgggagctgctggacaagtactgtgtggcctacggcgtgggcatcattggcttcttcaaggccaatgagaacagcctgctgagtgcgcagctcaagggcttccccctgttcctgcactcaaacctgggcctgaaggactgcagcatcaaccccaagtccccgctgctctacgtgacgcgacctagcgaggtggagaaaggtgtgctccccggcgaggactggacggttttccagtcaaatcactccacctatgagccagtgctgctggccaagacgcgctcgtctgagtccatcccacacctgggcgcagacgccggcctgcatgctgcactgcacgccactgtggtccaggacctgggcctgcacgacggcatccagcgcgtgctgtttggcaacaacctgaacttctggctgcacaagcttgtcttcgtggatgccgtggccttcctcacggggaagcgcctctccctgccattggaccgctacatcctggtggacattgatgacatcttcgtgggcaaggagggcacacgcatgaaggtggaggacgtgaaggccctgtttgacacacagaacgaactacgcgcacacatcccaaacttcaccttcaacctgggctactcagggaaattcttccacacaggtaccaatgctgaggacgctggggatgatctgctgctgtcgtatgtgaaggagttctggtggttcccccacatgtggagccacatgcagccccaccttttccacaaccagtccgtgttggccgagcagatggccttgaacaagaagttcgctgtcgagcatggcattcccacagacatggggtatgcagtggcgccccaccactcgggcgtgtaccccgtgcacgtgcagctgtacgaggcttggaagcaggtgtggagcatccgcgtgaccagcacggaggagtacccccacctgaagccagcccgctaccgccgtggcttcatccacaatggcatcatggttctcccacggcagacctgcggcctcttcacacacaccatcttctacaacgagtaccctggcggctccagtgagctggacaagatcatcaacgggggcgagctcttcctcaccgtgctcctcaatcctatcagcatcttcatgacgcacctgtccaactatgggaatgaccgcctgggcctgtacaccttcaagcacctggtgcgcttcctgcactcctggacgaacctccggctgcagacactgccccctgtgcagttggcgcagaagtacttccagatcttctccgaggagaaggacccgctctggcaggacccctgcgaggacaaacgtcacaaagacatctggtccaaggagaagacgtgtgaccgcttcccaaagctcctcatcatcggcccccagaaaacaggcaccactgccctctacctgttcctgggcatgcaccctgacctaagcagcaactaccccagctctgagacctttgaggagatccagttttttaatggccacaactatcacaaaggcatcgactggtacatggagttcttccccatcccttccaacaccacctccgacttctactttgagaaaagcgccaactactttgattcagaagtggcgccccggcgggcagcagccctcttgcccaaagccaaggtcctgaccatcctcatcaaccccgcggaccgggcctattcctggtaccagcaccagcgagcccatgacgacccagtggccctaaagtacaccttccatgaggtgattaccgccggctctgacgcatcctcgaagctgcgtgccctccagaaccgctgcctggtccctggctggtacgccacccacatcgagcgctggctcagtgcctatcacgccaaccagattctggtcttggatggcaaactgcttcgcacagaacctgccaaagtgatggacatggtgcagaagttccttggggtgaccaacaccattgactaccacaaaaccttggcgtttgatccaaagaaaggattttggtgccaactgcttgaaggaggaaaaaccaagtgtctgggcaaaagcaagggccggaaatatcccgagatggacttggattcccgagccttcctgaaggactattaccgggaccacaacatcgagctctccaagctgctgtataagatgggccagacacttcccacttggctacgagaggacctccagaacaccaggtagccgtggccaccacagccagactgaacgtttgtgaaagctgggacatcccaccacacgctgagccagacctgcagagtgggaagctggaccagggcagctgcgcacttatgagcaatactctgtggaggtctggtggggctgggggagcacccaggcggatctgcaagcacctcggagcacccaccgctgggtctgcggcctaagggacctccctcgccagcagaggtccattccgttcccagctgctcctggggaggccgcttcctggtaggagggagtccacgagactcttttctgtccctcactgtgttccgccgactgtcccctctcgtcacccatcactccctgcttccgcagggcgcccctcagtattcgctgccatatgtccctgtcctccaggctgtaggggaggagagcctggccgggggagacagactggacatttccctgtttcgagccaggctcttccaaggggccagctgggtccccggagtcagtcctaggctggatgggagggtggccccctcaagaggactcccagcctccacatctggttcctaccttcacatctcaccctcccgttctggggaagaatttctggttcctacagtatccactccatcctcaaggcttcccgcagggccttggggcactgccttgccatcgggcccagttctccgggccccacctgcacccctttcttccccctgggatatgatgtgtggtgtttcctgtggtaaaagactgaggcaggccaggggtctgccagtaacatgttcccatgtacagacacggtccccacaccctcccagcctcaggcccaggcagacatgggcgagctggtgagactgccagccacggctttgcttagccacctgtggccgagggctctcagagacccccttaacctcccaaatactaagaagctaaaatattttaatattttgtttttttttttcttggtgccagagtttataccctgggtgctggggtcgcactgtgttatatatatatatatatatatataatgtgtatatatatatattctattttttttggttgggttcgtttttaattcagtcctacaaaatggtggtaagccccagtctcaggggtcaccctgtcttagagctagagatgaggtggcagggagggaggctgtgtcctcagtggcctggggctgagcagaccttaggaagggaccctccccagtgccgtggctgctctggggctaccccaggtgaacagaggtggtgagatgcgcagggaagaccagctctctccaggacatcgggctgcgtgaagtccagtgaccctgaggggattttggccaaaggaaacagccagggctgggctaggagagctagggtcaaaagctgccccacccactctccctcacatggtgctaggctgggagctgccctgagagctgggatgcccaccaaggcccacagaactgtctccaggcccttgtagacagtgggatctctgggctgatttctggttggggtctgctcctaccccaccccatttaacaatgtgaagtgactgaggctggggtgcctctccctggccccctccaactgccaaattctgcttccctctgaaccccaggaaatactttctggagaggcttgtcttgttcagaagactctagcatcttggggctggaaggtcctttgacgggtatgaaacaggtccagaaaggggaggtggcctgcttggccgacgtcatggagccagctgggagcagggctgagcgttgaacccgaggctcccggttccaagtcccatcgtgctcctcttccaatgccacactgcctctgagcccatccttggaccctactctgtgccaggttcctgtcccttcctccgtcacagcatggtcattccaggatatgggacaaaccactccttcccagccagggtgcctttgagccttctcattccgaggtctgcgtttgcatccctgtcgtgttctccctcgaggggtccttccccagcctgtgggggcctgggtctgttctgagctgattcccttttctccagttctctgctgggatgaagaaagttggacactcagtgggaccagctgcaggtggtttcactgtgtacacagcagtgtccccatcatgcctctcaatggggcctgcaagcctgggaacttgggcatcgttgggccagcaggatgagcagcaaagagtctgaggacagggtggcatgtctgcttgtgtgctcatgaagacatgcccacgccatggagccaggggcttacagagaggggcagtgacttccagagtcccatccgtcagtgaggggactgggctgcgggatgggtgaggatcttacagctcccaggttcggaaatctaccctctaggcctggaggcctctctcgcagagcatggaaggcaggagaggtgggctggcctagggcaggagctccacttctctctgcctctggctatgggaaggagcaggcggttggaaatcctgtgacaacagagatcttctggatttttgcctggacccttctgcaagcctggagactggacctgccacatgttccaagtctgtctgcctaggtcactgctgccacttctcctcccactaacagacctttcttgaagacccactaggtccagacactgccgggacttgcaggtatggggggtagaaggagaggcagataagctgcctggggggctgttagctaatgggtacaaggacaccccctcccgagaagagaagccacagatgagtgggccagcgaggccagtcttcaatgtccactaattcactctaagcatttggccaaaaaaaggagagagaaataactgaaattgttcaggtggctccatcgtctattctgtggtcccctccatgagcctttgccccagggtgggtgcaggtgcgagtgtcacctgcagctgcctcagtcattcagagttccagagccttctgtggtggagcatcctgctgcttggaggatgagtctgaagtttaaaaatgggccttttctgagcccccctgatgagcagtcagtgcttctgggcccagctaaggaagccatctgttcccagcagaggagagctgctgcgctgacctgcagaggttggtggtcccagcacagagctgtgcccatgggcttgttagtgggaaaagcaaatacaacaatgttttaccaaacatttaattatgaatgcccactccccagcatctagatctaaaattattaacattttgccacattctttttctctctctgtgtatgtatatgttttctctgtcctaatttaaaagtacattgcaaacatcatgaaacttgatccctgaaagcttcagcctgcatctcctaagagttagggcattgtcctacacgttggcccagtatcacagccaagacgagaagtcatttcccagcgatgtctgctatctaatctgtattcaaatccccccaattgtctcccaggtaacttatgtgtctggttttggaatcagcatccagtcacggtgcacacattgcattttctaactatgtttttaaaacctctttgaatgctgaaaggtcttccctcagctcactttgagtttttaaatgacattgtttttgaggccctaggcctgctgtctttttgaagccccacattctgaatttgtcagattgtttgctcatggtgtcgcataaccacttcttctatcccctgtactttcaaggataatttaggctacatgagattttgccttttgtgctgacttgacagcttcacttctgcctaagatgcgcctccactgtcacctgtaccaagtgccaaaacagcagaggggccagttagagcaagagctctgggggggccggaaagtctccctggagaaggccgtaatatctgggccttggaaggaaggacacagggctctggaaggaggaggctgcatgcctgaaggctgggccttcgaccctggggatgggccacagggcaccaaacacatcatatgtctctctctttctattttggggtcccagggttttcatttcctggagacccgtggtctgtgtgcactggagcagagccaggctctcagttgcagcagggaaaagcctacatggggaactgcctcccgcaagctgtggtgtgagaagagccctggctggcagcaggagctgtgaagtttcatcccagccgggtgcatttagtagctgcctgaccatcttcctcccaggccctcagtttcttcatctgtagaatgagcagataggggccacagcagggattttcacacatcaaaggaggcagcctctgctctagttgatgtgaggatgagggggcggcctagaccccctgctgcccaggccgttgaggcaacactgggttcctggcttgacagctgtgggctggctgcccttgccagctcagacggctggcgagttttcagcttccctaagggactggcatagggttttgtggggtcaatgccaggaacctgggggaaactggatgcgttttatcctaagaagttcatccctcctgctcttactgtttccggccctggaggagaatgagggaggagagggttttctatgactgtgttagcttttattattagcaagagggctccttttgtaatttgtgcatgaaattcatgtcatttcctgggagaggagagggccgactggagagggtggggggcacactggggaagcaggcagaggtttccttcccttgtaggggggtggggggagtggggagagggggggctatccagttcgcctgatgagggctctcgaaccagccgttttgggttgtgttaaaggtgagaccttcctccattaatgtacaatctcgaactaactgctaataaagtggggttctgtttgta

SEQ ID NO: 29198 - DNA, 2381 bp, Homo Sapiens
ggaattctgagcgtttttttttttttttttttttttttggtctgggcttccgaatatgttttatgacggttgattttacaccaggaggtttgtctccgaggaagacccagggaactggatatctagcgagaacttcctccggattccccggcgcctcgggaaaatgggagctgctgcaaagttggcgtttgccgtctttcttatctcctgttcttcaggtgctatacttggtagatcagaaactcaggagtgtcttttctttaatgctaattgggaaaaagacagaaccaatcaaactggtgttgaaccgtgttatggtgacaaagataaacggcggcattgttttgctacctggaagaatatttctggttccattgaaatagtgaaacaaggttgttggctggatgatatcaactgctatgacaggactgattgtgtagaaaaaaaagacagccctgaagtatatttttgttgctgtgagggcaatatgtgtaatgaaaagttttcttattttccagagatggaagtcacacagcccacttcaaatccagttacacctaagccaccctattacaacatcctgctctattccttggtgccacttatgttaattgcggggattgtcatttgtgcattttgggtgtacaggcatcacaagatggcctaccctcctgtacttgttccaactcaagacccaggaccacccccaccttctccattactagggttgaaaccactgcagttattagaagtgaaagcaaggggaagatttggttgtgtctggaaagcccagttgcttaacgaatatgtggctgtcaaaatatttccaatacaggacaaacagtcatggcaaaatgaatacgaagtctacagtttgcctggaatgaagcatgagaacatattacagttcattggtgcagaaaaacgaggcaccagtgttgatgtggatctttggctgatcacagcatttcatgaaaagggttcactatcagactttcttaaggctaatgtggtctcttggaatgaactgtgtcatattgcagaaaccatggctagaggattggcatatttacatgaggatatacctggcctaaaagatggccacaaacctgccatatctcacagggacatcaaaagtaaaaatgtgctgttgaaaaacaacctgacagcttgcattgctgactttgggttggccttaaaatttgaggctggcaagtctgcaggcgatacccatggacaggttggtacccggaggtacatggctccagaggtattagagggtgctataaacttccaaagggatgcatttttgaggatagatatgtatgccatgggattagtcctatgggaactggcttctcgctgtactgctgcagatggacctgtagatgaatacatgttgccatttgaggaggaaattggccagcatccatctcttgaagacatgcaggaagttgttgtgcataaaaaaaagaggcctgttttaagagattattggcagaaacatgctggaatggcaatgctctgtgaaaccattgaagaatgttgggatcacgacgcagaagccaggttatcagctggatgtgtaggtgaaagaattacccagatgcagagactaacaaatattattaccacagaggacattgtaacagtggtcacaatggtgacaaatgttgactttcctcccaaagaatctagtctatgatggttgcgccatctgtgcacactaagaaatgggactctgaactggagctgctaagctaaagaaactgcttacagtttattttctgtgtaaaatgagtaggatgtctcttggaaatgttaagaaagaagaccctttgttgaaaaatgttgctctgggagacttactgcattgccgacagcacagatgtgaaggacatgagactaagagaaaccttgcaaactctataaagaaacttttgaaaaagtgtacatgaagaatgtagccctctccaaatcaaggatcttttggacctggctaatggagtgtttgaaaactgacatcagatttcttaatgtctgtcagaagacactaattccttaaatgaactactgctattttttttaaatcaaaaacttttcatttcagattttaaaaagggtaacttgtttttattgcatttgctgttgtttctataaatgactattgtaatgccaatatgacacagcttgtgaatgtttagtgtgctgctgttctgtgtacataaagtcatcaaagtggggtacagtaaagaggcttccaagcattactttaacctccctcaacaaggtatacctcagttccacggttgctaaattataaaattgaaaacactaacaaaatttgaataataaatcgatccatgttttgtaaaaaaaaa

SEQ ID NO: 29199 - DNA, 1945 bp, Homo Sapiens
ggaagccttggcactagcggcgcccgggcgcggagtgcgcagggcaaggtcctgcgctctgggccagcgctcggccatgcgatccgccgcgcggaggggacgcgccgcgcccgccgccagggactctttgccggtgctactgtttttatgcttgcttctgaagacgtgtgaacctaaaactgcaaatgcctttaaaccaaatatcctactgatcatggcggatgatctaggcactggggatctcggttgctacgggaacaatacactgagaacgccgaatattgaccagcttgcagaggaaggtgtgaggctcactcagcacctggcggccgccccgctctgcaccccaagccgagctgcattcctcacagggagacattccttcagatcaggcatggacgccagcaatggataccgggcccttcagtggaacgcaggctcaggtggactccctgagaacgaaaccacttttgcaagaatcttgcagcagcatggctatgcaaccggcctcataggaaaatggcaccagggtgtgaattgtgcatcccgcggggatcactgccaccaccccctgaaccacggatttgactatttctacggcatgcccttcacgctcacaaacgactgtgacccaggcaggccccccgaagtggacgccgccctgagggcgcagctctggggttacacccagttcctggcgctggggattctcaccctggctgccggccagacctgcggtttcttctctgtctccgcgagagcagtcaccggcatggccggcgtgggctgcctgtttttcatctcttggtactcctccttcgggtttgtgcgacgctggaactgtatcctgatgagaaaccatgacgtcacggagcaacccatggttctggagaaaacagcgagtcttatgctaaaggaagctgtttcctatattgaaagacacaagcatgggccatttctcctcttcctttctttgctgcatgtgcacattccccttgtgaccacgagtgcattcctggggaaaagtcagcatggcttatatggtgataatgtggaggagatggactggctcataggtaaggttcttaatgccatcgaagacaatggtttaaagaactcaacattcacgtatttcacctctgaccatggaggacatttagaggcaagagatggacacagccagttagggggatggaacggaatttacaaaggtgggaagggcatgggaggatgggaaggtgggatccgagtgcccgggatcttccactggccgggggtgctcccggccggccgagtgattggagagcccacgagcctgatggacgtgttccctactgtggtccagctggtgggtggcgaggtgccccaggacagggtgattgatggccacagcctggtacccttgctgcagggagctgaggcacgctcggcacatgagttcctgtttcattactgtgggcagcatcttcacgcagcacgctggcaccagaaggacagtggaagcgtctggaaggttcattacacgaccccgcagttccaccccgaggagcggggcctgctaacggccgaggcgtctgcccatgctgaatggggaggcgtgacccatcacagaccccctttgctctttgacctctccagggacccctccgaggcacggcccctgacccccgactccgagcccctgtaccacgccgtgatagcaagggtaggtgccgcggtgtcggagcatcggcagaccctgagtcctgtgccccagcagttttccatgagcaacatcctgtggaagccgtggctgcagccgtgctgcggacatttcccgttctgttcatgccacgaggatggggatggcaccccctgaatgccaggactgtgagagaggatccaggagagcctgactgcgttgcaaacaaaattctccaagcttggttctatcttcagtccggaa

SEQ ID NO: 29200 - DNA, 4031 bp, Homo Sapiens
cggtctcgggttgcgcgctgggcctggagggagggggcggcccccgcaccggtccgagttgcggccgcgtggactgcgacccgcgccgcgccgcaccgcgccgcgccctgggaacgccgctccccgcgcgccaacggacccggggaagcccttctggggtccgaggccgcgctgcggggccgcccacgctgcgctccaggagccagagcctgcagggtgggtgtcgggacatgctgatcttccctcaagacagctggcgggcgctctggtcatggaggactgcaatgtgcactcggccgccagcatcctggcctcggtgaaggagcaggaggcccgcttcgagaggctgacacgggcactggagcaggagcggcgccatgttgccctacagctggagcgtgcccagcagcctggcatggtcagtggtggcatgggcagtgggcagcccctgccaatggcctggcaacagctggtcctccaggagcagagcccaggcagccaggcctcactggccacgatgccggaggcacctgatgtgctggaggagaccgtgacggtggaggaggaccccggcacacccacttcccatgtgtctattgtcacatccgaagatggcacaacccggcgcaccgagaccaaggtcaccaagactgtcaagacggtgaccactcggacagtacgccaggtgcccgtgggcccagatggactccccctgctggatggcggccccccactaggcccttttgcagatggtgccctggaccggcatttcctgctgcgtggtggtggcccagtggccacactctctcgagcctacctcagcagtgggggtggctttcccgaaggccccgagccccgggacagccccagctatggcagcctgtcccgagggctgggcatgcggcccccacgtgctggcccccttggcccaggccctggtgatggctgcttcacactgcctggccaccgggaagccttcccggtgggtcctgagcctgggccaccaggtggccgctccctgcccgagcgcttccaggcagagccgtatggcttggaggatgacacgcgcagcctggccgctgatgacgagggtggccctgagctggagcctgactatggcacggccacaaggaggaggcctgagtgtgggcggggccttcataccagggcctacgaggacacagcagatgatggcggcgagctggcggacgagcggcctgcgttcccaatggtgacggcgcccctggcccagcctgaacggggcagcatgggcagcctggaccggctggtgcggcgctcgccctcagtggatagcgcccgcaaggagccgcgctggcgggaccctgagctgcctgaggtgctggccatgctgcggcaccccgtggaccccgtgaaggccaatgcggccgcctacctgcagcatctgtgctttgagaacgagggtgtcaagcggcgtgtacggcagttgcgggggctgccgctgcttgtggcactgctggaccacccgcgggctgaggtgcggcgccgggcctgtggggcactgcgcaacctctcctatggccgcgacactgacaacaaggccgccatccgggactgcggtggtgtgcctgccctggtgcgcctgctgagggctgcccgggacaacgaggtccgtgagcttgtcactggcaccctgtggaacctgtcatcctatgagcccctgaagatggtcatcattgaccatggcctgcagacgctgacccacgaggtgatcgtgccccactcaggatgggagcgtgagcccaacgaggactccaagccacgggacgccgagtggacaactgtcttcaagaacacgtcgggctgcctgaggaatgtgagctccgatggtgctgaggcccggcggcgactccgggagtgtgaagggctggtggacgcgctcctgcatgccctgcagtcggctgtgggccggaaggacactgacaacaagtcggtggagaactgcgtgtgcatcatgcggaacctgtcctaccacgtgcacaaggaggtgcccggggccgacaggtaccaggaggccgagcccgggcccctgggcagtgctgtaggctcccagcgccggaggcgggatgatgccagctgctttggaggcaagaaggccaaagaggagtggttccaccaaggaaagaaggatggtgagatggaccggaactttgacacgctagacctgcccaagcgaactgaggccgccaaaggctttgagctgctgtaccagcccgaggtggtacgtctctacctctccctcctcacggagagccggaacttcaacaccctggaggctgccgccggcgctctgcagaacctcagtgccggcaactggatgtgggccacgtacatccgcgccacagtgcgcaaagagcgcgggctgccggtgcttgtggaactgctgcagtctgagaccgacaaggtggtgcgcgccgtcgccatcgctctgcgcaacctctcgctggaccggcgcaacaaagacctcatcgggagctacgccatggctgagcttgtgcggaatgtgcgcaatgcacaggctccgccgcgaccgggggcctgcctggaggaagacaccgtggtggcggtgctcaacaccatccacgaaatcgtgtccgacagcctggataacgcgcgctcgctcctgcaggcacgcggggtgccagcgttggtggctctcgtggcctccagccaatcggtacgcgaagcgaaggcggcgtcacacgtgctgcagacagtgtggagctacaaggagctgcgtggtaccttgcagaaagatggttggaccaaggcgcgcttccagtcagctgctgctactgccaaggggcctaagggagcactgagtcctgggggcttcgatgacagcacgctgccactggtggacaagagccttgagggcgagaaaactggcagccgggatgtgatccccatggatgcgctgggcccagacggatactccacggtggaccggagggagcggaggccacggggcgccagctctgcaggagaggcctctgagaaggaacccttgaaactcgaccccagcaggaaggcccctccccccgggcccagcaggcccgcggtcaggctggtggacgccgtaggggacgctaagcctcagcccgttgattcctgggtctagcttgcatgcctgggcccaggcccagcctcttgttcttagggcttggatcgtggaagaagggccaccctgagcagatcgtgccgtggagcttggagccccctggcggcaggggttggcagcgcctcgccccagccaagcctgactttggggacaccctcctgcccccccaccccactccccccatcctacctaactccctaggcctgagttagctgtttactgacatggtgctgtgtgtgagcgagtgacagaaggcccgaggaggccgactgggctgctggggcagggcccagggaggtggcagggaagggtgcctggctgggctttggggctggtgggataggagggtgcccctgggaacacagtgccccagtggtgcgggccaggtctggcgccaggggcaggcagctaggcagggagggggctgggaaagaacttggacttctaaaggcggagggtctccctgggcaccctgcaggcaggcagaccacggtgtggggggtgccccacaaggcccagccctgggcaaggaagctttggaagcagcaaggtgggggtcaggctacaggtgccccacctccccagagccctgcagtcacgtgaggcccctgtgcagtagagagcctttctccagcccatgctggctggggccggggctgccgcatctgcctggagcctgggcagcacctccgggactgaccttcggcagtggctgggggactgctttcagtgcctgctgttcgtgactcagaaacagaagaaaaacactgagaaaaagcattaaaaataagccaaaataagactattggtaaacacctaaatttttgtaagaaaatttaaaaattaaagcagcaaaggaaaaaaaaaaaaa

SEQ ID NO: 29201 - DNA, 1853 bp, Homo Sapiens
ggcgcggcgcggcgcagtcggctcgagtactccccgtaacgaggaggtgttctcggccgtcccacccttcactgccgtctccgggctgcgccgccggagccgggacgcgcctccgcagccctcgccgcctccatccccgcggccgcagctcctctcgccgtccgcgcgcacaccatgacgaagaacgagaagaagtccctcaaccagagcctggccgagtggaagctcttcatctacaacccgaccaccggagaattcctggggcgcaccgccaagagctggggtttgatcttgctcttctacctagttttttatgggttcctggctgcactcttctcattcacgatgtgggttatgcttcagactctcaacgatgaggttccaaaataccgtgaccagattcctagcccaggactcatggtttttccaaaaccagtgaccgcattggaatatacattcagtaggtctgatccaacttcgtatgcagggtacattgaagaccttaagaagtttctaaaaccatatactttagaagaacagaagaacctcacagtctgtcctgatggagcactttttgaacagaagggtccagtttatgttgcatgtcagtttcctatttcattacttcaagcatgcagtggtatgaatgatcctgattttggctattctcaaggaaacccttgtattcttgtgaaaatgaacagaataattggattaaagcctgaaggagtgccaaggatagattgtgtttcaaagaatgaagatataccaaatgtagcagtttatcctcataatggaatgatagacttaaaatatttcccatattatgggaaaaaactgcatgttgggtatctacagccattggttgctgttcaggtcagctttgctcctaacaacactgggaaagaagtaacagttgagtgcaagattgatggatcagccaacctaaaaagtcaggatgatcgtgacaagtttttgggacgagttatgttcaaaatcacagcacgtgcatagtatgagtaggatatctccacagagtaaatgttgtgttgtctgtcttcattttgtaacagctggaccttccattctagaattatgagaccaccttggagaaaggtgtgtggtacatgacattgggttacatcataacgtgcttccagatcatagtgttcagtgtcctctgaagtaactgcctgttgcctctgctgccctttgaaccagtgtacagtcgccagatagggaccggtgaacacctgattccaaacatgtaggatgggggtcttgtcctctttttatgtggtttaattgccaagtgtctaaagcttaatatgccgtgctatgtaaatattttatggatataacaactgtcatattttgatgtcaacagagttttagggataaaatggtacccggccaacatcaagtgactttatagctgcaagaaatgtggtatgtggagaagttctgtatgtgaggaaggaaaaaaagaaaataaaagtgtgtttgaaaaatattatcttgggttctttgtaaaatttattttttacatgctgaattagcctcgatctttttgattaagagcacaaacttttttttgtaaaacatgtaaaaaaaaaaactgggattaatttttagtgttggaactgcctcttattttaggctgtagataaaatagcatttttaggttagccagtgtgactatgcacctaattttttatgagattaaattcataagacttaatttgtacaatagtttgtgaaatatcttgttactgcttttatttagcagactgtggactgtaataaagtatataaattgtgaaatataaaaacttggaacttattcaaagctt

SEQ ID NO: 29202 - DNA, 6796 bp, Homo Sapiens
ggccaaaggtcaagatacttctctgggaaatgttgctgctgatgctgctttacaaagtcatacaatgagtgtttggtttaagaaagattttcatacttaaaagattttcatcttggaaatacatcaagtgaaaattaaattcttttgggaaacattttccttctgatatattatacttgtaatgggcgacatggcaaacaactcagttgcttacagtggtgtgaaaaactctttgaaggaagctaatcatgatggagactttggaattacgctcgcagagctgcgggctctcatggagctcaggtccacagatgcattacgaaaaatacaggaaagctatggagatgtctatggaatttgcaccaaattgaaaacatctcccaatgaaggtttaagtggaaaccctgcagatttagaaagaagagaagcagtgtttggaaagaattttatacctcctaaaaagccaaaaacctttcttcaattagtatgggaagcattacaagatgtcactttaattatattagaaattgcagccatagtatcattgggcctttctttttatcagcctccagaaggggataatgcactttgtggagaagtttctgttggggaggaagaaggtgaaggtgaaactggttggattgaaggagctgcaatcctcttgtctgtagtgtgtgtggtgttagtaacagctttcaatgactggagtaaggaaaaacagtttagaggtttgcagagccgaattgaacaagaacagaagttcactgtcatcaggggtggtcaggtcattcagatacctgtagctgacattactgttggagatattgctcaagtgaaatatggtgatcttcttccagctgacggcatacttattcaaggcaacgatcttaaaattgatgaaagctcattgactggtgaatcagatcatgttaaaaagtctttagataaggatcccttacttctatcaggtactcatgtaatggaaggctctggaagaatggtagttacagctgtaggtgtaaattctcaaactggaattatctttaccttacttggagctggaggtgaagaggaagagaagaaagatgagaagaaaaaggaaaagaaaaataagaaacaagatggagctattgagaatcgcaacaaagcaaaagcccaggatggtgcagccatggaaatgcagccattgaagagtgaagaaggtggagatggtgatgaaaaagataaaaagaaagcaaatttgccaaaaaaggaaaaatctgttttacaagggaaacttacaaaactggctgttcagattggcaaagcaggtctgttgatgtctgccatcacagttatcattctagtattatattttgtcattgacaccttctgggttcagaaaagaccatggcttgctgagtgcacaccaatttatatacaatactttgtgaagttcttcattattggagttacagttttagtggtcgcagtgccagaaggtcttccacttgcagtcacgatctcactggcttattcagtcaaaaaaatgatgaaagataataacttagtaaggcatctggatgcttgtgaaaccatgggaaatgctacagctatttgttcagataaaacaggaactttgacaatgaacagaatgacagtcgttcaagcttacataaatgaaaaacattataaaaaggttcctgaaccagaagctattccaccaaatattttgtcctatcttgtaacaggaatttctgtgaattgtgcttatacatcaaaaatattgccaccagagaaagagggtggattacctcgtcacgttggtaataaaactgaatgtgccttgttgggacttcttttggatttaaaacgggattatcaggatgttagaaatgaaataccagaagaagcactgtacaaagtctacaccttcaattctgttaggaagtccatgagtactgtcctgaaaaattcagatggaagttatcgaatattcagcaagggtgcatctgagataattctgaaaaagtgtttcaaaatcttgagtgctaatggtgaggcaaaagtattcagaccaagggaccgtgatgatattgtaaaaactgtgattgaaccgatggcatcagaaggcttgagaaccatatgtcttgcattcagagattttccagcaggagaaccagaaccagagtgggataatgaaaatgatattgtcaccggccttacatgcattgctgttgtggggattgaagatcctgtgagacctgaggtgccagatgcaattaaaaagtgtcagagggctggaattactgtgcggatggtcactggtgataatattaatactgctcgggccattgctaccaaatgtggtattttacatcctggggaagattttctgtgcctagaaggtaaagattttaacagaagaatacgaaatgaaaaaggagagattgagcaagagaggatagacaagatttggccaaaacttcgagtacttgcaagatcatctcctactgataagcatacactggttaaaggtataattgacagcactgtctcagaccaacgccaggttgtagctgtaactggtgatggtacaaatgatggcccagcactaaagaaagcagatgttggatttgcaatgggtattgctggaactgatgtagctaaagaagcatccgatattattctcacagatgacaactttacaagcattgttaaagcagttatgtggggacgaaatgtctatgacagcatctcaaaattccttcagttccaacttactgttaatgtagtagcagtgattgttgcttttacgggcgcctgcattactcaagactcaccgcttaaggctgtgcagatgctgtgggtaaacctcataatggatacactcgcttccctggctctggcaacggaaccacccactgagtctctcttgcttcggaaaccttatggtagaaataagcctctcatctcacgtacaatgatgaagaatattttgggtcatgcattctatcaacttgtagtagtctttacactcttatttgctggagaaaagttttttgacattgatagtggaagaaatgctcctttgcatgctcctccttcagaacattatactattgtttttaatacctttgtgctgatgcaacttttcaacgaaataaatgcccggaaaattcatggtgaaagaaatgtattcgaaggaatctttaacaatgccatcttctgcacaattgttttaggcacttttgtggtacagataataattgtgcagtttggtggaaaacctttcagttgttcagaactttcaatagaacagtggctatggtcaatattcctaggaatgggaacattactctggggccagcttatttcaacaattccaactagccgtttaaaattcctcaaagaagctggtcatggaacacaaaaggaagaaatacctgaggaggaattagcagaggatgttgaagagattgatcacgctgaaagggagttgcggcgtggccaaatcttgtggtttagaggtctgaacagaatccaaacacagattcgagtggtgaatgcatttcgtagttctttatatgaagggttagaaaaaccggaatcaagaagttcgattcacaactttatgacacatcctgagtttaggatagaagattcagagcctcatatcccccttattgatgacactgatgccgaagatgatgctcctacaaaacgtaactccagtcctccaccctctcccaacaaaaataacaatgctgttgacagtggaattcaccttacaatagaaatgaacaagtctgctacctcttcatccccaggaagcccactacatagtttggaaacatcactctgattgtaagctgaatgttaacacactagctgcattgtaaagaaacaaattgaaactgggtcttttcacatattgtgatggacaagctagtattcttgtctttggacttcaacagaagacacacttgtacgaatgtagatttatttttttaaaaaaaaaaaagcaaagctttctgccagactgagggtgctttttggggggtgggagaaatgaactgacagataaacagtaactcagcgtaagtgacctgtggatcatcagtagtacccaagcatggtcctgaacagtgtattagcagagctttagtttatctcagtcctggatgggagagagagggaggagtaaaactgggcaagacaaagagccctggatcgttgaattgatagtttaatttctgctgttggctgttaataatttggattatttatgtttataaatgatacagatctgtttacaaggtttgtagatactttttttgttcctgttcatagatgggaagcttccttataactgatgcagagaaaaattagtccttcaaatactgctgtattttcaggaaaaaaaaaaaaaggggtgtttctattgaaactgtactaaatttttgcctacaatttaccttgttaaatattgtagataaattgctaatactaatagccaaatagataacactaatgctttgtttaaaaaaacgaaaaaaacaaaacaaaacaaaaaaacatgagcagtggtgttctaatgaagttatgacatctgtcctaattagtttcttaaatacatttactacttaatggttttgaagcaactgtttaatttttaaaatttttgaaaacttgctaataaccttttgttcagaatttagtagattgtttaatgcaggacatcaactacataatgaaagatgcttgaaatgcttttgttatttcaggcaaatcaaattaaatcagactatcaaactacaagagaaccttagtcttttttgtttttgtctaaacatgttagtttagtgatgtcttggtgaactgtgagtgaactgtattgatttttctaatctttagagaccttcacacagcatgagggctgttggcattttgaaaaaggttaataagtagaagcatacatgttttccttttgtttttgaaacttgtttgtaaacataaataaatatgcccttttattaaataaattcatggcaatgtttttttaaaagacatttcagcttctttactcagttctgcatatacagtgcatcagtctgttctctttgaccacaattggaatacatttcaagatggtaacagccccatgaagtaccgctttaattccttgctggtaatctaatagaatcagattaagaaaattaacacaattttaccatttgacatactcttcattgaatttagtttgtctaaaatagtctcacaggtaaaaaacataacaacaatgaccaccattgtctttgatacatttattttaattcttaagtggccaaataacagattaggtaaaatgagattacatgaaaaggttctaaaatgatatatttagatgcaataattaaccatatgctagaatgcccacctctaagccaattggattctttagctctctttttctttccttcatctaccttcttctcttttttgcctctgtctttaccctttagaaactggcatgtgttagggcccagatttcaccagatacacaatcctcaggctgacataaagtttacgaggactgctactataactgagagtgctgaccaagcaaagaaacatttagttgatggtgcttgatatttttggtgggtgggggaaatctttttctcaccatcaaatctttgcagtaatcctctgcaggtcttagaaacacattggctctgtcagcatttgtaattgtacatttattcatcaggtatttatagtgaatcatactgtaaaaaagaggtagcatgatatgctggaaagcatattagactaggagtcaagacctggtttctagtcttggttttgccattaatgtgctgcatgatcttgggaaaatcatttaccctaaataagggtggtggactatcttgaagaaccctttcaactctaaaaattgaccctatcaactggagagcccacaaggcatagggaatagagaaaagggaaatgttttcagttttcttttttattttggttatgcttaaatatgaatgtaattaccaaaagatttagaagtgcatgtgctttggaggatttgtattgagcttttacagtattcatttttcaactcaaggcaatggctttctacaccaactctaatccataaacgggtcttatgacatctatgaagtagtagcaagacatgcttagtgtgtatttctctctttgagacactgtaatttctaccagaaatttccagagcattatgtaggtagaaaaaaatgcaagcaagctgttaaagatcttggatcccattatatagtatgtatagctgaaatctgtaattcaatcactttttctcttttatcctctaaccaaaaaattgtttaattttgcatcccaaatgtttttaatctttgtatattttttaaaaatccttttctcctcatcattgccttttttgtggttgtaaatagacttacttgcactttgaagatgagttactccttgtcatcttacaaatatgtgatatggtaattttcataacagatgtcagttttgaaccaagaattggtgatttgtttataagaaaaaaactggcttcatttctgtgaaattgctctttgaaaatttctttttacacgtgtaagccaactgagataccgtgatggtgttgatttctttcaatgatgcttaccatctattttagccactgagccttttattatttgtctatttgtaaagtttatttgtcttaactcatttaataaatatactgtttatctgtttctgaaaaaaaaaaaaaaaaaaa

SEQ ID NO: 29203 - DNA, 3537 bp, Homo Sapiens
ggcccctcgagcctcgaaccggaacctccaaatccgagacgctctgcttatgaggacctcgaaatatgccggccagtgaaaaaatcttgtggctttgagggcttttggttggccaggggcagtaaaaatctcggagagctgacaccaagtcctcccctgccacgtagcagtggtaaagtccgaagctcaaattccgagaattgagctctgttgattcttagaactggggttcttagaagtggtgatgcaagaagtttctaggaaaggccggacaccaggttttgagcaaaattttggactgtgaagcaaggcattggtgaagacaaaatggcctcgccggctgacagctgtatccagttcacccgccatgccagtgatgttcttctcaaccttaatcgtctccggagtcgagacatcttgactgatgttgtcattgttgtgagccgtgagcagtttagagcccataaaacggtcctcatggcctgcagtggcctgttctatagcatctttacagaccagttgaaatgcaaccttagtgtgatcaatctagatcctgagatcaaccctgagggattctgcatcctcctggacttcatgtacacatctcggctcaatttgcgggagggcaacatcatggctgtgatggccacggctatgtacctgcagatggagcatgttgtggacacttgccggaagtttattaaggccagtgaagcagagatggtttctgccatcaagcctcctcgtgaagagttcctcaacagccggatgctgatgccccaagacatcatggcctatcggggtcgtgaggtggtggagaacaacctgccactgaggagcgcccctgggtgtgagagcagagcctttgcccccagcctgtacagtggcctgtccacaccgccagcctcttattccatgtacagccacctccctgtcagcagcctcctcttctccgatgaggagtttcgggatgtccggatgcctgtggccaaccccttccccaaggagcgggcactcccatgtgatagtgccaggccagtccctggtgagtacagccggccgactttggaggtgtcccccaatgtgtgccacagcaatatctattcacccaaggaaacaatcccagaagaggcacgaagtgatatgcactacagtgtggctgagggcctcaaacctgctgccccctcagcccgaaatgccccctacttcccttgtgacaaggccagcaaagaagaagagagaccctcctcggaagatgagattgccctgcatttcgagccccccaatgcacccctgaaccggaagggtctggttagtccacagagcccccagaaatctgactgccagcccaactcgcccacagagtcctgcagcagtaagaatgcctgcatcctccaggcttctggctcccctccagccaagagccccactgaccccaaagcctgcaactggaagaaatacaagttcatcgtgctcaacagcctcaaccagaatgccaaaccagaggggcctgagcaggctgagctgggccgcctttccccacgagcctacacggccccacctgcctgccagccacccatggagcctgagaaccttgacctccagtccccaaccaagctgagtgccagcggggaggactccaccatcccacaagccagccggctcaataacatcgttaacaggtccatgacgggctctccccgcagcagcagcgagagccactcaccactctacatgcaccccccgaagtgcacgtcctgcggctctcagtccccacagcatgcagagatgtgcctccacaccgctggccccacgttccctgaggagatgggagagacccagtctgagtactcagattctagctgtgagaacggggccttcttctgcaatgagtgtgactgccgcttctctgaggaggcctcactcaagaggcacacgctgcagacccacagtgacaaaccctacaagtgtgaccgctgccaggcctccttccgctacaagggcaacctcgccagccacaagaccgtccataccggtgagaaaccctatcgttgcaacatctgtggggcccagttcaaccggccagccaacctgaaaacccacactcgaattcactctggagagaagccctacaaatgcgaaacctgcggagccagatttgtacaggtggcccacctccgtgcccatgtgcttatccacactggtgagaagccctatccctgtgaaatctgtggcacccgtttccggcaccttcagactctgaagagccacctgcgaatccacacaggagagaaaccttaccattgtgagaagtgtaacctgcatttccgtcacaaaagccagctgcgacttcacttgcgccagaagcatggcgccatcaccaacaccaaggtgcaataccgcgtgtcagccactgacctgcctccggagctccccaaagcctgctgaagcatggagtgttgatgctttcgtctccagccccttctcagaatctacccaaaggatactgtaacactttacaatgttcatcccatgatgtagtgcctctttcatccactagtgcaaatcatagctgggggttgggggtggtgggggtcggggcctgggggactgggagccgcagcagctccccctcccccactgccataaaacattaagaaaatcatattgcttcttctcctatgtgtaaggtgaaccatgtcagcaaaaagcaaaatcattttatatgtcaaagcaggggagtatgcaaaagttctgacttgactttagtctgcaaaatgaggaatgtatatgttttgtgggaacagatgtttcttttgtatgtaaatgtgcattcttttaaaagacaagacttcagtatgttgtcaaagagagggctttaatttttttaaccaaaggtgaaggaatatatggcagagttgtaaatatataaatatatatatatataaaataaatatatataaacctaacaaagatatattaaaaatataaaactgcgttaaaggctcgattttgtatctgcaggcagacacggatctgagaatctttattgagaaagagcacttaagagaatattttaagtattgcatctgtataagtaagaaaatattttgtctaaaatgcctcagtgtatttgtatttttttgcaagtgaaggtttacaatttacaaagtgtgtattaaaaaaaacaaaaagaacaaaaaaatctgcagaaggaaaaatgtgtaattttgttctagttttcagtttgtatatacccgtacaacgtgtcctcacggtgccttttttcacggaagttttcaatgatgggcgagcgtgcaccatccctttttgaagtgtaggcagacacagggacttgaagttgttactaactaaactctctttgggaatgtttgtctcatcccattctgcgtcatgcttgtgttataactactccggagacagggtttggctgtgtctaaactgcattaccgcgttgtaaaatatagctgtacaaatataagaataaaatgttgaaaagtcaaactggaaaaaaaa

SEQ ID NO: 29204 - DNA, 5480 bp, Homo Sapiens
tatatccgtggtttcctgctacctccaaccatgggccttttgggaatactttgttttttaatcttcctggggaaaacctggggacaggagcaaacatatgtcatttcagcaccaaaaatattccgtgttggagcatctgaaaatattgtgattcaagtttatggatacactgaagcatttgatgcaacaatctctattaaaagttatcctgataaaaaatttagttactcctcaggccatgttcatttatcctcagagaataaattccaaaactctgcaatcttaacaatacaaccaaaacaattgcctggaggacaaaacccagtttcttatgtgtatttggaagttgtatcaaagcatttttcaaaatcaaaaagaatgccaataacctatgacaatggatttctcttcattcatacagacaaacctgtttatactccagaccagtcagtaaaagttagagtttattcgttgaatgacgacttgaagccagccaaaagagaaactgtcttaactttcatagatcctgaaggatcagaagttgacatggtagaagaaattgatcatattggaattatctcttttcctgacttcaagattccgtctaatcctagatatggtatgtggacgatcaaggctaaatataaagaggacttttcaacaactggaaccgcatattttgaagttaaagaatatgtcttgccacatttttctgtctcaatcgagccagaatataatttcattggttacaagaactttaagaattttgaaattactataaaagcaagatatttttataataaagtagtcactgaggctgacgtttatatcacatttggaataagagaagacttaaaagatgatcaaaaagaaatgatgcaaacagcaatgcaaaacacaatgttgataaatggaattgctcaagtcacatttgattctgaaacagcagtcaaagaactgtcatactacagtttagaagatttaaacaacaagtacctttatattgctgtaacagtcatagagtctacaggtggattttctgaagaggcagaaatacctggcatcaaatatgtcctctctccctacaaactgaatttggttgctactcctcttttcctgaagcctgggattccatatcccatcaaggtgcaggttaaagattcgcttgaccagttggtaggaggagtcccagtaacactgaatgcacaaacaattgatgtaaaccaagagacatctgacttggatccaagcaaaagtgtaacacgtgttgatgatggagtagcttcctttgtgcttaatctcccatctggagtgacggtgctggagtttaatgtcaaaactgatgctccagatcttccagaagaaaatcaggccagggaaggttaccgagcaatagcatactcatctctcagccaaagttacctttatattgattggactgataaccataaggctttgctagtgggagaacatctgaatattattgttacccccaaaagcccatatattgacaaaataactcactataattacttgattttatccaagggcaaaattatccactttggcacgagggagaaattttcagatgcatcttatcaaagtataaacattccagtaacacagaacatggttccttcatcccgacttctggtctattacatcgtcacaggagaacagacagcagaattagtgtctgattcagtctggttaaatattgaagaaaaatgtggcaaccagctccaggttcatctgtctcctgatgcagatgcatattctccaggccaaactgtgtctcttaatatggcaactggaatggattcctgggtggcattagcagcagtggacagtgctgtgtatggagtccaaagaggagccaaaaagcccttggaaagagtatttcaattcttagagaagagtgatctgggctgtggggcaggtggtggcctcaacaatgccaatgtgttccacctagctggacttaccttcctcactaatgcaaatgcagatgactcccaagaaaatgatgaaccttgtaaagaaattctcaggccaagaagaacgctgcaaaagaagatagaagaaatagctgctaaatataaacattcagtagtgaagaaatgttgttacgatggagcctgcgttaataatgatgaaacctgtgagcagcgagctgcacggattagtttagggccaagatgcatcaaagctttcactgaatgttgtgtcgtcgcaagccagctccgtgctaatatctctcataaagacatgcaattgggaaggctacacatgaagaccctgttaccagtaagcaagccagaaattcggagttattttccagaaagctggttgtgggaagttcatcttgttcccagaagaaaacagttgcagtttgccctacctgattctctaaccacctgggaaattcaaggcgttggcatttcaaacactggtatatgtgttgctgatactgtcaaggcaaaggtgttcaaagatgtcttcctggaaatgaatataccatattctgttgtacgaggagaacagatccaattgaaaggaactgtttacaactataggacttctgggatgcagttctgtgttaaaatgtctgctgtggagggaatctgcacttcggaaagcccagtcattgatcatcagggcacaaagtcctccaaatgtgtgcgccagaaagtagagggctcctccagtcacttggtgacattcactgtgcttcctctggaaattggccttcacaacatcaatttttcactggagacttggtttggaaaagaaatcttagtaaaaacattacgagtggtgccagaaggtgtcaaaagggaaagctattctggtgttactttggatcctaggggtatttatggtaccattagcagacgaaaggagttcccatacaggatacccttagatttggtccccaaaacagaaatcaaaaggattttgagtgtaaaaggactgcttgtaggtgagatcttgtctgcagttctaagtcaggaaggcatcaatatcctaacccacctccccaaagggagtgcagaggcggagctgatgagcgttgtcccagtattctatgtttttcactacctggaaacaggaaatcattggaacatttttcattctgacccattaattgaaaagcagaaactgaagaaaaaattaaaagaagggatgttgagcattatgtcctacagaaatgctgactactcttacagtgtgtggaagggtggaagtgctagcacttggttaacagcttttgctttaagagtacttggacaagtaaataaatacgtagagcagaaccaaaattcaatttgtaattctttattgtggctagttgagaattatcaattagataatggatctttcaaggaaaattcacagtatcaaccaataaaattacagggtaccttgcctgttgaagcccgagagaacagcttatatcttacagcctttactgtgattggaattagaaaggctttcgatatatgccccctggtgaaaatcgacacagctctaattaaagctgacaactttctgcttgaaaatacactgccagcccagagcacctttacattggccatttctgcgtatgctctttccctgggagataaaactcacccacagtttcgttcaattgtttcagctttgaagagagaagctttggttaaaggtaatccacccatttatcgtttttggaaagacaatcttcagcataaagacagctctgtacctaacactggtacggcacgtatggtagaaacaactgcctatgctttactcaccagtctgaacttgaaagatataaattatgttaacccagtcatcaaatggctatcagaagagcagaggtatggaggtggcttttattcaacccaggacacaatcaatgccattgagggcctgacggaatattcactcctggttaaacaactccgcttgagtatggacatcgatgtttcttacaagcataaaggtgccttacataattataaaatgacagacaagaatttccttgggaggccagtagaggtgcttctcaatgatgacctcattgtcagtacaggatttggcagtggcttggctacagtacatgtaacaactgtagttcacaaaaccagtacctctgaggaagtttgcagcttttatttgaaaatcgatactcaggatattgaagcatcccactacagaggctacggaaactctgattacaaacgcatagtagcatgtgccagctacaagcccagcagggaagaatcatcatctggatcctctcatgcggtgatggacatctccttgcctactggaatcagtgcaaatgaagaagacttaaaagcccttgtggaaggggtggatcaactattcactgattaccaaatcaaagatggacatgttattctgcaactgaattcgattccctccagtgatttcctttgtgtacgattccggatatttgaactctttgaagttgggtttctcagtcctgccactttcacagtgtacgaataccacagaccagataaacagtgtaccatgttttatagcacttccaatatcaaaattcagaaagtctgtgaaggagccgcgtgcaagtgtgtagaagctgattgtgggcaaatgcaggaagaattggatctgacaatctctgcagagacaagaaaacaaacagcatgtaaaccagagattgcatatgcttataaagttagcatcacatccatcactgtagaaaatgtttttgtcaagtacaaggcaacccttctggatatctacaaaactggggaagctgttgctgagaaagactctgagattaccttcattaaaaaggtaacctgtactaacgctgagctggtaaaaggaagacagtacttaattatgggtaaagaagccctccagataaaatacaatttcagtttcaggtacatctaccctttagattccttgacctggattgaatactggcctagagacacaacatgttcatcgtgtcaagcatttttagctaatttagatgaatttgccgaagatatctttttaaatggatgctaaaattcctgaagttcagctgcatacagtttgcacttatggactcctgttgttgaagttcgtttttttgttttcttctttttttaaacattcatagctggtcttatttgtaaagctcactttacttagaattagtggcacttgcttttattagagaatgatttcaaatgctgtaactttctgaaataacatggccttggagggcatgaagacagatactcctccaaggttattggacaccggaaacaataaattggaacacctcctcaaacctaccactcaggaatgtttgctggggccgaaagaacagtccattgaaagggagtattacaaaaacatggcctttgcttgaaagaaaataccaaggaacaggaaactgatcattaaagcctgagtttgctttcaaaaaaaaaaaaaaaaaa

SEQ ID NO: 29205 - DNA, 6190 bp, Homo Sapiens
ctttgggcctcataaacaaccacagaaccacaagttgggtagcctggcagtgtcagaagtctgaacccagcatagtggtcagcaggcaggacgaatcacactgaatgcaaaccacagggtttcgcagcgtggtgagcatcaccaacccacagccaaggcggcgctggctttttttttttttttaatctttaacaatttgaatatttgtttttacaaaggtgcattttttaatagggcttggggagtcccagaggtatccagcagaggggagaagaaagagagatgtagggctagaggggtgaggctgaaacagtgacctgtcttggttttcgctccgaaggtaaaagaaatcattgagtcccccgccttcagaagagggtgcattttcaggaggaagcgatggcttcagacagcatatttgagtcatttccttcgtacccacagtgcttcatgagagaatgcatacttggaatgaatccttctagagacgtccacgatgccagcacgagccgccgcttcacgccgccttccaccgcgctgagcccaggcaagatgagcgaggcgttgccgctgggcgccccggacgccggcgctgccctggccggcaagctgaggagcggcgaccgcagcatggtggaggtgctggccgaccacccgggcgagctggtgcgcaccgacagccccaacttcctctgctccgtgctgcctacgcactggcgctgcaacaagaccctgcccatcgctttcaaggtggtggccctaggggatgttccagatggcactctggtcactgtgatggctggcaatgatgaaaactactcggctgagctgagaaatgctaccgcagccatgaagaaccaggttgcaagatttaatgacctcaggtttgtcggtcgaagtggaagagggaaaagcttcactctgaccatcactgtcttcacaaacccaccgcaagtcgccacctaccacagagccatcaaaatcacagtggatgggccccgagaacctcgaagacatcggcagaaactagatgatcagaccaagcccgggagcttgtccttttccgagcggctcagtgaactggagcagctgcggcgcacagccatgagggtcagcccacaccacccagcccccacgcccaaccctcgtgcctccctgaaccactccactgcctttaaccctcagcctcagagtcagatgcaggatacaaggcagatccaaccatccccaccgtggtcctacgatcagtcctaccaatacctgggatccattgcctctccttctgtgcacccagcaacgcccatttcacctggacgtgccagcggcatgacaaccctctctgcagaactttccagtcgactctcaacggcacccgacctgacagcgttcagcgacccgcgccagttccccgcgctgccctccatctccgacccccgcatgcactatccaggcgccttcacctactccccgacgccggtcacctcgggcatcggcatcggcatgtcggccatgggctcggccacgcgctaccacacctacctgccgccgccctaccccggctcgtcgcaagcgcagggaggcccgttccaagccagctcgccctcctaccacctgtactacggcgcctcggccggctcctaccagttctccatggtgggcggcgagcgctcgccgccgcgcatcctgccgccctgcaccaacgcctccaccggctccgcgctgctcaaccccagcctcccgaaccagagcgacgtggtggaggccgagggcagccacagcaactcccccaccaacatggcgccctccgcgcgcctggaggaggccgtgtggaggccctactgaggcgccaggcctggcccggctgggccccgcgggccgccgccttcgcctccgggcgcgcgggcctcctgttcgcgacaagcccgccgggatcccgggccctgggcccggccaccgtcctggggccgagggcgcccgacggccaggatctcgctgtaggtcaggcccgcgcagcctcctgcgcccagaagcccacgccgccgccgtctgctggcgccccggccctcgcggaggtgtccgaggcgacgcacctcgagggtgtccgccggccccagcacccaggggacgcgctggaaagcaaacaggaagattcccggagggaaactgtgaatgcttctgatttagcaatgctgtgaataaaaagaaagattttatacccttgacttaactttttaaccaagttgtttattccaaagagtgtggaattttggttggggtggggggagaggagggatgcaactcgccctgtttggcatctaattcttatttttaatttttccgcaccttatcaattgcaaaatgcgtatttgcatttgggtggtttttatttttatatacgtttatataaatatatataaattgagcttgcttctttcttgctttgaccatggaaagaaatatgattcccttttctttaagttttatttaacttttcttttggacttttgggtagttgtttttttttgttttgttttgtttttttgagaaacagctacagctttgggtcatttttaactactgtattcccacaaggaatccccagatatttatgtatcttgatgttcagacatttatgtgttgataattttttaattatttaaatgtacttatattaagaaaaatatcaagtactacattttcttttgttcttgatagtagccaaagttaaatgtatcacattgaagaaggctagaaaaaaagaatgagtaatgtgatcgcttggttatccagaagtattgtttacattaaactccctttcatgttaatcaaacaagtgagtagctcacgcagcaacgtttttaataggatttttagacactgagggtcactccaaggatcagaagtatggaattttctgccaggctcaacaagggtctcatatctaacttcctccttaaaacagagaaggtcaatctagttccagagggttgaggcaggtgccaataattacatctttggagaggatttgatttctgcccagggatttgctcaccccaaggtcatctgataatttcacagatgctgtgtaacagaacacagccaaagtaaactgtgtaggggagccacatttacataggaaccaaatcaatgaatttaggggttacgattatagcaatttaagggccaccagaagcaggcctcgaggagtcaatttgcctctgtgtgcctcagtggagacaagtgggaaaacatggtcccacctgtgcgagaccccctgtcctgtgctgctcactcaacaacatctttgtgttgctttcaccaggctgagaccctaccctatggggtatatgggcttttacctgtgcaccagtgtgacaggaaagattcatgtcactactgtccgtggctacaattcaaaggtatccaatgtcgctgtaaattttatggcactatttttattggaggatttggtcagaatgcagttgttgtacaactcataaatactaactgctgattttgacacatgtgtgctccaaatgatctggtggttatttaacgtacctcttaaaattcgttgaaacgatttcaggtcaactctgaagagtatttgaaagcaggacttcagaacagtgtttgatttttattttataaatttaagcattcaaattaggcaaatctttggctgcaggcagcaaaaacagctggacttatttaaaacaacttgtttttgagttttcttatatatatattgattatttgttttacacacatgcagtagcactttggtaagagttaaagagtaaagcagcttatgttgtcaggtcgttcttatctagagaagagctatagcagatctcggacaaactcagaatatattcactttcatttttgacaggattccctccacaactcagtttcatatattattccgtattacatttttgcagctaaattaccataaaatgtcagcaaatgtaaaaatttaatttctgaaaagcaccattagcccatttcccccaaattaaacgtaaatgttttttttcagcacatgttaccatgtctgacctgcaaaaatgctggagaaaaatgaaggaaaaaattatgtttttcagtttaattctgttaactgaagatattccaactcaaaaccagcctcatgctctgattagataatcttttacattgaacctttactctcaaagccatgtgtggagggggcttgtcactattgtaggctcactggattggtcatttagagtttcacagactcttaccagcatatatagtatttaattgtttcaaaaaaaatcaaactgtagttgttttggcgataggtctcacgcaacacatttttgtatgtgtgtgtgtgtgcgtgtgtgtgtgtgtgtgtgaaaaattgcattcattgacttcaggtagattaaggtatctttttattcattgccctcaggaaagttaaggtatcaatgagacccttaagccaatcatgtaataactgcatgtgtctggtccaggagaagtattgaataagccatttctactgcttactcatgtccctatttatgatttcaacatggatacatatttcagttctttctttttctcactatctgaaaatacatttccctccctctcttccccccaatatctccctttttttctctcttcctctatcttccaaaccccactttctccctcctccttttcctgtgttctcttaagcagatagcacatacccccacccagtaccaaatttcagaacacaagaaggtccagttcttcccccttcacataaaggaacatggtttgtcagcctttctcctgtttatgggtttcttccagcagaacagagacattgccaaccatattggatctgcttgctgtccaaaccagcaaactttcctgggcaaatcacaatcagtgagtaaatagacagcctttctgctgccttgggtttctgtgcagataaacagaaatgctctgattagaaaggaaatgaatggttccactcaaatgtcctgcaatttaggattgcagatttctgccttgaaatacctgtttctttgggacattccgtcctgatgatttttatttttgttggtttttatttttggggggaatgacatgtttgggtcttttatacatgaaaatttgtttgacaataatctcacaaaacatattttacatctgaacaaaatgcctttttgtttaccgtagcgtatacatttgttttgggatttttgtgtgtttgttgggaattttgtttttagccaggtcagtattgatgaggctgatcatttggctctttttttccttccagaagagttgcatcaacaaagttaattgtatttatgtatgtaaatagattttaagcttcattataaaatattgttaatgcctataactttttttcaatttttttgtgtgtgtttctaaggactttttcttaggtttgctaaatactgtagggaaaaaaatgcttctttctactttgtttattttagactttaaaatgagctacttcttattcacttttgtaaacagctaatagcatggttccaattttttttaagttcactttttttgttctaggggaaatgaatgtgcaaaaaaagaaaaagaactgttggttatttgtgttattctggatgtataaaaatcaatggaaaaaaataaactttcaaattgaaatgacggtataacacatctactgaaaaagcaacgggaaatgtggtcctatttaagccagcccccacctagggtctatttgtgtggcagttattgggtttggtcacaaaacatcctgaaaattcgtgcgtgggcttctttctccctggtacaaacgtatggaatgcttcttaaaggggaactgtcaagctggtgtcttcagccagatgacatgagagaatatcccagaaccctctctccaaggtgtttctagatagcacaggagagcaggcactgcactgtccacagtccacggtacacagtcgggtgggccgcctcccctctcctgggagcattcgtcgtgcccagcctgagcagggcagctggactgctgctgttcaggagccaccagagccttcctctctttgtaccacagtttcttctgtaaatccagtgttacaatcagtgtgaatggcaaataaacagtttgacaagtacatacaccataaaaaaaaaaaaaaaa

SEQ ID NO: 29206 - DNA, 1207 bp, Homo Sapiens
acagagatcagcaaacagcttttctgagagaaagaaacatctgcaaatgacatgctgtttctgcagtttctgctgctagctcttcttctcccaggtggtgacaatgcagacgcatcccaggaacacgtctccttccatgtcatccagatcttctcatttgtcaaccaatcctgggcacgaggtcagggctcaggatggctggacgagttgcagactcatggctgggacagtgaatcaggcacaataattttcctgcataactggtccaagggcaacttcagcaatgaagagttgtcagacctagagttgttatttcgtttctacctctttggattaactcgggagattcaagaccatgcaagtcaagattactcgaaatatccctttgaagtacaggtgaaagcgggctgtgagctgcattctggaaagagcccagaaggcttctttcaggtagctttcaacggattagatttactgagtttccagaatacaacatgggtgccatctccaggctgtggaagtttggcccaaagtgtctgtcatctactcaatcatcagtatgaaggcgtcacagaaacagtgtataatctcataagaagcacttgcccccgatttctcttgggtctcctggatgcagggaagatgtatgtacacaggcaagtgaggccagaagcctggctgtccagtcgccccagccttgggtctggccagctgttgctggtttgtcatgcctccggcttctacccaaagcctgtttgggtgacatggatgcggaatgaacaggagcaactgggcactaaacatggtgatattcttcctaatgctgatgggacatggtatcttcaggtgatcctggaggtggcatctgaggagcctgctggcctgtcttgtcgagtgagacacagcagtctaggaggccaggacatcatcctctactggggacaccactcttccatgaattggattgccttggtagtgatagtgcccttggtgattctaatagtccttgtgttatggtttaagaagcactgctcatatcaggacatcctgtgagactcttccccctgactcccccattgtgttaagaacccagcaacccaggagcctagtacaatatagtgatgccatcccgtcgactctccatttaaattgtttctctttctgcataataaacatttgttaataaaaaccaaaaaaaaaaaaaaaa

SEQ ID NO: 29207 - DNA, 2329 bp, Homo Sapiens
gttttctacccaagaatgctacttcaggagatcagtcaaaaggttagggtgatggtgacggtggaaatatagaaaaaggaatttattcaagaggtattcaaaaagaagtgaaatagagatgagttggagatagattggataaaaagagtgagggagagggaggtgtcaggctgcagcccaggttctgagttgccaaagaggagtcttttcctccaggaaattgagacacgccggttgtgaaacctactgaagtgagcggcggcgccaggattcctgggaccccgacctctttgcagctcgcacagctaagggcgagggcgcccttcggcagaagcagcaaaccgccggcaagcccagcgaggagggctgccggggtctgggcttgggaattggctggcacccagcggaaagggacgtgagctgagcggcgggggagaagagtgcgcaggtcagagggcggcgcgcagcggcgctccgcgaggtccccacgccgggcgatatggggtgcctgctgtttctgctgctctgggcgctcctccaggcttggggaagcgctgaagtcccgcaaaggcttttccccctccgctgcctccagatctcgtccttcgccaatagcagctggacgcgcaccgacggcttggcgtggctgggggagctgcagacgcacagctggagcaacgactcggacaccgtccgctctctgaagccttggtcccagggcacgttcagcgaccagcagtgggagacgctgcagcatatatttcgggtttatcgaagcagcttcaccagggacgtgaaggaattcgccaaaatgctacgcttatcctatcccttggagctccaggtgtccgctggctgtgaggtgcaccctgggaacgcctcaaataacttcttccatgtagcatttcaaggaaaagatatcctgagtttccaaggaacttcttgggagccaacccaagaggccccactttgggtaaacttggccattcaagtgctcaaccaggacaagtggacgagggaaacagtgcagtggctccttaatggcacctgcccccaatttgtcagtggcctccttgagtcagggaagtcggaactgaagaagcaagtgaagcccaaggcctggctgtcccgtggccccagtcctggccctggccgtctgctgctggtgtgccatgtctcaggattctacccaaagcctgtatgggtgaagtggatgcggggtgagcaggagcagcagggcactcagccaggggacatcctgcccaatgctgacgagacatggtatctccgagcaaccctggatgtggtggctggggaggcagctggcctgtcctgtcgggtgaagcacagcagtctagagggccaggacatcgtcctctactggggtgggagctacacctccatgggcttgattgccttggcagtcctggcgtgcttgctgttcctcctcattgtgggctttacctcccggtttaagaggcaaacttcctatcagggcgtcctgtgactcgccttgccacatctgtgtctctggaacccaggacctctggacctcaggttcccaagacttcagtcctggtctgctcaggaattgaagatgtaaggaattgaagataggagagataccttgaaaaagtagagaacagtcatgaggcagctttcatcacacccttttaacatttatctaaaagaatttaaattctttttcaaaaattacactacaagtttataagcccaaatggctctgtgaaatcagaagtgcaaaggtgtgcaaacttgtatctgaagacctaccagggacaagcaggtaagagctgatgtgagtgtgtgtgatgggatctgtaaggaactggaacacacatgtcctatccaaaggaatcagctgcagctgcttgttgtcaagtataaagtcaggacctggcttggctttaaccgtttttcaagaaaactggaaatctggattttcagcgaacatgcctgattttaaaaggttgactcaagtttttacaaaatactatgtgggacacctcaaatacatacctactgactgatgacaaacccaggagtttgtgtgtcttttataaaaagtttgccctggatgtcatattggcagttggaggacacagtttctattgtaaatttggatttacgactgaagaaggacattttctctttaaaagaaagttaggttataagaaacagaggcgtctcacatttttacttggtgtaattaataaacgaagataaatcataaaaaaaaaaaaaaaaaaaaaaaaaaaaaaaaaaaaaaaaaaaaaaaaaaaaaaaaaaaaaaaaaaaaaaaaaaaaa

SEQ ID NO: 29208 - DNA, 1959 bp, Homo Sapiens
tctcacggagacggaccacagcaagcagaggctgggggggggaaagacgaggaaagaggaggaaaacaaaagctgctacttatggaagatacaaaggagtctaacgtgaagacattttgctccaagaatatcctagccatccttggcttctcctctatcatagctgtgatagctttgcttgctgtggggttgacccagaacaaagcattgccagaaaacgttaagtatgggattgtgctggatgcgggttcttctcacacaagtttatacatctataagtggccagcagaaaaggagaatgacacaggcgtggtgcatcaagtagaagaatgcagggttaaaggtcctggaatctcaaaatttgttcagaaagtaaatgaaataggcatttacctgactgattgcatggaaagagctagggaagtgattccaaggtcccagcaccaagagacacccgtttacctgggagccacggcaggcatgcggttgctcaggatggaaagtgaagagttggcagacagggttctggatgtggtggagaggagcctcagcaactacccctttgacttccagggtgccaggatcattactggccaagaggaaggtgcctatggctggattactatcaactatctgctgggcaaattcagtcagaaaacaaggtggttcagcatagtcccatatgaaaccaataatcaggaaacctttggagctttggaccttgggggagcctctacacaagtcacttttgtaccccaaaaccagactatcgagtccccagataatgctctgcaatttcgcctctatggcaaggactacaatgtctacacacatagcttcttgtgctatgggaaggatcaggcactctggcagaaactggccaaggacattcaggttgcaagtaatgaaattctcagggacccatgctttcatcctggatataagaaggtagtgaacgtaagtgacctttacaagaccccctgcaccaagagatttgagatgactcttccattccagcagtttgaaatccagggtattggaaactatcaacaatgccatcaaagcatcctggagctcttcaacaccagttactgcccttactcccagtgtgccttcaatgggattttcttgccaccactccagggggattttggggcattttcagctttttactttgtgatgaagtttttaaacttgacatcagagaaagtctctcaggaaaaggtgactgagatgatgaaaaagttctgtgctcagccttgggaggagataaaaacatcttacgctggagtaaaggagaagtacctgagtgaatactgcttttctggtacctacattctctccctccttctgcaaggctatcatttcacagctgattcctgggagcacatccatttcattggcaagatccagggcagcgacgccggctggactttgggctacatgctgaacctgaccaacatgatcccagctgagcaaccattgtccacacctctctcccactccacctatgtcttcctcatggttctattctccctggtccttttcacagtggccatcataggcttgcttatctttcacaagccttcatatttctggaaagatatggtatagcaaaagcagctgaaatatgctggctggagtgaggaaaaaaatcgtccagggagcattttcctccatcgcagtgttcaaggccatccttccctgtctgccagggccagtcttgacgagtgtgaagcttccttggcttttactgaagcctttcttttggaggtattcaatatcctttgcctcaaggacttcggcagatactgtctctttcatgagtttttcccagctacacctttctcctttgtactttgtgcttgtataggttttaaagacctgacacctttcataatctttgctttataaaagaacaatattgactttgtctagaaaaaaaaaaaaaaaaaaaaa

SEQ ID NO: 29209 - DNA, 5103 bp, Homo Sapiens
gggagcgcgcgtgcgcgcggccgtgcagcctgggcagtgggtcctgcctgtgacgcgcggcggcggtcggtcctgcctgtaacggcggcggcggctgctgctccagacacctgcggcggcggcggcgaccccgcggcgggcgcggagatgtggcccctggtagcggcgctgttgctgggctcggcgtgctgcggatcagctcagctactatttaataaaacaaaatctgtagaattcacgttttgtaatgacactgtcgtcattccatgctttgttactaatatggaggcacaaaacactactgaagtatacgtaaagtggaaatttaaaggaagagatatttacacctttgatggagctctaaacaagtccactgtccccactgactttagtagtgcaaaaattgaagtctcacaattactaaaaggagatgcctctttgaagatggataagagtgatgctgtctcacacacaggaaactacacttgtgaagtaacagaattaaccagagaaggtgaaacgatcatcgagctaaaatatcgtgttgtttcatggttttctccaaatgaaaatattcttattgttattttcccaatttttgctatactcctgttctggggacagtttggtattaaaacacttaaatatagatccggtggtatggatgagaaaacaattgctttacttgttgctggactagtgatcactgtcattgtcattgttggagccattcttttcgtcccaggtgaatattcattaaagaatgctactggccttggtttaattgtgacttctacagggatattaatattacttcactactatgtgtttagtacagcgattggattaacctccttcgtcattgccatattggttattcaggtgatagcctatatcctcgctgtggttggactgagtctctgtattgcggcgtgtataccaatgcatggccctcttctgatttcaggtttgagtatcttagctctagcacaattacttggactagtttatatgaaatttgtggcttccaatcagaagactatacaacctcctaggaaagctgtagaggaaccccttaatgcattcaaagaatcaaaaggaatgatgaatgatgaataactgaagtgaagtgatggactccgatttggagagtagtaagacgtgaaaggaatacacttgtgtttaagcaccatggccttgatgattcactgttggggagaagaaacaagaaaagtaactggttgtcacctatgagacccttacgtgattgttagttaagtttttattcaaagcagctgtaatttagttaataaaataattatgatctatgttgtttgcccaattgagatccagttttttgttgttatttttaatcaattaggggcaatagtagaatggacaatttccaagaatgatgcctttcaggtcctagggcctctggcctctaggtaaccagtttaaattggttcagggtgataactacttagcactgccctggtgattacccagagatatctatgaaaaccagtggcttccatcaaacctttgccaactcaggttcacagcagctttgggcagttatggcagtatggcattagctgagaggtgtctgccacttctgggtcaatggaataataaattaagtacaggcaggaatttggttgggagcatcttgtatgatctccgtatgatgtgatattgatggagatagtggtcctcattcttgggggttgccattcccacattcccccttcaacaaacagtgtaacaggtccttcccagatttagggtacttttattgatggatatgttttccttttattcacataaccccttgaaaccctgtcttgtcctcctgttacttgcttctgctgtacaagatgtagcaccttttctcctctttgaacatggtctagtgacacggtagcaccagttgcaggaaggagccagacttgttctcagagcactgtgttcacacttttcagcaaaaatagctatggttgtaacatatgtattcccttcctctgatttgaaggcaaaaatctacagtgtttcttcacttcttttctgatctggggcatgaaaaaagcaagattgaaatttgaactatgagtctcctgcatggcaacaaaatgtgtgtcaccatcaggccaacaggccagcccttgaatggggatttattactgttgtatctatgttgcatgataaacattcatcaccttcctcctgtagtcctgcctcgtactccccttcccctatgattgaaaagtaaacaaaacccacatttcctatcctggttagaagaaaattaatgttctgacagttgtgatcgcctggagtacttttagacttttagcattcgttttttacctgtttgtggatgtgtgtttgtatgtgcatacgtatgagataggcacatgcatcttctgtatggacaaaggtggggtacctacaggagagcaaaggttaattttgtgcttttagtaaaaacatttaaatacaaagttctttattgggtggaattatatttgatgcaaatatttgatcacttaaaacttttaaaacttctaggtaatttgccacgctttttgactgctcaccaataccctgtaaaaatacgtaattcttcctgtttgtgtaataagatattcatatttgtagttgcattaataatagttatttcttagtccatcagatgttcccgtgtgcctcttttatgccaaattgattgtcatatttcatgttgggaccaagtagtttgcccatggcaaacctaaatttatgacctgctgaggcctctcagaaaactgagcatactagcaagacagctcttcttgaaaaaaaaaatatgtatacacaaatatatacgtatatctatatatacgtatgtatatacacacatgtatattcttccttgattgtgtagctgtccaaaataataacatatatagagggagctgtattcctttatacaaatctgatggctcctgcagcactttttccttctgaaaatatttacattttgctaacctagtttgttactttaaaaatcagttttgatgaaaggagggaaaagcagatggacttgaaaaagatccaagctcctattagaaaaggtatgaaaatctttatagtaaaattttttataaactaaagttgtaccttttaatatgtagtaaactctcatttatttggggttcgctcttggatctcatccatccattgtgttctctttaatgctgcctgccttttgaggcattcactgccctagacaatgccaccagagatagtgggggaaatgccagatgaaaccaactcttgctctcactagttgtcagcttctctggataagtgaccacagaagcaggagtcctcctgcttgggcatcattgggccagttccttctctttaaatcagatttgtaatggctcccaaattccatcacatcacatttaaattgcagacagtgttttgcacatcatgtatctgttttgtcccataatatgctttttactccctgatcccagtttctgctgttgactcttccattcagttttatttattgtgtgttctcacagtgacaccatttgtccttttctgcaacaacctttccagctacttttgccaaattctatttgtcttctccttcaaaacattctcctttgcagttcctcttcatctgtgtagctgctcttttgtctcttaacttaccattcctatagtactttatgcatctctgcttagttctattagttttttggccttgctcttctccttgattttaaaattccttctatagctagagcttttctttctttcattctctcttcctgcagtgttttgcatacatcagaagctaggtacataagttaaatgattgagagttggctgtatttagatttatcactttttaatagggtgagcttgagagttttctttctttctgttttttttttttttttttttttttttttgactaatttcacatgctctaaaaaccttcaaaggtgattatttttctcctggaaactccaggtccattctgtttaaatccctaagaatgtcagaattaaaataacagggctatcccgtaattggaaatatttcttttttcaggatgctatagtcaatttagtaagtgaccaccaaattgttatttgcactaacaaagctcaaaacacgataagtttactcctccatctcagtaataaaaattaagctgtaatcaaccttctaggtttctcttgtcttaaaatgggtattcaaaaatggggatctgtggtgtatgtatggaaacacatactccttaatttacctgttgttggaaactggagaaatgattgtcgggcaaccgtttattttttattgtattttatttggttgagggatttttttataaacagttttacttgtgtcatattttaaaattactaactgccatcacctgctggggtcctttgttaggtcattttcagtgactaatagggataatccaggtaactttgaagagatgagcagtgagtgaccaggcagtttttctgcctttagctttgacagttcttaattaagatcattgaagaccagctttctcataaatttctctttttgaaaaaaagaaagcatttgtactaagctcctctgtaagacaacatcttaaatcttaaaagtgttgttatcatgactggtgagagaagaaaacattttgtttttattaaatggagcattatttacaaaaagccattgttgagaattagatcccacatcgtataaatatctattaaccattctaaataaagagaactccagtgttgctatgtgcaagatcctctcttggagcttttttgcatagcaattaaaggtgtgctatttgtcagtagccatttttttgcagtgatttgaagaccaaagttgttttacagctgtgttaccgttaaaggtttttttttttatatgtattaaatcaatttatcactgtttaaagctttgaatatctgcaatctttgccaaggtacttttttatttaaaaaaaaacataactttgtaaatattaccctgtaatattatatatacttaataaaacattttaagctaaaaaaaaaaaaa

SEQ ID NO: 29210 - DNA, 3750 bp, Homo Sapiens
ggcggcgcgcgcggccccggcgagcaggggaagccggtggccgcggctgcggaacgggcggaggctgccggtttcgtaaccgtcgctcctcctcgctgactcgcgggctgtgaggcctgggtcggctcgggccgcaccgcgcggggccgctcggagtggaggccgcctgggggcaggcgggctagaggagcaggtacatgtgaagattttttggcagcttagcgtggaaaccattgatcaccctgctctcatttctacctgttctgtgttggcaagggagagtgcccaaatgagcaagatatcgcagcaaaacagcactccaggggtgaacggaattagtgttatccatacccaggcacatgccagcggcttacagcaggttcctcagctggtgcctgctggccctgggggaggaggcaaagctgtggctcccagcaagcagagcaaaaagagttcgcccatggatcgaaacagtgacgagtatcggcaacgccgagagaggaacaacatggctgtgaaaaagagccggttgaaaagcaagcagaaagcacaagacacactgcagagagtcaatcagctcaaagaagagaatgaacggttggaagcaaaaatcaaattgctgaccaaggaattaagtgtactcaaagatttgtttcttgagcatgcacacaaccttgcagacaacgtacagtccattagcactgaaaatacgacagcagatggcgacaatgcaggacagtagacctcaccctttccagactttagagcttgtggcttgaatgttaaaggtgtgaccaccgacaccactcatgtcaatggctgaaagttgtccatttccatgactcaaagacccattggaggctattttctgggatcagcactgaagagttgattagctaaaaatgttagccttgtaattcgaatatctggttttaaatgatagaggtttttgtgggaatcaaaatcccccaaatgttaaggtatatggtaaaaaaagaaatatctgggatcccgatgttcttaataaatcctgacttcccaagaaatgcttcttttttaagttgacaaaaggaatggggaactggcaggccgcgcagaaggttcttggttttaatggataggctgaattggattaagaaaagttgaatgccacctatggtaatctatttgtgattttcttctaaattatgtattataaattcgtagagctatagaaagcaatgagtgtgtaatttggagtgattttatatatggcataaactttgttttaacataattagtactgttttcccccaaaagtacaagtttttgagtagcaatgtcaggttaagtaaagaaacttcatcacatcttataggtagtgtgtggccaattgacttaaaaaatacaaataacatttaggaagcaaatagattaaacacaaaaataaaactaaagcataggaattatgtttttgagatacctttgggcttagattggcattgttttattctaaaaacccaactcagtggtgtagagaaacttgtgtaccaaaattttagtttctgcagatgctagtgtttttttggatacaattttgacaaccaagttagtaaacaaaatatcttaacagtttgatgacacaagctactgatgagggtttggaatattaattcagaaggtagtttctcttgtgttcaaaatagctgccatggggctgttacttttaaagtcaaaattttcttctgaaggctcattttggtatttgatcttaaccaagtgattattagagaaatgtatcaactccatgccatctcccaaaataattgtctaagaaaacttgaaagtgtaaggttttaacctttaatttatttctcttaaatacatcttttgatattgttgttgtgacatttctttttctggttagtgggctttccagactttgtaccactgcttctgtttattcatttatatgcttttgtgtcccataaattatttcagaaaatgctgataaaactcaggatattgacatttttgttgagactaaaaaatggcagtcgctaaagtagggactctagagtctggcttacgtcagtgttggtagtttagattgtctttgtcaacgttttttcttctctcttttgctttcttttctttctctttttttcttagcacagttctagctcaaatttgtgtattttttgtgtgcctgggctggagatgagagactgagtcataactgatttaaaagtttgtgttatcaggtatcttatttgaacatggtcatttttggccacattgctgtttcatactaggacttgggatgatgtagccagaataaaactcaagttgcaccctccggttggtggaagattgctgaccgtgccgtttctgggcaggagaagacatcatggtgtccagcaactcagcaaagccattcttaagagtcgtgaggtccttctgaatgtaaaactggagcccaggagaagctgtcccaggagggctgttaactccctatagagccaggagacaggataggggtttctagggtccaacaccagcttaccttggagtatgaatctacccatgaaggatgagagatgttttgaaaaactagccaggacacacccacaggatcctactggctccttagcagctgattggtgttacataattaacttaattggagatgcattaggtcacttgaatgtataagcaagcacctatggtaggcgctacagacatttaaatctcttgggaattcgatgctcccatggaatttataccagttatatgaattgacttaagtatcttgaaaaagaaactttagagaaagcatcaggggtgtgtactcagtatttcaaatcagaacacaagattggaacttttggaaaaatgggttcaagctttcctattagccatggaaatgcaaagtttagcagaagcaagcaattaggcagagaacaaaaatgttaagcatggtgttgtctatcttattgaagtggttggaaatgaaagcttttaatttgatagatttatcagtataaaattagggaaaccacgtgtggggaatgaatcaatttagagcttcgggaattgtgaggtgacttttgtaacttttgttctgtgtgtgacctgtgaaccactaggatgtgatctgcccttgtgggcaggtccagcatagttaggagttaggctttagcataaatttctagctgcatctgagtctcctgggatgggtgctctttggctggttttggctgcggatggtgagatcagagcagctcttcctgctgctggcccctgcaatcagttgttgggatgccagtgcagatcactaagtagtaagattttaatcaaacacgaccaggtccgaaatgcaggtcatgagtgtgaaattctcaaatttacataaaaagtagaagtatagacagtttaacatttggtattaaaggagaggaaattgtagcagcttttcacgtttcccagtccccattagagggcttgagaccttgtacctgaacaacccattttgcactcagtgctttctgatgccttaggagaattgttttgtttcacaaaagctgggaaggaagaagtccattctgcagctgttagatctgcctctcaggaaaaagtactaacttgttctttttgttcctggctttcatcagtttgtgagatttctctattttttttaaatataattttatttctttcaacaaatataaaataaaaaacaactttggaacaatgaaaaaaaaaaaaaaa

SEQ ID NO: 29211 - DNA, 1190 bp, Homo Sapiens
gtcagcagccccgacagccgacagtcacagcagctctgacaagagcgttcctggagcccagctcctctccacagaccacaagcacccagcagagaccatgggccccccctcagccgctccccgtggagggcacaggccctggcaggggctcctgatcacagcctcacttttaaccttctgggacccgcccaccactgtccagttcactattgaagccctgccatccagtgctgcagagggaaaggatgttcttctactggcctgcaatatttcagaaactattcaagcctattattggcacaaggggaaaacggcagaagggagccctctcattgctggttatataacagacattcaagcaaatatcccaggggccgcatacagtggtcgagagcaagtataccccaatggatccctgctgttccaaaacatcaccctggaggacgcaggatcctacaccctacgaaccataaatgccagttacgactctgaccaagcaactggccagctccacgtacaccaaaacaacgtcccaggccttcctgtgggggccgtcgctggcatcgtgactggggtcctggttggggtggctctggtggccgccctggtgtgttttctgcttctctccaggactggaagggccagcatccagcgtgacctcagggagcagccgcccccagcctccacccctggccatggtccctctcacagatccaccttctcggcccctctacccagccccagaacagccactcccatctatgtggaatttctatactctgatgcaaacatttactgccagatcgaccacaaagcagatgtggtctcttaggttcctctgggagctgctcttgtgggttgatggagcgtcctcgaagctccagccctggggacggggaaggacatggagcctgagccagagaaccagctctgagtcctgaggagacacaggcctggggacagggagggatgggagtccctgctgaatatctggagaccctgacaggttgccctgggctccgggtgggccgggacaaaggcctctcatcaccacaggaagcgggggcttgcaaggaaagtgaatgggcctgtggcccacccggggtcaccaggaaaggatctgaataaagaggacccttcctctcattggctctttttctgctcacgggaacttagcagaaactcacctg

SEQ ID NO: 29212 - DNA, 3953 bp, Homo Sapiens
ggggtcacgggcgaactagaacactgggaaaggggctgcaggttccggaccggaccggccctgacccggaataatgagcaaggagggtgtggtgggttgaaagccatcctactttactcccgagttagagcatggattcagttttagtcttaagggggaagtgagattggagatttttatttttaattttgggcagaagcaggttgactctagggatctccagagcgagaggatttaacttcatgttgctcccgtgtttgaaggaggacaataaaagtcccaccgggcaaaattttcgtaacctctgcggtagaaaacgtcaggtatcttttaaatcgcgatagttttcgctgtgtcaggctttcttcggtggagctccgagggtagctaggttctaggtttgaaacagatgcagaatccaaaggcagcgcaaaaaacagccaccgattttgctatgtctctgagctgcgagataatcagacagctaaatggagtctgagcagctgttccatagaggctactatagaaacagctacaacagtataacaagtgcaagtagtgatgaggaacttttagatggagcaggtgttattatggactttcaaacatctgaagatgacaatttattagatggtgacactgcagttggaactcattatacaatgacaaatggaggcagcattaacagttctacacatttactggatcttttggatgaaccaattccaggtgttggtacatatgatgatttccatactattgattgggtgcgagaaaaatgtaaagacagagaaaggcatagacggatcaacagcaaaaagaaagaatcagcatgggaaatgacaaaaagtttgtatgatgcgtggtcaggatggctagtagtaacactaacaggattggcatcaggggcactggccggattaatagacattgctgccgattggatgactgacctaaaggagggcatttgccttagtgcgttgtggtacaaccacgaacagtgctgttggggatctaatgaaacaacatttgaagagagggataaatgtccacagtggaaaacatgggcagaattaatcataggtcaagcagagggtcctggttcttatatcatgaactacataatgtacatcttctgggccttgagttttgcctttcttgcagtttccctggtaaaggtatttgctccatatgcctgtggctctggaattccagagattaaaactattttaagtggattcatcatcagaggttacttgggaaaatggactttaatgattaaaaccatcacattagtcctggctgtggcatcaggtttgagtttaggaaaagaaggtcccctggtacatgttgcctgttgctgcggaaatatcttttcctacctctttccaaagtatagcacaaacgaagctaaaaaaagggaggtgctatcagctgcctcagctgcaggggtttctgtagcttttggtgcaccaattggaggagttctttttagcctggaagaggttagctattattttcctctcaaaactttatggagatcattttttgctgctttagtggctgcatttgttttgaggtccatcaatccatttggtaacagccgtctggtccttttttatgtggagtatcatacaccatggtacctttttgaactgtttccttttattcttctaggggtatttggagggctttggggagcctttttcattagggcaaatattgcctggtgtcgtcgacgcaagtccacgaaatttggaaagtatcccgttctggaagtcattattgttgcagccattactgctgtgatagccttccctaatccatacactaggctaaacaccagtgaactgatcaaagagctttttacagactgtggtcccctggaatcctcttctctttgtgactacagaaatgacatgaatgccagtaaaattgtcgatgacattcctgatcgtccagcaggcattggagtatattcagctatatggcagttatgcctggcactcatatttaaaatcataatgacagtattcacttttggcatcaaggttccatcaggcttgttcatccccagcatggccattggagcgatcgcaggaaggattgtggggattgcggtggagcagcttgcctactatcaccacgactggtttatctttaaggagtggtgtgaggtcggggctgattgcattacacctggcctttatgccatggttggtgctgctgcatgcttaggtggtgtgacaagaatgactgtctccctggtggttattgtttttgagcttactggaggcttggaatatattgttccccttatggctgcagtcatgaccagtaaatgggttggagatgcctttggcagggaaggcatttatgaagcacacatccgattaaatggataccctttcttggatgcaaaagaagaattcgaattcactcataccaccctggctgctgacgttatgagacctcgaaggaatgatcctcccttagctgtcctgacacaggacaatatgacagtggatgatatagaaaacatgattaatgaaaccagctacaatggatttcctgtcataatgtcaaaagaatctcagagattagtgggatttgccctcagaagagacctgacaattgcaatagaaagtgccaggaaaaaacaagaaggtatcgttggcagttctcgggtgtgttttgcacagcacaccccatctcttccagcagaaagtcctcggccattgaagcttcgaagcattcttgacatgagcccttttacagtgacagaccacaccccaatggagattgtggtggatattttccgaaagctgggactgaggcagtgccttgtaactcacaatgggcgcctccttggcattataacaaaaaaagatatcctccggcatatggcccagacggcaaaccaagaccccgcttcaataatgttcaactgaatctcacagatgaggagagagaagaaacggaagaggaagtttatttgttgaatagcacaactctttaacctgagggagtcatctacttttttttcctcctttacaaaaaaagaaaggaaatataaaagccgggtttttgcaacatggtttgcaaataatgctggtggaatggaggagttgtttggggagggaaaggagagagaaggaaaggagtgaggtatttcccgtctaacagaaagcagcgtatcaactcctattgttctgcactggatgcattcagctgaggatgtgcctgatagtgcaggcttgcgcctcaacagagatgacagcagagtcctcgagcacctggcctgtttgctcacatgcaagacacatacagccctattctagaggatacttgaatggacctctataaacgcaaggttcttgcctttttttaatcaaaactgttctgtttaattcatgaattgtatagttaagcattacctttctacattccagaagagcctttatttctctctctctctctctctctctctctctctctactgagctgtaacaaagcctctttaaatcggtgtatccttttgaagcagtcctttctcatattgagatgtactgtgattttactgaggtttcatcacaagaagggagtgtttcttgtgccattaaccatgtagtttgtaccatcactaaatgcttggaacagtacacatgcaccacaacaaaggctcatcaaacaggtaaagtctcgaaggaagcgagaacgaaatctctcattgtgtgccgtgtggctcaaaaccgaaaacaatgaagcttggttttaaaggataaagttttcttttttgttttcctctcagactttatggataatgtgaccgggtcttatgcaaattttctatttctaaaactactactatgatatacaagtgctgttgagcataattaaataaaatgctgctgctttgacagtaaagagaaggaagtattctgaaaaaaaac

SEQ ID NO: 29213 - DNA, 1308 bp, Homo Sapiens
gctggcggccggcagggggcggagttcgagcctggatttttttcctcggggcctcccccgggaggccgtcccggcgtgggggaggggaggacggggcgggaggacgcggttcggtcggctgcagcgctacttttggtccggggtcggcagggaggccgcggctaccgcatcacagctgacgtgaggactacgtggggccgctgccggctccgggttgctgggcggcggcgccgctgctgagcggcggtcgggctcgccgtctccacctcctcgcgtccgtaatcagtgacgaggtccgctacgtaaatccctttgcggcggacaaatgaccatggaaacagttgaatcccagcatgatggaagtataacagcttctttgacagagagcaagtctgctcatgtgcagactcagactggccaaaattcaatccctgctttagctcaggtagcagcaattgcagagacagatgaatctgcagaatcagaaggtgtaattgattctcataaacgtagagaaatcctttcacgaagaccctcttataggaaaatactgaatgaactgtcctctgatgtgcctggtgttcccaagattgaagaagagagatcagaggaagaaggaacaccacctagtattgctaccatggcagtaccaactagcatatatcagactagcacggggcaatacagtatgtatgctgcaattcgatatgatacagtgctagctttaagtcttctctagttatattgaagcaactcaggttttggcattaaattgttccattttaaaatgcatcattaatacctaaactgtatcatagaatgaaagtatatgttaaaaagtgagatctttgtattgacagctgtcatataattttgaaaagtaaaaattttgactgccgaatatagaagaaaattttggggtaaaaaggagaatttttcctatttacatgtttatattaatctctagtaaaacattgtttttgttgtctttatgatgcatgcgaacataaatgtctgtatttcattcttgttggcttttgttacccacaattacatactattcttactaatctgagagttttctaaagtatgttttcaatgtttcactactctctactctgttaatttgtgctacagtttttcctaaaagagaatggaaaaatgatttaattttttaaactgtagcaattggatagataattttatttgaaattttacacactgaaagctctaaataaacagatacattcacattcaaaaaaaaaaaaaaaaaaaaaaaaaaaaaaaaaaaaaaaaaaaaaaaaaaaa

SEQ ID NO: 29214 - DNA, 2670 bp, Homo Sapiens
ggttgggatctgaggggtcctctctgtgcccatcacagtttgagcttcagggaaaagaagaagaggtctttgcccttcgtttttccacgggaggagaatcaagagtgagccatggagctacgtgtggggaacaagtaccgcctgggacggaagatcgggagcgggtccttcggagatatctacctgggtgccaacatcgcctctggtgaggaagtcgccatcaagctggagtgtgtgaagacaaagcacccccagctgcacatcgagagcaagttctacaagatgatgcagggtggcgtggggatcccgtccatcaagtggtgcggagctgagggcgactacaacgtgatggtcatggagctgctggggcctagcctcgaggacctgttcaacttctgttcccgcaaattcagcctcaagacggtgctgctcttggccgaccagatgatcagccgcatcgagtatatccactccaagaacttcatccaccgggacgtcaagcccgacaacttcctcatggggctggggaagaagggcaacctggtctacatcatcgacttcggcctggccaagaagtaccgggacgcccgcacccaccagcacattccctaccgggaaaacaagaacctgaccggcacggcccgctacgcttccatcaacacgcacctgggcattgagcaaagccgtcgagatgacctggagagcctgggctacgtgctcatgtacttcaacctgggctccctgccctggcaggggctcaaagcagccaccaagcgccagaagtatgaacggatcagcgagaagaagatgtcaacgcccatcgaggtcctctgcaaaggctatccctccgaattctcaacatacctcaacttctgccgctccctgcggtttgacgacaagcccgactactcttacctacgtcagctcttccgcaacctcttccaccggcagggcttctcctatgactacgtctttgactggaacatgctgaaattcggtgcagcccggaatcccgaggatgtggaccgggagcggcgagaacacgaacgcgaggagaggatggggcagctacgggggtccgcgacccgagccctgccccctggcccacccacgggggccactgccaaccggctccgcagtgccgccgagcccgtggcttccacgccagcctcccgcatccagccggctggcaatacttctcccagagcgatctcgcgggtcgaccgggagaggaaggtgagtatgaggctgcacaggggtgcgcccgccaacgtctcctcctcagacctcactgggcggcaagaggtctcccggatcccagcctcacagacaagtgtgccatttgaccatctcgggaagtgaggagagcccccattggaccagtgtttgcttagtgtcttcactgtattttctttaaaaaaaaaaaaaaaaaaaaaaaggcaaaaataaaccactcaaaagaacaacaaaaaaacccagcacaaaaccgacgatggagtttgtttctttgatttctttgccaatggcaagaagatgagatgccctcagcactgaggattcttgcccccttgtggtgcccgctgcccccaaccttcaggctgccagatgctcccctgacaacaccaggctacaggagccagacgccagggcctgcccggcctcctgttcctgcccccacccaccacctgcctggagaggaacgggtcgggtccgtgtcggagaagtgacaggtcccagagccaaagccggccctcaagcatcatcagggagtggtgtagtcagttgaaggcagttcccaccgagttttccgagcctcagaatccaggagatacgcacagccccacccactctgagatgacagtggctgacttcccgtgctgggcttttccattgtccccctggcctccaggctcctcctctgcctctccatggagtgggtggggaggtggtgggggccggcgtcccctgcgtgtgtgtgtgtgtgtgtgtgtgtggatgtattgacctgtgtttcccaagacagcaggtgccacggcccgccccgcctgccagcccgaattcccgttctcctgtgtctactaacaaggacatgggggtgggcggtgacctccgcatccctcagagctcagagggtcctcgctgccaccggtccccccctagcccgtcatcagccggtggcagctccatcttccattcctggttttagggcagaatccatggagactgcttccagaaggcatctggctctgagttataaattacttccctggtcctgacagtcacctggggtcccccctctccctggttccacctttctgaggaggagcctggagtcagggctgggttttggattaacccatccttcctagttaacacctttttgtttttattttattttatttttgtttgttttctccgtgtgtgtgttttcctaatttatttacctctgtttcccctttttcctttttttttttaattaaagagcaaagctttttattactttgtaatttaaaaaactgaaaaaaaaaaaactgaagaactttggggggaattttgtacttttttcctgtgtaaatattggacttttttgagctttatcgtggttgttaatttgaagtaataaagtagaaaagataaagtgaaaaaaaaaaaaaaaaaaaaaaaaaaaaa

SEQ ID NO: 29215 - DNA, 7896 bp, Homo Sapiens
atgcagtccgggccgcggcccccacttccagcccccggcctggccttggctttgaccctgactatgttggccagacttgcatccgcggcttccttcttcggtgagaaccacctggaggtgcctgtggccacggctctgaccgacatagacctgcagctgcagttctccacgtcccagcccgaagccctccttctcctggcagcaggcccagctgaccacctcctgctgcagctctactctggacgcctgcaggtcagacttgttctgggccaggaggagctgaggctgcagactccagcagagacgctgctgagtgactccatcccccacactgtggtgctgactgtcgtagagggctgggccacgttgtcagtcgatgggtttctgaacgcctcctcagcagtcccaggagcccccctagaggtcccctatgggctctttgttgggggcactgggacccttggcctgccctacctgaggggaaccagccgacccctgaggggttgcctccatgcagccaccctcaatggccgcagcctcctccggcctctgacccccgatgtgcatgagggctgtgctgaagagttttctgccagtgatgatgtggccctgggcttctctgggccccactctctggctgccttccctgcctggggcactcaggacgaaggaaccctagagtttacactcaccacacagagccggcaggcacccttggccttccaggcagggggccggcgtggggacttcatctatgtggacatatttgagggccacctgcgggccgtggtggagaagggccagggtaccgtattgctccacaacagtgtgcctgtggccgatgggcagccccatgaggtcagtgtccacatcaatgctcaccggctggaaatctccgtggaccagtaccctacgcatacttcgaaccgaggagtcctcagctacctggagccacggggcagtctccttctcggggggctggatgcagaggcctctcgtcacctccaggaacaccgcctgggcctgacaccagaggccaccaatgcctccctgctgggctgcatggaagacctcagtgtcaatggccagaggcgggggctgcgggaagctttgctgacgcgcaacatggcagccggctgcaggctggaggaggaggagtatgaggacgatgcctatggacattatgaagctttctccaccctggcccctgaggcttggccagccatggagctgcctgagccatgcgtgcctgagccagggctgcctcctgtctttgccaatttcacccagctgctgactatcagcccactggtggtggccgaggggggcacagcctggcttgagtggaggcatgtgcagcccacgctggacctgatggaggctgagctgcgcaaatcccaggtgctgttcagcgtgacccgaggggcacgccatggcgagctcgagctggacatcccgggagcccaggcacgaaaaatgttcaccctcctggacgtggtgaaccgcaaggcccgcttcatccacgatggctctgaggacacctccgaccagctggtgctggaggtgtcggtgacggctcgggtgcccatgccctcatgccttcggaggggccaaacatacctcctgcccatccaggtcaaccctgtcaatgacccaccccacatcatcttcccacatggcagcctcatggtgatcctggaacacacgcagaagccgctggggcctgaggttttccaggcctatgacccggactctgcctgtgagggcctcaccttccaggtccttggcacctcctctggcctccccgtggagcgccgagaccagcctggggagccggcgaccgagttctcctgccgggagttggaggccggcagcctagtctatgtccaccgcggtggtcctgcacaggacttgacgttccgggtcagcgatggactgcaggccagccccccggccacgctgaaggtggtggccatccggccggccatacagatccaccgcagcacagggttgcgactggcccaaggctctgccatgcccatcttgcccgccaacctgtcggtggagaccaatgccgtggggcaggatgtgagcgtgctgttccgcgtcactggggccctgcagtttggggagctgcagaagcagggggcaggtggggtggagggtgctgagtggtgggccacacaggcgttccaccagcgggatgtggagcagggccgcgtgaggtacctgagcactgacccacagcaccacgcttacgacaccgtggagaacctggccctggaggtgcaggtgggccaggagatcctgagcaatctgtccttcccagtgaccatccagagagccactgtgtggatgctgcggctggagccactgcacactcagaacacccagcaggagaccctcaccacagcccacctggaggccaccctggaggaggcaggcccaagccccccaaccttccattatgaggtggttcaggctcccaggaaaggcaaccttcaactacagggcacaaggctgtcagatggccagggcttcacccaggatgacatacaggctggccgggtgacctatggggccacagcacgtgcctcagaggcagtcgaggacaccttccgtttccgtgtcacagctccaccatatttctccccactctataccttccccatccacattggtggtgacccagatgcgcctgtcctcaccaatgtcctcctcgtggtgcctgagggtggtgagggtgtcctctctgctgaccacctctttgtcaagagtctcaacagtgccagctacctctatgaggtcatggagcggccccgccatgggaggttggcttggcgtgggacacaggacaagaccactatggtgacatccttcaccaatgaagacctgttgcgtggccggctggtctaccagcatgatgactccgagaccacagaagatgatatcccatttgttgctacccgccagggcgagagcagtggtgacatggcctgggaggaggtacggggtgtcttccgagtggccatccagcccgtgaatgaccacgcccctgtgcagaccatcagccggatcttccatgtggcccggggtgggcggcggctgctgactacagacgacgtggccttcagcgatgctgactcgggctttgctgacgcccagctggtgcttacccgcaaggacctcctctttggcagtatcgtggccgtagatgagcccacgcggcccatctaccgcttcacccaggaggacctcaggaagaggcgagtactgttcgtgcactcaggggctgaccgtggctggatccagctgcaggtgtccgacgggcaacaccaggccactgcgctgctggaggtgcaggcctcggaaccctacctccgtgtggccaacggctccagccttgtggtccctcaaggaggccagggcaccatcgacacggccgtgctccacctggacaccaacctcgacatccgcagtggggatgaggtccactaccacgtcacagctggccctcgctggggacagctagtccgggctggtcagccagccacagccttctcccagcaggacctgctggatggggccgttctctatagccacaatggcagcctcagcccccgcgacaccatggccttctccgtggaagcagggccagtgcacacggatgccaccctacaagtgaccattgccctagagggcccactggccccactgaagctggtccggcacaagaagatctacgtcttccagggagaggcagctgagatcagaagggaccagctggaggcagcccaggaggcagtgccacctgcagacatcgtattctcagtgaagagcccaccgagtgccggctacctggtgatggtgtcgcgtggcgccttggcagatgagccacccagcctggaccctgtgcagagcttctcccaggaggcagtggacacaggcagggtcctgtacctgcactcccgccctgaggcctggagcgatgccttctcgctggatgtggcctcaggcctgggtgctcccctcgagggcgtccttgtggagctggaggtgctgcccgctgccatcccactagaggcgcaaaacttcagcgtccctgagggtggcagcctcaccctggcccctccactgctccgtgtctccgggccctacttccccactctcctgggcctcagcctgcaggtgctggagccaccccagcatggagccctgcagaaggaggacggacctcaagccaggaccctcagcgccttctcctggagaatggtggaagagcagctgatccgctacgtgcatgacgggagcgagacactgacagacagttttgtcctgatggctaatgcctccgagatggatcgccagagccatcctgtggccttcactgtcactgtcctgcctgtcaatgaccaaccccccatcctcactacaaacacaggcctgcagatgtgggagggggccactgcgcccatccctgcggaggctctgaggagcacggacggcgactctgggtctgaggatctggtctacaccatcgagcagcccagcaacgggcgggtagtgctgcggggggcgccgggcactgaggtgcgcagcttcacgcaggcccagctggacggcgggctcgtgctgttctcacacagaggaaccctggatggaggcttccgcttccgcctctctgacggcgagcacacttcccccggacacttcttccgagtgacggcccagaagcaagtgctcctctcgctgaagggcagccagacactgactgtctgcccagggtccgtccagccactcagcagtcagaccctcagggccagctccagcgcaggcactgacccccagctcctgctctaccgtgtggtgcggggcccccagctaggccggctgttccacgcccagcaggacagcacaggggaggccctggtgaacttcactcaggcagaggtctacgctgggaatattctgtatgagcatgagatgccccccgagcccttttgggaggcccatgataccctagagctccagctgtcctcgccgcctgcccgggacgtggccgccacccttgctgtggctgtgtcttttgaggctgcctgtccccagcgccccagccacctctggaagaacaaaggtctctgggtccccgagggccagcgggccaggatcaccgtggctgctctggatgcctccaatctcttggccagcgttccatcaccccagcgctcagagcatgatgtgctcttccaggtcacacagttccccagccggggccagctgttggtgtccgaggagcccctccatgctgggcagccccacttcctgcagtcccagctggctgcagggcagctagtgtatgcccacggcggtgggggcacccagcaggatggcttccactttcgtgcccacctccaggggccagcaggggcctccgtggctggaccccaaacctcagaggcctttgccatcacggtgagggatgtaaatgagcggccccctcagccacaggcctctgtcccactccggctcacccgaggctctcgtgcccccatctcccgggcccagctgagtgtggtggacccagactcagctcctggggagattgagtacgaggtccagcgggcaccccacaacggcttcctcagcctggtgggtggtggcctggggcccgtgacccgcttcacgcaagccgatgtggattcagggcggctggccttcgtggccaacgggagcagcgtggcaggcatcttccagctgagcatgtctgatggggccagcccacccctgcccatgtccctggctgtggacatcctaccatccgccatcgaggtgcagctgcgggcacccctggaggtgccccaagctttggggcgctcctcactgagccagcagcagctccgggtggtttcagatcgggaggagccagaggcagcataccgcctcatccagggaccccagtatgggcatctcctggtgggcgggcggcccacctcggccttcagccaattccagatagaccagggcgaggtggtctttgccttcaccaacttctcctcctctcatgaccacttcagagtcctggcactggctaggggtgtcaatgcatcagccgtagtgaacgtcactgtgagggctctgctgcatgtgtgggcaggtgggccatggccccagggtgccaccctgcgcctggaccccaccgtcctagatgctggcgagctggccaaccgcacaggcagtgtgccgcgcttccgcctcctggagggaccccggcatggccgcgtggtccgcgtgccccgagccaggacggagcccgggggcagccagctggtggagcagttcactcagcaggaccttgaggacgggaggctggggctggaggtgggcaggccagaggggagggcccccggccccgcaggtgacagtctcactctggagctgtgggcacagggcgtcccgcctgctgtggcctccctggactttgccactgagccttacaatgctgcccggccctacagcgtggccctgctcagtgtccccgaggccgcccggacggaagcagggaagccagagagcagcacccccacaggcgagccaggccccatggcatccagccctgagcccgctgtggccaagggaggcttcctgagcttccttgaggccaacatgttcagcgtcatcatccccatgtgcctggtacttctgctcctggcgctcatcctgcccctgctcttctacctccgaaaacgcaacaagacgggcaagcatgacgtccaggtcctgactgccaagccccgcaacggcctggctggtgacaccgagacctttcgcaaggtggagccaggccaggccatcccgctcacagctgtgcctggccaggggccccctccaggaggccagcctgacccagagctgctgcagttctgccggacacccaaccctgcccttaagaatggccagtactgggtgtgaggcctggcctgggcccagatgctgatcgggccagggacaggcttgcccatgtcccgggccccattgcttccatgcctggtgctgtctgagtatccccagagcaagagagacctggagacaccaggggtggagggtcctgggagatagtcccaggggtccgggacagagtggagtcaagagctggaacctccctcagctcactccgagcctggagaactgcaggggccaaggtggaggcaggcttaagttcagtcctcctgccctggagctggtttgggctgtcaaaaccagggtaacctcctacatgggtcatgactctgggtcctgggtctgtgaccttgggtaagtcgcgcctgacccaggctgctaagagggcaaggagaaggaagtaccctggggagggaagggacagaggaagctattcctggcttttccactccaacccaggccaccctttgtctctgccccagagttgagaaaaaaacttcctcccctggttttttagggagatggtatcccctggagtagagggcaagaggagagagcgcctccagtctagaaggcataagccaataggataatatattcagggtgcagggtgggtaggttgctctggggatgggtttatttaagggagattgcaaggaagctatttaacatggtgctgagctagccaggactgatggagcccctgggggtgtgggatggaggagggtctgcagccagttcattcccagggccccatcttgatgggccaagggctaaacatgcatgtgtcagtggctttggagcaggttaggctggggctcatcgagggtctcaggccgaggccactgcggtgccagtgcccccctgaggactagggcaggcagctgggggcacttggttccatggagcctggataaacagtgctttggaggctctgga

SEQ ID NO: 29216 - DNA, 2205 bp, Homo Sapiens
gcgcacgccggccgcgcccacgtgaccggtccgggtgcaaacacgcgggtcagctgatccggcccaactgcggcgtcatcccggctataagcgcacggcctcggcgaccctctccgacccggccgccgccgccatgcagccctccagccttctgccgctcgccctctgcctgctggctgcacccgcctccgcgctcgtcaggatcccgctgcacaagttcacgtccatccgccggaccatgtcggaggttgggggctctgtggaggacctgattgccaaaggccccgtctcaaagtactcccaggcggtgccagccgtgaccgaggggcccattcccgaggtgctcaagaactacatggacgcccagtactacggggagattggcatcgggacgcccccccagtgcttcacagtcgtcttcgacacgggctcctccaacctgtgggtcccctccatccactgcaaactgctggacatcgcttgctggatccaccacaagtacaacagcgacaagtccagcacctacgtgaagaatggtacctcgtttgacatccactatggctcgggcagcctctccgggtacctgagccaggacactgtgtcggtgccctgccagtcagcgtcgtcagcctctgccctgggcggtgtcaaagtggagaggcaggtctttggggaggccaccaagcagccaggcatcaccttcatcgcagccaagttcgatggcatcctgggcatggcctacccccgcatctccgtcaacaacgtgctgcccgtcttcgacaacctgatgcagcagaagctggtggaccagaacatcttctccttctacctgagcagggacccagatgcgcagcctgggggtgagctgatgctgggtggcacagactccaagtattacaagggttctctgtcctacctgaatgtcacccgcaaggcctactggcaggtccacctggaccaggtggaggtggccagcgggctgaccctgtgcaaggagggctgtgaggccattgtggacacaggcacttccctcatggtgggcccggtggatgaggtgcgcgagctgcagaaggccatcggggccgtgccgctgattcagggcgagtacatgatcccctgtgagaaggtgtccaccctgcccgcgatcacactgaagctgggaggcaaaggctacaagctgtccccagaggactacacgctcaaggtgtcgcaggccgggaagaccctctgcctgagcggcttcatgggcatggacatcccgccacccagcgggccactctggatcctgggcgacgtcttcatcggccgctactacactgtgtttgaccgtgacaacaacagggtgggcttcgccgaggctgcccgcctctagttcccaaggcgtccgcgcgccagcacagaaacagaggagagtcccagagcaggaggcccctggcccagcggcccctcccacacacacccacacactcgcccgcccactgtcctgggcgccctggaagccggcggcccaagcccgacttgctgttttgttctgtggttttcccctccctgggttcagaaatgctgcctgcctgtctgtctctccatctgtttggtgggggtagagctgatccagagcacagatctgtttcgtgcattggaagaccccacccaagcttggcagccgagctcgtgtatcctggggctcccttcatctccagggagtcccctccccggccctaccagcgcccgctgggctgagcccctaccccacaccaggccgtcctcccgggccctcccttggaaacctgccctgcctgagggcccctctgcccagcttgggcccagctgggctctgccaccctacctgttcagtgtcccgggcccgttgaggatgaggccgctagaggcctgaggatgagctggaaggagtgagaggggacaaaacccaccttgttggagcctgcagggtggtgctgggactgagccagtcccaggggcatgtattggcctggaggtggggttgggattgggggctggtgccagccttcctctgcagctgacctctgttgtcctccccttgggcggctgagagccccagctgacatggaaatacagttgttggcctccggcctcccctcaaaaaaaaaaaaaaaaaaaaaaaaaaaaaaaaaaaaaaaaaaaaaaaaaaaaaaaaaaaaaaaaaaaaaaaaaaaaaaaaaaaaa

SEQ ID NO: 29217 - DNA, 924 bp, Homo Sapiens
gcacagcagcaactgactgggcagcctttcaggaaagatgcagccactcctgcttctgctggcctttctcctacccactggggctgaggcaggggagatcatcggaggccgggagagcaggccccactcccgcccctacatggcgtatcttcagatccagagtccagcaggtcagagcagatgtggagggttcctggtgcgagaagactttgtgctgacagcagctcattgctggggaagcaatataaatgtcaccctgggcgcccacaatatccagagacgggaaaacacccagcaacacatcactgcgcgcagagccatccgccaccctcaatataatcagcggaccatccagaatgacatcatgttattgcagctgagcagaagagtcagacggaatcgaaacgtgaacccagtggctctgcctagagcccaggagggactgagacccgggacgctgtgcactgtggccggctggggcagggtcagcatgaggaggggaacagatacactccgagaggtgcagctgagagtgcagagggataggcagtgcctccgcatcttcggttcctacgacccccgaaggcagatttgtgtgggggaccggcgggaacggaaggctgccttcaagggggattccggaggccccctgctgtgtaacaatgtggcccacggcatcgtctcctatggaaagtcgtcaggggttcctccagaagtcttcaccagggtctcaagtttcctgccctggataaggacaacaatgagaagcttcaaactgctggatcagatggagacccccctgtgactgactcttcttctcggggacacaggccagctccacagtgttgccagagccttaataaacgtccacagagtataaataaccaattcctcatttgttcattaaacgtcattcagtactta

SEQ ID NO: 29218 - DNA, 3535 bp, Homo Sapiens
atttccggggtaagatggctgcagtccgtatgctgagaacctggagcaggaatgcggggaagctgatttgtgttcgctattttcaaacatgtggtaatgttcatgttttgaagccaaattatgtgtgtttctttggttatccttcattcaagtatagtcatccacatcacttcctgaaaacaactgctgctctccgtggacaggttgttcagttcaagctctcagacattggagaagggattagagaagtaactgttaaagaatggtatgtaaaagaaggagatacagtgtctcagtttgatagcatctgtgaagttcaaagtgataaagcttctgttaccatcactagtcgttatgatggagtcattaaaaaactctattataatctagacgatattgcctatgtggggaagccattagtagacatagaaacggaagctttaaaagattcagaagaagatgttgttgaaactcctgcagtgtctcatgatgaacatacacaccaagagataaagggccgaaaaacactggcaactcctgcagttcgccgtctggcaatggaaaacaatattaagctgagtgaagttgttggctcaggaaaagatggcagaatacttaaagaagatatcctcaactatttggaaaagcagacaggagctatattgcctccttcacccaaagttgaaattatgccacctccaccaaagccaaaagacatgactgttcctatactagtatcaaaacctccggtattcacaggcaaagacaaaacagaacccataaaaggctttcaaaaagcaatggtcaagactatgtctgcagccctgaagatacctcattttggttattgtgatgagattgaccttactgaactggttaagctccgagaagaattaaaacccattgcatttgctcgtggaattaaactctcctttatgcctttcttcttaaaggctgcttccttgggattactacagtttcctatccttaacgcttctgtggatgaaaactgccagaatataacatataaggcttctcataacattgggatagcaatggatactgagcagggtttgattgtccctaatgtgaaaaatgttcagatctgctctatatttgacatcgccactgaactgaaccgcctccagaaattgggctctgtgggtcagctcagcaccactgatcttacaggaggaacatttactctttccaacattggatcaattggtggtacctttgccaaaccagtgataatgccacctgaagtagccattggggcccttggatcaattaaggccattccccgatttaaccagaaaggagaagtatataaggcacagataatgaatgtgagctggtcagctgatcacagagttattgatggtgctacaatgtcacgcttctccaatttgtggaaatcctatttagaaaacccagcttttatgctactagatctgaaatgaagactgataagacattcttgaactttttgagcttccaaagagtatgtaaaccctagctgtgccagcacatgttcatctttacaatttatattgtaaacgatttgtatcgtatgattaaggatctaaggcacaatatttgtcactgttctattagactttttactgaaaatgaataatggtgtaatggttctcctggggctgtcacattttataggtcagagtgtgacttcttaatatggtgctgatgtttttgtgtcaatggcttgaaactggcaagattaacaaaattaggccgggcatggtggctcacgcctgtaatccagcactttgggaggcccaggtggggcgatcacctgaggttagaagtttgagaccagcctggccaacatggtgaaacctggcctctacctaaaaaatacaaaattgaccgggtgtggtggtgggtaccgctacttgggaggctgaggcaggagaatcgcttgaacctgggaggtggaggttgcagtgagctgagatcgtgctattgcactccagcctgggcgacagagcaagacgccatctcaaaaacaaaaaaaacaaaattcatgttactaaaagacaggtagccatatacagacagtatatgccctattttttttaactgactcttaatgaaactttaattttacttaattaagaaatggaatttatatacaaaaatattttccatttccgttattatgctaattgttgtatgaaataagtgcaattatacttctcttttgagatatccaagagtatattcttgctctgtatagagaatatcatctgatagtgtcttatttatattaattaatgtctttgaaaagggaaaagtataaactggccttaaaattgtccaattatagttttataaccagtctattaaaggtgtttgtttaaaatggatatagttttagatttgtggtaatgctttggtattttcttggggaagaccttcacctttgcaaacttccctcatgtaaggaaggtactttaaatgtagcagccactgacatttctttttttaaaaaaaatttgagaagtctacttccttttaacttttttggtcttcagctaaaaaataggataagaaattaaggtctattccattctccatatcctgggtaagaatgtaaataagaggagaaggaagagtctaatagtaattatggatataaaaaataagaaattttgtatagaaatgaaggtttcataatgatcattttgttaaaggtctactttaatcagaaatagcaacgagatgaatgtatccaacatttcaatttgcattcggaaatccatgttgtttctaatattgtccagttgaaaactgtatgccaaaattagttgtttaagtgaagttttgtgacagaaaaaaggttgttttaatatctacttggtttttctcaaaatggaaataattttaaaatcaggaaagaataaatcagccaggtgtgatgacttgtaactgtaatcccagttataggggaggctgaagcaggaggatcacttgaggccaggagtttgagaccagcctgggcaacatagtgagatcccatctcaaaaaacattatttttaaaattagcctggtggctcacgcctgtaatcccagcactttgggaggccgaggtggccagatcacctgaggtcaggagttcgagaccaccctggccaacatggtgaaaccccatctctacagttttgtaaaaatacaaaaattacctgggcctggtgcacaggcctgtagtcccagctacttgggaggctgaggcaggagaattgcttgagcccaagaggtggaggttacagtgagcagagatcacaccactgcactccagcctgggtggcagagcaacacttcgtctcagaaaaaaaaaaaaaaaccaaaaaccaaaaagccaagtgtggtggtgtgcacctatagtcccagctactcaggaagctgagacaagaggatcaattgagcccaggagttcaaagctgtagtgagctgtcattgtgccactatcctccagtatgggtgacagagtgagacctggtctctaaaaat

SEQ ID NO: 29219 - DNA, 4744 bp, Homo Sapiens
aaataataaagaaattgaaaacaatacattaatataccataacactaaaaagagcaggagcgagagatgagaaagggaatccagcccgctctggagcagtacctggtgaccgccgggggtggggagggggcggctgtcgtcgccgccgccgctgcagcctccatggacaaaagggcactgctagccagccccggcttcgccgccgccgccgccgctgccgccgccccgggcgcgtacatccagatcctcaccacgaacacttccaccacctcctgttcctcctccctccaaagcggcgccgtagccgccggccccctcctccccagtgcccccggcgcggagcagaccgccggcagcctcctctacaccacgccgcacggaccctccagcagagccgggctgctgcagcagccaccagcgctgggacgcggcggcagcggcggcggcggcggccctccggcaaagcgaaggctggagctaggagaaagcggtcatcagtacctctcagatggtttaaaaacccccaagggcaaaggaagagctgcactacgaagtccagatagtccaaaaactccaaaatctccctcagaaaaaacgcggtatgatacgtctcttggtctgctcaccaagaagttcattcagctcctgagccagtcacccgatggggtattggatttgaacaaggcagcagaagtgctaaaagtgcaaaagagaaggatttatgatatcaccaacgttctggaaggcatccacctcattaagaagaagtctaaaaacaacgtccaatggatgggctgcagtctgtctgaggatgggggcatgctggcccagtgtcaaggcctgtcaaaagaagtgaccgagctcagtcaggaagagaagaaattagatgaactgatccaaagctgcaccctggacctcaaactgttaaccgaggattcagagaatcaaaggttagcttatgttacatatcaagatattcgaaaaattagtggccttaaagaccaaactgttatagttgtgaaagcccctccagaaacaagacttgaagtgcctgactcaatagagagcctacaaatacatttggcaagtacccaagggcccattgaggtttacttatgtccagaagagactgaaacacacagtccaatgaaaacaaacaaccaagaccacaatgggaatatccctaaacccgcttccaaagacttggcttcaaccaactcaggacatagcgattgctcagtttctatgggaaacctttctcctctggcctccccagccaacctcttacagcagactgaggaccaaattccttccaacctagaaggaccgtttgtgaacttactgcctcccctgctgcaagaggactatctcctgagcctcggggaggaggaaggcatcagcgatctcttcgatgcttacgatttggaaaagctcccactggtggaagacttcatgtgtagttgattatgcttcgtgtgaactctccttaaaaaccgatatttttttatcatggaccagaacatctgtcatgcagtgttgtcccttcctaccttcttcctccaagagagtatcatgaagtaaactacaaacttcagaagaaagctgacattttaatgaattttttaaaaaattaataaacaaattgtctaaacgcacagttgcaggctcccttgggaaagccctgctttgctccaggctccaagatctcctggctaagtcagcaagtgagaaaatgtgcaatcaggtgtctctcaccccgaattgtccttcctccttcctccccggattggcttgctgtgcctgacggatgggctgtagaatggggtctggccacctggcctgctgggaaacagcaatcttccttaatagcatttcaagccgtgccttctccgcagaatgcatgtctttgaggtctgctaatatggaatggaactgcagcaaatgcaaacttgaagtcatgcaaaagtatgaaatggatttcttcagctcttcttaggaatatttaaattactgtcataattcagtttaagctatgaactgtgtgtcccagtaggaggtcaagaaaacctccacagccttctggatgaagaacctgttttcaaatatacttgttgcagatacagaagactagtagagttctgccactctaagctgttgtggattttcctgtctccatgaaccactcccattcccccgtccccaatgtgtttgtgagtttccagttgatttgtagcaaatgcctacttagttctttgtggattgttctagacttttaatttttttagctgccatttaagcattcctgtggcacccatcaccatttcaatttaattgtttactttgaagcggtttttgcaaattcatattacttaagcagagggagagaacctctactgatcagagcatctaaacctgtgtgatctaaggtttatcagcctctgcaaggagctttgtcccatcgtgcttccattcccaggagggggagcttggagcgagtcagtcctggggcttgctgacatgggtggcccattggaaaggagaaccaggtcagatgatgtaacagccccaaggagcagcaggcatgggtccctccatccttgggcttcccgggcccctgtgacaggggaaagggctctcttacaccgcactcagggagaccacttctcaggatggggtcagatggagagacctctagggagaaagacatccccattgtgtgagtggcatttccttaagctggcaggaacagggagcagccctgtgtcgggggctggaatagttctggccagaccccgttccccttcctctatgaaggaataagttggaccaagggaagtcggggacgtaaaaaatgaagcaaaacaatgccagggtgtctcccgctttactcttcaggaatggtgtcccaagttggaggctttgtgtcagctgcaaatcctaccagttatgtccaagaatggctttccctcgggcaggtggcagcggccatctcccactgggaatatggcgtagtatctccggtccattccttggatgctaaggactgcgggaatgagggagtcagataaagaacaaacctcgaaacgaacagttaaattgaaatgctatgtgcctgacccaatggtaggcacatagtaggcactcaactcatatgtttaattgaattgaaaatatcccttaggaaaaaaaaaaaacacacaaaaaaccacaagagccccagccagtttactccaggtagatttccacaatatgcaaagtggtggtggggtcaagacagatgacaccagcactttaaactctttgtgtgggtatgcgtgggtgtatgtttgggaagaaaaacaaaggtgcagactatcttcctttttttcttcttcagcctccatccctggcctcctcccctcacacacactggacttggtacaaaatgtcggtgtggtcctagatgaagcattggggtgggggagggagagggagctttgtgttaagtgcctactggaaatgcactgtggggttttttcctgtatgggaaaccatttatgccaagcttttccccatttcccatatttatctcatctggttagctgcctctgcttccagctttgtgtaattctctttgccagctgcacaaagctgattttttccaaagtctaaagactgagctcacctggctagattgttgtgtgttttgttgaattttttcataatgtaatgccgtatttattgtttttaaaatgaaaggaatactaataagtcttaaaagttccttcatgcataagatttttttccagttactgggcttaactggtgtacattaattagatgtccatactgtattttgtttgcattaagtaattttctttttgacttagtatccggcacacaaagtgggttagtactacagtatttgcgttactttaagtactaagtatgcaggtttcctggtaccattgagttgctgctattaaagctcacacacgaaatggctaaaagttacaagtgtgcaaattatgactgcgtgagccttagaaaataaaatgtataaagggcaacacatgagctgtcaaacagtgttaggagtgtgtttatatgtacagagttgtgcatagcaatcgttttatttaagttgatatgtagtctactcacattttcattatttagcaattttgtacaaaaatagcaattaatttgtaaacactgccagaatactttctagctgctttgtaattttttaagagtgttattttgtttttgtttttctgttctttgttgtggctcttgttttcatttttgttgtacgtgtagatctgtaaataaaattgcagtatttaaagcttaagctttcaggaaaaagaaaataagaattcagtgtgtgcatgacaactcgtgtgtatgagaaggagggatatgaaggaagatggcttgcagagtaagtcgggtggcaattgtcagggtgtgggaatttcttttcctacggggtacgtgattttgtaaaaaggaagtatttctcccaaaattgggagtaggcaaactactaatcagtttagctttgtgttgtatgctagtttaaaaaagaaaatatgtaatataatgtaaaaaaaaacaaaaaaaagcttttatgatggattttgtaaatagatttgttacagggtgacctgttctctagctgtgatcttaccacttcaaatgggtgtaatttgaataaattttgtatggtaaaggatcaataaaatgattttttttaaga

SEQ ID NO: 29220 - DNA, 4877 bp, Homo Sapiens
actgttgggagaggaatcgtatctccatatttcttctttcagccccaatccaagggttgtagctggaactttccatcagttcttcctttctttttcctctctaagcctttgccttgctctgtcacagtgaagtcagccagagcagggctgttaaactctgtgaaatttgtcataagggtgtcaggtatttcttactggcttccaaagaaacatagataaagaaatctttcctgtggcttcccttggcaggctgcattcagaaggtctctcagttgaagaaagagcttggaggacaacagcacaacaggagagtaaaagatgccccagggctgaggcctccgctcaggcagccgcatctggggtcaatcatactcaccttgcccgggccatgctccagcaaaatcaagctgttttcttttgaaagttcaaactcatcaagattatgctgctcactcttatcattctgttgccagtagtttcaaaatttagttttgttagtctctcagcaccgcagcactggagctgtcctgaaggtactctcgcaggaaatgggaattctacttgtgtgggtcctgcacccttcttaattttctcccatggaaatagtatctttaggattgacacagaaggaaccaattatgagcaattggtggtggatgctggtgtctcagtgatcatggattttcattataatgagaaaagaatctattgggtggatttagaaagacaacttttgcaaagagtttttctgaatgggtcaaggcaagagagagtatgtaatatagagaaaaatgtttctggaatggcaataaattggataaatgaagaagttatttggtcaaatcaacaggaaggaatcattacagtaacagatatgaaaggaaataattcccacattcttttaagtgctttaaaatatcctgcaaatgtagcagttgatccagtagaaaggtttatattttggtcttcagaggtggctggaagcctttatagagcagatctcgatggtgtgggagtgaaggctctgttggagacatcagagaaaataacagctgtgtcattggatgtgcttgataagcggctgttttggattcagtacaacagagaaggaagcaattctcttatttgctcctgtgattatgatggaggttctgtccacattagtaaacatccaacacagcataatttgtttgcaatgtccctttttggtgaccgtatcttctattcaacatggaaaatgaagacaatttggatagccaacaaacacactggaaaggacatggttagaattaacctccattcatcatttgtaccacttggtgaactgaaagtagtgcatccacttgcacaacccaaggcagaagatgacacttgggagcctgagcagaaactttgcaaattgaggaaaggaaactgcagcagcactgtgtgtgggcaagacctccagtcacacttgtgcatgtgtgcagagggatacgccctaagtcgagaccggaagtactgtgaagatgttaatgaatgtgctttttggaatcatggctgtactcttgggtgtaaaaacacccctggatcctattactgcacgtgccctgtaggatttgttctgcttcctgatgggaaacgatgtcatcaacttgtttcctgtccacgcaatgtgtctgaatgcagccatgactgtgttctgacatcagaaggtcccttatgtttctgtcctgaaggctcagtgcttgagagagatgggaaaacatgtagcggttgttcctcacccgataatggtggatgtagccagctctgcgttcctcttagcccagtatcctgggaatgtgattgctttcctgggtatgacctacaactggatgaaaaaagctgtgcagcttcaggaccacaaccatttttgctgtttgccaattctcaagatattcgacacatgcattttgatggaacagactatggaactctgctcagccagcagatgggaatggtttatgccctagatcatgaccctgtggaaaataagatatactttgcccatacagccctgaagtggatagagagagctaatatggatggttcccagcgagaaaggcttattgaggaaggagtagatgtgccagaaggtcttgctgtggactggattggccgtagattctattggacagacagagggaaatctctgattggaaggagtgatttaaatgggaaacgttccaaaataatcactaaggagaacatctctcaaccacgaggaattgctgttcatccaatggccaagagattattctggactgatacagggattaatccacgaattgaaagttcttccctccaaggccttggccgtctggttatagccagctctgatctaatctggcccagtggaataacgattgacttcttaactgacaagttgtactggtgcgatgccaagcagtctgtgattgaaatggccaatctggatggttcaaaacgccgaagacttacccagaatgatgtaggtcacccatttgctgtagcagtgtttgaggattatgtgtggttctcagattgggctatgccatcagtaataagagtaaacaagaggactggcaaagatagagtacgtctccaaggcagcatgctgaagccctcatcactggttgtggttcatccattggcaaaaccaggagcagatccctgcttatatcaaaacggaggctgtgaacatatttgcaaaaagaggcttggaactgcttggtgttcgtgtcgtgaaggttttatgaaagcctcagatgggaaaacgtgtctggctctggatggtcatcagctgttggcaggtggtgaagttgatctaaagaaccaagtaacaccattggacatcttgtccaagactagagtgtcagaagataacattacagaatctcaacacatgctagtggctgaaatcatggtgtcagatcaagatgactgtgctcctgtgggatgcagcatgtatgctcggtgtatttcagagggagaggatgccacatgtcagtgtttgaaaggatttgctggggatggaaaactatgttctgatatagatgaatgtgagatgggtgtcccagtgtgcccccctgcctcctccaagtgcatcaacaccgaaggtggttatgtctgccggtgctcagaaggctaccaaggagatgggattcactgtcttgatattgatgagtgccaactgggggtgcacagctgtggagagaatgccagctgcacaaatacagagggaggctatacctgcatgtgtgctggacgcctgtctgaaccaggactgatttgccctgactctactccaccccctcacctcagggaagatgaccaccactattccgtaagaaatagtgactctgaatgtcccctgtcccacgatgggtactgcctccatgatggtgtgtgcatgtatattgaagcattggacaagtatgcatgcaactgtgttgttggctacatcggggagcgatgtcagtaccgagacctgaagtggtgggaactgcgccacgctggccacgggcagcagcagaaggtcatcgtggtggctgtctgcgtggtggtgcttgtcatgctgctcctcctgagcctgtggggggcccactactacaggactcagaagctgctatcgaaaaacccaaagaatccttatgaggagtcgagcagagatgtgaggagtcgcaggcctgctgacactgaggatgggatgtcctcttgccctcaaccttggtttgtggttataaaagaacaccaagacctcaagaatgggggtcaaccagtggctggtgaggatggccaggcagcagatgggtcaatgcaaccaacttcatggaggcaggagccccagttatgtggaatgggcacagagcaaggctgctggattccagtatccagtgataagggctcctgtccccaggtaatggagcgaagctttcatatgccctcctatgggacacagacccttgaagggggtgtcgagaagccccattctctcctatcagctaacccattatggcaacaaagggccctggacccaccacaccaaatggagctgactcagtgaaaactggaattaaaaggaaagtcaagaagaatgaactatgtcgatgcacagtatcttttctttcaaaagtagagcaaaactataggttttggttccacaatctctacgactaatcacctactcaatgcctggagacagatacgtagttgtgcttttgtttgctcttttaagcagtctcactgcagtcttatttccaagtaagagtactgggagaatcactaggtaacttattagaaacccaaattgggacaacagtgctttgtaaattgtgttgtcttcagcagtcaatacaaatagatttttgtttttgttgttcctgcagccccagaagaaattaggggttaaagcagacagtcacactggtttggtcagttacaaagtaatttctttgatctggacagaacatttatatcagtttcatgaaatgattggaatattacaataccgttaagatacagtgtaggcatttaactcctcattggcgtggtccatgctgatgattttgccaaaatgagttgtgatgaatcaatgaaaaatgtaatttagaaactgatttcttcagaattagatggccttattttttaaaatatttgaatgaaaacattttatttttaaaatattacacaggaggccttcggagtttcttagtcattactgtccttttcccctacagaattttccctcttggtgtgattgcacagaatttgtatgtattttcagttacaagattgtaagtaaattgcctgatttgttttcattatagacaacgatgaatttcttctaattatttaaataaaatcaccaaaaacat

SEQ ID NO: 29221 - DNA, 5809 bp, Homo Sapiens
ccagccaatgggcagtgaggcctgacgcggggggcggacgctggggccgagggtagcttgagcgcggcggcggcgttgttcagtcagagcgagaacattccagaggtcgcccagctccggcgctgacgggtgtggaccgcggacgtcgctgggacagcccctccccgctgctcggcggcggcacctggcccggccgctcctcgctgcgcttcgcctccgcctcctcggactcggactcgggtttatatcgcgcctcacttcatcccagtcccgggcgagcagcgttgggtttatgtctttatttgacgaaaacgagctgttgcgcagccattggtacctgtattggggaaacatagcatacaagcaagaagcttacagcctcagtggcgaaaattttttcatgtcagagaccgagaactcttgcagtcgtttatgtcatcccttcttctccagacagaagataccaaaaagttgcaatcaaagatctcttcatcttattgataaagccactaataagccaaaatgtctgtcaatgtcaaccgcagcgtgtcagaccagttctatcgctacaagatgccccgtctgattgccaaggttgagggcaaaggcaatggaatcaagacagttatagtcaacatggttgacgttgcaaaggcgcttaatcggcctccaacgtatcccaccaaatattttggttgtgagctgggagcacagacccagtttgatgttaagaatgaccgttacattgtcaatggatctcatgaggcgaataagctgcaagacatgttggatggattcattaaaaaatttgttctctgtcctgaatgtgagaatcctgaaacagatttgcatgtcaatccaaagaagcaaacaataggtaattcttgtaaagcctgtggctatcgaggcatgcttgacacacatcataaactctgcacattcattctcaaaaacccacctgagaatagtgacagtggtacaggaaagaaagaaaaagaaaagaaaaacagaaagggcaaagacaaggaaaatggctccgtatccagcagtgagacaccaccaccaccaccaccaccaaatgaaattaatcctcctccacatacaatggaagaagaggaggatgatgactggggagaagatacaactgaggaagctcaaaggcgtcgaatggatgaaatcagtgaccatgcaaaagttctgacactcagtgatgatttggaaagaacaattgaggagagggtcaatatcctctttgattttgttaagaaaaagaaagaagagggtgttattgattcatctgacaaagaaatcgttgctgaagcagaaagactggatgtaaaagccatgggccctcttgttctaactgaagttctttttaatgagaagattagagaacagattaagaaatacaggcgccatttcctacgattttgtcacaacaacaaaaaagcccaacggtaccttcttcatggtttggagtgtgtggtagcaatgcatcaagctcagcttatctccaagattccacatatcttgaaggagatgtacgatgcagaccttttagaagaagaggtcatcatcagctggtcggaaaaggcctctaagaaatatgtctccaaagaacttgccaaagagattcgtgtcaaagcagaaccatttataaaatggttgaaggaggcagaggaagaatcttctggtggcgaagaagaagatgaagatgagaacattgaggtggtgtattcgaaggctgccagtgtaccgaaagttgagactgtaaagtcagacaacaaggatgacgacatcgatattgatgccatttaaagggatggatgcaacctagcttaacagtataatgctgcaaattttcctccattatcagccagaagtgcaacatgtatgtgcaaaagctaaaatggcttaacatcatgctacactttacactaaaaatctattactgtgagtggtctgttattaagcccaatgagacatctagggagtccatacacatcagtgagcagatgtagtttgcttatttatagcatgtttctttttgaaaaactagtggtggacacatttggatcacatttatacagttataaaaataaaggtttgattttggtcgttcttcagatgtttggctctgaatgacttaagctgaagtaactggctccttactttaaatgttctgccatcatttcacctgatgagcattcttggagcctgccagatattgttaggtcctggggctgcaaagaggtcctcaacaggatgtaaagcaaacttaattgtaattaatttattcagcccattaagaaagtactaaagttttatctctgtagttcctcaaattggcatctggtaatgtacattgtgaggtagactgataatgaaatgacagtgcaacatcttaaccaagaagtaaatatgacctcagtgtcctataaataatgtaagagcaggatttgaaacttggagagctgttttctcatttcatgtacacttgccccaaattgtctttgaagtcgtgtgcattgcacgttggatgagccagggaaattattacattaacaagcattttgtgtgtacgtagtagttactttgtactgagagaacttgctttggggtgcaattaataaactgattttatttgggagaaacaaggaagggtgcacttaactagcaacctaagcatgatttttcagcttttgcccttagggtttaaattacaattccaaaatgttagacatactgtattttttcgttcagtgtggctttaattttcccctcttgcagtttgttctgtaatgccttttacatttggacacatagtttatgctttttagattttggttgctttcttgccaaaataagtgttaactgtgtttcaaacttgattttctttcctttttcttttttttttcttccagaatgtcttatttaaaaagaaagctaaaagcatacttctaagtcagagcctctattttggtgtaagacttgggatattttttacttcacattgaatatagccaggcacccaagaagtctgatggccacctgagtgcaggtgacaaggacctgacagagcccatgcagggctttagatttggacacacaagagttgataacttcctcatgaactccttgcctgatctaaactcatattatgggttctgactgtttgagtaatcatcttcaaggttaaacctcttggcagttacccttttcacaaagtgcacagtgggaatcgagaatcgatagggttaattttggagcagtggcttataccattcacctctgtttttttgtgattatttcacagataatgagaccttaataacaaataggcgtaaaaaaattttcacattgaaatgatagaaacatttgatgtaataaaacttggttggcttgatattttaaggaattgaaacctagcaatcttattggagagacaagaattggtctccagctgcctttgatcaagattcgggtgcaagtggagcaggagccatatacctggagggaatgtgctttgtcacaccaaagaggatttttttttcttcaaacttgtatgttgcctaggtttcaaattctttgccgcaaggctgatctgctttcattaactggaattctgtaggagatactggtgacctaagctaagttgcactcagcatactcagtgtcaagctaatgaggttctattataaaggttctacttttaatctgagggaaaacatgttcagggcttctagaacactaaaaaatttggcttaaaccagtgttcagtctggtgccaaacttcgaatggaatacaaattcacataatctgaactttgttcacaggttatcctaatagagtaattcttcactttgctctattgaactgtcttaaggatttgtttaaacagctaagttacttgattaaaataatgataaaattgtattttgtctttgctttaatattaaagttaacaagttttcattttataatgagatcaaagcattggaatctgccctgttttgtagccgttgctttggatttgtgttggatgtatcctgcagttacacttgccagccccactcacaaaagttgttcatttcattgggtcactggctttatttgctagtcttgtctgtgaactgagcatctgcctcagttttattacttgaaatcttggcaggtgcttaatagggaacatacatacagctatgtaactgtgaataattgtatatatctctagttaagaatgagggaatggggaggtttgctttctaaacaagtgcattctgaaattgacttaaaaatttttagtgtgggtcctaaagtttagagatgggcaaggaggtctctaatccaccgcttcccgcttgagaagggaggggtatcaaaattgagccccaagctgtttgttccagtgtaccaagcactgactttatgcctttggcctggagatggcagaagtgaaagctggccatctgcaaaaagcagataagtgagtttgaaccttttgcattttgttagctcagtcagtcctcatcgtggtcctgaggcataggtactgttgtaccaaggtcacttatctaacaaaataacccttcatgtattttaaatttatttgacaagtctgcagacaatccttatctaaccagctattttcttaattgctacagcttgacctaccagtattccggagtaaccagcaaatgcaaagttaaccttgttcctgcatcatctttttgatggttcaaatttcagcctccctgactactacaaagccagagcagtcttagtaccagaaacagtgttgcactttcgttgcatgtgctgtgtgaccccaaggggacagggagtcactttggtcatctctgtccccagtacagatcttgattcatagtgacattccataagtggggtgacagcaaatgacttgcaggtagtctcattgtaggtttgtgcaccagagtgaccctgtgagcctttgttaataggttgggagctcagggtgtttatgtccacctgtctggtctagccaaacagtttttttctgggaatcaaatttctgtggtttttatggccagaaattttaaggacttgtgtgtgctgggatatgagaatagaagctacagagttcttttcttgggacctagactgggaggtgcaatgtcaggacctccaggtgaatggtaggatctgagttgaccctgcagttcggttatgcagtcaattatttctttttaagaggaggaggattcacttgggtgttgggatcaaatttggattctgtcccaggccttactgtaaaactaggggattgcctttccatatctgctgggggtggagacccttatgtgcagcactcaatcccactggaagcctaatgctgcagtcagaagcaatgcctggctggggcagtaggggaaattccacccaattttgctatgagcctaaaacctctttaaaaacggtcagttaactaaaaaataaaaatcaagtctttaggagagtagaaaacacaattaactaaaaagcagggacatctgaaagagacgtattaagttaacatttttaaaaatccaaatgaaagtaaatggaataaatgtatcaggtaaaggacaagttgtaagcttggatttttaggtctagcaatacactgtttacaagagcatcacctaaaatgtgacaaaagatgttgaaaggatgaaaaaaggtatagtagacatacactaaccaaaaatgtagctctttgaatctcagaaaaaagtagattttaataaagtgtgaaagttgtcaatcaaaaaaaaaaaaaaaaaaaaa

SEQ ID NO: 29222 - DNA, 3034 bp, Homo Sapiens
tttcttgttaaacaaacacctaatttatttcttggaggttttgttcagctgtcctaatttatgactttacattccttctggtgctaaactgctcaagtagcctcttgtatcaagtgtgacctgattccttaagaattttacttaatgagaacctctaagctagaaactcttgctaggtgtttcatgcaccttattttctttaatcattacaacaactctaagattgggttctctccaccttataaatgatgactgttttagagaggttaaggttgcttaaaattggtgagttagtgaggggtagagccacgaatggatttctggtcgctgcctccatcgtcagggcaagcttttcccacgactccagcgcttccatttgtcagtccccaggctagaaagccacagtgctaatttagtatttatcaagcgtttgtagtgtcctgggatctggcacttcgatgagaaagctgtgacggccccaacttctaacagcgagtggtaaggaggacgagggacacaggagggaggagactctccccaaagcttagcaccaacagaagtggtcccccgcaggttgctctgcgagcgccacctcttccctccaaccgaggagaaagtggcgcgcctttgaggagtccgaggtcccggcccaggcggcagcttgggtcctggcgggttccggacgggcgcctcagggacctggaagcaaccgcaccgaacgcgacggagagcggcgagacgactccaggaggcgcccgagctacatcccccggccacaccaaacccgggtttgctggcagacgcggctcacgacaccccttagggtcgcagcccctcccccggaagtgacgtgtagcgactacggcgtctgggagggacccaggagcagtcggggggtttgagagtggcggcggccgcggagggcctggcaggccccgccgctgcaaggaacgccccgaacgcgcgcgcccggcgtgtagcggccccaagacccgcgccgccgctgccgcgtgcgggggcggggagggcggggcgccaggagccgcggcggcgggagatgcgggcggctgcgggcacccggcgggctcggcttggccgccgccgccttctacggctccgccgcgggggtcgcagcggctgccgcgccgtcctcgagtttccagcgtgaggaggaggctgagggcggagaggcgcatcgtgttcgaggcggagaccgagggggagccccgcgcgcggcgtcgctcattgctatggacagtgctatcaccctgtggcagttccttcttcagctcctgcagaagcctcagaacaagcacatgatctgttggacctctaatgatgggcagtttaagcttttgcaggcagaagaggtggctcgtctctgggggattcgcaagaacaagcctaacatgaattatgacaaactcagccgagccctcagatactattatgtaaagaatatcatcaaaaaagtgaatggtcagaagtttgtgtacaagtttgtctcttatccagagattttgaacatggatccaatgacagtgggcaggattgagggtgactgtgaaagtttaaacttcagtgaagtcagcagcagttccaaagatgtggagaatggagggaaagataaaccacctcagcctggtgccaagacctctagccgcaatgactacatacactctggcttatattcttcatttactctcaactctttgaactcctccaatgtaaagcttttcaaattgataaagactgagaatccagccgagaaactggcagagaaaaaatctcctcaggagcccacaccatctgtcatcaaatttgtcacgacaccttccaaaaagccaccggttgaacctgttgctgccaccatttcaattggcccaagtatttctccatcttcagaagaaactatccaagctttggagacattggtttccccaaaactgccttccctggaagccccaacctctgcctctaacgtaatgactgcttttgccaccacaccacccatttcgtccataccccctttgcaggaacctcccagaacaccttcaccaccactgagttctcacccagacatcgacacagacattgattcagtggcttctcagccaatggaacttccagagaatttgtcactggagcctaaagaccaggattcagtcttgctagaaaaggacaaagtaaataattcatcaagatccaagaaacccaaagggttagaactggcacccacccttgtgatcacgagcagtgatccaagcccactgggaatactgagcccatctctccctacagcttctcttacaccagcatttttttcacagacacccatcatactgactccaagccccttgctctccagtatccacttctggagtactctcagtcctgttgctcccctaagtccagccagactgcaaggtgctaacacacttttccagtttccttctgtactgaacagtcatgggccattcactctgtctgggctggatggaccttccacccctggcccattttccccagacctacagaagacataacctatgcacttgtggaatgagagaaccgaggaacgaagaaacagacattcaacatgattgcatttgaagtgagcaattgatagttctacaatgctgataatagactattgtgatttttgccattccccattgaaaacatctttttaggattctctttgaataggactcaagttggactatatgtataaaaatgccttaattggagtctaaactccacctccctctgtcttttccttttctttttctttccttccttccttttcttttctcctttaaaaatattttgagctttgtgctgaagaagtttttggtgggctttagtgactgtgctttgcaaaagcaattaagaacaaagttactccttctggctattgggaccctttggccaggaaaaattatgcttagaatctattatttaaagaaatatttgtgaaatgaaaaaaaaaaaaaaaaaaaaaaaaaaaaaaaaaaaaaaaaaaaaaaaaaaa

SEQ ID NO: 29223 - DNA, 5992 bp, Homo Sapiens
gcgtcccgggtccccgcgccgcgccgcgacctgcagaccccgccgccgcgctcgggcccgtctcccacgcccccgccgccccgcgcgcccaactccgccggccgccccgccccgccccgcgcgctccagacccccggggcggctgccgggagagatgctggaagaaacttcttaaatgaccgcgtctggctggccgtggagcctttctgggttggggagaggaaaggaaagtggaaaaaacctgagaacttcctgatctctctcgctgtgagacatgtctgagactcctgctcagtgtagcattaagcaggaacgaatttcatatacacctccagagagcccagtgccgagttacgcttcctcgacgccacttcatgttccagtgcctcgagcgctcaggatggaggaagactcgatccgcctgcctgcgcacctgcgcttgcagccaatttactggagcagggatgacgtagcccagtggctcaagtgggctgaaaatgagttttctttaaggccaattgacagcaacacgtttgaaatgaatggcaaagctctcctgctgctgaccaaagaggactttcgctatcgatctcctcattcaggtgatgtgctctatgaactccttcagcatattctgaagcagaggaaacctcggattcttttttcaccattcttccaccctggaaactctatacacacacagccggaggtcatactgcatcagaaccatgaagaagataactgtgtccagaggacccccaggccatccgtggataatgtgcaccataaccctcccaccattgaactgttgcaccgctccaggtcacctatcacgacaaatcaccggccttctcctgaccccgagcagcggcccctccggtcccccctggacaacatgatccgccgcctctccccggctgagagagctcagggacccaggccgcaccaggagaacaaccaccaggagtcctaccctctgtcagtgtctcccatggagaataatcactgcccagcgtcctccgagtcccacccgaagccatccagcccccggcaggagagcacacgcgtgatccagctgatgcccagccccatcatgcaccctctgatcctgaacccccggcactccgtggatttcaaacagtccaggctctccgaggacgggctgcatagggaagggaagcccatcaacctctctcatcgggaagacctggcttacatgaaccacatcatggtctctgtctccccgcctgaagagcacgccatgcccattgggagaatagcagactgtagactgctttgggattacgtctatcagttgctttctgacagccggtacgaaaacttcatccgatgggaggacaaagaatccaaaatattccggatagtggatcccaacggactggctcgactgtggggaaaccataagaacagaacaaacatgacctatgagaaaatgtccagagccctgcgccactactacaaactaaacattatcaggaaggagccaggacaaaggcttttgttcaggtttatgaaaaccccagatgaaatcatgagtggccgaacagaccgtctggagcacctagagtcccaggagctggatgaacaaatataccaagaagatgaatgctgaaggaaccaacagtccacctcagcgggccagcagcccagggaacccctgcccaccaggattgctggaagtgtgacggagcaggcgggctgaggagagtggaaaaggaagcgacccagaaatggcagggacacttctcttgcagaccaagagggaccctggagcaccttagacaaactacccagcacaggcggggctggaattctggcggagggcatgagcctgggactccatgtcacgtttccttctgatttggaatctctccatctgtaattcctcaccctcacccttccaccgttgttagtatcatggtgtttttgtttttgtttttgttttaagaacctgcagtttgactcttcatcgttcatctaggggaagacatctgatgttgttttcctatggaaatatatatctattatatatatattttttgcaaatctcacaaagtgcggcaagcccagctggtcaggaaagagaatacttgcagaggggttcaggttcctctttttcctgccacgtggatcaggtctgttcctgttactgttgggtcttggctgaaaaaaaaaaatgcttttaaaaaagataaaatgaaaaggagagctctctttttctctctcttgctctgttcttcccttggtcccctctgtcctcccgccctgcctgcagttgagattcagatgccttctgacagagttcagcctcttggagagtcttggggattgttggcacctaaacagaatcagtgacccgggtgctttgtggccagcagcacagaatcaaacccgcatcccagcattgggccacccatctgagggaggccaaaatcatcacagatgctgctgtgctgcagacagatacatgctagtccagagagccgcccctgagatggctgtgagaaccatgtgtctaaggcgtaagataaggatggaaggctgtccaagttatttggaaggcctcggcagcttgggattagcttgggagcgcagcgctgcaaagtggaaaatatgaaaagaccacacaggcccagcagtccagaaactgggcaaaaatattctgcagtggggatttatttttccaaagcaggtaacagaggctagtgagaaagaaaagctcctctctgctccattccaaaggccatcttgtggtcagtttcatgccctcacctgatttttttttttttttttttttttcaattcctaaccttttttaaagtttcctggtctccactggacacagagctttggagacggaggatcccagagggcagtctcagttgcaatcagtgtgtgcccagcctgggcagacaggaaattcctcggatacattattttttctttctttcatagctgtgtctcagaaaggacccatttgtggctctttttcacctcaaaataagatcgatggtatcttgtaaaatgagggtagtgccacttcttagtatttttgaaagctgttttagattttttttttttttccttttctagccatctaaattgactcttccaatataggtctcagaaatccaatatttggagtacaatttcttttaatccagattacacctgccttacaaagcaccccctccttgttcccctctgtttcctctactcagttgggggagaaactcacagctcctccgggatacatatgtgccctcagcagcagctcccaggtgaagttaccagacccctgggcttctccccagctttttctgagttgagtcagacatgtagagtttgggtcacacaggcaagaggaattttccctcggccttactgacaaggacaccaacctagggtgcaaacagatggactatggttcaaggacactggaattgaggagctgatcaaggctctcttcagccttgctctgtccctgcctcttatcagagcacaggtagacacacgggcatagccagcccactcctactgtcacaggcgccccaccattcaaccttccgggaggtcagggaccttctatatgaggcgagtgggtctcagtctgcttgaatggtgatgagattctgctggatctcagcacgctgcaggtgtcttttgagagcattcagtaggacatggtgatccctatttcagcctctaagatgactggtattctatctgaaatgcagagattaagccaaatacctgatgtattgtgaaagccactgattttaagaatggagagaaagggattttttactgcatccctctgtatgaatatgaaatcagagaccagggcatgatgttgctaggattagagcctctcagtctggcctcttcacccaagtgcaagaactcagtctcttactgttcaaagaatcttaacagttgaattatggagggaaattcccttttgccccaagcatttctatatttaaagcaatatcccaggagaatatgttagacttaggatgataccttcagccacttgaagaagaaatagaaggcgctcattccaatatagtctttatttcccattcagatacaggttgagcatccctaatctgaacagttaaaacccccaaatgccccaaaatccaaaccttcctgaacgctatgacaccatgagtggaaaattccacacctaacaaacacatttgctttcttatggttcaatgtacacaaactgttttatatagaaaatgatttcaaatatcataaaattaccttcaggctatgtgtataaagtatatatgagccataaatgaattttgtgtttagactttgtgtccatccccaagatctctcattttatatatatatatatatatatatatatatatatatatatatatatatacacacacacacacatacacaaatattccaggatacaaaaaaaaacatttaaaaatccgagacccagaacacttctggtcccaagcatttcagataagggatatcaatctgtactaccaataaggatttcgtaattcccctaactgcaaatgtcctcttcatttgttctttatgagaaaacccgggtagtgccagcacctggatacagtatttacaccctgcagaccctaaagatttcagattcagttagcaaaccttgatgaagcacctgctggacactgagggacccaaagctcaatcagccataatccctgctttcagagtttatattgtacctgcctaatccacccggcgtgactcatttcaacactaagtactaggggtgttgtcaggagacaaatctgaagtcaggagaggaaaatgcaaaggagccctgccgtgtgatggatgtgcattctcacttgggtcttgaagttctcattcctacatctcaagctagccaggcagtctcctctctatcagaagaaagcactggtaattggctagactggctatgttgaaggtaacatgaactctaagatcttgacccagggcgacttggttttgcttaaggtggcatcaccaatgttccaaatcctttagggagatgagggtatccccacagaaaaagaggaataatagaccaatggattttctcctttcaccagtatgtttggaaccctctgatccaatgtcctttgatactgatctcttgtccaaatgagaatgtcgctttagctgaaattcaaatggctgtgacaatttaccgaaatgatgaagtaaccaccattcccacctttcactgcctaggctccaagtctgaatacatttttgaaataggaactcccttttgcaaaaaagaaacctgggtgtcagggaggtgaagtgacttgccctaggagcagacagcatgccaagaatggaattaggctcaggatccagcctgggctcaccctgtgtggctcattcccacccaggaaactgaagataaaagatttgggaaaacacaccaagaaaaaggggcagttttctttgcccaagcatttggtgctagttagaggctgttcactctctcctgctcctcttcggagtagaaataaaggctgtgacacaaggaagccagtggggtgggagggaggcaccataatccctccctaaaacccacagaagactaacctgatactcttttgacccaactgcatcaacactaaacagctgcagaccccctgaatctttcacacatgccaagtgaacattcttgatgatttctctttgtgaccgcaaccacctgcaaaccagaacgactctagaatttccttccccgcccccctttttgtttagtttctaatctcttgtttatgaggtgtggggtttataagggactgaatcaaatgaatgtaacaaaaaagaaaaaaaaaacaaaaaaaaatgccttttctcagggccagtgagttgcaaataatttttaaagaaaagcctataattacatcatctcaataaattttttataaaaaaaaaaaaaaaa

SEQ ID NO: 29224 - DNA, 6457 bp, Homo Sapiens
gctgaccagccagtgaggacgcccgctgcctcccacctgccctcctgccgtctttcgccagccaagcccagcctgagccagcacttgcctttacgaccatgttcaaggggctgagcaaaggctcccaggggaaggggtcccccaagggctcccccgccaaggggtcccccaaaggctcccccagcaggcacagccgggctgccacccaggagctggcccttctcatctcccgcatgcaagccaacgccgaccaggtggagcgggacatcctggagacgcagaagaggctgcagcaggaccggctgaacagtgagcagagccaggccctgcagcaccagcaggagacgggccgcagcctgaaggaggctgaggtgctgctcaaggacctcttcctggacgtggacaaggcccggcggctcaagcacccgcaggctgaggagattgagaaggacatcaagcagctgcacgagcgggtgacccaggagtgtgcggagtaccgtgccctgtacgagaagatggtgctgccccccgacgtgggacccagggtcgactgggcacgcgtgctggagcagaaacagaagcaggtctgcgcaggccagtacgggccgggcatggcggagctggagcaacagatcgccgagcacaacatcctgcagaaggagatcgacgcctatgggcagcagctgcggagcctcgtggggccggatgcagccaccatccggagccaataccgagacctactgaaggcggcgtcgtggcgcgggcagagcctgggcagcctgtacacgcacctccagggctgcacgcggcagctgagcgccctggctgagcagcagcgccgcatcctgcagcaggactggagcgacctcatggccgaccctgcgggcgtgcggcgggagtacgagcacttcaagcagcacgagctgctgagccaggagcagagcgtgaaccagctggaggacgacggcgagcgcatggtggagctgcggcaccccgcggtggggcccatccaggcccaccaggaggccctgaagatggagtggcagaacttcctgaacctgtgtatctgccaggagacccagctgcagcacgtggaggactaccgccggttccaggaagaggccgactcagtcagccagaccctggcgaagctcaactccaacttggatgccaagtacagccctgcacctgggggcccccctggcgcccccacagagctgctgcaacagctggaggcagaggaaaaacggctggccgtcaccgagagggccactggggacctgcagcggcgaagccgggatgtggcccctctgccacagcgaagaaacccccctcagcagcccctgcacgtggacagcatctgcgactgggactcaggagaagtgcagctgctgcagggtgagcggtataagctggtagataacactgaaccgcacgcctgggtcgtgcagggccctggcggggagaccaagcgtgctcccgccgcctgcttctgcatcccagcaccagaccctgatgctgtggccagggcctcccggctggcctcagagctgcaggccctgaagcagaaattggccacagtccagagccgcctgaaggccagtgctgtggagtctcttcggcccagccagcaggctccatctggctcagacctggccaacccacaggcccagaagctcctgacacagatgacccggctggatggagacctgggacagatagagaggcaggtgctggcctgggcgcgggccccgctgagccgccccacacccttggaggacttggagggccgcatccacagccatgagggcacagcccagcgcctgcagagcctgggaacggagaaggagacagcccagaaggagtgcgaggcgtttctgtccacgcggcccgtgggccccgctgccctgcagctgcccgtagccctcaacagcgtgaagaacaagttcagtgacgtgcaggttctgtgcagcctctacggggagaaagccaaggctgccctggatctggagcggcagatccaggatgcggacagggtcatccgaggcttcgaggccaccctggtgcaggaggcccccatccctgctgaaccgggggctctgcaggagagggtcagcgagctgcagcgccagcggagggagctgctggaacagcagacctgcgtgctgcggctacaccgcgcgctgaaggcctcggagcacgcatgcgctgccctgcagaacaacttccaggagttctgccaagacctgcctcgccagcagcgccaggtgcgagccctcaccgaccgctaccacgccgtaggggaccagctggacctgcgggagaaggtggtgcaggatgccgccctcacctaccagcagttcaagaactgcaaggataacctgagctcctggctggagcacctgccccgcagccaggtgcggcccagcgacggccccagccagatcgcctacaagctgcaggcgcagaagaggctgacgcaggagatccagagccgagagcgggacagggccacagcatcccacctctcccaggccctgcaggcagcgctccaggactatgagctccaggcagacacctaccgctgctctttggagcccaccctggcagtgtcagcccccaagagaccccgagtggctcccctgcaagagagcatccaagcccaggagaagaaccttgcaaaggcctatactgaggttgcagcagcacagcagcagctgctccagcagctggagtttgctagaaaaatgctggagaagaaggagctcagtgaggacatccgaaggacccatgatgcaaagcagggctccgagagccctgcccaagcagggagagagtcagaggccctgaaggcccagctggaagaggagaggaagcgggtggcccgggtgcagcatgagctggaggcgcagaggagccaactgctgcagctgaggacccagcggcccttggagaggctggaggagaaggaagtggtagagttctaccgggacccccagctggagggcagcctgtccagggtgaaggcccaggtggaggaggagggcaagcggcgggctggcctgcaggcagacctggaagtggcagcccagaaggtcgtgcagctggaaagcaagaggaagaccatgcagcctcatctgctgaccaaggaggtcacccaggtggagagggaccccggcctggacagccaggcggcccagctcaggatccagatccagcagctccgcggggaggatgccgtcatctcggcccggctggaagggctgaagaaggagctactggcccttgagaagagggaggtggacgtgaaggagaaggtcgtggtgaaagaggtagtcaaggtggagaagaatctggaaatggtcaaggcagcccaggctctgaggctgcagatggaggaggatgctgcgcggaggaagcaggcggaggaggctgtggccaagctacaggctcgcatcgaagacctggagcgggctatcagctcggtggagcccaaggtcatcgtgaaggaggtgaagaaggtggagcaggacccagggctcctccaggagtcctccaggctgaggagcctcctcgaggaggagaggaccaagaacgcgacgctggccagggagctgagcgacctgcacagcaagtacagcgtggtggagaagcagaggcccaaagtgcagctccaggagcgcgtccacgagatcttccaggtggatccggagacagagcaggagatcactcggctcaaggccaagctgcaggagatggcgggcaagaggagcggtgtggagaaggaggtggagaagctgctgcccgacctggaggtcctgcgggcccagaagcccacggtggagtacaaggaggtgacccaggaggtggtgaggcatgagaggagccccgaggtgctgcgtgagatcgaccgcctgaaggctcagctcaacgagctcgtcaacagccacgggcgctcccaggagcagctcatccgcctgcagggtgagcgcgacgagtggaggcgcgagcgggccaaggtggagaccaagacggtgagcaaggaggtggtgcgccacgagaaggacccggtgctggagaaagaagcagagcggctccgccaggaggtgcgggaggcggcccagaagaggcgggccgcggaggacgcggtgtacgagctgcagagcaagcgcctgctgctggagaggaggaagcccgaggagaaggtggtggtgcaggaggtggtggtcacccagaaggacccgaagctgcgcgaggagcacagccggctgagcgggagcctggatgaggaggtgggccggcggcgccagctagagcttgaggtgcagcagctgcgggccggcgtggaggagcaggagggcctgctcagcttccaggaggaccgcagcaagaagctggccgtggagagggagctgcggcagctgaccttgaggatccaggagctcgagaagcggcctcccacggtgcaggagaagatcatcatggaggaagtggtcaagctggagaaggacccggacctggagaagtccacggaagccctgcggtgggacctggaccaggagaagacccaggtaaccgagctgaatcgggagtgcaagaacctgcaggtccagattgacgtcctccagaaagccaaatcgcaggagaagaccatctacaaggaagtgatccgggtgcagaaggaccgcgtcctggaagatgagcgggcccgcgtgtgggagatgctcaacagggagcgcacggcccggcaggcccgggaggaggaggcacggcgcctgcgggagcgcattgaccgggccgagacgctggggagaacctggtcccgggaggagtccgagctgcagagggcccgggaccaggccgaccaggagtgtgggcggctgcagcaggagctgcgggctctggagaggcagaagcagcagcagacactgcagctgcaggaggagtcgaagctgctcagccagaagacggagagcgagcgacagaaggcggcccagcggggccaggagctctcgcggctggaggcggccatcctccgcgagaaggaccagatctacgagaaggagcggacgctccgggacctccacgccaaggtgagccgggaggagctcagccaggagacccagacgcgagagaccaacctttccaccaagatctccatcctggaacccgagacggggaaggacatgtccccatacgaggcctacaagaggggcatcatcgacaggggccagtacttgcagctgcaggagctcgagtgtgactgggaggaggtcaccacctcggggccctgtggggaggagtctgtgctcctggaccgcaagagcgggaagcagtactccatcgaggccgccctccgctgccggcgcatctctaaggaggagtaccatctgtacaaggacggccacctgcccatctccgagtttgcgctgcttgtagctggggagaccaagccaagctcctcactctccatcggctctatcatctccaagtccccgctcgcctccccggccccccagagcaccagtttcttctctcccagcttctctctcgggctcggtgatgacagcttccctatcgccgggatctatgacacaaccacagacaacaagtgcagcatcaagacggccgtggccaagaacatgctggaccccatcactgggcagaagctactggaggcccaggcggccacagggggcatcgtggacctgctcagccgtgagcgctactctgtgcacaaggcgatggagaggggcctgatcgagaacacctccacacagaggctgcttaacgcccagaaggccttcaccggcatcgaggaccccgtcaccaagaagaggctctcggtgggcgaggccgtccagaagggctggatgccccgggagagcgtgctcccacacctgcaggtgcagcacctgaccggggggctcatcgaccccaagaggacaggccgcatccccatccagcaggccctcctctccgggatgatcagtgaagagctggcccagctcctgcaggacgagtccagctacgagaaggatttgacagaccccatctccaaggaacggctgagctacaaggaggccatgggccgctgccgcaaagaccccctgagcggcctgctgctcctgccagcggcactggaggggtaccgctgctaccgctccgcctcccccaccgtcccgcgctcccttcgctgacacgggccaaggagccagtggggaagtgcgtgtgttgggccaggtaggatacgtacacctcttgcctcagagcagcctcatcccaggcagtgggtcttccctctgtccaaccactgttttattattttactaacatggtgatgggctccctcccctaaccttggtgcctgatccatccccagaccaggacagcagccactcagttcttcctccacctccacccagtgatcccaataaacgaattctgtctccccgtg

SEQ ID NO: 29225 - DNA, 5723 bp, Homo Sapiens
gcagccgccacattcaacaggcagcagcgcagcgggcgcgccgctggggagagcaagcggcccgcggcgtccgtccgtccttccgtccgcggccctgtcagctggagcgcggcgcaggctctgccccggcccggcggctctggccggccgtccagtccgtgcggcggaccccgaggagcctcgatgtggatggccccgcgaagttaagttctgggctcgcgcttccactccgccgcgccttcctcccagtttccgtccgctcgccgcaccggcttcgttcccccaaatctcggaccgtcccttcgcgccccctccccgtccgcccccagtgctgcgttctccccctcttggctctcctgcggctgggggaggggcgggggtcaccatggccgaggcgcctcaggtggtggagatcgacccggacttcgagccgctgccccggccgcgctcgtgcacctggccgctgcccaggccggagtttagccagtccaactcggccacctccagcccggcgccgtcgggcagcgcggctgccaaccccgacgccgcggcgggcctgccctcggcctcggctgccgctgtcagcgccgacttcatgagcaacctgagcttgctggaggagagcgaggacttcccgcaggcgcccggctccgtggcggcggcggtggcggcggcggccgccgcggccgccaccggggggctgtgcggggacttccagggcccggaggcgggctgcctgcacccagcgccaccgcagcccccgccgcccgggccgctgtcgcagcacccgccggtgccccccgccgccgctgggccgctcgcggggcagccgcgcaagagcagctcgtcccgccgcaacgcgtggggcaacctgtcctacgccgacctcatcaccaaggccatcgagagctcggcggagaagcggctcacgctgtcgcagatctacgagtggatggtcaagagcgtgccctacttcaaggataagggtgacagcaacagctcggcgggctggaagaattcaattcgtcataatctgtccctacacagcaagttcattcgtgtgcagaatgaaggaactggaaaaagttcttggtggatgctcaatccagagggtggcaagagcgggaaatctcctaggagaagagctgcatccatggacaacaacagtaaatttgctaagagccgaagccgagctgccaagaagaaagcatctctccagtctggccaggagggtgctggggacagccctggatcacagttttccaaatggcctgcaagccctggctctcacagcaatgatgactttgataactggagtacatttcgccctcgaactagctcaaatgctagtactattagtgggagactctcacccattatgaccgaacaggatgatcttggagaaggggatgtgcattctatggtgtacccgccatctgccgcaaagatggcctctactttacccagtctgtctgagataagcaatcccgaaaacatggaaaatcttttggataatctcaaccttctctcatcaccaacatcattaactgtttcgacccagtcctcacctggcaccatgatgcagcagacgccgtgctactcgtttgcgccaccaaacaccagtttgaattcacccagcccaaactaccaaaaatatacatatggccaatccagcatgagccctttgccccagatgcctatacaaacacttcaggacaataagtcgagttatggaggtatgagtcagtataactgtgcgcctggactcttgaaggagttgctgacttctgactctcctccccataatgacattatgacaccagttgatcctggggtagcccagcccaacagccgggttctgggccagaacgtcatgatgggccctaattcggtcatgtcaacctatggcagccaggcatctcataacaaaatgatgaatcccagctcccatacccaccctggacatgctcagcagacatctgcagttaacgggcgtcccctgccccacacggtaagcaccatgccccacacctcgggtatgaaccgcctgacccaagtgaagacacctgtacaagtgcctctgccccaccccatgcagatgagtgccctggggggctactcctccgtgagcagctgcaatggctatggcagaatgggccttctccaccaggagaagctcccaagtgacttggatggcatgttcattgagcgcttagactgtgacatggaatccatcattcggaatgacctcatggatggagatacattggattttaactttgacaatgtgttgcccaaccaaagcttcccacacagtgtcaagacaacgacacatagctgggtgtcaggctgagggttagtgagcaggttacacttaaaagtacttcagattgtctgacagcaggaactgagagaagcagtccaaagatgtctttcaccaactcccttttagttttcttggttaaaaaaaaaaacaaaaaaaaaaaccctcctttttttcctttcgtcagacttggcagcaaagacatttttcctgtacaggatgtttgcccaatgtgtgcaggttatgtgctgctgtagataaggactgtgccattggaaatttcattacaatgaagtgccaaactcactacaccatataattgcagaaaagattttcagatcctggtgtgctttcaagttttgtatataagcagtagatacagattgtatttgtgtgtgtttttggtttttctaaatatccaattggtccaaggaaagtttatactctttttgtaatactgtgatgggcctcatgtcttgataagttaaacttttgtttgtactacctgttttctgcggaactgacggatcacaaagaactgaatctccattctgcatctccattgaacagccttggacctgttcacgttgccacagaattcacatgagaaccaagtagcctgttatcaatctgctaaattaatggacttgttaaacttttggaaaaaaaaagattaaatgccagctttgtacaggtcttttctatttttttttgtttattttgttatttgcaaatttgtacaaacatttaaatggttctaatttccagataaatgatttttgatgttattgttgggacttaagaacatttttggaatagatattgaactgtaataatgttttcttaaaactagagtctactttgttacatagtcagcttgtaaattttgtggaaccacaggtatttggggcagcattcataattttcattttgtattctaactggattagtactaattttatacatgcttaactggtttgtacactttgggatgctacttagtgatgtttctgactaatcttaaatcattgtaattagtacttgcatattcaacgtttcaggccctggttgggcaggaaagtgatgtatagttatggacactttgcgtttcttatttaggataacttaatatgtttttatgtatgtattttaaagaaatttcatctgcttctactgaactatgcgtactgcatagcatcaagtcttctctagagacctctgtagtcctgggaggcctcataatgtttgtagatcagaaaagggagatctgcatctaaagcaatggtcctttgtcaaacgagggattttgatccacttcaccattttgagttgagctttagcaaaagtttcccctcataattctttgctcttgtttcagtccaggtggaggttggttttgtagttctgccttgaggaattatgtcaacactcatacttcatctcattctcccttctgccctgcagattagattacttagcacactgtggaagtttaagtggaaggagggaatttaaaaatgggacttgagtggtttgtagaatttgtgttcataagttcagatgggtagcaaatggaatagaacttacttaaaaattggggagatttatttgaaaaccagctgtaagttgtgcattgagattatgttaaaagccttggcttaagaatttgaaaatttctttagcctgtagcaacctaaactgtaattcctatcattatgttttattactttccaattacctgtaactgacagaccaaattaattggctttgtgtcctatttagtccatcagtattttcaagtcatgtggaaagcccaaagtcatcacaatgaagagaacaggtgcacagcactgttcctcttgtgttcttgagaaggatctaatttttctgtatatagcccacatcacacttgctttgtcttgtatgttaattgcatcttcattggcttggtatttcctaaatgtttaacaagaacacaagtgttcctgataagatttcctacagtaagccagctgtattgtaagcttcccaccgtgatgatcatttttttgaagattcattgaacagccaccactctatcatcctcattttggggcagtccaagacatagctggttttagaaacccaagttcctctaagcacagcctcccgggtatgtaactgaacttggtgccaaagtacttgtgtactaatttctattactacgtactgtcactttcctcccgtgccattactgcatcataatacaaggaacctcagagcccccatttgttcattaaagaggcaactacagccaaaatcactgttaaaatcttactacttcatggagtagctcttaggaaaatatatcttcctcctgagtctgggtaattatacctctcccaagcccccattgtgtgttgaaatcctgtcatgaatccttggtagctctctgagaacagtgaagtccagggaaaggcatctggtctgtctggaaagcaaacattatgtggcctctggtagtttttttcctgtaagaatactgactttctggagtaatgagtatatatcagttattgtacatgattgctttgtgaaatgtgcaaatgatatcacctatgcagccttgtttgatttattttctctggtttgtactgttattaaaagcatattgtattatagagctattcagatattttaaatataaagatgtattgtttccgtaatatagacgtatggaatatatttaggtaatagatgtattacttggaaagttctgctttgacaaactgacaaagtctaaatgagcacatgtatcccagtgagcagtaaatcaatggaacatcccaagaagaggataaggatgcttaaaatggaaatcattctccaacgatatacaaattggacttgttcaactgctggatatatgctaccaataaccccagccccaacttaaaattcttacattcaagctcctaagagttcttaatttataactaattttaaaagagaagtttcttttctggttttagtttgggaataatcattcattaaaaaaaatgtattgtggtttatgcgaacagaccaacctggcattacagttggcctctccttgaggtgggcacagcctggcagtgtggccaggggtggccatgtaagtcccatcaggacgtagtcatgcctcctgcatttcgctacccgagtttagtaacagtgcagattccacgttcttgttccgatactctgagaagtgcctgatgttgatgtacttacagacacaagaacaatctttgctataattgtataaagccataaatgtacataaattatgtttaaatggcttggtgtctttcttttctaattatgcagaataagctctttattaggaattttttgtgaagctattaaatacttgagttaa

SEQ ID NO: 29226 - DNA, 5777 bp, Homo Sapiens
gcggacactcctctcggctcctccccggcagcggcggcggctcggagcgggctccggggctcgggtgcagcggccagcgggcctggcggcgaggattacccggggaagtggttgtctcctggctggagccgcgagacgggcgctcagggcgcggggccggcggcggcgaacgagaggacggactctggcggccgggtcgttggccgggggagcgcgggcaccgggcgagcaggccgcgtcgcgctcaccatggtcagctactgggacaccggggtcctgctgtgcgcgctgctcagctgtctgcttctcacaggatctagttcaggttcaaaattaaaagatcctgaactgagtttaaaaggcacccagcacatcatgcaagcaggccagacactgcatctccaatgcaggggggaagcagcccataaatggtctttgcctgaaatggtgagtaaggaaagcgaaaggctgagcataactaaatctgcctgtggaagaaatggcaaacaattctgcagtactttaaccttgaacacagctcaagcaaaccacactggcttctacagctgcaaatatctagctgtacctacttcaaagaagaaggaaacagaatctgcaatctatatatttattagtgatacaggtagacctttcgtagagatgtacagtgaaatccccgaaattatacacatgactgaaggaagggagctcgtcattccctgccgggttacgtcacctaacatcactgttactttaaaaaagtttccacttgacactttgatccctgatggaaaacgcataatctgggacagtagaaagggcttcatcatatcaaatgcaacgtacaaagaaatagggcttctgacctgtgaagcaacagtcaatgggcatttgtataagacaaactatctcacacatcgacaaaccaatacaatcatagatgtccaaataagcacaccacgcccagtcaaattacttagaggccatactcttgtcctcaattgtactgctaccactcccttgaacacgagagttcaaatgacctggagttaccctgatgaaaaaaataagagagcttccgtaaggcgacgaattgaccaaagcaattcccatgccaacatattctacagtgttcttactattgacaaaatgcagaacaaagacaaaggactttatacttgtcgtgtaaggagtggaccatcattcaaatctgttaacacctcagtgcatatatatgataaagcattcatcactgtgaaacatcgaaaacagcaggtgcttgaaaccgtagctggcaagcggtcttaccggctctctatgaaagtgaaggcatttccctcgccggaagttgtatggttaaaagatgggttacctgcgactgagaaatctgctcgctatttgactcgtggctactcgttaattatcaaggacgtaactgaagaggatgcagggaattatacaatcttgctgagcataaaacagtcaaatgtgtttaaaaacctcactgccactctaattgtcaatgtgaaaccccagatttacgaaaaggccgtgtcatcgtttccagacccggctctctacccactgggcagcagacaaatcctgacttgtaccgcatatggtatccctcaacctacaatcaagtggttctggcacccctgtaaccataatcattccgaagcaaggtgtgacttttgttccaataatgaagagtcctttatcctggatgctgacagcaacatgggaaacagaattgagagcatcactcagcgcatggcaataatagaaggaaagaataagatggctagcaccttggttgtggctgactctagaatttctggaatctacatttgcatagcttccaataaagttgggactgtgggaagaaacataagcttttatatcacagatgtgccaaatgggtttcatgttaacttggaaaaaatgccgacggaaggagaggacctgaaactgtcttgcacagttaacaagttcttatacagagacgttacttggattttactgcggacagttaataacagaacaatgcactacagtattagcaagcaaaaaatggccatcactaaggagcactccatcactcttaatcttaccatcatgaatgtttccctgcaagattcaggcacctatgcctgcagagccaggaatgtatacacaggggaagaaatcctccagaagaaagaaattacaatcagagatcaggaagcaccatacctcctgcgaaacctcagtgatcacacagtggccatcagcagttccaccactttagactgtcatgctaatggtgtccccgagcctcagatcacttggtttaaaaacaaccacaaaatacaacaagagcctggaattattttaggaccaggaagcagcacgctgtttattgaaagagtcacagaagaggatgaaggtgtctatcactgcaaagccaccaaccagaagggctctgtggaaagttcagcatacctcactgttcaaggaacctcggacaagtctaatctggagctgatcactctaacatgcacctgtgtggctgcgactctcttctggctcctattaaccctccttatccgaaaaatgaaaaggtcttcttctgaaataaagactgactacctatcaattataatggacccagatgaagttcctttggatgagcagtgtgagcggctcccttatgatgccagcaagtgggagtttgcccgggagagacttaaactgggcaaatcacttggaagaggggcttttggaaaagtggttcaagcatcagcatttggcattaagaaatcacctacgtgccggactgtggctgtgaaaatgctgaaagagggggccacggccagcgagtacaaagctctgatgactgagctaaaaatcttgacccacattggccaccatctgaacgtggttaacctgctgggagcctgcaccaagcaaggagggcctctgatggtgattgttgaatactgcaaatatggaaatctctccaactacctcaagagcaaacgtgacttattttttctcaacaaggatgcagcactacacatggagcctaagaaagaaaaaatggagccaggcctggaacaaggcaagaaaccaagactagatagcgtcaccagcagcgaaagctttgcgagctccggctttcaggaagataaaagtctgagtgatgttgaggaagaggaggattctgacggtttctacaaggagcccatcactatggaagatctgatttcttacagttttcaagtggccagaggcatggagttcctgtcttccagaaagtgcattcatcgggacctggcagcgagaaacattcttttatctgagaacaacgtggtgaagatttgtgattttggccttgcccgggatatttataagaaccccgattatgtgagaaaaggagatactcgacttcctctgaaatggatggctcccgaatctatctttgacaaaatctacagcaccaagagcgacgtgtggtcttacggagtattgctgtgggaaatcttctccttaggtgggtctccatacccaggagtacaaatggatgaggacttttgcagtcgcctgagggaaggcatgaggatgagagctcctgagtactctactcctgaaatctatcagatcatgctggactgctggcacagagacccaaaagaaaggccaagatttgcagaacttgtggaaaaactaggtgatttgcttcaagcaaatgtacaacaggatggtaaagactacatcccaatcaatgccatactgacaggaaatagtgggtttacatactcaactcctgccttctctgaggacttcttcaaggaaagtatttcagctccgaagtttaattcaggaagctctgatgatgtcagatatgtaaatgctttcaagttcatgagcctggaaagaatcaaaacctttgaagaacttttaccgaatgccacctccatgtttgatgactaccagggcgacagcagcactctgttggcctctcccatgctgaagcgcttcacctggactgacagcaaacccaaggcctcgctcaagattgacttgagagtaaccagtaaaagtaaggagtcggggctgtctgatgtcagcaggcccagtttctgccattccagctgtgggcacgtcagcgaaggcaagcgcaggttcacctacgaccacgctgagctggaaaggaaaatcgcgtgctgctccccgcccccagactacaactcggtggtcctgtactccaccccacccatctagagtttgacacgaagccttatttctagaagcacatgtgtatttatacccccaggaaactagcttttgccagtattatgcatatataagtttacacctttatctttccatgggagccagctgctttttgtgatttttttaatagtgctttttttttttgactaacaagaatgtaactccagatagagaaatagtgacaagtgaagaacactactgctaaatcctcatgttactcagtgttagagaaatccttcctaaacccaatgacttccctgctccaacccccgccacctcagggcacgcaggaccagtttgattgaggagctgcactgatcacccaatgcatcacgtaccccactgggccagccctgcagcccaaaacccagggcaacaagcccgttagccccaggggatcactggctggcctgagcaacatctcgggagtcctctagcaggcctaagacatgtgaggaggaaaaggaaaaaaagcaaaaagcaagggagaaaagagaaaccgggagaaggcatgagaaagaatttgagacgcaccatgtgggcacggagggggacggggctcagcaatgccatttcagtggcttcccagctctgacccttctacatttgagggcccagccaggagcagatggacagcgatgaggggacattttctggattctgggaggcaagaaaaggacaaatatcttttttggaactaaagcaaattttagacctttacctatggaagtggttctatgtccattctcattcgtggcatgttttgatttgtagcactgagggtggcactcaactctgagcccatacttttggctcctctagtaagatgcactgaaaacttagccagagttaggttgtctccaggccatgatggccttacactgaaaatgtcacattctattttgggtattaatatatagtccagacacttaactcaatttcttggtattattctgttttgcacagttagttgtgaaagaaagctgagaagaatgaaaatgcagtcctgaggagagttttctccatatcaaaacgagggctgatggaggaaaaaggtcaataaggtcaagggaagaccccgtctctataccaaccaaaccaattcaccaacacagttgggacccaaaacacaggaagtcagtcacgtttccttttcatttaatggggattccactatctcacactaatctgaaaggatgtggaagagcattagctggcgcatattaagcactttaagctccttgagtaaaaaggtggtatgtaatttatgcaaggtatttctccagttgggactcaggatattagttaatgagccatcactagaagaaaagcccattttcaactgctttgaaacttgcctggggtctgagcatgatgggaatagggagacagggtaggaaagggcgcctactcttcagggtctaaagatcaagtgggccttggatcgctaagctggctctgtttgatgctatttatgcaagttagggtctatgtattta

SEQ ID NO: 29227 - DNA, 3121 bp, Homo Sapiens
ccggaagaaaacggctcctgtcacagaagtctcgtgattgctctgggagctttgcttagacacttgaaactacaggagaaagaaggatctagcgaaatatggctacagagagccctgctacgcgtcgggtccaggtggcagaacatcctaggttactgaagctaaaggagatgtttaactccaagtttggatctattcccaagttttatgttcgagcaccaggaagagtcaacataataggagagcatatagattattgtggatattctgttcttcctatggctgtagaacaagatgtgctaatagctgtagaacctgtgaaaacgtacgctctccaactggccaatacaaatcccttgtatccggacttcagtactagtgctaataacatccagattgataaaaccaagcctttgtggcacaactatttcttatgtggacttaaaggaattcaggaacactttggtcttagtaacctgactggaatgaactgcctggtagatggaaatatcccaccaagttctggcctctccagctccagtgctttggtctgttgtgctggcttggtgacgctcacagtgctgggaaggaatctatccaaggtggaacttgcagaaatctgtgccaagagtgagcgttacattggcactgaaggaggaggcatggaccagtctatatcatttcttgcagaagaaggaactgccaagttgatagaatttagtcctctgagggcaaccgatgtaaaactcccaagtggagcagtgtttgtgattgccaacagttgtgtggagatgaataaggcagcaacttcccatttcaatatcagggtgatggagtgtcggctggctgcgaagctcctggctaaatacaaaagcttgcaatgggacaaagtactgaggctggaggaggtgcaggctaaactagggattagtctagaagaaatgctgttggtcacagaagatgcccttcatcctgaaccctataaccctgaggagatctgcaggtgtctgggaattagcctggaggaactccgaacccaaatcctgagtccaaacactcaagatgtgctcatcttcaaactctatcagcgggcaaagcatgtgtacagcgaggctgcgcgagtgctccagtttaagaagatatgtgaagaagcacctgaaaacatggtccagctgctgggagagttgatgaaccagagccacatgagctgccgggacatgtatgagtgcagctgccccgagctggatcagctggtggacatctgtcggaagtttggggctcaagggtcacgacttactggagcaggatggggaggctgcacagtatcaatggtacctgcggacaagctgcccagctttctagcaaatgtgcacaaagcttattaccagaggagtgatggaagcttagcaccggagaagcaaagtttgtttgctaccaaacctggaggtggggctttggttttgcttgaggcctgaaaaaatgtaaaaagtctgagagaaactacttagggcacttaggaattggcaggactttctgtgccacagtaaattaatcttccttctgttttgtattatgatgaacggttgctattatatcaagatatattttcaaagaaatggttgaaagctctctatgcttcataatgattctttttccatcttaaaatatggttttactattaagagccaagatcatgcttggacagatcttttaagaataacttactgagatttattgatttgaagattttaaagatgaatggtaaaacacactcttaatactgattacatggattggacttgaattaaatatattgttacaattaaactgataccactgaattgtatgcattattcttgaatagagttcatttctggtttctcttagtattcttcttcctcaaagttgtagttgtctgttgatgatggtgatgatgatgatgatgacgatagtgatgccacacattctctctcaatttcagcttcggaacgctatgaaaataatacatgattaaagtttcacagatcttcttggacattgtataattgaatttgaatgtgagatttctccagttatcaagagactaaggatttttttttttttttgacaaaaggaggatacaggaagaaaattcagactcatttgaatatttgtaaaccatgtaatatataaataaccactttcaattcttttggccctgagctatctccattacttaatagaaaaacttagataaaaaacactttaagactcttctattcacattgaaataaagaattatctagatgataattcagataattcagtttgttcatagaattactttcttatcactctttttctactactttttctcaaatacctctctaatccaagaggcacttccaagaaattccacacattccttatatcccttttttgcttgtctagcaaagcttgtttgtatatatgcaccccattgtaaagcaggtatgcaggtatgtgggtgaaagtgactatgaaaagacttaatgaattctgggatttgtaatggtattgatgggtatctctgtatgtatatcaagagtgggcagaaatgtttggctggtgatggcaaatgactggctttctcttgtggatggactataggaagcactttctgaattatgtaatgatttggaccaaaaagtattttgctgaaatactcaggtaattgagatagcaatggttttatggcatgaattatccaaaaaaatatcagaattacttattattctgtgatttcattagctcattaatgtttaactcacagattgggcatcaccatctagaatttcagtttaagggaggcctgcgcaaagctagttttatttcttaaaggataacagtcatacatagaatactaggaaagccaatattctatttaaaaataaacttctgatgcattttcattcttagcagaaaggtaaatgcttgagaaagcttgagtcaaatttgttaaaagaattttgagttctataaatccaaaaatctgaaacctgaatttatttaaatttataatcctttattttttaataccgtgccattttccacaaaggatttgtggttggtatataattctttaaagatacctggatcagtg

SEQ ID NO: 29228 - DNA, 2828 bp, Homo Sapiens
agcagccggcacggggacagccggccgcacaacggatctgcaggcgcggagcaaaatgcacccgccgcgccgcgcggtcctgcagccccgccacggccccgcggcccgcacccccccggggcgacagtgagcctctcccgccaccaccgggggccgagcggagggctctcgggtgggagagcgggaccagatctcgacagctgttcatttccaggaagccaccgcagccagagcgaaaggggaccttctgccaccagcggggcatcagccagcggcgcgcatggatttatgaagacactcatgcaagaagtgggcaggacttggacaaacttttccaccggctccgcgtccgccgctccccgcgcctcgtctcctttcccctcctctcccggcggccgccgctgcccgcgatggtggccgcgctgctgggcggcggcggcgaggcccgcggggggacagtgccgggcgcctggctgtgcctgatggcgctgctgcagctgctgggctcggcgccgcggggatcggggctggcgcacggccgccgcctcatctgctggcaggcgctgctgcagtgccagggggagccggagtgcagctacgcctacaaccagtacgccgaggcgtgcgcgccggtgctggcgcagcacggcgggggcgacgcgcccggggccgccgccgccgctttcccggcctcggccgcctctttctcgtcgcgctggcgctgcccgagtcactgcatctcggccctcattcagctcaaccacacgcgccgcgggcccgccctggaggactgtgactgcgcgcaggacgagaactgcaagtccaccaagcgcgccattgagccgtgcctgccccggacgagcggcggcggcgcgggcggccccggcgcgggcggggtcatgggctgcaccgaggcccggcggcgctgcgaccgcgacagccgctgcaacctggcgctgagccgctacctgacctactgcggcaaagtcttcaacgggctgcgctgcacggacgaatgccgcaccgtcattgaggacatgctggctatgcccaaggtggcgctgctcaacgactgcgtgtgcgacggcctcgagcggcccatctgcgagtcggtcaaggagaacatggcccgcctgtgcttcggcgccgagctgggcaacggccccggcagcagcggctcggacgggggcctggacgactactacgatgaggactacgatgacgagcagcgcaccgggggcgcgggtggtgagcagccgctggacgacgacgacggcgtcccgcacccaccgcgcccgggcagcggcgctgctgcatcgggcggccgcggggacctgccctatgggcctgggcgcaggagcagcggcggcggcggccgcttggcgccccggggcgcctggaccccactcgcctccatcttgctgctgctgcttgggccgctcttttagccctcgcgccccccgccgttggctgcgggagagcccgcgtcccactcccgtgctcgcctcgaccccgcgccgggcacctgtggcttgggacagatagaagggatggttggggatacttcccaaaactttttccaagtcaacttggtgtagccggttccccggccacgactctgggcacttcccctgaagctcctctccggagcttgacttcttggacctcctcccccgccccaattccaagctccagaaactcccaactcgtctgccgtccagaaagctagctgcagtgttcaggacgtccgggaggaagcaagcatgtgggggacagaacagtagtcctggactcgaaagggaaggtgctgaccagtggggccttagcaatttgaagggttgggaaggaggaattatatttgcaaaggggctgtctattagcatatttcctttgagggggcaaaaaaaagtgccagtatcgacttttacagattgtggccagtgaggatattataatcctatgtaaacagaaaagtcccacttaccgattcattctttcactgtttgtatctgcgcccagaattctcagtgacgtgggggtgagggtgggtggcgattgccttagagggaacccctaaattggttttggataagtttgagcccttgaccttaatttcattgctaccactctgatctcttagcacatttcttaggattaagggtccaaaaatgctgatctaaggggttgccatggtgttgaacaatgcaactttttatttaaaaaagctctgcactgccatgtatgaaagtctctttatgatgtttgtttttttgtcatttttgttctttacatcaagaaattttatgtttaaatatgcggagaatgtatattgcctctgctcctatcagggttgctaaaccctggtacatcgtatataaaatgtattaaaactggggtttgttaccagttgctgtactttgtatatagaatttttataaattgtatgcttcagaaataatttatttttaaaaagaaattaaaagttttaaactcacatccatattacacctttcccccctgaaatgtatagaatccatttgtcatcaggaatcaaaacccacagtccattgtgaagtgtgctatatttagaacagtcttaaaatgtacagtgtattttatagaattgaagttaacattcttattttcaagagaatttatggacgttgtagaaatgtacaaatgcatttccaaactgccttaaacgttgtatttttatagacatgtttttttaaaaatcctaagtttttaaataactatggatttgtgtattttttttggttatttgttttattaaaacatgtacatcagtaaagagttttaaacaatga

SEQ ID NO: 29229 - DNA, 3372 bp, Homo Sapiens
gtcgccgctgcagctccgggggctcccaggggagcgtgcgcggaacctccaggcccagcaggaccccggctgcggcgaggaggaaggagccagcctagcagcttctgcgcctgtggccgcgggtgtcctggaggcctctcggtgtgacgagtgggggacccgaaggctcgtgcgccacctccaggcctggacgctgccctccgtcttctgcccccaataggtgcgccggaccttcaggccctggggtgaattcagctgctcctacatcagcttccggaaccaccaaaaattcaaattgggattttccggagtaaacaagagcctagagccctttgctcaatgctggatttaatacgtatatatttttaagcgagttggttttttcccctttgatttttgatcttcgcgacagttcctcccacgcatattatcgttgttgccgtcgttttctctccccgcgtggctccttgacctgcgagggagagagaggacaccgaagccgggagctcgcagggaccatgtatcagagcttggccatggccgccaaccacgggccgccccccggtgcctacgaggcgggcggccccggcgccttcatgcacggcgcgggcgccgcgtcctcgccagtctacgtgcccacaccgcgggtgccctcctccgtgctgggcctgtcctacctccagggcggaggcgcgggctctgcgtccggaggcgcctcgggcggcagctccggtggggccgcgtctggtgcggggcccgggacccagcagggcagcccgggatggagccaggcgggagccgacggagccgcttacaccccgccgccggtgtcgccgcgcttctccttcccggggaccaccgggtccctggcggccgccgccgccgctgccgcggcccgggaagctgcggcctacagcagtggcggcggagcggcgggtgcgggcctggcgggccgcgagcagtacgggcgcgccggcttcgcgggctcctactccagcccctacccggcttacatggccgacgtgggcgcgtcctgggccgcagccgccgccgcctccgccggccccttcgacagcccggtcctgcacagcctgcccggccgggccaacccggccgcccgacaccccaatctcgatatgtttgacgacttctcagaaggcagagagtgtgtcaactgtggggctatgtccaccccgctctggaggcgagatgggacgggtcactatctgtgcaacgcctgcggcctctaccacaagatgaacggcatcaaccggccgctcatcaagcctcagcgccggctgtccgcctcccgccgagtgggcctctcctgtgccaactgccagaccaccaccaccacgctgtggcgccgcaatgcggagggcgagcctgtgtgcaatgcctgcggcctctacatgaagctccacggggtacccaggcctcttgcaatgcggaaagaggggatccaaaccagaaaacggaagcccaagaacctgaataaatctaagacaccagcagctccttcaggcagtgagagccttcctcccgccagcggtgcttccagcaactccagcaacgccaccaccagcagcagcgaggagatgcgtcccatcaagacggagcctggcctgtcatctcactacgggcacagcagctccgtgtcccagacgttctcagtcagtgcgatgtctggccatgggccctccatccaccctgtcctctcggccctgaagctctccccacaaggctatgcgtctcccgtcagccagtctccacagaccagctccaagcaggactcttggaacagcctggtcttggccgacagtcacggggacataatcactgcgtaatcttccctcttccctcctcaaattcctgcacggacctgggacttggaggatagcaaagaaggaggccctgggctcccaggggccggcctcctctgcctggtaatgactccagaacaacaactgggaagaaacttgaagtcgacaatctggttaggggaagcgggtgttggattttctcagatgcctttacacgctgatgggactggagggagcccacccttcagcacgagcacactgcatctctcctgtgagttggagacttctttcccaagatgtccttgtcccctgcgttccccactgtggcctagaccgtgggttttgcattgtgtttctagcaccgaggatctgagaacaagcggagggccgggccctgggacccctgctccagcccgaatgacggcatctgtttgccatgtacctggatgcgacgggcccctggggacaggcccttgccccatccatccgcttgaggcatggcaccgccctgcatccctaataccaaatctgactccaaaattgtggggtgtgacatacaagtgactgaacacttcctggggagctacaggggcacttaacccaccacagcacagcctcatcaaaatgcagctggcaacttctcccccaggtgccttccccctgctgccggcctttgctccttcacttccaacatctctcaaaataaaaatccctcttcccgctctgagcgattcagctctgcccgcagcttgtacatgtctctcccctggcaaaacaagagctgggtagtttagccaaacggcaccccctcgagttcactgcagacccttcgttcaccgtgtcacacatagaggggttctgagtaagaacaaaacgttctgctgctcaagccagtctggcaagcactcagcccagcctcgaggtccttctggggagagtgtaagtggacagagtcctggtcagggggcaggagtgtcccaagggctggcccacctgctgtctgtctgctcctcctagcccttggtcagatggcagccagagtccctcaggacctgcagcctcgccccggcagaagtcttttgtccaggaggcaaaaagccagagattctgcaacacgaattcgaagcaaacaaacacaacacaacagaattcctggaaagaagacgactgctaagacacggcaggggggcctggagggagcctccgactctgagctgctccgggatctgccgcgttctcctctgcacattgctgtttctgcccctgatgctggagctcaaggagactccttcctctttctcagcagagctgtagctgactgtggcattactacgcctccccacacgcccagacccctcactccaaaatcctactggctgtagcagagaatacctttgaaccaagattctgttttaatcatcatttacattgttttcttccaaaggccccctcgtataccctccctaacccacaaacctgttaacattgtcttaaggtgaaatggctggaaaatcagtatttaactaataaatttatctgtattcctctt

SEQ ID NO: 29230 - DNA, 1128 bp, Homo Sapiens
acagagcttaggacacagagcacatcaaaagttcccaaagagggcttgctctctcttcacctgctctgttctacagcacactaccagaagacagcagaaatgaaaagcatttactttgtggctggattatttgtaatgctggtacaaggcagctggcaacgttcccttcaagacacagaggagaaatccagatcattctcagcttcccaggcagacccactcagtgatcctgatcagatgaacgaggacaagcgccattcacagggcacattcaccagtgactacagcaagtatctggactccaggcgtgcccaagattttgtgcagtggttgatgaataccaagaggaacaggaataacattgccaaacgtcacgatgaatttgagagacatgctgaagggacctttaccagtgatgtaagttcttatttggaaggccaagctgccaaggaattcattgcttggctggtgaaaggccgaggaaggcgagatttcccagaagaggtcgccattgttgaagaacttggccgcagacatgctgatggttctttctctgatgagatgaacaccattcttgataatcttgccgccagggactttataaactggttgattcagaccaaaatcactgacaggaaataactatatcactattcaagatcatcttcacaacatcacctgctagccacgtgggatgtttgaaatgttaagtcctgtaaatttaagaggtgtattctgaggccacattgctttgcatgccaataaataaattttcttttagtgttgtgtagccaaaaattacaaatggaataaagttttatcaaaatattgctaaaatatcagctttaaaatatgaaagtgctagattctgttattttcttcttattttggatgaagtaccccaacctgtttacatttagcgataaaattatttttctatgatataatttgtaaatgtaaattattccgatctgacatatctgcattataataataggagaatagaagaactggtagccacagtggtgaaattggaaagagaactttcttcctgaaacctttgtcttaaaaatactcagctttcaatgtatcaaagatacaattaaataaaattttcaagcttcttta

SEQ ID NO: 29231 - DNA, 1540 bp, Homo Sapiens
gccctcggccccgggccggcccgccccgcctcggccgccgcctggcgagccgccgggtccccgctcggccggtggccgaggccggagggccgcggcgggcggcggccgaggcggctccggccagggccgggccgggggccggggggcggcggcgggcaggcggccgcgtcggccggggccgggacgatgactctggagtccatgatggcgtgttgcctgagcgatgaggtgaaggagtccaagcggatcaacgccgagatcgagaagcagctgcggcgggacaagcgcgacgcccggcgcgagctcaagctgctgctgctcggcacgggcgagagcgggaagagcacgttcatcaagcagatgcgcatcatccacggcgccggctactcggaggaggacaagcgcggcttcaccaagctcgtctaccagaacatcttcaccgccatgcaggccatgatccgggccatggagacgctcaagatcctctacaagtacgagcagaacaaggccaatgcgctcctgatccgggaggtggacgtggagaaggtgaccaccttcgagcatcagtacgtcagtgccatcaagaccctgtgggaggacccgggcatccaggaatgctacgaccgcaggcgcgagtaccagctctccgactctgccaagtactacctgaccgacgttgaccgcatcgccaccttgggctacctgcccacccagcaggacgtgctgcgggtccgcgtgcccaccaccggcatcatcgagtaccctttcgacctggagaacatcatcttccggatggtggatgtggggggccagcggtcggagcggaggaagtggatccactgctttgagaacgtgacatccatcatgtttctcgtcgccctcagcgaatacgaccaagtcctggtggagtcggacaacgagaaccggatggaggagagcaaagccctgttccggaccatcatcacctacccctggttccagaactcctccgtcatcctcttcctcaacaagaaggacctgctggaggacaagatcctgtactcgcacctggtggactacttccccgagttcgatggtccccagcgggagccccaggcggcgcgggagttcatcctgaagatgttcgtggacctgaaccccgacagcgacaagatcatctactcacacttcacgtgtgccaccgacacggagaacatccgcttcgtgttcgcggccgtgaaggacaccatcctgcagctcaacctcaaggagtacaacctggtctgagcgccccaggcccagggagacgggatggagacacggggcaggaccttccttccacggagcctgcgctgccgggcgggtggcgctgccgagtccgggccggggctctgccgcgggaggagattttttttttttcatatttttaacaaatggtttttatttcacagttatcaggggatgtacatctctccctccgtacacttcgcgcaccttctcaccttttgtcaacggcaaaggcagcctttttctggccttgacttatggctcgcttttttct

SEQ ID NO: 29232 - DNA, 2200 bp, Homo Sapiens
actgccgacccgagtgcttcccgcagagggctggtggtgggagcggagtgggtcgggcggggccgagccgggccgtgggccgtgtgggggccgggcggcggccgggccggcggacggcgggatgggctgcaccgtgagcgccgaggacaaggcggcggccgagcgctctaagatgatcgacaagaacctgcgggaggacggagagaaggcggcgcgggaggtgaagttgctgctgttgggtgctggggagtcagggaagagcaccatcgtcaagcagatgaagatcatccacgaggatggctactccgaggaggaatgccggcagtaccgggcggttgtctacagcaacaccatccagtccatcatggccattgtcaaagccatgggcaacctgcagatcgactttgccgacccctccagagcggacgacgccaggcagctatttgcactgtcctgcaccgccgaggagcaaggcgtgctccctgatgacctgtccggcgtcatccggaggctctgggctgaccatggtgtgcaggcctgctttggccgctcaagggaataccagctcaacgactcagctgcctactacctgaacgacctggagcgtattgcacagagtgactacatccccacacagcaagatgtgctacggacccgcgtaaagaccacggggatcgtggagacacacttcaccttcaaggacctacacttcaagatgtttgatgtgggtggtcagcggtctgagcggaagaagtggatccactgctttgagggcgtcacagccatcatcttctgcgtagccttgagcgcctatgacttggtgctagctgaggacgaggagatgaaccgcatgcatgagagcatgaagctattcgatagcatctgcaacaacaagtggttcacagacacgtccatcatcctcttcctcaacaagaaggacctgtttgaggagaagatcacacacagtcccctgaccatctgcttccctgagtacacaggggccaacaaatatgatgaggcagccagctacatccagagtaagtttgaggacctgaataagcgcaaagacaccaaggagatctacacgcacttcacgtgcgccaccgacaccaagaacgtgcagttcgtgtttgacgccgtcaccgatgtcatcatcaagaacaacctgaaggactgcggcctcttctgaggggcagcggggcctggcgggatgggccaccgccgactttgtaccccccaacccctgaggaagatgggggcaagaagatcacgctccccgcctgttcccccgccgcttttctcctctttcctctctttgttctcagctccccctgtcccctcagctccagacgtaggggaggggttgccacaggcctccctgtttgaagcctgcccttgtctgagatgctggtaatggccatggtacccccttctgggcatctgttctggtttttaaccattgtcttgttctgtgatgaggggaggggggcacatgctgagtctcccaaggctgcgtctggaggggcccctgcttctccagcctggacccccagctttgcccaacaccagcccctgccccagcccaagtccaaatgtttacagggagcctcctgcccagtcccccaaccccagccgctcggaggccccaaaggaaaaagcacaagaagcgtgagacgccaccattcctggaaaccacagtccacctgctcattctcgtagctttttaaaaaaatgaaagtaaaggaaaaaaaaaaaactgcaaatctagaaaactttttagagaaaaactatttaaaactgtcagatcctgaccagcaagcccccccccagccccccttccaagtgactccgtgccttgagtgtgtctgcgtgtttacacccgtccctctgctggccgcccccgtgcgagcggcacccctgccctgccctccacagaattgggttccaagggctgttccagacaactgccaacgtcactgagggccctgccccagcggccctggccccaggctctattaacctaaaatgtagctccctagcgctaacctaggaaccgccgctgcctgctggggggccacgcccctcatgcccttgtcccaggcccggggccttcagcgttgaacacttccttgcttttttcacatgttttatggaattgttcacctggtttgaaataataaaatgtagaaagaaaaaaaat

SEQ ID NO: 29233 - DNA, 5130 bp, Homo Sapiens
cacgtgatcgcgcctagggagaaaacgtctgactccagccaccggccttcaaggcacggctttttattccttcggctggtcggcctctcgcccttcagctacctgtgcgtccctccgtcccgtcccgtcccggggtcaccccggagcctgtccgctatgcggctcctgcctctagccccaggtcggctccggcggggcagcccccgccacctgccctcctgcagcccagcgctgctactgctggtgctgggcggctgcctgggggtcttcggggtggctgcgggaacccggaggcccaacgtggtgctgctcctcacggacgaccaggacgaagtgctcggcggcatgacaccgctaaagaaaaccaaagctctcatcggagagatggggatgactttttccagtgcttatgtgccaagtgctctctgctgccccagcagagccagtatcctgacaggaaagtacccacataatcatcacgttgtgaacaacactctggaggggaactgcagtagtaagtcctggcagaagatccaagaaccaaatactttcccagcaattctcagatcaatgtgtggttatcagaccttttttgcagggaaatatttaaatgagtacggagccccagatgcaggtggactagaacacgttcctctgggttggagttactggtatgccttggaaaagaattctaagtattataattacaccctgtctatcaatgggaaggcacggaagcatggtgaaaactatagtgtggactacctgacagatgttttggctaatgtctccttggactttctggactacaagtccaactttgagcccttcttcatgatgatcgccactccagcgcctcattcgccttggacagctgcacctcagtaccagaaggctttccagaatgtctttgcaccaagaaacaagaacttcaacatccatggaacgaacaagcactggttaattaggcaagccaagactccaatgactaattcttcaatacagtttttagataatgcatttaggaaaaggtggcaaactctcctctcagttgatgaccttgtggagaaactggtcaagaggctggagttcactggggagctcaacaacacttacatcttctatacctcagacaatggctatcacacaggacagttttccttgccaatagacaagagacagctgtatgagtttgatatcaaagttccactgttggttcgaggacctgggatcaaaccaaatcagacaagcaagatgctggttgccaacattgacttgggtcctactattttggacattgctggctacgacctaaataagacacagatggatgggatgtccttattgcccattttgagaggtgccagtaacttgacctggcgatcagatgtcctggtggaataccaaggagaaggccgtaacgtcactgacccaacatgcccttccctgagtcctggcgtatctcaatgcttcccagactgtgtatgtgaagatgcttataacaatacctatgcctgtgtgaggacaatgtcagcattgtggaatttgcagtattgcgagtttgatgaccaggaggtgtttgtagaagtctataatctgactgcagacccagaccagatcactaacattgctaaaaccatagacccagagcttttaggaaagatgaactatcggttaatgatgttacagtcctgttctgggccaacctgtcgcactccaggggtttttgaccccggatacaggtttgacccccgtctcatgttcagcaatcgcggcagtgtcaggactcgaagattttccaaacatcttctgtagcgacctcacacagcctctgcagatggatccctgcacgcctctttctgatgaagtgattgtagtaggtgtctgtagctagtcttcaagaccacacctggaagagtttctgggctggctttaagtcctgtttgaaaaagcaacccagtcagctgacttcctcgtgcaatgtgttaaactgtgaactctgcccatgtgtcaggagtggctgtctctggtctcttcctttagctgacaaggacactcctgaggtctttgttctcactgtattctttttatcctggggccacagttcttgattattcctcttgtggttaaagactgaatttgtaaacccattcagataaatggcagtactttaggacacacacaaacacacagacacaccttttgatatgtaagcttgacctaaagtcaaaggacctgtgtagcatttcagattgagcacttcactatcaaaaatactaacatcacatggcttgaagagtaaccatcagagctgaatcatccaagtaagaacaagtaccattgttgattgataagtagagatacattttttatgatgttcatcacagtgtggtaaggttgcaaattcaaaacatgtcacccaagctctgttcatgtttttgtgaattctaggctggtgctgcactgaaatagagcagtaagcttgtgataaaggccaattccaggtagctcttgaaggtgatagccatctactttccagtggctgccaaccacagggagtgccagttaacactggaaggattaaggcaaggtcccttctcttgagactcccctctgagatctgaaaaatgaagtggcttaggaacatcagcagtgaagaactgccaagagttggtgaaggttgtctcttccgagggccttctgaagacagggctcttgaacagacaagtggaagggctgtaccagggataaaggaaagaagtgcctgtccagcagggagcttgaatttaagttccatgtatgaagtcattggctctatctgcatttttctgtcattctcttcatttgttttaaggtggaaaattttcttacagttgatgcaaagtatcaactactttaccctaccttctccccttttagatgggttcttcctgagttttggagtcttgtatgattatcagtattcccctgtcaaaatcaaatctattcaggtttcttcactgttgagaacacctaaatgtttttatttttgagaagtggggacagagtctcactatgtcacccaggctggagtgcaatggcatgatctcagctcactgcaaccttcgcctcctgggttcaagcgattctcctgcctccgcctcctgagtagctgggattataggcacgcaccaccacgcccagctaattttttgtatttttagtagagacagagtttcaccatgttggccaggctggtcttgaactcctgaccttgtgatccacccacctcggcctcccagagtgctgggattacaggcatgagccaccacgcttggctaagaacacctaaatttttatgtttcttggctcaaaaaccagttccatttctaatgttgtcctcacaagaaggctaattggtggtgagacagcaggggaggaggaagagctgtggtttgtaacttgttcaactcaggcaataagcgattttagctttatttaaagtcttctgtccagctttaagcactttgtaagacatggctgaaagtagcttttctatcagaattgcagatagtcatgttgggctaacagtcaattggatatattcctttacctcacatgaccccagcaactgtggtggtatctagaggtgaaacaggcaagtgaaatggacacctctgctgtgaatgttttagagaaggaaattcaaaaaatgttgtaactgaaagcactgttgaatatgggtatcggctttctttttcactttgactcttaacattatcagtcaacttccacattaatgaaagttgaccatagttatttccaaataaaaagaaaccaactcttaccaggtcttggactgtgatgtcatattattcagttttatgcttgttcctgagcagaactcataagagtgacatagtcagctgctgacggcacctcagccacgccactcttactcagttcagtgggtgtgcttgcgtggtaggatgtggtgcagccctctctacgctcttctatttttggtatatttcctatctaaccttcaaatagcttccaattctttttttcttggactggcttcattctgaatttgtgctaaaataatctttcataaagagacctcagtttatagcgtaacagactacacaatgcactgatgttttcataatgtttaagggacccactgcaagaagcttgctgcctccttttaattgtattcatttagattttgattttccatgttaagaaggtgaggtccatgttggtgcccttcagagtagagaaccatgtaaacattaggaatgaacagaggccttaggaatgaatagagagtttgccttatacaatttcctgttacaaagctctccctctcatgcaaagtagggaacaccttttgagcatctttgaatttgacaaatggtgctgttgcaaacactttttttttgagatgaagtctcgcggttgtcacccgggctggagtgcagtggcgtgatctcggctcactgcaacttccacctcctgggttccagcagttctcctgcctcagcctcccaagtagctgagattacaggcgcctgccaccccacctggctgatttttgtaattttagtagagacggggtttcaccatgttggccaggctgattaactcctgacctcaggtgatccacctttctcggcctcccaaagtgctgggattacgggtgtgagccaccgtgcccggcctgcaaacacattttaattgacaacactagggctgttgtacaaaatagtaatgatagccatggaagttttaccttattctgtgagaagtgttcttaaacttattaagtgtctaaactaaggtttagtgcttttttaaaggaaagttgtcccaggattcatcctaaagaaagcaaaagttaattcaactgatccaccaatggaattagatgggtagagttgggttcttgagttttaccaccacttagttcccactgaattttgtaacttcctgtgtttgcatcctctgttcctattctgcccttgctctgtgtcatctcagtcatttgacttagaaagtgcccttcaaaaggaccctgttcactgctgcacttttcaatgaattaaaatttatttctgttctagtgggaaaaaaaaaaaaaaaaaa

SEQ ID NO: 29234 - DNA, 1064 bp, Homo Sapiens
  misc_feature (27)..(27): n is a, c, g, or t
  misc_feature (766)..(766): n is a, c, g, or t
cacagccgggtcgcaggcacctccccngccagctctcccgcattctgcacagcttcccgacgcgtctgctgagccccatggcccacgccacgctctccgccgcccccagcaatccccggctcctgcgggtggcgctgctgctcctgctcctggtgggcagccggcgcgcagcaggagcgtccgtggtcactgaactgcgctgccagtgcttgcagacactgcagggaattcacctcaagaacatccaaagtgtgaatgtaaggtcccccggaccccactgcgcccaaaccgaagtcatagccacactcaagaatgggaagaaagcttgtctcaaccccgcatcccccatggttcagaaaatcatcgaaaagatactgaacaaggggagcaccaactgacaggagagaagtaagaagcttatcagcgtatcattgacacttcctgcagggtggtccctgcccttaccagagctgaaaatgaaaaagagaacagcagctttctagggacagctggaaagggacttaatgtgtttgactatttcttacgagggttctacttatttatgtatttatttttgaaagcttgtattttaatattttacatgctgttatttaaagatgtgagtgtgtttcatcaaacatagctcagtcctgattatttaattggaatatgatgggttttaaatgtgtcattaaactaatatttagtgggagaccataatgtgtcagccaccttgataaatgacagggtggggaactggagggtngggggattgaaatgcaagcaattagtggatcactgttagggtaagggaatgtatgtacacatctattttttatacttttttttttaaaaaagaatgtcagttgttatttattcaaattatctcacattatgtgttcaacatttttatgctgaagtttcccttagacattttatgtcttgcttgtagggcataatgccttgtttaatgtccattctgcagcgtttctctttcccttggaaaagagaatttatcattactgttacatttgtacaaatgacatgataataaaagttttatg

SEQ ID NO: 29235 - DNA, 1784 bp, Homo Sapiens
aaaacgacaacgcgagaaaaattagtatttttgcacttcacaaattaatgaccatgagctcgtttttgataaactccaactacatcgagcccaagttccctcccttcgaggagtacgcgcagcacagcggctcgggcggcgcagacggcggcccgggcgggggccccggctaccagcagcccccagcgcccccgacccagcacctgccgctgcagcagccccagctccctcacgcgggcggcggccgagagccccctgcctcctactacgcgccgcggaccgcccgcgagcccgcctaccctgctgccgcgctgtaccccgcgcatggggccgcggacaccgcctacccctatggctaccgcggcggcgccagccccgggcggccgccccagcccgagcagcccccggcgcaagccaagggcccagcgcacggcctgcatgcgagccacgtcctgcagccccagccgccgccgcccctgcagcctcgcgccgtgcccccagcggccccgcggcgctgcgaggcggcccccgccaccccaggcgtcccggcagggggcagcgcccccgcgtgcccgctgctcttggccgacaagagcccgctgggcctgaagggcaaggagcccgtggtgtacccctggatgaagaagatccatgtcagcgccgttaaccccagttataacggaggggagcctaagcgctctcgaaccgcctacacccggcagcaggtcttggagctggagaaggagttccacttcaatcgctacctgacccggcggcgccgcatcgagatcgcccacacgctctgtttgtctgagcgccaggtcaagatctggtttcagaaccggaggatgaagtggaagaaagaccacaaactgcccaacaccaagatgcgatcctccaattcggcctcggcctctgccggcccaccagggaaagcacaaactcagagcccacacctccatccccacccccacccgagcacctccacacccgttccctcctccatataatcttctagagatcttaaccagtttctatcccttacctgcttttctcttctcttctcctgctccgttcctcatccacccctccccatctggaccataatagacaccaaaacaaacccaaattggtaaaaagaataatcaaaaagaagacattatccggttaagagtctgtgctggttgccacccaagagagaacagttgtccaggatgctggctggtggaacaacctgctggcccgaaacaaggctgccaggtgtggaacagcccatgctgactggggacatacacttgcatctttgttgaaagcagaagaagacagaccctttccccaccttccttacctcctcttcccccattaaggcagctcatccaagcttgtatttaactgaataaatgagtagacattgtggacctcacaagattatttaattcttaagatgtgtagaccttgatggtaggtgtgacatgttagtttttcttacttgcatttatttaagacactgttacagagatactgttgtcaccttctggggcacggtctttggggagaggggagtgcatttagacttatgtggaactgtacaaattgtgatgtggctacatagaaagccatgtgctaagaataaactccatttaaaaaacattaaaaatctaagattcatgtgttttctaagcttttcattaagaaaacaaaagtcctctggattgagatacttgaccttgcatgtaaaaaccttgtagatagcttgagctggattcacttggattctgacggct

SEQ ID NO: 29236 - DNA, 2603 bp, Homo Sapiens
ctgggtagggcagggggaaccgacaggccggtgtccccagccgcaaaagagctgctgaactgtccgtttaaatgctgctgggagactcgtaaaaaaatcatcgtggacctggaggatgagaggggcgagctttatttcggtcggattgcggtgtggtggtttagctgcaaggggatgccgcagccccagttgagggggaaaatagttcttaaaaagcatatgcccccctaaggaatgtctctaaagaaccaaatcaaagctgctctttggaaggtatgaatagaatttaaaaaaaaaagatttctatggagcttaaagttcacagccattctgtgtagacaagagctaagaaaaatgtgagaattatacagaaaaccattaatcacttcttttctttaaatacgtatcctctctcctttgttattattcaacagcaaatctccttggaccggctgttgggggaaaaaagtgttagccgtctctcccggatctgcaagggggaaaaaatttggaaccataaagttgaaaacttttttctctcagtttggaagaagcccttcgtcatgaatgggatctgcagagttcgggcgagaggaggcgagaggcgcaaaggaggggagatttgtcgcctgccgctcgctctggggctcgatgtgaatatatattatgtctgcctgttctcccctcgtcggtggctaaggtcagccgcttggaacagaccccggaggaggggggcagagaggggaggtgggggggggggggtccggcgtgtcacgtgacccccagggttgccaatgtccggtcctgagggtatcaggcctttccaagttgccacccactgcccaggcctcacccagcgatgcagaaagccacctactacgacaacgccgcggctgctctcttcggaggctattcctcgtaccctggcagcaatggcttcggcttcgatgtccccccccaacccccatttcaggccgccacgcacctggagggcgactaccagcgctcagcttgctcgctgcagtccctgggcaacgctgccccacatgccaagagcaaggagctcaacggcagctgcatgaggccgggtctggcccccgagaccctgtcggccccgcctggctcacccccgcccagtgccgcacctaccagtgccactagcaacagcagtaatgggggcgggcccagcaaaagtggtcccccaaagtgcggtcccggcaccaactccaccctcaccaaacagatattcccctggatgaaagagtcgaggcaaacgtccaagctgaaaaacaactcccccggcacagcagagggctgtggtggcggcggcggtggcggcggcggcggaggcagtggtggcagcgggggcggtggcggcggcggcgggggaggggacaagagccccccggggtcggcggcgtccaagcgggcgcggacggcgtacacgagcgcgcagctggtggagctggagaaggagttccattttaaccgctacctgtgccggcctcgccgtgtagagatggccaacctgctgaacctcagcgagcggcagatcaagatctggttccagaaccggcgcatgaagtacaagaaggaccagaaggccaagggattggcctcgtcgtcggggggcccatctccagccggcagccccccgcagcccatgcagtccacggccggcttcatgaacgccttacactccatgacccccagctacgagagcccgtccccacccgccttcggtaaagcccaccagaatgcctacgcgctgccctccaactaccagccccctctcaaaggctgcggcgccccgcagaagtaccctccgaccccggcgcccgagtatgagccgcacgtcctccaagccaacgggggcgcctacgggacgcccaccatgcagggcagtccggtgtacgtgggcgggggcggctacgcggatccgctgccgccccctgccggcccctccctctatggcctcaaccacctttcccatcacccttccgggaacctggactacaacggggcgccccctatggcgcccagccagcaccacggaccctgcgaaccccaccccacctacacagacctctcctctcaccacgcgcctcctcctcagggtagaatccaagaagcgcccaaattaacacacctgtgatgggaaagggcgaacgaggattaggggatggggaggaagagagagactgtggagctctggggggcaacctggaggtctgaaaagaggagccagagaaggtggtacccaggcttcctggtcagaaccggcctggagctccttcccttccccctggcctgagaggttgcttttaagtcttccaccccttgttccatctgcctgccaacccatcggaaaggaatccacatcatattggagatgaccccatcaaccccagggctccagcactaccaagttggaattccacgcccgggagtggggtagaggaagacgagacaggacgaggcagaaaagcacattttaaaaaccagacaagatggctaggccatcaccaaccaacggacttaccttacatctttgtaggtaattccccccaaatcttgattttttttttcctcaattatccttt

SEQ ID NO: 29237 - DNA, 3385 bp, Homo Sapiens
gctctggtgctgcggctccgctctcgtcgcaacgagatctttcgagatcttctccgcccccgctaccggcgcctcctctgcggccactgagccggagccggcctgagcagcgctctcggttgcagtacccactggaaggacttaggcgctcgcgtggacaccgcaagcccctcagtagcctcggcccaagaggcctgctttccactcgctagccccgccgggggtccgtgtcctgtctcggtggccggacccgggcccgagcccgagcagtagccggcgccatgtcggtggtgggcatagacctgggcttccagagctgctacgtcgctgtggcccgcgccggcggcatcgagactatcgctaatgagtatagcgaccgctgcacgccggcttgcatttcttttggtcctaagaatcgttcaattggagcagcagctaaaagccaggtaatttctaatgcaaagaacacagtccaaggatttaaaagattccatggccgagcattctctgatccatttgtggaggcagaaaaatctaaccttgcatatgatattgtgcagttgcctacaggattaacaggtataaaggtgacatatatggaggaagagcgaaattttaccactgagcaagtgactgccatgcttttgtccaaactgaaggagacagccgaaagtgttcttaagaagcctgtagttgactgtgttgtttcggttccttgtttctatactgatgcagaaagacgatcagtgatggatgcaacacagattgctggtcttaattgcttgcgattaatgaatgaaaccactgcagttgctcttgcatatggaatctataagcaggatcttcctgccttagaagagaaaccaagaaatgtagtttttgtagacatgggccactctgcttatcaagtttctgtatgtgcatttaatagaggaaaactgaaagttctggccactgcatttgacacgacattgggaggtagaaaatttgatgaagtgttagtaaatcacttctgtgaagaatttgggaagaaatacaagctagacattaagtccaaaatccgtgcattattacgactctctcaggagtgtgagaaactcaagaaattgatgagtgcaaatgcttcagatctccctttgagcattgaatgttttatgaatgatgttgatgtatctggaactatgaatagaggcaaatttctggagatgtgcaatgatctcttagctagagtggagccaccacttcgtagtgttttggaacaaaccaagttaaagaaagaagatatttatgcagtggagatagttggtggtgctacacgaatccctgcggtaaaagagaagatcagcaaatttttcggtaaagaacttagtacaacattaaatgctgatgaagctgtcactcgaggctgtgcattgcagtgtgccatcttatcgcctgctttcaaagtcagagaattttctatcactgatgtagtaccatatccaatatctctgagatggaattctccagctgaagaagggtcaagtgactgtgaagtcttttccaaaaatcatgctgctcctttctctaaagttcttacattttatagaaaggaacctttcactcttgaggcctactacagctctcctcaggatttgccctatccagatcctgctatagctcagttttcagttcagaaagtcactcctcagtctgatggctccagttcaaaagtgaaagtcaaagttcgagtaaatgtccatggcattttcagtgtgtccagtgcatctttagtggaggttcacaagtctgaggaaaatgaggagccaatggaaacagatcagaatgcaaaggaggaagagaagatgcaagtggaccaggaggaaccacatgttgaagagcaacagcagcagacaccagcagaaaataaggcagagtctgaagaaatggagacctctcaagctggatccaaggataaaaagatggaccaaccaccccaagccaagaaggcaaaagtgaagaccagtactgtggacctgccaatcgagaatcagctattatggcagatagacagagagatgctcaacttgtacattgaaaatgagggtaagatgatcatgcaggataaactggagaaggagcggaatgatgctaagaacgcagtggaggaatatgtgtatgaaatgagagacaagcttagtggtgaatatgagaagtttgtgagtgaagatgatcgtaacagttttactttgaaactggaagatactgaaaattggttgtatgaggatggagaagaccagccaaagcaagtttatgttgataagttggctgaattaaaaaatctaggtcaacctattaagatacgtttccaggaatctgaagaacgaccaaaattatttgaagaactagggaaacagatccaacagtatatgaaaataatcagctctttcaaaaacaaggaggaccagtatgatcatttggatgctgctgacatgacaaaggtagaaaaaagcacaaatgaagcaatggagtggatgaataacaagctaaatctgcagaacaagcagagtttgaccatggatccagttgtcaagtcaaaagagattgaagctaaaattaaggagctgacaagtacttgtagccctataatttcaaagcccaaacccaaagtggaacctccaaaagaggaacaaaaaaatgcagagcagaatggaccagtggatggacaaggagacaacccaggcccccaggctgctgagcagggtacagacacagctgtgccttcggattcagacaagaagcttcctgaaatggacattgattgattccaacacttgtttctattaaaacagactattataaagctttaagttgtcaactttgttctaaatatcaactagcgcaagtgaatactgaagatttcttagtcagtttttaggggattttcggggaggggaaataggtaatgtatggagcattttcacttctaaatagttagatacagaaattaagtgcattgtatctttttcataatggtactatttagaagcccagttagtcttactgagcttatgcttcactcctttatgtttaaccatgtgtctacaagaataagtttgttttggaaagttgagctatagctacagctctagctatccagcagacttttcattatgacttacatggcaggagctctaattatgctttaaaaatctgttgtggagattgctttaaatgctccctgcctggtgtggggatggggtccccctctttgtgagggctggagcatggcacggcatggattaacacggcagaggaacaaaggtgtgctctgagcttcttcatatttcaccttcaccctcacctgtgttctcttccctctctcccaataaaagggctcccatta

SEQ ID NO: 29238 - DNA, 5405 bp, Homo Sapiens
gctggaagctgcagggaacagctgcggtgctctgccatattgtgtcttccccggccggtccctcgcctcccggccgagctgacgttggttgaagccatggataacagaacccacagatgcagagggctgactgtacaagtctgtcaaaaaaccaaactgctggttggctaataattggtcactgtatgacttatagtacaggtgatattacttctgattctagatgaactgtaagagtaaatgggtccagtaattggaatgactccagataagagagctgaaaccccaggagctgaaaagattgcaggattaagccagatttacaaaatgggaagcttgcctgaagctgttgatgctgccaggccgaaggccactctagtggacagtgagtcagcagatgatgaactcacaaacttgaactggcttcatgaaagcactaatcttctaacaaacttcagcctcggaagtgagggtcttccaattgttagtccattgtatgacatagagggagatgatgtgccatcctttggaccagcttgctaccagaacccagaaaaaaaatcagcgacttcaaagcccccatactcctttagtcttctcatttatatggccattgagcactctccaaataaatgtttgcctgtcaaagaaatttatagctggattctggaccattttccatattttgctactgcaccaacaggctggaagaattctgttcgacataatctgtccctgaataaatgttttcagaaagtggaaagaagccatggcaaggttaatggaaaaggttccttatggtgtgttgatccggaatataaacccaatcttatccaggcactgaagaagcaacctttttcttcagcatcttcacaaaatggttctttatcacctcactatttaagctctgtaatcaagcagaaccaggtgcgaaacctcaaagaatctgatattgatgctgctgctgcaatgatgcttttaaatacttctatagaacaaggaattttagaatgtgagaagcctcttcctcttaaaacagcattgcaaaaaaagaggagttacggcaatgcatttcatcatcccagtgctgtacgattacaagagagtgattctttagccaccagcattgatccaaaagaagatcacaattacagtgcaagtagcatggcagcacagcgttgtgcatccaggtctagcgtgtcttccctgtcttctgtggatgaggtatatgaatttatcccaaagaatagtcacgtgggaagtgatggcagtgaaggatttcacagtgaagaagatacagacgttgattatgaagatgatcctcttggagacagtggctatgcatcacagccttgtgcaaaaatctctgaaaaagggcagtcaggcaaaaagatgcgaaaacagacatgtcaagaaattgatgaggagctcaaagaggcagctggatctctgctccaccttgctggaattcgtacatgtttaggttccctaataagtactgcaaagacacaaaatcaaaagcaacggaaaaaatagaaatacttaaagtgtggcaatactctttcacttaattctttacaagggatatcaaagccataatggacttcattagttttagggtagggaagggatactaattacttatttctttcaaaacatttttggtttttggtttttaaaatttttattaaacaattgctgttaggatcatgcctgatcagaaatacatgatgtgaagtcctaaaagcataatttttgtgataaatgtgtccaagatttgaaaatttttatataagaaaatccccagcctctgtcttaaacttgtgggacaaaaatcctttcttctgttaatatgtcagaatgtaagatttggcaactcgataaatttttttcattttcttttccaatctgtaactatagttactgaaccagctaaaaattttgctgatgtatttttcatatacttctctcctgacacgcaatccggtaacataagattgaaatttttttactttgtcttaatttgtttctaattttttttttgttgtcgtgtgagcaaagacaaacataaattgaaaaacatcctgatgtttagaaagtttcttttggttacgtaggtagagaatacaacaaagagttctaagacttagaaaagacaattttgtggtgtcatttcatccaagaacactcccaattcctattagaatggtagctttgaagtgtttttacttcagagatcctgcatagcatttattggggccttttattctttcccaaagtgctttgcaaacattaagttttagccactagctgcctttgttgagtataagttatccagtgagaggatatagccaattaagtgtgttatggagtacacccattttgacacacttgtaataagagaatctttcatttgcctgccatgtgtactgtattatgagaatcttataatcggaatggagtgaaatgaaacattttgagtactgatggcatgttatcatacataaagtaggtcatttaggaaaaaacttctgtccaagctttgtatgaattaaattcataagtataccaaattaaatcttaatagatttaatgcaattttacagacacaataccttcatgaatttcaaaattcatataaaatttgatcttatgcaatacacctttttgaggaggcagtgtaacaacctatagtgccattgatccatgagaaaaagattttctggtactactccaaaagtgctttgactaagtatcttaactatttgaacagtctgcttatatgagacagtttttcatagtatcatttgtataatttgattagattattcagaaacaataggatgctaaactaattcattgtatcttttttttacaatggtggaagcaactttctgaaagttcagtcttatgctacatcctaagtcatagacaatgaccttgttttcattattctgatagattgtatacatatgtacacatacatatacacatatgcacagtcaaggtcatgatgttgatttgctttcagctgtttctgtgattataaagcattttttaagagacaaattttaacttttaatttttattttggcaaaactgtcaaatgagaaaaatgattttaaaaacttttttttcaattgacaagactttaagtcagggataacagtattaatgttctctgttctgtttccatgttaaatttaatttaacctggatagccacattaatgaattggtgctgtcaaaatatagtaatttttaaatttgttaataatgaaaacccttaagcatgcaggatgaggtatttgggttttttttttagatcgatcacatctacagaaaatggctaaaccaagttaacttttattatagacagtgaataaaacaccaaaaacccaaaaatgctttaaccacagtataaataatagattatacacatcatcttaataactatttttaagttatttaccatagcctctgtatagaccttaggaacagtgtttcagtgatctggcaccagtttattttgttctgctgaaattctgtatcacaaatgtgctacctggtttttgtccattagataattactctttataaggaaaggaaagagaagcagagttagttccagctctaatagggatcttcaaagttattttgtcttgatgtatgtaacagtaattctttacatcttttgatttttctcttcctttttattcactcttcccacgaatttaaatgtttaagttatattcatcactagcaaggatgataaacacttgtgcactgaaagctaacagggagaggttacacaatattttacagtttcttaaacataatttaatgcatcaccttccacttgctaacataccaagtcagttattttcaagggaagaaccttttaaattatggtcctccatttactacttccactgagagtatgctctcattcctcaggtgttttgagaaacatgactaataaccacacaattaagtagagtcattccaagtcctatggcctggaaattgtattccctataatatacaaattttcctgtaataaagtcaacttagaaactccaaggaggttacatgttttccaacatatcctaaaaactgtgatataagctaacatataatttgccttacgtcaaaagaatatgttttgttgcagctgattccagtttataatagatccctagtaaaaagctttgattcaacacaattgttcatcttcacatcccaaacagaatcactgtttcttgaatatatatttttgaagtttttttgtgcaatatattactaaatcagttattattttacttttccaaattcagagaaagaaaacagattacctgaattcatggaaaaggtggatcacctccctttttccaccttcaagcctttcctgtcctcatagccagcatgacttcttttaacttggattcctttgtatatagtaaagtttagtatatatatatttttttctttttgctactttctgaggcattatgtaaagggctcatactagatgttcagttaaatatactttagcacaaagtcaaactagagaatgtgttaaggagggaatgtatatgtcttggtagaccaggaggcctttgccagcaatttaagcaacagatgtgaatacttcacaaagctgtaaagaccattgtcttaaatactacaacaacttaacacccttttgtgaagatcacagcatttatctaagaaactgtgaggctttctggtttacatatatcttacaggtgtttttttgtatttttttttttttttagtttgaaatgtgtaagctttgatttaaaccaagtttacttcagtatgttaatgatgtagtaaaaatatttattgaaaggtgaattcgagtattttaatgttatacctgccattttttttcttaaagcatattctttgcatctaactgccagtgccattgtcaaaacttattttttaaatcgttgtacatttcttattaaactaagtgcttaattttaaagtattatgttgccatcatatagtgtataaaaatgtataattgccaattgattgtaactattatttatttttaaatgaaagtgtaagaatgctttctgattcaacaaatttgttatcaaactgtttccttatcctcttttctgatgtagcataaaaattgtcccggtttgagttataactgccagtagatgaccagtcacaagtgaaccacttctcagttgccaatctttgctcatattaaaaacaacttacaaatacttagtttttgtatctaatctctgattattaaaatgtttataaagtttatttttaccaaagagatgcaattcattatgagaaagtattgcataataaattttgttttataacttttaaaaaaaaaaaaaaaaa

SEQ ID NO: 29239 - DNA, 4335 bp, Homo Sapiens
cgggcagcgtggaccccggatgagttgcttttaggcttgctggcccgcggggctgtccaggcacgcgaggcccctcaacaaaatgcttcaacaagttccagaaaacataaattttcctgctgaagaagagaaaatcttggagttttggactgaatttaattgttttcaggaatgcttaaagcaatcaaaacataaaccaaaatttaccttctatgatggtcctccttttgcaactggactgcctcactatggacatatacttgcgggtacaattaaagatatagttacaagatatgctcaccagagtgggtttcatgttgacagaagatttggatgggattgccatggcttacctgtggaatatgaaattgataagacactgggaatcagaggaccagaggatgtggccaaaatggggattacagagtataacaatcagtgccgagcaattgtgatgagatattctgctgagtggaagtctactgttagcagacttggccgatggattgactttgacaatgactataaaactctgtatccacaattcatggaatcagtctggtgggtcttcaaacaactctatgataaaggccttgtttatagaggtgtgaaagtcatgcccttctctacggcatgtaacactccactttccaacttcgagtcacaccagaattataaggatgttcaagatccttcagtatttgtaactttccctttggaagaagatgaaactgtatctttagttgcttggacaaccactccctggactctacctagtaaccttgctgtgtgtgttaatccagaaatgcaatatgtgaaaattaaagatgttgccagaggacgattactcattttaatggaagccagattgtcagccctctataaattggagagtgactatgagatccttgaaagatttcctggtgcctatcttaaaggcaagaagtacaggcccctgtttgactatttcctgaagtgtaaagagaatggcgctttcactgtgcttgttgacaactatgtgaaggaagaagaaggcacaggggttgtccaccaagctccttacttcggtgctgaggactatcgggtctgtatggactttaacattattcggaaagactcactccctgtttgccctgtggatgcttcaggctgcttcacaacggaggtgacagatttcgcaggacagtatgtgaaggatgctgacaaaagtatcatcaggactttgaaggaacaaggccgacttctggttgccaccaccttcactcacagctaccctttttgctggagatcagacactcctctaatttacaaagcagtgcccagctggtttgtgcgagtggagaacatggtggaccagctcctaaggaacaatgacctgtgctactgggtcccagagttggtacgagaaaaacgatttggaaattggctgaaagatgcacgtgactggacaatttccagaaacagatactggggcacccccatcccactgtgggtcagcgatgactttgaggaggtggtatgcattgggtcagtggcggaacttgaagaactgtcaggagcaaagatctcagatctccacagagagagtgttgaccacctgaccattccttcacgctgtgggaagggatccttgcaccgcatctctgaagtgtttgactgttggtttgagagtggcagcatgccctatgctcaggttcattacccgtttgaaaacaagagggagtttgaggatgcttttcctgcagatttcattgccgagggcatcgaccaaaccagaggatggttttataccctgctggtgctggccacggccctctttggacaaccgcctttcaagaacgtaattgtgaatgggcttgtcctggcaagtgatggccaaaaaatgagcaaacggaaaaagaattatccagatccagtttccatcatccagaagtatggtgctgatgccctcagattatatctgattaactcccctgtggtgagagcagaaaacctccgctttaaagaagagggtgtgcgggacgtccttaaggatgtactgctcccatggtacaatgcctatcgcttcttaatccagaacgttctgaggctccagaaggaggaagaaatagaatttctctacaatgagaacacggttagagaaagccccaacattacagaccggtggatcctgtccttcatgcagtctctcattggcttctttgagactgaaatggcagcttataggctttatactgtggtgcctcgcctggtcaagtttgtagatattctgaccaattggtatgttagaatgaaccgcagaagattaaagggtgaaaatgggatggaggattgtgtcatggccctagaaaccttgtttagtgttctgctttctctttgcagacttatagctccctacacaccttttctcactgaattgatgtaccagaatctaaaggtgctgattgaccctgtttctgttcaggacaaggacacactcagcattcactacctcatgctgccccgtgttcgagaagaattgattgacaagaaaacagagagtgcagtatctcagatgcagtctgtgattgaacttggaagagtgatcagagaccgaaaaactattcccataaagtatcctttgaaagaaattgtggttatccatcaagatccagaagctcttaaagatatcaagtctttggagaagtatatcattgaggaactcaatgttcgaaaagttacactgtctacagataaaaacaagtatggcattcggctaagggcagaaccagatcacatggtcctggggaagcgtctgaagggagcctttaaggcagtgatgacgtccatcaagcagttgagcagtgaggagctggagcagttccagaagactgggaccattgttgtggaaggccatgaattgcacgatgaagacatccgcctcatgtacacctttgatcaggccacaggtgggactgcgcaatttgaagcacactcagatgctcaggctttggtcctcttagatgtcactcctgaccagtcaatggtagatgaaggaatggctcgggaagtcatcaatcgcatacagaaacttcgcaaaaagtgcaatctggttccaactgatgaaatcacagtgtactataaagcaaagtctgaaggaacatatctgaatagtgttattgaaagccacacagagttcatatttaccaccataaaggctcccttgaaaccatatccagtttctccatcggataaagtccttattcaagaaaaaacacagttgaagggatctgaactggaaattacactcaccagaggatcttcccttcctggtcctgcttgtgcatatgtcaatcttaacatttgtgcaaatggcagtgaacaaggtggagtattgctcctggaaaatccaaaaggtgacaataggttggaccttttaaagctgaagagtgttgtcactagcatttttggtgtgaaaaatacagagctggctgtcttccatgatgaaacagaaatacaaaaccaaactgacttactgagtcttagtggaaaaacactttgtgtgactgcaggatcggctccctctctgatcaacagttctagtactcttctttgtcagtatatcaacctacagctcctgaatgcaaagccacaagagtgtttaatggggacagtgggcactctcctgcttgaaaacccacttgggcagaatggactcacccaccaaggtcttctgtatgaagcagccaaggtgtttggccttcggagcaggaagctaaagctgtttctgaatgagacccaaacgcaggaaattacagaagacatccccgtgaagactttgaatatgaagactgtgtatgtttctgtgttaccaacaacagcagacttctagcatgtacttatcaatgttgttcggtcagcccttccctaattacacctatcccctacacatacatgcacatagacacacacatgaacacactgaagatatttccttcaggtgtgtgtaaaatatgctgcttggattgaaattcaaatgggattgattagtcaagtaacttgagacctcacagtaatcttcacacttaaccttagacacctatgcagtcatgttgggagcaggttacaatgttacttcagcccacagtttatttctattcttgagttcttaagtacagaagatagaagtgatttaaatggcatagtatatatatcattttctggccttttaaaatttatttgagacctcttgatgaaatggacatattatatatttctgccacctggattttcctggataatttgatggaatattttaagtttcagtaaatcagaacaataaacaaactcagatat

SEQ ID NO: 29240 - DNA, 2838 bp, Homo Sapiens
gggcgcagagctgggccgagccgtcgccggcgccacgcgagtcccgcagccgccgcgcccgggcaatgggccgggggcactgagggccgccggggccgagcgcggaggggggaccgagccagtgccgtgccctcgggccgcgccaacatgccccgcggcttcctggtgaagcgcagcaagaagtccacgcccgtttcctaccgggtccgcggcggcgaggacggcgaccgcgcactgctgctctcgcccagctgcgggggcgcccgcgccgagcccccggcgccgagcccggtccccgggccgctgccgccgccgccgcccgcggagcgcgcccatgcagcgctcgccgccgcgcttgcctgcgcgcctgggccgcagccacccccgcagggcccgcgggccgcgcacttcggcaaccccgaggctgcgcaccccgcgccgctctacagtcccacgcggcccgtgagccgcgagcacgagaagcacaagtacttcgaacgcagcttcaacctgggctcgccggtctcggccgagtccttccccacgcccgccgcgctgctcggagggggcggcggcggcggcgcgagcggagctggcggaggcggcacctgcggcggcgacccgctgctcttcgcgcccgccgagctcaagatgggcacggcgttctcggctggcgccgaggcggcccgcggcccgggccccggccccccactgccccctgccgccgccctgcggcccccgggaaagcggcccccgccccctaccgccgcggagccgcccgccaaggcagtcaaggccccgggcgccaagaagcccaaggccatccgcaagctgcacttcgaggacgaggtgaccacgtcgcccgtgctggggctcaagatcaaggagggcccggtggaggcgccgcggggccgcgcggggggcgcggcgcggccgctgggcgagttcatctgccagctgtgcaaggaggagtacgccgacccgttcgcgctggcgcagcacaaatgctcgcgcatcgtgcgtgtggagtaccgctgtcccgagtgcgccaaggtcttcagctgcccggccaacctggcctcgcaccgccgctggcacaaaccgcggcccgcgcccgccgccgcccgcgcgccggagccagaagcagcagccagggctgaggcgcgggaggcacccggcggcggcagcgaccgggacacgccgagccccggcggcgtgtccgagtcgggctccgaggacgggctctacgagtgccatcactgcgccaagaagttccgccgccaggcctacctacgcaagcacctgctggcgcaccaccaggcgctgcaggccaagggcgcgccgctagcgcccccggccgaggacctactggccttgtaccccgggcccgacgagaaggcgccccaggaggcggccggcgacggcgagggggccggcgtgctgggcctgagtgcgtccgccgagtgccacctgtgcccagtgtgcggagagtcgttcgccagcaagggcgctcaggagcgccacctgcgcctgctgcacgccgcccaggtgttcccctgcaagtactgcccggccaccttctacagctcgcccggccttacgcggcacatcaacaagtgccacccatccgaaaacagacaggtgatcctcctgcaggtgcccgtgcgcccggcctgctagagcgcgccctccaccccggcccccgaactgtgccttcgcttggagacccacaaagagagtgcgccctgcacgccccgaacccgagtccgcgctgggggagcctcgcccccgcccccaccgggtgaaagtgtcgtctccgcttctctcggtgtggcgtgacggtaaccccatactctccttttgactccttttggaacccccacttttacgttgtgtccctccgcctcccccatggcgcaacaggagtcagtctctttctgtacaagggagaaaagctgtacgcgtttgtctcgtggttggaagcctccccttggcggggagaagctttttttcttgctagtattcgctgtgttcatggtctagaaatgcggtctggtctcgcctcgcctaccaatctctgctctctatgtatgtagcgtacgggttgttttgggtgaatcttgaggaataaatgcctttatatttcacaggctgtaaattgaacttcccacacgattagctttattatggcttgtgaactgctggagtctggctttacctttttgtatgtgaacaaatcaaattgcttaaaaaagagttttctttagtatagccacaaatgccttgaactgttgtctgggattgttttgtggggggagggaagggagtgttccgaagatgctgtagtaactgcctcagtgtttcacgtaagactttttggtttgatcatctttgttgaggtaggactatcagttccctctaaatgtatatgttgatttatgagtaattgttatttattctttatttatttatattaattatgaagattatgatattatttgattgcagatttttttggcgcgctgccccctccccaccctgccactcttgacattccactgtgcgttttagaagagagcctttttctaaagggatctgcttaaagttttaacttttatacctatctgagtgaattacagacaacctatcatttattctgcttcgagggtccccagggcccttgtacaaccgacagctcttacttttaaatgcaatctcttttctacatacattattttcttaattgttagctatttatagaaagcttcaatagaactgtttcaactgtataactatttactattcaaataaaatattttcaaagtcaaaaaaaaaaaa

SEQ ID NO: 29241 - DNA, 5361 bp, Homo Sapiens
ctgcaaacccagcgcaactacggtcccccggtcagacccaggatggggccagaacggacaggggccgcgccgctgccgctgctgctggtgttagcgctcagtcaaggcattttaaattgttgtttggcctacaatgttggtctcccagaagcaaaaatattttccggtccttcaagtgaacagtttgggtatgcagtgcagcagtttataaatccaaaaggcaactggttactggttggttcaccctggagtggctttcctgagaaccgaatgggagatgtgtataaatgtcctgttgacctatccactgccacatgtgaaaaactaaatttgcaaacttcaacaagcattccaaatgttactgagatgaaaaccaacatgagcctcggcttgatcctcaccaggaacatgggaactggaggttttctcacatgtggtcctctgtgggcacagcaatgtgggaatcagtattacacaacgggtgtgtgttctgacatcagtcctgattttcagctctcagccagcttctcacctgcaactcagccctgcccttccctcatagatgttgtggttgtgtgtgatgaatcaaatagtatttatccttgggatgcagtaaagaattttttggaaaaatttgtacaaggccttgatataggccccacaaagacacaggtggggttaattcagtatgccaataatccaagagttgtgtttaacttgaacacatataaaaccaaagaagaaatgattgtagcaacatcccagacatcccaatatggtggggacctcacaaacacattcggagcaattcaatatgcaagaaaatatgcctattcagcagcttctggtgggcgacgaagtgctacgaaagtaatggtagttgtaactgacggtgaatcacatgatggttcaatgttgaaagctgtgattgatcaatgcaaccatgacaatatactgaggtttggcatagcagttcttgggtacttaaacagaaacgcccttgatactaaaaatttaataaaagaaataaaagcgatcgctagtattccaacagaaagatactttttcaatgtgtctgatgaagcagctctactagaaaaggctgggacattaggagaacaaattttcagcattgaaggtactgttcaaggaggagacaactttcagatggaaatgtcacaagtgggattcagtgcagattactcttctcaaaatgatattctgatgctgggtgcagtgggagcttttggctggagtgggaccattgtccagaagacatctcatggccatttgatctttcctaaacaagcctttgaccaaattctgcaggacagaaatcacagttcatatttaggttactctgtggctgcaatttctactggagaaagcactcactttgttgctggtgctcctcgggcaaattataccggccagatagtgctatatagtgtgaatgagaatggcaatatcacggttattcaggctcaccgaggtgaccagattggctcctattttggtagtgtgctgtgttcagttgatgtggataaagacaccattacagacgtgctcttggtaggtgcaccaatgtacatgagtgacctaaagaaagaggaaggaagagtctacctgtttactatcaaaaagggcattttgggtcagcaccaatttcttgaaggccccgagggcattgaaaacactcgatttggttcagcaattgcagctctttcagacatcaacatggatggctttaatgatgtgattgttggttcaccactagaaaatcagaattctggagctgtatacatttacaatggtcatcagggcactatccgcacaaagtattcccagaaaatcttgggatccgatggagcctttaggagccatctccagtactttgggaggtccttggatggctatggagatttaaatggggattccatcaccgatgtgtctattggtgcctttggacaagtggttcaactctggtcacaaagtattgctgatgtagctatagaagcttcattcacaccagaaaaaatcactttggtcaacaagaatgctcagataattctcaaactctgcttcagtgcaaagttcagacctactaagcaaaacaatcaagtggccattgtatataacatcacacttgatgcagatggattttcatccagagtaacctccagggggttatttaaagaaaacaatgaaaggtgcctgcagaagaatatggtagtaaatcaagcacagagttgccccgagcacatcatttatatacaggagccctctgatgttgtcaactctttggatttgcgtgtggacatcagtctggaaaaccctggcactagccctgcccttgaagcctattctgagactgccaaggtcttcagtattcctttccacaaagactgtggtgaggatggactttgcatttctgatctagtcctagatgtccgacaaataccagctgctcaagaacaaccctttattgtcagcaaccaaaacaaaaggttaacattttcagtaacactgaaaaataaaagggaaagtgcatacaacactggaattgttgttgatttttcagaaaacttgttttttgcatcattctccctaccggttgatgggacagaagtaacatgccaggtggctgcatctcagaagtctgttgcctgcgatgtaggctaccctgctttaaagagagaacaacaggtgacttttactattaactttgacttcaatcttcaaaaccttcagaatcaggcgtctctcagtttccaagccttaagtgaaagccaagaagaaaacaaggctgataatttggtcaacctcaaaattcctctcctgtatgatgctgaaattcacttaacaagatctaccaacataaatttttatgaaatctcttcggatgggaatgttccttcaatcgtgcacagttttgaagatgttggtccaaaattcatcttctccctgaaggtaacaacaggaagtgttccagtaagcatggcaactgtaatcatccacatccctcagtataccaaagaaaagaacccactgatgtacctaactggggtgcaaacagacaaggctggtgacatcagttgtaatgcagatatcaatccactgaaaataggacaaacatcttcttctgtatctttcaaaagtgaaaatttcaggcacaccaaagaattgaactgcagaactgcttcctgtagtaatgttacctgctggttgaaagacgttcacatgaaaggagaatactttgttaatgtgactaccagaatttggaacgggactttcgcatcatcaacgttccagacagtacagctaacggcagctgcagaaatcaacacctataaccctgagatatatgtgattgaagataacactgttacgattcccctgatgataatgaaacctgatgagaaagccgaagtaccaacaggagttataataggaagtataattgctggaatccttttgctgttagctctggttgcaattttatggaagctcggcttcttcaaaagaaaatatgaaaagatgaccaaaaatccagatgagattgatgagaccacagagctcagtagctgaaccagcagacctacctgcagtgggaaccggcagcatcccagccagggtttgctgtttgcgtgcatggatttctttttaaatcccatattttttttatcatgtcgtaggtaaactaacctggtattttaagagaaaactgcaggtcagtttggatgaagaaattgtggggggtgggggaggtgcggggggcaggtagggaaataatagggaaaatacctattttatatgatgggggaaaaaaagtaatctttaaactggctggcccagagtttacattctaatttgcattgtgtcagaaacatgaaatgcttccaagcatgacaacttttaaagaaaaatatgatactctcagattttaagggggaaaactgttctctttaaaatatttgtctttaaacagcaactacagaagtggaagtgcttgatatgtaagtacttccacttgtgtatattttaatgaatattgatgttaacaagaggggaaaacaaaacacaggttttttcaatttatgctgctcatccaaagttgccacagatgatacttccaagtgataattttatttataaactaggtaaaatttgttgttggttccttttataccacggctgccccttccacaccccatcttgctctaatgatcaaaacatgcttgaataactgagcttagagtatacctcctatatgtccatttaagttaggagagggggcgatatagagactaaggcacaaaattttgtttaaaactcagaatataacatttatgtaaaatcccatctgctagaagcccatcctgtgccagaggaaggaaaaggaggaaatttcctttctcttttaggaggcacaacagttctcttctaggatttgtttggctgactggcagtaacctagtgaatttttgaaagatgagtaatttctttggcaaccttcctcctcccttactgaaccactctcccacctcctggtggtaccattattatagaagccctctacagcctgactttctctccagcggtccaaagttatcccctcctttacccctcatccaaagttcccactccttcaggacagctgctgtgcattagatattaggggggaaagtcatctgtttaatttacacacttgcatgaattactgtatataaactccttaacttcagggagctattttcatttagtgctaaacaagtaagaaaaataagctagagtgaatttctaaatgttggaatgttatgggatgtaaacaatgtaaagtaaaacactctcaggatttcaccagaagttacagatgaggcactggaaaccaccaccaaattagcaggtgcaccttctgtggctgtcttgtttctgaagtactttttcttccacaagagtgaatttgacctaggcaagtttgttcaaaaggtagatcctgagatgatttggtcagattgggataaggcccagcaatctgcattttaacaagcaccccagtcactaggatgcagatggaccacactttgagaaacaccacccatttctactttttgcaccttattttctctgttcctgagcccccacattctctaggagaaacttagattaaaattcacagacactacatatctaaagctttgacaagtccttgacctctataaacttcagagtcctcattataaaatgggaagactgagctggagttcagcagtgatgctttttagttttaaaagtctatgatctgatctggacttcctataatacaaatacacaatcctccaagaatttgacttggaaaag

SEQ ID NO: 29242 - DNA, 4637 bp, Homo Sapiens
aggtgaacaggtcctcacgcccagctccgccccctcacgcgctctcgccgggaccccgcttccgctggcagccatgggccccggccccagccgcgcgccccgcgccccacgcctgatgctctgtgcgctcgccttgatggtggcggccggcggctgcgtcgtctccgccttcaacctggatacccgattcctggtagtgaaggaggccgggaacccgggcagcctcttcggctactcggtcgccctccatcggcagacagagcggcagcagcgctacctgctcctggctggtgccccccgggagctcgctgtgcccgatggctacaccaaccggactggtgctgtgtacctgtgcccactcactgcccacaaggatgactgtgagcggatgaacatcacagtgaaaaatgaccctggccatcacattattgaggacatgtggcttggagtgactgtggccagccagggccctgcaggcagagttctggtctgtgcccaccgctacacccaggtgctgtggtcagggtcagaagaccagcggcgcatggtgggcaagtgctacgtgcgaggcaatgacctagagctggactccagtgatgactggcagacctaccacaacgagatgtgcaatagcaacacagactacctggagacgggcatgtgccagctgggcaccagcggtggcttcacccagaacactgtgtacttcggcgcccccggtgcctacaactggaaaggaaacagctacatgattcagcgcaaggagtgggacttatctgagtatagttacaaggacccagaggaccaaggaaacctctatattgggtacacgatgcaggtaggcagcttcatcctgcaccccaaaaacatcaccattgtgacaggtgccccacggcaccgacatatgggcgcggtgttcttgctgagccaggaggcaggcggagacctgcggaggaggcaggtgctggagggctcgcaggtgggcgcctattttggcagcgcaattgccctggcagacctgaacaatgatgggtggcaggacctcctggtgggcgccccctactacttcgagaggaaagaggaagtagggggtgccatctatgtcttcatgaaccaggcgggaacctccttccctgctcacccctcactccttcttcatggccccagtggctctgcctttggtttatctgtggccagcattggtgacatcaaccaggatggatttcaggatattgctgtgggagctccgtttgaaggcttgggcaaagtgtacatctatcacagtagctctaaggggctccttagacagccccagcaggtaatccatggagagaagctgggactgcctgggttggccaccttcggctattccctcagtgggcagatggatgtggatgagaacttctacccagaccttctagtgggaagcctgtcagaccacattgtgctgctgcgggcccggccagtcatcaacatcgtccacaagaccttggtgcccaggccagctgtgctggaccctgcactttgcacggccacctcttgtgtgcaagtggagctgtgctttgcttacaaccagagtgccgggaaccccaactacaggcgaaacatcaccctggcctacactctggaggctgacagggaccgccggccgccccggctccgctttgccggcagtgagtccgctgtcttccacggcttcttctccatgcccgagatgcgctgccagaagctggagctgctcctgatggacaacctccgtgacaaactccgccccatcatcatctccatgaactactctttacctttgcggatgcccgatcgcccccggctggggctgcggtccctggacgcctacccgatcctcaaccaggcacaggctctggagaaccacactgaggtccagttccagaaggagtgcgggcctgacaacaagtgtgagagcaacttgcagatgcgggcagccttcgtgtcagagcagcagcagaagctgagcaggctccagtacagcagagacgtccggaaattgctcctgagcatcaacgtgacgaacacccggacctcggagcgctccggggaggacgcccacgaggcgctgctcaccctggtggtgcctcccgccctgctgctgtcctcagtgcgcccccccggggcctgccaagctaatgagaccatcttttgcgagctggggaaccccttcaaacggaaccagaggatggagctgctcatcgcctttgaggtcatcggggtgaccctgcacacaagggaccttcaggtgcagctgcagctctccacgtcgagtcaccaggacaacctgtggcccatgatcctcactctgctggtggactatacactccagacctcgcttagcatggtaaatcaccggctacaaagcttctttggggggacagtgatgggtgagtctggcatgaaaactgtggaggatgtaggaagccccctcaagtatgaattccaggtgggcccaatgggggaggggctggtgggcctggggaccctggtcctaggtctggagtggccctacgaagtcagcaatggcaagtggctgctgtatcccacggagatcaccgtccatggcaatgggtcctggccctgccgaccacctggagaccttatcaaccctctcaacctcactctttctgaccctggggacaggccatcatccccacagcgcaggcgccgacagctggatccagggggaggccagggccccccacctgtcactctggctgctgccaaaaaagccaagtctgagactgtgctgacctgtgccacagggcgtgcccactgtgtgtggctagagtgccccatccctgatgcccccgttgtcaccaacgtgactgtgaaggcacgagtgtggaacagcaccttcatcgaggattacagagactttgaccgagtccgggtaaatggctgggctaccctattcctccgaaccagcatccccaccatcaacatggagaacaagaccacgtggttctctgtggacattgactcggagctggtggaggagctgccggccgaaatcgagctgtggctggtgctggtggccgtgggtgcagggctgctgctgctggggctgatcatcctcctgctgtggaagtgcggcttcttcaagcgagcccgcactcgcgccctgtatgaagctaagaggcagaaggcggagatgaagagccagccgtcagagacagagaggctgaccgacgactactgagggggcagccccccgcccccggcccacctggtgtgacttctttaagcggacccgctattatcagatcatgcccaagtaccacgcagtgcggatccgggaggaggagcgctacccacctccagggagcaccctgcccaccaagaagcactgggtgaccagctggcagactcgggaccaatactactgacgtcctccctgatcccaccccctcctcccccagtgtcccctttcttcctatttatcataagttatgcctctgacagtccacaggggccaccacctttggctggtagcagcaggctcaggcacatacacctcgtcaagagcatgcacatgctgtctggccctggggatcttcccacaggagggccagcgctgtggaccttacaacgccgagtgcactgcattcctgtgccctagatgcacgtggggcccactgctcgtggactgtgctggtgcatcacggatggtgcatgggctcgccgtgtctcagcctctgccagcgccagcgccaaaacaagccaaagagcctcccaccagagccgggaggaaaaggcccctgcaatgtggtgacacctcccctttcacacctggatccatcttgagagccacagtcactggattgactttgctgtcaaaactactgacagggagcagcccccgggccgctggctggtgggcccccaattgacacccatgccagagaggtggggatcctgcctaaggttgtctacgggggcacttggaggacctggcgtgctcagacccaacagcaaaggaactagaaagaaggacccagaaggcttgctttcctgcatctctgtgaagcctctctccttggccacagactgaactcgcagggagtgcagcaggaaggaacaaagacaggcaaacggcaacgtagcctgggctcactgtgctggggcatggcgggatcctccacagagaggaggggaccaattctggacagacagatgttgggaggatacagaggagatgccacttctcactcaccactaccagccagcctccagaaggccccagagagaccctgcaagaccacggagggagccgacacttgaatgtagtaataggcagggggccctgccaccccatccagccagaccccagctgaaccatgcgtcaggggcctagaggtggagttcttagctatccttggctttctgtgccagcctggctctgcccctcccccatgggctgtgtcctaaggcccatttgagaagctgaggctagttccaaaaacctctcctgacccctgcctgttggcagcccactccccagccccagccccttccatggtactgtagcaggggaattccctccccctccttgtgccttctttgtatataggcttctcaccgcgaccaataaacagctcccagtttgt

SEQ ID NO: 29243 - DNA, 7037 bp, Homo Sapiens
gctgcgtggagcggcggagccggagggaagcaaaggaccgtctgcgctgctgtccccgccccgcgcgctctgcgcccctcgtccctggcggtcgctccgaagctcagccctcttgcctgccccggagctgtcccgggctagccgagaagagagcggccggcaagtttgggcgcgcgcaggcggcgggccgcgggcactgggcgcctcgctggggcggggggaggtggctaccgctcccggcttggcgtcccgcgcgcacttcggcgatggcttttccgccgcggcgacggctgcgcctcggtccccgcggcctcccgcttcttctctcgggactcctgctacctctgtgccgcgccttcaacctagacgtggacagtcctgccgagtactctggccccgagggaagttacttcggcttcgccgtggatttcttcgtgcccagcgcgtcttcccggatgtttcttctcgtgggagctcccaaagcaaacaccacccagcctgggattgtggaaggagggcaggtcctcaaatgtgactggtcttctacccgccggtgccagccaattgaatttgatgcaacaggcaatagagattatgccaaggatgatccattggaatttaagtcccatcagtggtttggagcatctgtgaggtcgaaacaggataaaattttggcctgtgccccattgtaccattggagaactgagatgaaacaggagcgagagcctgttggaacatgctttcttcaagatggaacaaagactgttgagtatgctccatgtagatcacaagatattgatgctgatggacagggattttgtcaaggaggattcagcattgattttactaaagctgacagagtacttcttggtggtcctggtagcttttattggcaaggtcagcttatttcggatcaagtggcagaaatcgtatctaaatacgaccccaatgtttacagcatcaagtataataaccaattagcaactcggactgcacaagctatttttgatgacagctatttgggttattctgtggctgtcggagatttcaatggtgatggcatagatgactttgtttcaggagttccaagagcagcaaggactttgggaatggtttatatttatgatgggaagaacatgtcctccttatacaattttactggcgagcagatggctgcatatttcggattttctgtagctgccactgacattaatggagatgattatgcagatgtgtttattggagcacctctcttcatggatcgtggctctgatggcaaactccaagaggtggggcaggtctcagtgtctctacagagagcttcaggagacttccagacgacaaagctgaatggatttgaggtctttgcacggtttggcagtgccatagctcctttgggagatctggaccaggatggtttcaatgatattgcaattgctgctccatatgggggtgaagataaaaaaggaattgtttatatcttcaatggaagatcaacaggcttgaacgcagtcccatctcaaatccttgaagggcagtgggctgctcgaagcatgccaccaagctttggctattcaatgaaaggagccacagatatagacaaaaatggatatccagacttaattgtaggagcttttggtgtagatcgagctatcttatacagggccagaccagttatcactgtaaatgctggtcttgaagtgtaccctagcattttaaatcaagacaataaaacctgctcactgcctggaacagctctcaaagtttcctgttttaatgttaggttctgcttaaaggcagatggcaaaggagtacttcccaggaaacttaatttccaggtggaacttcttttggataaactcaagcaaaagggagcaattcgacgagcactgtttctctacagcaggtccccaagtcactccaagaacatgactatttcaagggggggactgatgcagtgtgaggaattgatagcgtatctgcgggatgaatctgaatttagagacaaactcactccaattactatttttatggaatatcggttggattatagaacagctgctgatacaacaggcttgcaacccattcttaaccagttcacgcctgctaacattagtcgacaggctcacattctacttgactgtggtgaagacaatgtctgtaaacccaagctggaagtttctgtagatagtgatcaaaagaagatctatattggggatgacaaccctctgacattgattgttaaggctcagaatcaaggagaaggtgcctacgaagctgagctcatcgtttccattccactgcaggctgatttcatcggggttgtccgaaacaatgaagccttagcaagactttcctgtgcatttaagacagaaaaccaaactcgccaggtggtatgtgaccttggaaacccaatgaaggctggaactcaactcttagctggtcttcgtttcagtgtgcaccagcagtcagagatggatacttctgtgaaatttgacttacaaatccaaagctcaaatctatttgacaaagtaagcccagttgtatctcacaaagttgatcttgctgttttagctgcagttgagataagaggagtctcgagtcctgatcatatctttcttccgattccaaactgggagcacaaggagaaccctgagactgaagaagatgttgggccagttgttcagcacatctatgagctgagaaacaatggtccaagttcattcagcaaggcaatgctccatcttcagtggccttacaaatataataataacactctgttgtatatccttcattatgatattgatggaccaatgaactgcacttcagatatggagatcaaccctttgagaattaagatctcatctttgcaaacaactgaaaagaatgacacggttgccgggcaaggtgagcgggaccatctcatcactaagcgggatcttgccctcagtgaaggagatattcacactttgggttgtggagttgctcagtgcttgaagattgtctgccaagttgggagattagacagaggaaagagtgcaatcttgtacgtaaagtcattactgtggactgagacttttatgaataaagaaaatcagaatcattcctattctctgaagtcgtctgcttcatttaatgtcatagagtttccttataagaatcttccaattgaggatatcaccaactccacattggttaccactaatgtcacctggggcattcagccagcgcccatgcctgtgcctgtgtgggtgatcattttagcagttctagcaggattgttgctactggctgttttggtatttgtaatgtacaggatgggcttttttaaacgggtccggccacctcaagaagaacaagaaagggagcagcttcaacctcatgaaaatggtgaaggaaactcagaaacttaactgcagtttttaagttatgctacatcttgacccactagaattagcaactttattatagatttaaactttcttcatgaggagtaaaaatccaaggctttactgctgatagtgctaattggcattaaccacaaaatgagaattatatttgtcaaccttctccttataaataagttcagacatacatttaataacatagggtgacttgtgtttttaggtatttaaataataaaatttcaagggatagtttttattcaatgtatataagacaggtagtgcctgatttactactttatataaaatagtacctccttcagttactgtttctgatttaatgtacggaactttatttgttgttgttgttgttgttgttgttgttgttttaaagcagtccaaatttggaccttagcaatcatgtcttttgtataggtacttaatgttaatacatattacactacagtttacttttcagaatactaaagactttataactgcatgaacttggatttttttaatcactcatatggtagaattttataaacacatacatgataccatccaaattcttgcttttaataacaaaggtacaatattttgttttagtatgaaaatctggtagatcctattacacttctgtttatattaaatccacaatattttattacatttttaacttgtataaattttaggtcaaatccttcaagccaacctatactaaaaattagttccataatcacaaatggctcttttgtgtaattgtttaatttcacctgaatatcataatgcttaaagccatatggagttggaaattatttccaaagcatatttattccattgttttagtctggctatttacagtataaaaaaagcatttttattaaaatactgtgtagttctttgagatagttgcttatgcatatagtaagtattacattcttagagtagagcagagtttttagttagtattaatttattttcctccattcatgtacttttccttatatttccaaaactgttactgagaatgggtcaagatcagtgagaaatctttacagttgacaggaacctggaccccttaccccaactttatgagtaatgcttggaataaaaactcttaaggcaactcactgatttacttctagcaatagcatgatgttacaggaatattacctctgtttaagcaaggtaatgtgtaaaatcagtctcggctgtcagaataacttctaaaaggtatttttataagcagttcaagttactgaaaaccttttaaacctttctgaagttcgttagtataaattacttttctaggattattaataaaagccacataggtggcaagttgtagttttatatggctctgtagagtggtgaaccttctagaggaatatatgatttattcacagttcctcaaggcctggggatgatgatcagttatacctatttttgtgcaattacatcatgttgtacattagaaatggagagtttaatagctctttaactgctgtcctcattaggtaatgataaatatttcccttaaataattgactattttgctgtgttttaaaaatgattgaaatttatcttgccatatctcataatttcatgcacaagttgactgagctaatcttgagaatatattcgtaaaataggagcacatttagttgaggtatacaaggtaggactctagacaaaaccttctattttagctttagtgaatttcaaaagtaatgggtcttggagtatagatttttattagtagcttgaaagagcttaatcatatgcagtaagtatttttattaccaataaatttaaaattttttaagaaaaatatttttatcctagggccaagtgttgcctgccaccaatcagtaagttagtctataacaaattttaccctaacagttttaccacctagtaacagtcatttctgaaaatatgttggatagaaagtcactctttggcaaaagtgttagaatttgcttttgtgccatctattccttttatggcatctatcttgaaagtaatcttgtattggagattgaaagatgctgtaatttagaaattaacatgatatcttaaattacctttatgaaatatagttttgtataatagcatagattttccttcaaaaaatgaacatttatatatctacaaaaatatggagaagagtaatttgaaagcctactttctgaagaaaatggtgggatttttttttatcatgattaaatatcaaaaaattgccctatgaaaactttaaatctctaaaacatttgaaatactaccatatttgtgatttattgagaataaaaatccattttgaaatgtaaaatttttatgatctgattcagttttaagaaaacatgaatgaactagaagatattaaaaacatttgacattggtaagaaatattgatactgatattgatttttatataggtatttatttcagaattgatattttgagaaaaatacatgtgagtcattttttctgtttctcttttctcttaacgattatcactgtaattctgaatctgaaaggtaaaacaattagtcaaaatattattgccatcattctacctgtgttatgaaactacttattcatagttaattctcattaacacttacatttccataaagaaaactcaagtattaataaaagagactttactggcttaagagggctgtgaaagatttttgatagtgaatcatgaccctaagggagagatttgtgtgataaaagtattgtatataatagatcagcgatttttgtaaggcaaacagaatttgtaagttggcagatcttcctaagttgcaaaatgtaatgatgagcttggtggagaagaatgagtcgttcttggaatacctatgtgcagccactacccatctcaatgtcaccttgtttgcattcttggatagcttgtatatgtagtagtttgatgaataatttaaagaaaaacacctaaaatttgaaaaatgattgtaggatcaaaaaaggcagatgaaattacttaatactcagtgttttggagagtattccttttagtttgttggttggctggtttgaacgatagaaatatgcagcatgcaatatatgcttatatttcattttaatttctgatatataatgaacttcttgggagaggtactgaatctttgatgttttttgtcattgttctcaagtgcaatataacaatgtaaccaaatctagataatttcaaagttgtcattaatttagtaagcctaatataaacaaatatttgtattatttttgttagcaggaaagagtgattaagtgaggttatttacccctaaatggtccattctgcattgtatttcaggctggaaatgaattattctttaccagttttgaaacactttgaaatatcctaaggtaacttggaagctgtgtagtatatcaaattaatttgctacctaataacatagaaagtaaatatctttgtggtcacccacattgggtgagacagaaaatgaatctgttctaaaatttgtaatttgctaacttgatttgagttagtgaaaactggtacagtgttctgcttgatttacaacatgtaacttgtgactgtacaataaacataagcatatggtaccaaaaaaaaaaaaaaaa

SEQ ID NO: 29244 - DNA, 10524 bp, Homo Sapiens
cttccagctcccgccggcgctgtgacggccgagcggtcgcagagcagggagtggacacgaggtgggagcggagagggaaggaggaggaggaggagcaaaggtgttggagagaaaacttcagaaaggaacaggaaacctgccggggagcgggcggcggctgcggcttctctgggcgcctgggctgcctcttcgcggggtgtcccgagctggcgcttggccccggtctggcttccccggcgcgcaccacggctgagcgcgacgctcagtggctcgggccgtgcctccgccgtggctcttggccgctgtagtcccgcgatccgatccgcttctgccgcggcggctccctggagagagggcggcgagggcgcagggaagaagagggacgtccactgtggaacatgaagcagcatgaagcagcatgactgagaaaatgtccagcttcctctacataggggacatcgtgtccctgtacgcggagggctcggtcaacggcttcatcagcaccttggggttagtggatgacagatgtgtggtgcacccagaggccggggaccttgccaaccctcccaagaagttcagagactgccttttcaaggtgtgccctatgaacagatattctgcccagaagcaatattggaaagcaaagcaagccaaacaagggaaccacaccgaggcagccttgctgaagaaactacagcacgctgcagaactggaacaaaaacaaaatgaatcggagaataagaaactgttgggagaaattgtaaaatacagtaatgttatacaactactgcatataaaaagcaacaaatatcttactgtcaacaagagattacctgctttactggagaagaatgccatgcgtgtgtccttggatgctgcaggaaatgaagggtcttggttttatattcatccattctggaaactgagaagcgagggtgacaatattgttgtaggagataaagttgttttgatgcctgtgaatgcagggcagccactacatgccagcaacatagagcttcttgataacccagggtgtaaagaggtgaatgctgtcaattgcaacaccagctggaaaatcactttattcatgaaatatagttcctatcgagaggatgtattaaaaggaggggacgttgttagattatttcatgcggaacaagagaagtttttgacttgtgatgaatatgagaaaaaacagcacattttccttcgtacgaccttgcgccaatcagctacttctgctactagttctaaagcactctgggaaatagaggtggttcatcatgacccatgccgtgggggtgcaggacagtggaacagcttgttcagatttaagcatcttgcaactggaaactatttagctgcagagcttaatcctgattatcgagatgcccaaaatgaaggaaaaaatgtgagagatggagtccctccaacttcaaagaaaaaacgccaggcaggggagaagatcatgtatactttggtttcagtcccgcatggcaatgacattgcatccctttttgaactagatgccacaactcttcagagagctgactgcctggttccaaggaactcatatgttcggttaaggcatttatgcaccaacacatgggtaaccagtactagtatccccatagacacagatgaagagaggcctgttatgttaaagattggaacctgccaaaccaaagaagataaagaagcgttcgcaatcgtgtctgttccactgtctgaagttcgagacttagactttgccaatgatgccaataaagtactagcgaccacagttaaaaagctagaaaacggcacaataactcagaatgaaaggaggtttgtaaccaaattattggaagatctcatattctttgttgctgatgtgcctaataatggacaagaagttctggatgtggttatcactaagccaaaccgagagcgtcaaaaattgatgagggaacaaaacatactggcacaggtatttggaattcttaaagcaccctttaaagagaaagcaggagaaggctcgatgctgagacttgaagatctgggggatcaaagatatgcaccctacaagtacatgctgcggctctgttaccgcgtcctgagacactcgcagcaggattaccggaaaaatcaggaatatattgctaagaatttctgtgtcatgcagtcccagattggctatgatattttggcagaagatactatcacacctttgttgcacaacaacagaaaactactagagaaacatatcacagcaaaagaaatagaaacatttgtcagtttactcaggagaaatcgggagccaaggtttttggattatttgtcagatctgtgtgtgtctaataccactgctatccctgtaactcaagaactcatctgtaaatttatgttgagtccaggcaatgcagacattctcattcaaactaaggtggtctcaatgcaagcagacaaccccatggagagctccatcctttcagatgacattgatgatgaagaagtttggctctattggattgacagcaacaaggaacctcatggcaaagctatcaggcaccttgctcaagaggcaaaagaaggcaccaaagctgacttagaagttcttacctattacaggtaccagctaaacctctttgcaaggatgtgcttggatcgccagtatctggccataaaccagatttctacacagctgtctgtagacctgatcctgcggtgtgtgtcggatgagagcctgccgttcgacctccgagcgtccttctgtcgcctcatgctccacatgcacgttgaccgggatccccaggagtccgtggtgcctgttcgctatgccaggctctggacagaaatccccacaaagatcacaattcatgaatatgattctataacagactcttccagaaatgatatgaagaggaaatttgccctgacaatggaatttgttgaagaatatttgaaagaagttgtaaaccagccctttccttttggggataaagaaaaaaataaactgacatttgaggtggtccacttggctcggaatcttatatactttggattttatagtttcagtgagttattaaggctaacaagaacacttctggctattttagacattgtacaggcccccatgtcatcatactttgaaagattaagcaaatttcaagatggaggaaacaatgtgatgagaaccattcatggggtgggagagatgatgacccagatggtactcagtagaggctccatcttccccatgagcgtgccggatgtgccacccagcatccacccgagcaagcaagggagccccaccgagcatgaggatgtgactgtgatggacaccaagctgaagatcattgagattttgcagtttatcctgagtgtcagactggattataggatctcatatatgctgtcaatatataagaaggagtttggagaggacaatgacaatgcggagacatctgccagtggatctccagacactttactaccatcagctattgttcctgatatagatgaaattgcagctcaggcagaaactatgtttgcgggaagaaaagaaaaaaatccagttcaacttgacgatgaaggaggcaggacgtttttacgggtcctcattcatctgatcatgcacgactacgcgcctttgctgtctggagccctgcagctgttgtttaagcacttcagccagagggcagaggttttacaggcatttaagcaggtgcaattactggtgtctaatcaagacgtagataactacaagcaaatcaaggcagatctagaccagcttcgactgacagtagaaaagtctgagctatgggtggagaagagcagcaactatgagaatggagaaataggggaaagtcaagtgaaaggtggtgaagagccaattgaggaatcaaacattttaagtccagtgcaggatggaacaaagaaacctcagattgacagcaacaagagcaataagtaccggattgtaaaggagattttgatcaggctaagtaaactctgtgtgcagaataaaaagtgtcggaatcaacatcaacgattactgaaaaatatgggggcgcattcggtggtgttggatcttctgcagataccctatgaaaagaatgatgaaaagatgaatgaagtaatgaatctagcccatacatttctgcagaatttctgtcgaggaaatccacagaatcaagttcttcttcataaacatctgaatttgtttttaactccaggtctccttgaagcagaaaccatgcggcacatcttcatgaacaattaccatctgtgcaacgaaattagcgagagagttgtacaacactttgtgcactgcattgagacacatggccgccacgtggagtacctgaggtttttgcaaacaattgtaaaagcagatggtaaatatgtgaagaaatgccaggatatggtaatgacagagttgataaatgggggtgaagacgtgctgatattttacaatgatagagcatcatttccaatccttctccatatgatgtgttcagagagagaccgaggggatgagagtggccccttagcctaccacatcaccctggtggagttgctggcagcatgcacagaggggaaaaatgtctacactgaaatcaagtgtaattcccttctcccgctggacgacatagtgagggtggtgacccatgacgactgcatccctgaggttaaaattgcttatgtgaactttgttaatcactgttatgttgacactgaagtggaaatgaaagaaatctatacaagtaaccacatttggaaattatttgagaacttcttggtggatatggcaagggtttgcaacacaactacagacaggaaacatgcagacatctttttggaaaagtgtgttactgagtcaataatgaatattgtgagcggcttctttaattctcccttttcagacaatagtaccagcctccagacacatcagccagtttttattcagctactgcaatctgccttcagaatttacaattgcacctggccaaacccagcgcagaaagcctcagtggaatcctgtatcagaactttggctgaagtggcaaaaaatcgtggaattgccattccagtggatttggacagccaagttaatactcttttcatgaagagccattcaaatatggtgcagagagcagcaatgggttggagactatcagctcgctctgggccacgctttaaggaagctcttggagggcctgcttgggattacagaaatattattgaaaagttacaggatgtagtggcctccttggagcaccagttcagcccaatgatgcaggctgaattctcagtgttggttgatgtattgtacagtccagaactgctgttccctgagggaagcgatgcaagaataagatgtggcgctttcatgtcgaagttgattaatcatacaaagaaactaatggagaaagaagaaaaactgtgcattaaaattcttcagacattacgagaaatgttagagaagaaagacagctttgtggaagagggtaacacattaagaaagatacttctgaatcgatactttaaaggtgattatagtattggtgtgaatggacacctatcaggagcctactccaaaactgcacaggtgggaggaagcttttctggacaagattcagataagatggggatatcaatgtcagacattcagtgtctgctggataaagaaggtgcatcagaacttgtcatcgatgttatagtgaacaccaaaaatgacagaattttttcagaaggcattttcctcggcattgccttgcttgaaggaggaaatacacaaacacagtattctttctaccagcagttgcatgaacaaaaaaagtcagaaaaattctttaaagttctctatgatcgaatgaaggctgctcagaaagaaataagatcaacagtgacagttaataccatagatttaggtaacaaaaaaagggacgatgacaatgaattgatgacatctggtccacgaatgagagtaagagattcaacactacatttaaaagagggaatgaaagggcaattaacagaagcttcttcagcaacatccaaagcatattgtgtatacagaagagaaatggatccagaaatagacattatgtgcacaggaccagaagcgggaaacactgaggaaaaatccgcagaggaagtaacaatgagtcccgcaattgccatcatgcagccaatactgagatttcttcagttactgtgtgagaatcacaaccgggaattgcagaacttcttgaggaatcaaaacaacaaaacaaattacaacctagtctgtgagacccttcagtttctggactgcatttgtggaagtacaaccggtggcctgggcctgttgggtctctacatcaatgagaagaatgtagcgctggtcaaccagaacctggagagcttgactgagtattgccagggcccttgccatgaaaatcagacctgtatcgctacacatgagtctaatgggattgatatcatcattgctttgattctgaatgacataaaccctcttggtaaataccgaatggacctggtgctccagctaaagaacaatgcatctaaacttttgctggccattatggaaagcagacatgacagtgagaatgcagaaagaattctttttaacatgagacccagagaactggtggatgtgatgaagaatgcctataaccaaggattggaatgtgaccatggggatgatgagggtggagatgatggtgtttctccaaaagatgttggacacaatatctatattctggcccatcagttggcccgccacaataaactgttgcagcagatgctcaaaccaggatcggatccagatgaaggagatgaagccttaaagtattatgccaaccacactgcacagattgagattgtccggcatgataggaccatggaacaaatagtttttcctgtccccaatatatgtgaatacctcactcgagaatccaagtgccgtgtgttcaatacaactgaaagggatgaacaaggaagtaaagtgaatgactttttccagcaaacagaagatctctacaatgaaatgaagtggcagaagaaaatcaggaataaccctgcactgttctggttctcgaggcacatctctctctgggggagcatttccttcaacctggctgtgttcatcaatttagctgttgctctcttctacccatttggggatgatggagatgaaggtacactttctccattgttctcggttcttctttggatagcagttgcgatctgcacatctatgctgtttttcttctccaagcctgtgggtattcggccgtttcttgtatcaataatgctcagatcaatatatacaataggtcttgggcctacattaatacttcttggtgcagctaatctttgtaataaaattgtttttctggtgagttttgttggaaatcgtggcacgttcacccgtgggtaccgagcagtcatcctggatatggcctttctctatcacgtggcgtatgtcctggtttgcatgctgggcctttttgtccatgaattcttctatagcttcctgctttttgatttggtgtacagggaagagactttgctgaatgtcataaaaagtgtcacacgaaatggccgctctattattctaactgcagtcctggctctcatcctcgtctacctgttttccattattgggttcctttttttgaaggatgacttcactatggaagttgataggctgaaaaaccgaactcctgttacaggcagtcatcaagtgcctactatgactttaactaccatgatggaagcatgtgccaaggagaactgttcacccacaattccagcttcaaatacagctgatgaagagtatgaagatggaattgaaaggacgtgtgacactctccttatgtgcattgtcaccgtgctgaaccagggcctcaggaatggcggtggtgtgggggatgtgctaagaaggccatcgaaagatgagcctttgtttgctgcccgagtggtttatgaccttcttttttatttcattgttatcattattgttctgaacttgatttttggtgttatcatcgatacttttgctgatctcagaagcgaaaaacagaaaaaagaagaaattctaaagacaacttgtttcatctgtggacttgagagagacaagtttgataataaaacggtttcatttgaggagcacattaagtcagaacacaatatgtggcattatttgtacttcatagtcctggtgaaagttaaagacccaacagaatacactggacctgaaagttatgtggctcaaatgattgtggagaagaatttggattggtttcctcggatgcgagccatgtccctcgttagcaatgaaggcgacagtgagcaaaatgaaattcggagccttcaggagaagttggaatcgaccatgagtctggtcaaacagctgtcgggtcagctggcggagctcaaggagcagatgacagaacaaaggaagaataagcagagactgggcttcctcggatcaaacacaccccatgtgaatcatcacatgccaccacactgataccatggggggaagccgtgactagcctttcatcagtgtcctgcctgatcactgaataaagaactgagatggaggggagtgaacagtgcctattgttgaaaagttaaaaacaaccaagtgccaagatgttgagtgggttagctccgagaacaatttataactgtgttttcatggttgcgaagacctaacctcaaatgcatctgctagaaagcgtacatcacacattcgcaatgcatcaggaagaaaaggcttgcccaaaaggctggagagggcagggagcggcaggatggaaggagacacggggcagggagaactctcttctgctaaatcgataggagtcagttttgtcttaaatgctgactacagccactgacatggttggctggaatttcttcttttaattgtggcatataggtttgtgacacaagaagtcatactttggtggctaagttttactaaggaaaataactgaaaagattaaaagtgagagctgaaaagagaaatgataatgcttccaaactgtagctgtcacagggcaatttctttatttataacatgaagcacaatggatttacagctctaggaacttagtactttggagcttttgcctctcacactgacaacataacaggatgtgattgccttctctgggattcagacaggctctgtcaatgtggagcacaaaaggagattttcatataacttgttaaaaacatgttctaagtcatgtataggctaagattttaagaagatctgggggaataaaaagccaacagtaagccccaggaaagggttttttgagaccatatgtatgctattaaaatatattgagattaatacatgaaaatgcttaaaagtgataggaattattgagaaacttatgatggtggcattgccttttataaacatggagtgaaagccatttgactcaacgtttgctgtgcttaaagaattgcttcaggacccgagcgtttttatgtatgctgttcctgcagttaggaaaaaaaaatccaagaaatgtattgaatactcaagaaaatgccacatttcaattacatatttaaaactgtatctgtaagggcttttcaaaatgtagcaagataaaaatctcttattcaaattgtttttgtattaaatcatgcactcagaatttgtcgagggagagaataacctggtgtgttcaggttattcttagagactacacatttggaatagcagagcaaaatatggataatgaaagtgttgggaaaaaagtgatgtgacagggagtgaagacacttgataccagactctgggagatactctgcaagttgacctggcctctcccccacaggaacaaaacactgcctccagagtctttaaattctcagttatcaacgccaaggtttaaggtctagatagggtttgctatagggtttgctctgacaatttttaaagcttttggattgttctaacatagcttaagctattggttcctaaaaatcccaaatcaagatctatgtagaatataaaggaagcctgaaccaatccttccacatactgttaagatgtagacttggaacaaagctgttgggacccagagcaatgaatttttgaactgaagctactggtactccccagcaccacctcatactaagaattcctcactctgacatgacagtattttttctgaccaggagctgaaagaccctgacattcatgatccaaagatataagaaattttgatatgtctgcatgcagcacagaactttgaacctaggaggcagtcaataaatacatgagaaattcagctgtcattcagttactcttaattctttataaaactttaaatgataccacatatttgtttgtttaaaatggctttcccaaaatcaaagtagactaaagcagccatctttaaaatccaggatcatcaatgctattaacagtatcaggtaaaaagtacactttaaaatattttaatcaggcagagttttatggataggagatgtactcactcg

SEQ ID NO: 29245 - DNA, 8833 bp, Homo Sapiens
cgccccccacgccctgggccccggagggccgcagccatgagtgaaatgtccagctttcttcacatcggggacatcgtctccctgtacgccgagggctccgtcaatggcttcatcagcactttggggctggtggatgaccgctgtgtggtggagcccgcggccggggacctggacaacccccctaagaagttccgtgactgcctcttcaaggtgtgccccatgaaccgctactcggcccagaagcagtactggaaggccaagcagactaagcaggacaaggagaagatcgctgatgtggtgttgctgcagaagctgcagcatgcggcgcagatggagcagaagcaaaatgacacggagaacaagaaggtgcatggggatgtcgtgaagtatggcagtgtgatccagctcctgcacatgaagagcaacaagtacctgacagtgaacaagcggcttccggccttgctggagaagaacgccatgcgggtgactctggatgccacaggcaacgagggttcctggctcttcatccagcccttctggaagctgcggagcaacggggacaacgtggtcgtgggggacaaggtgatcctgaatcctgtcaatgccgggcagcctctgcatgccagcaattacgagctcagcgacaacgccggctgcaaggaggtcaattctgtgaactgcaacaccagctggaagatcaacctgtttatgcagtttcgggaccacctggaggaggtgttgaaagggggagacgtggtgcggctgttccatgcggagcaggagaagttcctgacgtgtgacgagtacaagggcaagctgcaggtgttcctgcgaactacactgcgccagtctgccacctcggccaccagctccaatgctctctgggaggtggaggtggtccaccacgacccctgccgtggaggagctgggcactggaatggcttgtaccgcttcaagcacctggctacaggcaactacctggctgctgaggagaaccccagttacaaaggtgatgcctcagatcccaaggcagcaggaatgggggcacagggccgcacaggccgcaggaatgctggggagaagatcaagtactgcctggtggctgtgcctcatggcaatgacatcgcctctctctttgagctggaccccaccaccttgcagaaaaccgactctttcgtgccccggaactcgtacgtccggctgcggcacctctgcaccaacacgtggattcagagcaccaatgtgcccattgacatcgaggaggagcggcccatccggctcatgctgggcacctgccccaccaaggaggacaaggaggcctttgccatcgtgtcagtgcccgtgtctgagatccgagacctggactttgccaatgacgccagctccatgctggccagtgccgtggagaaactcaacgagggcttcatcagccagaatgaccgcaggtttgtcatccagctgctggaagacctggtgttctttgtcagcgatgtccccaacaatgggcagaatgtcctggacatcatggtcactaagcccaaccgggaacggcagaagctgatgagggagcagaacatcctcaaacaggtctttggcattctgaaggtcccgttccgtgagaaggggggtgaaggtcccctggtgcggctggaggagctgtcagaccagaagaacgccccctaccagcacatgttccgcctgtgctaccgtgtgttgcggtattcccaggaggactaccgcaagaaccaggagcacattgccaagcagtttgggatgatgcagtcccagattggctacgacatcctggccgaggacaccatcactgccctgctgcacaacaaccgcaagctcctggaaaagcacatcaccaagaccgaggtggagaccttcgtcagccttgtgcgcaagaaccgggagcccaggttcctggactacctctctgacctgtgtgtgtccaaccacatcgccatccccgtcacccaagagctcatctgcaagtgtgtgctggaccccaagaacagtgacattctcatccggaccgagcttcggcccgtgaaggagatggcccaatcccacgagtacctgagcatcgagtactcagaagaggaagtgtggctcacgtggactgacaagaataacgagcatcatgagaagagtgtgaggcagctggcccaggaggcgcgggccggcaacgcccacgacgagaatgtgctcagctactacaggtaccagctgaagctctttgcccgcatgtgcttggaccgccagtacttggccatcgacgagatctcccagcagctgggcgtggacctgattttcctgtgcatggcagacgagatgctgccctttgacctgcgcgcctccttctgccacctgatgctgcacgtgcacgtggaccgtgacccccaggagctggtcacgccggtcaagtttgcccgtctctggactgagatccccacagccatcaccatcaaggactatgattccaacctcaacgcgtcccgagatgacaagaagaacaagtttgccaacaccatggagttcgtggaggactacctcaacaatgtagtcagcgaggccgtgccctttgccaacgaggagaagaacaagctcacttttgaggtggtcagcctggcgcacaatctcatctacttcggcttctacagcttcagcgagctgctgcggctcactcgcacactgctgggcatcatcgactgtgtgcaggggcccccggccatgctgcaggcctatgaggaccccggtggcaagaatgtgcggcggtccatccagggcgtggggcacatgatgtccaccatggtgctgagccgcaagcagtccgtcttcagtgcccccagcctgtctgctggggccagtgctgctgagccgctggacagaagcaagtttgaggagaatgaggacattgtggtgatggagaccaagctgaagatcctggaaatccttcagttcatcctcaacgtccgcctggattaccgcatatcctacctgctgtctgtcttcaagaaggagtttgtggaggtgtttcccatgcaggacagtggggctgatggcacagcccctgccttcgactctaccactgccaacatgaacctggatcgcatcggggagcaggcggaggccatgtttggagtggggaagacaagcagcatgctggaggtggatgacgagggcggccgcatgttcctgcgcgtgctcatccacctcaccatgcacgactatgcgccactggtctcgggtgccctgcagctgctcttcaagcacttcagccagcgccaggaggccatgcacaccttcaagcaggttcagctgctgatctcagcgcaggacgtggagaactacaaggtgatcaagtcggagctggaccggctgcggaccatggtggagaagtcagagctgtgggtggacaagaagggcagtggcaagggtgaggaggtggaggcaggcaccgccaaggacaagaaagagcgtcccacggacgaggagggctttctgcacccaccaggggagaaaagcagtgagaactaccagatcgtcaagggcatcctggaaaggctgaacaagatgtgcggggttggggagcaaatgaggaagaagcagcaacggctgctgaagaacatggatgcccacaaggtcatgctggacctgctgcagatcccctatgacaagggtgatgccaagatgatggagatcctgcgctacacgcaccagttcctgcagaagttctgtgcagggaaccccggcaaccaggccctgctgcacaaacacctgcacctcttcctcacgccagggctcctggaggcagagaccatgcagcacatcttcctgaacaactatcagctctgctccgagatcagcgagcctgtgttgcagcacttcgtgcacctgctggccacgcacgggcgccatgtgcagtacctggacttcctgcacaccgtcattaaggccgagggcaagtacgtcaagaagtgccaggacatgatcatgactgagctgaccaatgcaggtgacgatgtggtcgtgttctacaatgataaggcatcgctggcccacctgctggacatgatgaaggccgcccgcgacggcgtggaggaccacagccccctcatgtaccacatttccctggtggacctgctggccgcctgtgccgagggcaaaaacgtctacactgagatcaagtgcacctccctcgtgccgctggaggacgtggtgtctgtggtgacgcatgaggactgcatcactgaggtgaaaatggcctatgtgaacttcgtgaaccactgctacgtggacacggaggtggagatgaaggagatctacaccagcaaccacatctggacgctctttgagaacttcaccctggacatggctcgggtctgcagcaagcgtgagaagcgcgtggctgaccccaccttggagaagtacgtgctgagcgttgtgctggacaccatcaacgccttcttcagctccccattctctgagaacagcacttccctgcagacacaccagccggttgtggtgcagctgctgcagtctaccacacgcctcctcgagtgtccgtggctacagcagcagcacaagggctccgtggaggcctgcatccggaccctcgccatggtggccaagggccgggccatcttgctgcccatggacctggatgcccacatcagctcgatgctcagcagtggagccagctgtgcagctgccgcccagcggaacgcctccagctacaaggcaaccacgcgggccttcccccgcgtcacccccaccgccaaccagtgggactacaagaacatcattgagaagctgcaggacatcatcacagccctggaggagcggctgaagcccctggtacaggctgagctgtccgtgctggtggatgtcctgcactggcctgagctgctcttcctggagggcagtgaggcctaccagcgctgcgagagtgggggcttcctgtccaagctgatccagcacaccaaggacctcatggagtcggaggagaagctgtgcatcaaggtgctgcggaccctgcagcagatgctcgtcaagaagaccaagtacggggaccggggcaaccagctgcgcaagatgctgctgcaaaactacctccagaaccggaagtccacctcgcggggggaccttcccgaccccataggcactggcctggacccagactggtcggcaatcgcagccacccagtgccggctggacaaggagggggccaccaagttggtatgcgacctcatcaccagcaccaagaacgagaagatcttccaggagagcatcggcctggccatccacctgctggatggtggcaacacagagatccagaaatccttccacaacctgatgatgagtgacaagaagtcagagcgcttcttcaaggtgctgcacgaccgcatgaagcgggcccagcaggagaccaagtccacggtggcagtcaacatgaatgacctgggcagccagccacatgaggaccgcgagccagtcgaccccaccaccaaaggccgcgtggcctccttctcgatacctggctcctcatcccgctactcgctgggccccagcctgcgccgggggcacgaggtgagcgaacgtgtgcagagcagtgagatgggcacatccgtgctcatcatgcagcccatcctgcgctttctgcagctgctgtgtgagaaccacaaccgggacctgcagaacttcctgcgctgtcagaacaacaaaaccaactacaacttggtatgcgagacgctgcagttcctggacatcatgtgcggcagcaccacgggcggcctggggctgctggggctctacatcaatgaggacaacgtgggcctcgtcatccagaccttggagaccctcactgagtactgccagggcccctgccatgagaaccagacttgcattgtgactcacgagtccaatggcatagacatcatcaccgcactgatcctcaatgacatcagccccctgtgcaagtaccgcatggatctggtgctgcagctcaaggacaatgcctccaagctgctcctggctctgatggagagccggcatgacagtgaaaatgctgagcgaatcctcatcagcctgcggccccaggagctggtggacgtcatcaagaaggcctacctgcaggaggaagagcgtgagaactcggaggtgagcccacgtgaagtgggccataacatctatatcctggcgctgcagctctccaggcacaataaacagctgcagcacctgctgaagccggtgaagcgcattcaagaggaggaggccgagggtatctcttccatgctcagcctcaacaacaagcagctgtcacagatgctcaagtcctcagcgccagcacaggaggaggaggaagaccccctggcctactatgagaaccacacgtcccagatcgagattgtgcggcaggaccgcagcatggagcagatcgtgttcccagtgcccggcatctgccagttcctgacggaggaaaccaagcaccggctcttcaccactactgagcaggacgagcagggcagcaaagtgagcgacttcttcgaccagtcctccttcctgcacaacgagatggagtggcagcgcaacgtccgcagcatgccgctgatctactggttctcccgccgcatgaccctgtggggcagcatctccttcaacctggccgtgtttatcaacatcatcattgccttcttctacccttacatggagggcgcgtccacaggcgtgctggactcccctctcatctcattgctcttctggatcctcatctgcttctccatcgcggccctgttcaccaagcgctacagcatccgccccctcatcgtggcgctcatcctgcgctccatctactatctgggcatcgggcccacactcaacatcctgggtgccctcaatctgaccaacaagatcgtgtttgtggtgagcttcgtgggcaaccgtggcaccttcatccggggctataaggccatggtcatggacatggaattcctctaccacgtgggctacatcctgaccagtgtcctgggcctctttgctcatgagctgttctacagcatcctgctctttgacctcatctaccgcgaggagacgctgttcaacgtcatcaagagtgtgacccgcaatggccgctccatcctgctgacagccctgctggccctcatcctggtctacctcttctccatcgtcggcttcctcttcctcaaggatgacttcattctcgaggtcgaccggctgcccaacaaccactccacagccagccccctggggatgccacatggagctgctgcatttgtggacacctgcagtggggacaagatggactgtgtctcagggctctcggtgcctgaggtcctggaagaggacagggagctggacagcacagagcgggcctgtgacactctgttgatgtgcatcgtcactgtcatgaaccatgggctacgcaacggtggtggcgtgggcgacattctccgcaagccctccaaagatgagtctctcttcccagcccgagtggtctatgacctcctgttcttcttcatcgtcatcatcattgtgctgaacctcatctttggggtaatcatcgacaccttcgctgacctgcgtagtgagaagcagaagaaggaggagattcttaagacgacatgcttcatctgtggtctggagagggacaagtttgataacaagacagtgtcatttgaggaacacatcaagctggagcacaacatgtggaactacttgtacttcattgtgctggtccgcgtgaagaacaagaccgactacacgggccctgagagctacgtggcccagatgatcaagaacaagaacctggactggttcccccggatgcgggccatgtcccttgtcagcaatgagggcgagggggagcagaatgagattcggattctccaggacaagctcaactccaccatgaagctggtgtcccacctcactgcccagctcaacgagctcaaggagcagatgacggagcagcggaaacgcaggcaacgcctaggctttgtggatgtccagaactgcattagccgctgaggagagccaccgaaggccccaacaggggatgctcatcactggagactgcgactgggaagaacactgccccctccctcgggttgggtggcccagccagctggccagcctccactcccactctgccagacaccctgacacccacccaggctttgaagagcatggagggggagcctcagagctgacagtcctgcttagagcccttaaaaagacttgaaagttcactgggactcagtttaccttaatgccttagcagaagataaatcctacctagagacctttgttccttaaagcaataactgacaactctttgtagtcctccttgtgggtagttaagagtggggtcacccctttaactccaagcactacattttggcggctgcggcctctgggggaggtggcagttatgctgttactagtgattttagggctttgttatttaacttatttcaagggtgctgtgctcagccctgcccatggctgtgcagctccctccgtgcctcagatctgctgtagccagtgcagacctcactgtcgtgtccatgccacccccggcatggctccaggtggcctggtgactccatgatggacgatcttgctcccaggacctgcctcttcccaggcttcctggggaagagttgtacgcccaggcaacaagggctgagctgcgcttgcgtggctgtttcatgaccgcttgtttttctccttttggtgtaatgttttacaaatcctttggcctgagaactaatatgttaattgccttaaataaattaatagaaatcta

SEQ ID NO: 29246 - DNA, 5077 bp, Homo Sapiens
ctcatgcatatgcaggtgcgcgggtgacgaatgggcgagcgagctgtcagtctcgttccgaacttgttggctgcggtgccgggagcgcgggcgcgcagagccgaggccgggacccgctgccttcaccgccgccgccgtcgccgccgggtgggagccgggccgggcagccggagcgcggccgccagcgagccggagctgccgccgcccctgcacgcccgccgcccaggcccgcgcgccgcggcgctgcgctcgaccccgcccgcgccgccgccgccgccgcctctgccgctgccgctgcctctgcgggcgctcggagggcgggcgggcgctgggaggccggcgcggcggctgggagccgggcgcgggcggcggcggcggggccgggcgggcgggtcgcgggggcaatgcgggcgcagggccgggggcgccttccccggcggctgctgctgctgctggcgctctgggtgcaggcggcgcggcccatgggctatttcgagctgcagctgagcgcgctgcggaacgtgaacggggagctgctgagcggcgcctgctgtgacggcgacggccggacaacgcgcgcggggggctgcggccacgacgagtgcgacacgtacgtgcgcgtgtgccttaaggagtaccaggccaaggtgacgcccacggggccctgcagctacggccacggcgccacgcccgtgctgggcggcaactccttctacctgccgccggcgggcgctgcgggggaccgagcgcgggcgcgggcccgggccggcggcgaccaggacccgggcctcgtcgtcatccccttccagttcgcctggccgcgctcctttaccctcatcgtggaggcctgggactgggacaacgataccaccccgaatgaggagctgctgatcgagcgagtgtcgcatgccggcatgatcaacccggaggaccgctggaagagcctgcacttcagcggccacgtggcgcacctggagctgcagatccgcgtgcgctgcgacgagaactactacagcgccacttgcaacaagttctgccggccccgcaacgactttttcggccactacacctgcgaccagtacggcaacaaggcctgcatggacggctggatgggcaaggagtgcaaggaagctgtgtgtaaacaagggtgtaatttgctccacgggggatgcaccgtgcctggggagtgcaggtgcagctacggctggcaagggaggttctgcgatgagtgtgtcccctaccccggctgcgtgcatggcagttgtgtggagccctggcagtgcaactgtgagaccaactggggcggcctgctctgtgacaaagacctgaactactgtggcagccaccacccctgcaccaacggaggcacgtgcatcaacgccgagcctgaccagtaccgctgcacctgccctgacggctactcgggcaggaactgtgagaaggctgagcacgcctgcacctccaacccgtgtgccaacgggggctcttgccatgaggtgccgtccggcttcgaatgccactgcccatcgggctggagcgggcccacctgtgcccttgacatcgatgagtgtgcttcgaacccgtgtgcggccggtggcacctgtgtggaccaggtggacggctttgagtgcatctgccccgagcagtgggtgggggccacctgccagctggacgccaatgagtgtgaagggaagccatgccttaacgctttttcttgcaaaaacctgattggcggctattactgtgattgcatcccgggctggaagggcatcaactgccatatcaacgtcaacgactgtcgcgggcagtgtcagcatgggggcacctgcaaggacctggtgaacgggtaccagtgtgtgtgcccacggggcttcggaggccggcattgcgagctggaacgagacgagtgtgccagcagcccctgccacagcggcggcctctgcgaggacctggccgacggcttccactgccactgcccccagggcttctccgggcctctctgtgaggtggatgtcgacctttgtgagccaagcccctgccggaacggcgctcgctgctataacctggagggtgactattactgcgcctgccctgatgactttggtggcaagaactgctccgtgccccgcgagccgtgccctggcggggcctgcagagtgatcgatggctgcgggtcagacgcggggcctgggatgcctggcacagcagcctccggcgtgtgtggcccccatggacgctgcgtcagccagccagggggcaacttttcctgcatctgtgacagtggctttactggcacctactgccatgagaacattgacgactgcctgggccagccctgccgcaatgggggcacatgcatcgatgaggtggacgccttccgctgcttctgccccagcggctgggagggcgagctctgcgacaccaatcccaacgactgccttcccgatccctgccacagccgcggccgctgctacgacctggtcaatgacttctactgtgcgtgcgacgacggctggaagggcaagacctgccactcacgcgagttccagtgcgatgcctacacctgcagcaacggtggcacctgctacgacagcggcgacaccttccgctgcgcctgcccccccggctggaagggcagcacctgcgccgtcgccaagaacagcagctgcctgcccaacccctgtgtgaatggtggcacctgcgtgggcagcggggcctccttctcctgcatctgccgggacggctgggagggtcgtacttgcactcacaataccaacgactgcaaccctctgccttgctacaatggtggcatctgtgttgacggcgtcaactggttccgctgcgagtgtgcacctggcttcgcggggcctgactgccgcatcaacatcgacgagtgccagtcctcgccctgtgcctacggggccacgtgtgtggatgagatcaacgggtatcgctgtagctgcccacccggccgagccggcccccggtgccaggaagtgatcgggttcgggagatcctgctggtcccggggcactccgttcccacacggaagctcctgggtggaagactgcaacagctgccgctgcctggatggccgccgtgactgcagcaaggtgtggtgcggatggaagccttgtctgctggccggccagcccgaggccctgagcgcccagtgcccactggggcaaaggtgcctggagaaggccccaggccagtgtctgcgaccaccctgtgaggcctggggggagtgcggcgcagaagagccaccgagcaccccctgcctgccacgctccggccacctggacaataactgtgcccgcctcaccttgcatttcaaccgtgaccacgtgccccagggcaccacggtgggcgccatttgctccgggatccgctccctgccagccacaagggctgtggcacgggaccgcctgctggtgttgctttgcgaccgggcgtcctcgggggccagtgccgtggaggtggccgtgtccttcagccctgccagggacctgcctgacagcagcctgatccagggcgcggcccacgccatcgtggccgccatcacccagcgggggaacagctcactgctcctggctgtcaccgaggtcaaggtggagacggttgttacgggcggctcttccacaggtctgctggtgcctgtgctgtgtggtgccttcagcgtgctgtggctggcgtgcgtggtcctgtgcgtgtggtggacacgcaagcgcaggaaagagcgggagaggagccggctgccgcgggaggagagcgccaacaaccagtgggccccgctcaaccccatccgcaaccccatcgagcggccggggggccacaaggacgtgctctaccagtgcaagaacttcacgccgccgccgcgcagggcggacgaggcgctgcccgggccggccggccacgcggccgtcagggaggatgaggaggacgaggatctgggccgcggtgaggaggactccctggaggcggagaagttcctctcacacaaattcaccaaagatcctggccgctcgccggggaggccggcccactgggcctcaggccccaaagtggacaaccgcgcggtcaggagcatcaatgaggcccgctacgccggcaaggagtaggggcggctgccagctgggccgggacccagggccctcggtgggagccatgccgtctgccggacccggaggccgaggccatgtgcatagtttctttattttgtgtaaaaaaaccaccaaaaacaaaaaccaaatgtttattttctacgtttctttaaccttgtataaattattcagtaactgtcaggctgaaaacaatggagtattctcggatagttgctatttttgtaaagtttccgtgcgtggcactcgctgtatgaaaggagagagcaaagggtgtctgcgtcgtcaccaaatcgtagcgtttgttaccagaggttgtgcactgtttacagaatcttccttttattcctcactcgggtttctctgtggctccaggccaaagtgccggtgagacccatggctgtgttggtgtggcccatggctgttggtgggacccgtggctgatggtgtggcctgtggctgtcggtgggactcgtggctgtcaatgggacctgtggctgtcggtgggacctacggtggtcggtgggaccctggttattgatgtggccctggctgccggcacggcccgtggctgttgacgcacctgtggttgttagtggggcctgaggtcatcggcgtggcccaaggccggcaggtcaacctcgcgcttgctggccagtccaccctgcctgccgtctgtgcttcctcctgcccagaacgcccgctccagcgatctctccactgtgctttcagaagtgcccttcctgctgcgcagttctcccatcctgggacggcggcagtattgaagctcgtgacaagtgccttcacacagacccctcgcaactgtccacgcgtgccgtggcaccaggcgctgcccacctgccggccccggccgcccctcctcgtgaaagtgcatttttgtaaatgtgtacatattaaaggaagcactctgtatatttgattgaataatgccacca

SEQ ID NO: 29247 - DNA, 2865 bp, Homo Sapiens
ttttcggctgcttggtaacgggctgccagaagagagagaggcagagagcagggcagcggcttcttgacgtcagggccaagcgaggggatcgcgccagcaaccccagctctccccagagaggggccggccgaccgctggagcggagcctgacgccaggcgcccgcggagcgtgagtagggggcgcgggagccggtcagctggggcgcagcatgccctctgctcccgcgccatggagatcgccctggtgcccctggagaacggcggtgccatgaccgtcagaggaggcgatgaggcccgggcaggctgcggccaggccacagggggagagctccagtgtcccccgacggctgggctcagcgatgggcccaaggagccggcgccaaaggggcgcggcgcgcagagagacgcggactcgggagtgcggcccttgcctccgctgccggacccgggagtgcggcccttgcctccgctgccagaggagctgccacggcctcgacggccgcctcccgaggacgaggaggaagaaggcgatcccggcctgggcacggtggaggaccaggctctgggcacggcgtccctgcaccaccagcgcgtccacatcaacatctccgggctgcgctttgagacgcagctgggcaccctggcgcagttccccaacacactcctgggggaccccgccaagcgcctgcgctacttcgaccccctgaggaacgagtacttcttcgaccgcaaccggcccagcttcgacggtatcctctactactaccagtccgggggccgcctgcggaggccggtcaacgtctccctggacgtgttcgcggacgagatacgcttctaccagctgggggacgaggccatggagcgcttccgcgaggatgagggcttcattaaagaagaggagaagcccctgccccgcaacgagttccagcgccaggtgtggcttatcttcgagtatccggagagctctgggtccgcgcgggccatcgccatcgtctcggtcttggttatcctcatctccatcatcaccttctgcttggagaccctgcctgagttcagggatgaacgtgagctgctccgccaccctccggcgccccaccagcctcccgcgcccgcccctggggccaacggcagcggggtcatggccccgccctctggccctacggtggcaccgctcctgcccaggaccctggccgaccccttcttcatcgtggagaccacgtgcgtcatctggttcaccttcgagctgctcgtgcgcttcttcgcctgccccagcaaggcagggttctcccggaacatcatgaacatcatcgatgtggtggccatcttcccctacttcatcaccctgggcaccgaactggcagagcagcagccagggggtggaggaggcggccagaatgggcagcaggccatgtccctggccatcctccgagtcatccgcctggtccgggtgttccgcatcttcaagctctcccgccactccaaggggctgcagatcctgggcaagaccttgcaggcctccatgagggagctggggctgctcatcttcttcctcttcatcggggtcatcctcttctccagtgccgtctacttcgcagaggctgacaaccagggaacccatttctctagcatccctgacgccttctggtgggcagtggtcaccatgaccactgtgggctacggggacatgaggcccatcactgttgggggcaagatcgtgggctcgctgtgtgccatcgccggggtcctcaccattgccctgcctgtgcccgtcatcgtctccaacttcaactacttctaccaccgggaaacggatcacgaggagccggcagtccttaaggaagagcagggcactcagagccaggggccggggctggacagaggagtccagcggaaggtcagcgggagcaggggatccttctgcaaggctggggggaccctggagaatgcagacagtgcccgaaggggcagctgccccctagagaagtgtaacgtcaaggccaagagcaacgtggacttgcggaggtccctttatgccctctgcctggacaccagccgggaaacagatttgtgaaaggagattcaggcagactggtggcagtggagtagggaatgggaggcttgctgaacatggatatctacattataccgcagagtatttgaagtcacactgtaacctcagtctacccctctcctttcactcctttcctccctccctcgatccccccattttctctattctttccatgacacccaagggtcgcctatttttaaaaagtaccacattccatgacgcaggagctgtggaaatggtgagcgctgtgagatggatgtatttgtagccagtctcctatacccagcagagggataacccaaacaaaaatgactctaaatagcccagatcccaagagattatgtaactcctccatccatgtgttccaaatttgctttacatatgattgtatttgtgtataggggaaaatattatttttatgcctggtaagtggctttttgtactgtagttcagatagagatattttgggtatattttcaagatacatgttgtatttatggaagaaagagttgtcctgatgtttttctgtgttacttatattagagtcagagatcttggtatgggctgttctgtttcctgtgtctccaagcctctgtcttttctgggatgtggtattggtgctttgtgtctagggcagagtatgttcttgaagaaaggcaaatctgactttttctgtgcgccttaaacaattcttgtaactttcttcaaaaagcattttaatgatattggaggaatacttctgataatttattgtctttatttttatcccaggaaataaaaggttaccttgttga

SEQ ID NO: 29248 - DNA, 3816 bp, Homo Sapiens
gcagcgccggggccctcagatcgaggctgcctccccctctcagccggcagcacattccgtcgccttgccgccgcccggccccacagttgtctttgccggagctgcagtcgcgctggggttagggcgggggggcgggcggggagaggagaaggccgcggcggaggcaggtgagaggaggaaggaagcggcggcgcggcgggcacagcagctcaggcggcggcccggttcctgggagtgtcggtgcggcgcgttggttggggcggatcccgcggggcccgggcgggggaaggagtcaccggcccggccatggcggacaacgagaaactggacaaccaacggctcaagaatttcaagaacaaaggccgcgacttggagactatgagaagacaacgaaatgaagttgtagttgaattaaggaagaataaaagagatgaacatctcttaaagagaaggaatgtaccacatgaagatatctgtgaagactctgatatagatggtgattatagagtgcaaaatacctctctagaagctattgttcaaaatgcttcaagtgataaccaaggaattcaattaagtgcagttcaagctgctaggaagcttttgtccagtgatcgaaatccaccaattgatgacttaataaaatctggaatattgcccattttagtccattgtcttgaaagagatgacaatccttctttacagtttgaagctgcatgggctttgacaaacattgcatctggaacttctgaacaaactcaagcagtagttcagtccaatgctgtgccacttttcctgaggcttctccattcaccccatcagaatgtctgtgagcaagcagtgtgggcattgggaaatatcataggtgatgggccccagtgtagagattatgtcataagtcttggagttgtgaaacctttactttccttcataagtccatctattcctataacattcttaagaaatgttacttgggttatggtcaacttatgtcgccacaaagacccaccaccaccaatggaaaccattcaggagattcttccagccctttgtgttttaattcatcacacagatgtaaatatactggtagacacagtctgggccctctcttaccttactgatgctggcaatgaacaaatacagatggtaatagactctggaatagttcctcatttggttcctctgctcagccaccaggaagttaaagttcagactgctgcacttagagctgtgggcaacattgttactggaactgatgagcaaacacaagtagttttgaactgtgatgctctttcacacttcccagcactcctgacacatcccaaagagaaaattaataaagaagcagtgtggttcctctccaacatcactgcaggaaatcagcagcaggtacaggcagtaattgatgccaatcttgtaccaatgataatacaccttttggataagggggattttggcactcaaaaagaagctgcttgggccataagtaacttaacaattagtggaaggaaagatcaagtggcttaccttatccaacaaaatgttatcccacctttttgcaacttgctgactgtaaaagatgcacaagttgtgcaagtagtactcgatggactaagtaatatattaaaaatggctgaagatgaggcagaaaccataggcaatcttatagaagaatgtggagggctggagaaaattgaacaacttcaaaatcatgaaaatgaagacatctacaaattggcctatgagatcattgatcagttcttctcttcagatgatattgatgaagaccctagccttgttccagaggcaattcaaggcggaacatttggtttcaattcatctgccaatgtaccaacagaagggttccagttttagaaagatgttgtggaagttaggtacaatgcagcactgagatatatatatatatatgtgtgtgtgtatatatatatatatatacatatatataaaaaggtttgatccatcaagcttggctcatgggatctgctgctgcattaaatcgggaaagaaaatgtgaagatttcatttggaatcacagaaaatgcccaaatgaggtcaagatggcgagtgggtgcgagtgagaatgagtggcaaaatgtaatgaaaactttacatgaatgcttatttaggttgttcaaagtaaaaagggctacaggtcacagatcgtcagtgcctgagaaagaacattgacttactctatatcaattgaggggaaagtgcagtaccgtcatcttcaagccttgtaagcataaaagagaataggctgcccatataagtcaaaggaaaatgagcccaggccttgctatgaagcagtgtgtgaatggacaatgttgaatgaatgtctggctcagtgatggagagccaggttcatctttgaaatctagggctcttcactcatgaagcagactcctagtcctggagtgactgtgtacgagagcgtggttgtggtgctgtatgtgaacgcatgcaagcttgattcaccttcagggggctgataacctagtaaatcatcaaaatgagatcataagtgttaatgtacactggacatgaaaacaaagactggtttagcagcagacattggtttactctgcagcctgtgttttctgtttccccctttcccacctccttccccccacccaatccttttttttttcttttttgcttttcttttctttttttttagtttttatttactttacctagtatgcctttttttagttgcttctcaagtcagaaaacttttcaggaaggtttccctgtgcatttgcaccagatgaatgtttgatgctatgaaaagctttccatatcatcaaaactaatttgtgtagatttttgcatgaaaaaaatcataaatttccctcaaaatagactgtgttgcagtacacaagttgccataatagtataaaacagtaaaatgtgcttaaaaggccatccttttcattttcagagataacataaagatctttgcatgaggtaaatctacagcatagttcatttttagattttgttgagtcctgtaaagaagaagaagaaaaaagtttcagttgtggtagaataccgtgctgtgtttaaatgttacttgttttcaaactttgttttctatgaaaatgatatggaaacttctaaaatggaatttggtgcatatgtactgctgaataaagaccgatgaagaggtttgagtagatgtacaaatcaagtaatggtttgaacacctttaataatatgcctaatctgttcaattgttttagaatctttttatcttagatgtaggcagccatgaacaatctattttgagccactttagggagaaaactttgtatttttaaaacttgcataaaagttatgcaagtggtttttataaattggaataatacctcagttttgaggttatgcacactaaattaaatgtgacataaattaatttgtacaaaaagaactctttataaggtggctcattgtaggaaatcctgtgccttcccctttgagcacaagtgttgcatgaacaacagtttgctataagaaacataccagattagccaccattagcatctatatctactttgtgtttaaaaatcaactggtaattctgaaacactgtagaatggataaaaattattttgtgatcataactctttgttgaactagagtatttttgcagcattccttgtcatcagaaacatggttaaagtttaaaactagaagcagcagaaaactagcttgtaaaatttatccaagtagagtgcaggctaggctgtcttggggaaataaacattaaaacttaaagcaaaaaaaaaaaaaaaa

SEQ ID NO: 29249 - DNA, 2172 bp, Homo Sapiens
ggccgccatcttggattgcgaactgggtcgctacgcttcacgccaggggcggagtggcggcccttctgttacccgccacacacgtcgccgctggggactgggaaatcagggcatcggagagtgccacattaatggatgccatggctagtccagggaaagataactatagaatgaaaagttataagaataaagccctaaatcctcaagagatgcgtagacgaagagaagaagaaggaatacagcttagaaaacaaaaaagagaagaacagttgttcaaacgcagaaatgtctatttgcccagaaatgatgaatctatgcttgaaagtcctatacaggatccagatattagttccactgtacccattccagaggaagaagttgttactacagatatggttcagatgattttttctaataatgctgatcaacagctaacagcaacacagaaatttagaaagctgctttctaaagaacctaatccaccaatagatcaagttatacagaaaccaggagttgtacagagatttgtgaaatttcttgaaagaaatgaaaattgcactttacaatttgaagctgcatgggcattaacaaatatagcatctggaacttttctgcataccaaggtagtgattgaaactggggctgttccgatttttatcaaacttcttaattctgaacatgaagatgttcaggaacaggctgtttgggcacttggtaatattgctggtgacaatgcagaatgcagagattttgttttgaattgtgaaatacttccacctcttttagagttattaacaaattcaaacagactcacaacaacaagaaatgccgtgtgggccctctcaaatttatgtagaggcaaaaaccctcctccaaactttagtaaggtttcaccttgcttaaatgtcctgtcacgactgttgtttagcagtgacccagatgtgttagcagacgtgtgttgggccctttcttatctctccgatggacccaatgataaaattcaagcagtcattgattctggagtctgtcgaagattggtggaacttttgatgcacaatgattataaagttgtatcacctgcattaagggcagttggtaatattgtgactggtgatgatattcaaacacaggtaattttgaattgttctgcattaccctgtctcttacatttattgagtagcccaaaggagtcaattagaaaagaagcctgctggactgtttctaacatcactgctggaaatagagctcagattcaggctgttatagatgcaaatatttttcctgttttgattgagattcttcagaaagcagagtttcgtaccagaaaagaagcagcttgggctataactaatgcaacatcaggaggtactccagagcaaataaggtatttggtagctttaggctgcattaaaccactttgtgatcttttgactgttatggactccaaaatagtccaagtggctttaaatggacttgaaaatattttacgtcttggagaacaagaatctaagcagaatggaataggcattaatccatactgtgctctcattgaagaagcatatggtctggataaaattgagtttttgcaaagccatgaaaatcaggaaatttaccagaaggcatttgatctgattgaacattactttggtgtagaagaagatgaccccagcattgtacctcaggtggatgaaaaccaacaacagtttatatttcagcagcaggaagcaccaatggatggatttcaactttaacttactggaggaaaaaaaatttatggctaaaaagggtagcttcagaaatgacagactttttcattgaatgatgaggacacagcagccatattatgccaagaggaaaaatatcatgatcatattgaaagatcaagcatgagcttccatggtgaagtcttctgtaccaatgcaccagagaatgcctaccatccaaaaaagcagtcagctgatggaaaagaagattattaaacctttgttctgggatttactgttaaaaaacaaacaaaaaacaacaaaaaagcggtgacaggaaacagttaaggaaatgatttaactgaagggaagcaagatttttttaaagcattgttcttaatccccatgactgtccttcagtcacaattccagaataaaagaatctactttgtgtaaaaaaaaaaaaaaa

SEQ ID NO: 29250 - DNA, 2054 bp, Homo Sapiens
tgggctcaaatgacaggtccctttgaagaactgacagggacttggtcttcccagtgatgtggggtggtggagatgagtcttgacatagtaatggggctcctattttatgagactggtaaattttcacaggaaactaaataacaggttaatgaggggttttaatagaaagtggtgttaactttaatgaggagaaaacactttgtaaaggccaaccaatgcccactggggcagagatataaatctggggtaaggagctgcttctctgctttggggtgtctggcctcagagacctatcaattgcatctgagttgcaggggccatggcttccaaatgcctcaaggccggcttctcttctgggtctctcaagagcccaggaggggccagtgggggctccactcgtgtgtccgcaatgtactccagcagctcttgcaagcttccaagtctctcccctgtggccagaagtttctctgcctgctcagtgggtctgggcagaagcagctacagggccaccagctgcctccctgctctctgcctccctgctggaggcttcgctaccagctacagtgggggtgggggctggtttggggagggcatcctcactggcaatgagaaggagaccatgcaatccctgaacgaccgcctggccggctacctggagaaggtgcgtcagctggagcaggagaacgccagcctggagagccgcatccgtgagtggtgtgagcagcaggtcccctacatgtgccctgactaccagtcctacttccggaccatcgaggagctccagaagaagactctatgcagcaaggctgagaatgccaggctggtggtggagattgacaatgccaaattggctgcagatgacttcaggaccaagtatgagacggaggtgtccctgcggcagctggtggagtcagacatcaacggcctgcgcaggatcctggatgacctgaccctgtgcaagtctgacctggaggcccaggtggagtccctgaaggaggagctgctctgcctgaagaagaaccatgaggaggaagtgaactcactgcgctgccaacttggtgaccgcctcaatgttgaggtggacgctgccccacctgttgacctgaaccgagttctggaggagatgaggtgccagtatgaaaccctggtggagaataaccgccgggatgctgaagactggttggacacccagagtgaggagctgaaccagcaggtggtgtccagctcagagcagttgcagtcctgccaggcagagatcatcgagctgagacgcacggtcaacgccctggagattgagctgcaggctcagcacagcatgagagatgctttggaatccaccctggcagagacggaggcccgctatagctcccagctggcccagatgcagtgcatgatcaccaacgtggaggcccagctggccgagatccgggctgacctggagcggcagaaccaggagtaccaggtgctgctggacgtccgggcccggctggagtgtgagatcaacacgtaccggggcctgctggagagtgaggacagcaagctcccctgtaacccatgtgcacctgactactcaccctccaagtcatgccttccctgtcttcctgcggcctcctgcggtcctagtgcagcccgcacaaactgcagcccccgccccatttgtgtgccctgcccagggggtcggttctgagagcgggtgacccagatggccatggctattgtctccagggcttgaacttggcctctacccaaacttaacccttgtagcccaatcccctctcttcgcgcagagcccaggcccagggtctggctgaaaaggctttctgcaaatacatgccctaaagtttctcagagcctgtcacaaaggccggctgcccccaaaggtctcaactcctcatcatttcaatgggtgccagggtctctgttctcaggctgcctcctgggtcaggttttccttctaggtgctgttccggtggattctgaaatgcagtagagggcttttgttggcagaacaataaagtgcatttgctcaggcccctgatgcctaacttgcacca

SEQ ID NO: 29251 - DNA, 7923 bp, Homo Sapiens
gcgcactcgggcacgcgctcggaagtcgggggtcggcgcggagtgcaggctgctcccggggtaggtgagggaagcgcggaggcggggcgcgggggcagtggtcggcgagcagcgcggtcctcgctaggggcgcccacccgtcagtctctccggcgcgagccgccgccaccgcccgcgccggagtcaggcccctgggcccccaggctcaagcagcgaagcggcctccgggggacgccgctaggcgagaggaacgcgccggtgcccttgccttcgccgtgacccagcgtgcgggcggcgggatgagagggagccatcgggccgcgccggccctgcggccccgggggcggctctggcccgtgctggccgtgctggcggcggccgccgcggcgggctgtgcccaggcagccatggacgagtgcacggacgagggcgggcggccgcagcgctgcatgcccgagttcgtcaacgccgctttcaacgtgactgtggtggccaccaacacgtgtgggactccgcccgaggaatactgtgtgcagaccggggtgaccggggtcaccaagtcctgtcacctgtgcgacgccgggcagccccacctgcagcacggggcagccttcctgaccgactacaacaaccaggccgacaccacctggtggcaaagccagaccatgctggccggggtgcagtaccccagctccatcaacctcacgctgcacctgggaaaagcttttgacatcacctatgtgcgtctcaagttccacaccagccgcccggagagctttgccatttacaagcgcacacgggaagacgggccctggattccttaccagtactacagtggttcctgcgagaacacctactccaaggcaaaccgcggcttcatcaggacaggaggggacgagcagcaggccttgtgtactgatgaattcagtgacatttctcccctcactgggggcaacgtggccttttctaccctggaaggaaggcccagcgcctataactttgacaatagccctgtgctgcaggaatgggtaactgccactgacatcagagtaactcttaatcgcctgaacacttttggagatgaagtgtttaacgatcccaaagttctcaagtcctattattatgccatctctgattttgctgtaggtggcagatgtaaatgtaatggacacgcaagcgagtgtatgaagaacgaatttgataagctggtgtgtaattgcaaacataacacatatggagtagactgtgaaaagtgtcttcctttcttcaatgaccggccgtggaggagggcaactgcggaaagtgccagtgaatgcctgccctgtgattgcaatggtcgatcccaggaatgctacttcgaccctgaactctatcgttccactggccatgggggccactgtaccaactgccaggataacacagatggcgcccactgtgagaggtgccgagagaacttcttccgccttggcaacaatgaagcctgctcttcatgccactgtagtcctgtgggctctctaagcacacagtgtgatagttacggcagatgcagctgtaagccaggagtgatgggggacaaatgtgaccgttgccagcctggattccattctctcactgaagcaggatgcaggccatgctcttgtgatccctctggcagcatagatgaatgtaatgttgaaacaggaagatgtgtttgcaaagacaatgtcgaaggcttcaattgtgaaagatgcaaacctggattttttaatctggaatcatctaatcctcggggttgcacaccctgcttctgctttgggcattcttctgtctgtacaaacgctgttggctacagtgtttattctatctcctctacctttcagattgatgaggatgggtggcgtgcggaacagagagatggctctgaagcatctctcgagtggtcctctgagaggcaagatatcgccgtgatctcagacagctactttcctcggtacttcattgctcctgcaaagttcttgggcaagcaggtgttgagttatggtcagaacctctccttctcctttcgagtggacaggcgagatactcgcctctctgccgaagaccttgtgcttgagggagctggcttaagagtatctgtacccttgatcgctcagggcaattcctatccaagtgagaccactgtgaagtatgtcttcaggctccatgaagcaacagattacccttggaggcctgctcttaccccttttgaatttcagaagctcctaaacaacttgacctctatcaagatacgtgggacatacagtgagagaagtgctggatatttggatgatgtcaccctggcaagtgctcgtcctgggcctggagtccctgcaacttgggtggagtcctgcacctgtcctgtgggatatggagggcagttttgtgagatgtgcctctcaggttacagaagagaaactcctaatcttggaccatacagtccatgtgtgctttgcgcctgcaatggacacagcgagacctgtgatcctgagacaggtgtttgtaactgcagagacaatacggctggcccgcactgtgagaagtgcagtgatgggtactatggagattcaactgcaggcacctcctccgattgccaaccctgtccgtgtcctggaggttcaagttgtgctgttgttcccaagacaaaggaggtggtgtgcaccaactgtcctactggcaccactggtaagagatgtgagctctgtgatgatggctactttggagaccccctgggtagaaacggccctgtgagactttgccgcctgtgccagtgcagtgacaacatcgatcccaacgcagttggaaattgcaatcgcttgacgggagaatgcctgaagtgcatctataacactgctggcttctattgtgaccggtgcaaagacggattttttggaaatcccctggctcccaatccagcagacaaatgcaaagcctgcaattgcaatccgtatgggaccatgaagcagcagagcagctgtaaccccgtgacggggcagtgtgaatgtttgcctcacgtgactggccaggactgtggtgcttgtgaccctggattctacaatctgcagagtgggcaaggctgtgagaggtgtgactgccatgccttgggctccaccaatgggcagtgtgacatccgcaccggccagtgtgagtgccagcccggcatcactggtcagcactgtgagcgctgtgaggtcaaccactttgggtttggacctgaaggctgcaaaccctgtgactgtcatcctgagggatctctttcacttcagtgcaaagatgatggtcgctgtgaatgcagagaaggctttgtgggaaatcgctgtgaccagtgtgaagaaaactatttctacaatcggtcttggcctggctgccaggaatgtccagcttgttaccggctggtaaaggataaggttgctgatcatagagtgaagctccaggaattagagagtctcatagcaaaccttggaactggggatgagatggtgacagatcaagccttcgaggatagactaaaggaagcagagagggaagttatggacctccttcgtgaggcccaggatgtcaaagatgttgaccagaatttgatggatcgcctacagagagtgaataacactctgtccagccaaattagccgtttacagaatatccggaataccattgaagagactggaaacttggctgaacaagcgcgtgcccatgtagagaacacagagcggttgattgaaatcgcatccagagaacttgagaaagcaaaagtcgctgctgccaatgtgtcagtcactcagccagaatctacaggggacccaaacaacatgactcttttggcagaagaggctcgaaagcttgctgaacgtcataaacaggaagctgatgacattgttcgagtggcaaagacagccaatgatacgtcaactgaggcatacaacctgcttctgaggacactggcaggagaaaatcaaacagcatttgagattgaagagcttaataggaagtatgaacaagcgaagaacatctcacaggatctggaaaaacaagctgcccgagtacatgaggaggccaaaagggccggtgacaaagctgtggagatctatgccagcgtggctcagctgagccctttggactctgagacactggagaatgaagcaaataacataaagatggaagctgagaatctggaacaactgattgaccagaaattaaaagattatgaggacctcagagaagatatgagagggaaggaacttgaagtcaagaaccttctggagaaaggcaagactgaacagcagaccgcagaccaactcctagcccgagctgatgctgccaaggccctcgctgaagaagctgcaaagaagggacgggataccttacaagaagctaatgacattctcaacaacctgaaagattttgataggcgcgtgaacgataacaagacggccgcagaggaggcactaaggaagattcctgccatcaaccagaccatcactgaagccaatgaaaagaccagagaagcccagcaggccctgggcagtgctgcggcggatgccacagaggccaagaacaaggcccatgaggcggagaggatcgcaagcgctgtccaaaagaatgccaccagcaccaaggcagaagctgaaagaacttttgcagaagttacagatctggataatgaggtgaacaatatgttgaagcaactgcaggaagcagaaaaagagctaaagagaaaacaagatgacgctgaccaggacatgatgatggcagggatggcttcacaggctgctcaagaagccgagatcaatgccagaaaagccaaaaactctgttactagcctcctcagcattattaatgacctcttggagcagctggggcagctggatacagtggacctgaataagctaaacgagattgaaggcaccctaaacaaagccaaagatgaaatgaaggtcagcgatcttgataggaaagtgtctgacctggagaatgaagccaagaagcaggaggctgccatcatggactataaccgagatatcgaggagatcatgaaggacattcgcaatctggaggacatcaggaagaccttaccatctggctgcttcaacaccccgtccattgaaaagccctagtgtctttagggctggaaggcagcatccctctgacaggggggcagttgtgaggccacagagtgccttgacacaaagattacatttttcagacccccactcctctgctgctgtccatcactgtccttttgaaccaggaaaagtcacagagtttaaagagaagcaaattaaacatcctgaatcgggaacaaagggttttatctaataaagtgtctcttccatcacgttgctaccttacccacacttccctctgatttgcgtgaggacgtggcatcctacttacgtacgtggcataacacatcgtgtgagcccatgtatgctggggtagagcaagtagccctcccctgtctcatcgatccagcagaacctcctcagtctcagtactcttgtttctataaggaaaagttttgctactaacagtagcattgtgatggccagtatatccagtccatggataaagaaaatgcatctgcatctcctgcccctcttccttctaagcaaaaggaaataaacatcctgtgccaaaggtattggtcatttagaatgtcggtagccatccatcagtgcttttagctattatgagtgtaggacactgagccatccgtgggtcaggatgcaattatttataaaagtccccaggtgaacatggctgaagatttttctagtatattaataattgactaggaagatgaactttttttcagatctttgggcagctgataatttaaatctggatgggcagcttgcactcaccaatagaccaaaagacatcttttgatattcttataaatggaacttacacagaagaaatagggatatgataaccactaaagttttgttttcaaaatcaaactaattcttacagcttttttattagttagtcttggaactagtgttaagtatctggcagagaacagttaatccctaaggtcttgacaaaacagaagaaaaacaagcctcctcgtcctagtcttttctagcaaagggataaaacttagatggcagcttgtactgtcagaatcccgtgtatccatttgttcttctgttggagagatgagacatttgacccttagctccagttttcttctgatgtttccatcttccagaatccctcaaaaaacattgtttgccaaatcctggtggcaaatacttgcactcagtatttcacacagctgccaacgctatcgagttcctgcactttgtgatttaaatccactctaaaccttccctctaagtgtagagggaagacccttacgtggagtttcctagtgggcttctcaacttttgatcctcagctctgtggttttaagaccacagtgtgacagttccctgccacacacccccttcctcctaccaacccacctttgagattcatatatagcctttaacactatgcaactttgtactttgcgtagcaggggctggggtggggggaaagaaacctattatcatggacacactggtgctattaattatttcaaatttatatttttgtgtgaatgttttgtgttttgtttatccatgctatagaacaaggaatttatgtagatatacttagtcctatttctagaatgacactctgttcactttgctcaatttttcctcttcactggcacaagtatctgaatacctccttccctcccttctagagttctttggattgtactccaaagaattgtgccttgtgtttgcagcatctccattctctaaattaatataattgctttcctccacacccagccacgtaaagaggtaacttgggtcctcttccattgcagtcctgatgatcctaacctgcagcacggtggttttacaatgttccagagcaggaacgccaggttgacaagctatggtaggattaggaaagtttgctgaagaggatctttgacgccacagtgggactagccaggaatgagggagaaatgccctttttggcaattgttggagctggataggtaagttttataagggagtacattttgactgagcacttagggcatcaggaacagtgctacttactggtgggtagactgggagaggtggtgtaacttagttcttgatgatcccacttcctgtttccatctgcttgggatataccagagtttaccacaagtgttttgacgatatactcctgagctttcactctgctggcttctcccaggcctcttctactatggcaggagatgtggtgtgctgttgcaaagttttcacgtcatcgtttcctggctagttcatttcattaagtggctacatcctaacatatgcattggtcaaggttgcagcaagaggactgaagattgactgccaagctagtttgggtgaagttcactccagcaagtctcaggccacaatggggtggtttggtttggtttccttttaactttctttttgttatttgcttttctcctccacctgtgtggtatattttttaagcagaattttattttttaaaataaaaggttctttacaagatgataccttaattacactcccgcaacacagccattattttattgtctagctccagttatctgtattttatgtaatgtaattgacaggatggctgctgcagaatgctggttgacacagggattattatactgctatttttccctgaattcttttccttggaattccaactgtggaccttttatatgtgccttcactttagctgtttgccttactctacagccttgctctccggggtggttaataaaatgcaacacttggcatttttatgttataagaaaaacagtattttatttataataaaatctgaatattttgtaacccttta

SEQ ID NO: 29252 - DNA, 3868 bp, Homo Sapiens
atgaacctctgaaaactgccggcatctgaggtttcctccaaggccctctgaagtgcagcccataatgaaggtcttggcggcaggagttgtgcccctgctgttggttctgcactggaaacatggggcggggagccccctccccatcacccctgtcaacgccacctgtgccatacgccacccatgtcacaacaacctcatgaaccagatcaggagccaactggcacagctcaatggcagtgccaatgccctctttattctctattacacagcccagggggagccgttccccaacaacctggacaagctatgtggccccaacgtgacggacttcccgcccttccacgccaacggcacggagaaggccaagctggtggagctgtaccgcatagtcgtgtaccttggcacctccctgggcaacatcacccgggaccagaagatcctcaaccccagtgccctcagcctccacagcaagctcaacgccaccgccgacatcctgcgaggcctccttagcaacgtgctgtgccgcctgtgcagcaagtaccacgtgggccatgtggacgtgacctacggccctgacacctcgggtaaggatgtcttccagaagaagaagctgggctgtcaactcctggggaagtataagcagatcatcgccgtgttggcccaggccttctagcaggaggtcttgaagtgtgctgtgaaccgagggatctcaggagttgggtccagatgtgggggcctgtccaagggtggctggggcccagggcatcgctaaacccaaatgggggctgctggcagaccccgagggtgcctggccagtccactccactctgggctgggctgtgatgaagctgagcagagtggaaacttccatagggagggagctagaagaaggtgccccttcctctgggagattgtggactggggagcgtgggctggacttctgcctctacttgtccctttggccccttgctcactttgtgcagtgaacaaactacacaagtcatctacaagagccctgaccacagggtgagacagcagggcccaggggagtggaccagcccccagcaaattatcaccatctgtgcctttgctgccccttaggttgggacttaggtgggccagaggggctaggatcccaaaggactccttgtcccctagaagtttgatgagtggaagatagagaggggcctctgggatggaaggctgtcttcttttgaggatgatcagagaacttgggcataggaacaatctggcagaagtttccagaaggaggtcacttggcattcaggctcttggggaggcagagaagccaccttcaggcctgggaaggaagacactgggaggaggagaggcctggaaagctttggtaggttcttcgttctcttccccgtgatcttccctgcagcctgggatggccagggtctgatggctggacctgcagcaggggtttgtggaggtgggtagggcaggggcaggttgctaagtcaggtgcagaggttctgagggacccaggctcttcctctgggtaaaggtctgtaagaaggggctggggtagctcagagtagcagctcacatctgaggccctgggaggtcttgtgaggtcacacagaggtacttgagggggactggaggccgtctctggtccccagggcaagggaacagcagaacttagggtcagggtctcagggaaccctgagctccaagcgtgctgtgcgtctgacctggcatgatttctatttattatgatatcctatttatattaacttattggtgctttcagtggccaagttaattcccctttccctggtccctactcaacaaaatatgatgatggctcccgacacaagcgccagggccagggcttagcagggcctggtctggaagtcgacaatgttacaagtggaataagcttacgggtgaagctcagagaagggtcggatctgagagaatggggaggcctgagtgggagtggggggccttgctccacccccatcccctactgtgacttgctttagcgtgtcagggtccaggctgcaggggctgggccaatttgtggagaggccgggtgcctttctgtcttgcttccagggggctggttcacactgttcttgggcgccccagcattgtgttgtgaggcgcactgttcctggcagatattgtgccccctggagcagtgggcaagacagtccttgtggcccaccctgtccttgtttctgtgtccccatgctgcctctgaaatagcgccctggaacaaccctgcccctgcacccagcatgctccgacacagcagggaagctcctcctgtggcccggacacccatagacggtgcggggggcctggctgggccagaccccaggaaggtggggtagactggggggatcagctgcccattgctcccaagaggaggagagggaggctgcagacgcctgggactcagaccaggaagctgtgggccctcctgctccacccccatcccactcccacccatgtctgggctcccaggcagggaacccgatctcttcctttgtgctggggccaggcgagtggagaaacgccctccagtctgagagcaggggagggaaggaggcagcagagttggggcagctgctcagagcagtgttctggcttcttctcaaaccctgagcgggctgccggcctccaagttcctccgacaagatgatggtactaattatggtacttttcactcactttgcacctttccctgtcgctctctaagcactttacctggatggcgcgtgggcagtgtgcaggcaggtcctgaggcctggggttggggtggagggtgcggcccggagttgtccatctgtccatcccaacagcaagacgaggatgtggctgttgagatgtgggccacactcacccttgtccaggatgcagggactgccttctccttcctgcttcatccggcttagcttggggctggctgcattcccccaggatgggcttcgagaaagacaaacttgtctggaaaccagagttgctgattccacccggggggcccggctgactcgcccatcacctcatctccctgtggacttgggagctctgtgccaggcccaccttgcggccctggctctgagtcgctctcccacccagcctggacttggccccatgggacccatcctcagtgctccctccagatcccgtccggcagcttggcgtccaccctgcacagcatcactgaatcacagagcctttgcgtgaaacagctctgccaggccgggagctgggtttctcttccctttttatctgctggtgtggaccacacctgggcctggccggaggaagagagagtttaccaagagagatgtctccgggcccttatttattatttaaacatttttttaaaaagcactgctagtttacttgtctctcctccccatcgtccccatcgtcctccttgtccctgacttggggcacttccaccctgacccagccagtccagctctgccttgccggctctccagagtagacatagtgtgtggggttggagctctggcacccggggaggtagcatttccctgcagatggtacagatgttcctgccttagagtcatctctagttccccacctcaatcccggcatccagccttcagtcccgcccacgtgctagctccgtgggcccaccgtgcggccttagaggtttccctccttcctttccactgaaaagcacatggccttgggtgacaaattcctctttgatgaatgtaccctgtggggatgtttcatactgacagattatttttatttattcaatgtcatatttaaaatatttattttttataccaaatgaatcacttttttttttaagaaaaaaaagagaaatgaataaagaatctactcttcg

SEQ ID NO: 29253 - DNA, 4115 bp, Homo Sapiens
ccacagcgctgtagactgcgccgcattagaagcctggcctcctgatgctgtgctcttcatctagacccaagccccaggtcgtgggacgatttctcccgtttttgactccctggaactgtattgcctgctttacctgcgtacatgttgattctttctcatggcaaccccgcaggaaaccatcaagatctcattttacagctgggattctctggttcacagaggtaacggagcttgcccgaggccagttaaacgagaagattcatcaccgctttgatggctgcctcacaaacttcacaaactgttgcatctcacgttccttttgcagatttgtgttcaactttagaacgaatacagaaaagtaaaggacgtgcagaaaaaatcagacacttcagggaatttttagattcttggagaaaatttcatgatgctcttcataagaaccacaaagatgtcacagactctttttatccagcaatgagactaattcttcctcagctagaaagagagagaatggcctatggaattaaagaaactatgcttgctaagctttatattgagttgcttaatttacctagagatggaaaagatgccctcaaacttttaaactacagaacacccactggaactcatggagatgctggagactttgcaatgattgcatattttgtgttgaagccaagatgtttacagaaaggaagtttaaccatacagcaagtaaacgaccttttagactcaattgccagcaataattctgctaaaagaaaagacctaataaaaaagagccttcttcaacttataactcagagttcagcacttgagcaaaagtggcttatacggatgatcataaaggatttaaagcttggtgttagtcagcaaactatcttttctgtttttcataatgatgctgctgagttgcataatgtcactacagatctggaaaaagtctgtaggcaactgcatgatccttctgtaggactcagtgatatttctatcactttattttctgcatttaaaccaatgctagctgctattgcagatattgagcacattgagaaggatatgaaacatcagagtttctacatagaaaccaagctagatggtgaacgtatgcaaatgcacaaagatggagatgtatataaatacttctctcgaaatggatataactacactgatcagtttggtgcttctcctactgaaggttctcttaccccattcattcataatgcattcaaagcagatatacaaatctgtattcttgatggtgagatgatggcctataatcctaatacacaaactttcatgcaaaagggaactaagtttgatattaaaagaatggtagaggattctgatctgcaaacttgttattgtgtttttgatgtattgatggttaataataaaaagctagggcatgagactctgagaaagaggtatgagattcttagtagtatttttacaccaattccaggtagaatagaaatagtgcagaaaacacaagctcatactaagaatgaagtaattgatgcattgaatgaagcaatagataaaagagaagagggaattatggtaaaacaacctctatccatctacaagccagacaaaagaggtgaagggtggttaaaaattaaaccagagtatgtcagtggactaatggatgaattggacattttaattgttggaggatattggggtaaaggatcacggggtggaatgatgtctcattttctgtgtgcagtagcagagaagccccctcctggtgagaagccatctgtgtttcatactctctctcgtgttgggtctggctgcaccatgaaagaactgtatgatctgggtttgaaattggccaagtattggaagccttttcatagaaaagctccaccaagcagcattttatgtggaacagagaagccagaagtatacattgaaccttgtaattctgtcattgttcagattaaagcagcagagatcgtacccagtgatatgtataaaactggctgcaccttgcgttttccacgaattgaaaagataagagatgacaaggagtggcatgagtgcatgaccctggacgacctagaacaacttagggggaaggcatctggtaagctcgcatctaaacacctttatataggtggtgatgatgaaccacaagaaaaaaagcggaaagctgccccaaagatgaagaaagttattggaattattgagcacttaaaagcacctaaccttactaacgttaacaaaatttctaatatatttgaagatgtagagttttgtgttatgagtggaacagatagccagccaaagcctgacctggagaacagaattgcagaatttggtggttatatagtacaaaatccaggcccagacacgtactgtgtaattgcagggtctgagaacatcagagtgaaaaacataattttgtcaaataaacatgatgttgtcaagcctgcatggcttttagaatgttttaagaccaaaagctttgtaccatggcagcctcgctttatgattcatatgtgcccatcaaccaaagaacattttgcccgtgaatatgattgctatggtgatagttatttcattgatacagacttgaaccaactgaaggaagtattctcaggaattaaaaattctaacgagcagactcctgaagaaatggcttctctgattgctgatttagaatatcggtattcctgggattgctctcctctcagtatgtttcgacgccacaccgtttatttggactcgtatgctgttattaatgacctgagtaccaaaaatgaggggacaaggttagctattaaagccttggagcttcggtttcatggagcaaaagtagtttcttgtttagctgagggagtgtctcatgtaataattggggaagatcatagtcgtgttgcagattttaaagcttttagaagaacttttaagagaaagtttaaaatcctaaaagaaagttgggtaactgattcaatagacaagtgtgaattacaagaagaaaaccagtatttgatttaaagctaggtttcctagtgaggaaagcctctgatctggcagactcattgcagcaggtggtaatgataaaatactaaactacattttatttttgtatcttaaaaatctatgcctaaaaagtatcattacatataggaaaacaataattttaacttttaaggttgaaaagacaatagcccaaagccaagaaagaaaaattatcttgaatgtagtattcaatgattttttatgatcaaggtgaaataaacagtctaaagaagaggtgtttttataatatccatatagaaatctagaatttttacttagatactaataaaatacatttagaaacttttaaagtcatgaaaaagcattaaccttctaaacagtatattctaaaaagtcaaaacgttaacaatagtttttatctaataaaagcactgcaagaaaatagggtagaattgttacagctggacttgtaaaaatatgtctttttactcagggtttaaaatgtcccatttaaatatgaaatgtaaacaaatttgttttttaaggttaaggccaaatgtaacaataaaaccctgtcgatggttttagctaaattagaggaagttgtatgagacttaatgatctaaaaacttaaaattgaattggtttgattaaaaataaagcttgcaattttaaaagtagctcacatttaatttcttgtgtgaaatagaacatgctttaaaggaagtatttttatgtgaatttgcattccagtataaatagtattcacaaaaaagattttcctagattttatctattgaataggtgtcaatatggcatgcatattgtaactttcattagaaataagttgctttgacttttaaaaatgacatagttagattatttaaagtcaatgtatatagtatatattatgtatggatttatataccaaattttggaatacagcctatctcatgaccatattgaaatgtacggaatttgatccatgcgatactatgtgtgcattatttgaaagttattggaaattttattcaaaccgtggaacaaatgtatgtgattttgttatacttcttaatttaaataaaatatttaatgcactattaaaaaaaaaaaaaaaaaaa

SEQ ID NO: 29254 - DNA, 1946 bp, Homo Sapiens
agacactgcccgctctccgggactccgcgccgctccccgttgccttccaggactgagaaaggggaaagggaagggtgccacgtccgagcagccgccttgactggggaagggtctgaatcccacccttggcattgcttggtggagactgagatacccgtgctccgctcgcctccttggttgaagatttctccttccctcacgtgatttgagccccgtttttattttctgtgagccacgtcctcctcgagcggggtcaatctggcaaaaggagtgatgcgcttcgcctggaccgtgctcctgctcgggcctttgcagctctgcgcgctagtgcactgcgcccctcccgccgccggccaacagcagcccccgcgcgagccgccggcggctccgggcgcctggcgccagcagatccaatgggagaacaacgggcaggtgttcagcttgctgagcctgggctcacagtaccagcctcagcgccgccgggacccgggcgccgccgtccctggtgcagccaacgcctccgcccagcagccccgcactccgatcctgctgatccgcgacaaccgcaccgccgcggcgcgaacgcggacggccggctcatctggagtcaccgctggccgccccaggcccaccgcccgtcactggttccaagctggctactcgacatctagagcccgcgaagctggcgcctcgcgcgcggagaaccagacagcgccgggagaagttcctgcgctcagtaacctgcggccgcccagccgcgtggacggcatggtgggcgacgacccttacaacccctacaagtactctgacgacaacccttattacaactactacgatacttatgaaaggcccagacctgggggcaggtaccggcccggatacggcactggctacttccagtacggtctcccagacctggtggccgacccctactacatccaggcgtccacgtacgtgcagaagatgtccatgtacaacctgagatgcgcggcggaggaaaactgtctggccagtacagcatacagggcagatgtcagagattatgatcacagggtgctgctcagatttccccaaagagtgaaaaaccaagggacatcagatttcttacccagccgaccaagatattcctgggaatggcacagttgtcatcaacattaccacagtatggatgagtttagccactatgacctgcttgatgccaacacccagaggagagtggctgaaggccacaaagcaagtttctgtcttgaagacacatcctgtgactatggctaccacaggcgatttgcatgtactgcacacacacagggattgagtcctggctgttatgatacctatggtgcagacatagactgccagtggattgatattacagatgtaaaacctggaaactatatcctaaaggtcagtgtaaaccccagctacctggttcctgaatctgactataccaacaatgttgtgcgctgtgacattcgctacacaggacatcatgcgtatgcctcaggctgcacaatttcaccgtattagaaggcaaagcaaaactcccaatggataaatcagtgcctggtgttctgaagtgggaaaaaatagactaacttcagtaggatttatgtattttgaaaaagagaacagaaaacaacaaaagaatttttgtttggactgttttcaataacaaagcacataactggattttgaacgcttaagtcatcattacttgggaaatttttaatgtttattatttacatcactttgtgaattaacacagtgtttcaattctgtaattacatatttgactctttcaaagaaatccaaatttctcatgttccttttgaaattgtagtgcaaaatggtcagtattatctaaatgaatgagccaaaatgactttgaactgaaacttttctaaagtgctggaactttagtgaaacataataataatgggtttata

SEQ ID NO: 29255 - DNA, 3432 bp, Homo Sapiens
actccagcgcgcggctacctacgcttggtgcttgctttctccagccatcggagaccagagccgccccctctgctcgagaaaggggctcagcggcggcggaagcggagggggaccaccgtggagagcgcggtcccagcccggccactgcggatccctgaaaccaaaaagctcctgctgcttctgtaccccgcctgtccctcccagctgcgcagggccccttcgtgggatcatcagcccgaagacagggatggagaggcctctgtgctcccacctctgcagctgcctggctatgctggccctcctgtcccccctgagcctggcacagtatgacagctggccccattaccccgagtacttccagcaaccggctcctgagtatcaccagccccaggcccccgccaacgtggccaagattcagctgcgcctggctgggcagaagaggaagcacagcgagggccgggtggaggtgtactatgatggccagtggggcaccgtgtgcgatgacgacttctccatccacgctgcccacgtcgtctgccgggagctgggctatgtggaggccaagtcctggactgccagctcctcctacggcaagggagaagggcccatctggttagacaatctccactgtactggcaacgaggcgacccttgcagcatgcacctccaatggctggggcgtcactgactgcaagcacacggaggatgtcggtgtggtgtgcagcgacaaaaggattcctgggttcaaatttgacaattcgttgatcaaccagatagagaacctgaatatccaggtggaggacattcggattcgagccatcctctcaacctaccgcaagcgcaccccagtgatggagggctacgtggaggtgaaggagggcaagacctggaagcagatctgtgacaagcactggacggccaagaattcccgcgtggtctgcggcatgtttggcttccctggggagaggacatacaataccaaagtgtacaaaatgtttgcctcacggaggaagcagcgctactggccattctccatggactgcaccggcacagaggcccacatctccagctgcaagctgggcccccaggtgtcactggaccccatgaagaatgtcacctgcgagaatgggctgccggccgtggtgagttgtgtgcctgggcaggtcttcagccctgacggaccctcgagattccggaaagcatacaagccagagcaacccctggtgcgactgagaggcggtgcctacatcggggagggccgcgtggaggtgctcaaaaatggagaatgggggaccgtctgcgacgacaagtgggacctggtgtcggccagtgtggtctgcagagagctgggctttgggagtgccaaagaggcagtcactggctcccgactggggcaagggatcggacccatccacctcaacgagatccagtgcacaggcaatgagaagtccattatagactgcaagttcaatgccgagtctcagggctgcaaccacgaggaggatgctggtgtgagatgcaacacccctgccatgggcttgcagaagaagctgcgcctgaacggcggccgcaatccctacgagggccgagtggaggtgctggtggagagaaacgggtcccttgtgtgggggatggtgtgtggccaaaactggggcatcgtggaggccatggtggtctgccgccagctgggcctgggattcgccagcaacgccttccaggagacctggtattggcacggagatgtcaacagcaacaaagtggtcatgagtggagtgaagtgctcgggaacggagctgtccctggcgcactgccgccacgacggggaggacgtggcctgcccccagggcggagtgcagtacggggccggagttgcctgctcagaaaccgcccctgacctggtcctcaatgcggagatggtgcagcagaccacctacctggaggaccggcccatgttcatgctgcagtgtgccatggaggagaactgcctctcggcctcagccgcgcagaccgaccccaccacgggctaccgccggctcctgcgcttctcctcccagatccacaacaatggccagtccgacttccggcccaagaacggccgccacgcgtggatctggcacgactgtcacaggcactaccacagcatggaggtgttcacccactatgacctgctgaacctcaatggcaccaaggtggcagagggccacaaggccagcttctgcttggaggacacagaatgtgaaggagacatccagaagaattacgagtgtgccaacttcggcgatcagggcatcaccatgggctgctgggacatgtaccgccatgacatcgactgccagtgggttgacatcactgacgtgccccctggagactacctgttccaggttgttattaaccccaacttcgaggttgcagaatccgattactccaacaacatcatgaaatgcaggagccgctatgacggccaccgcatctggatgtacaactgccacataggtggttccttcagcgaagagacggaaaaaaagtttgagcacttcagcgggctcttaaacaaccagctgtccccgcagtaaagaagcctgcgtggtcaactcctgtcttcaggccacaccacatcttccatgggacttccccccaacaactgagtctgaacgaatgccacgtgccctcacccagcccggcccccaccctgtccagacccctacagctgtgtctaagctcaggaggaaagggaccctcccatcattcatggggggctgctacctgacccttggggcctgagaaggccttgggggggtggggtttgtccacagagctgctggagcagcaccaagagccagtcttgaccgggatgaggcccacagacaggttgtcatcagcttgtcccattcaagccaccgagctcaccacagacacagtggagccgcgctcttctccagtgacacgtggacaaatgcgggctcatcagcccccccagagagggtcaggccgaaccccatttctcctcctcttaggtcattttcagcaaacttgaatatctagacctctcttccaatgaaaccctccagtctattatagtcacatagataatggtgccacgtgttttctgatttggtgagctcagacttggtgcttccctctccacaacccccaccccttgtttttcaagatactattattatattttcacagacttttgaagcacaaatttattggcatttaatattggacatctgggcccttggaagtacaaatctaaggaaaaaccaacccactgtgtaagtgactcatcttcctgttgttccaattctgtgggtttttgattcaacggtgctataaccagggtcctgggtgacagggcgctcactgagcaccatgtgtcatcacagacacttacacatacttgaaacttggaataaaagaaagatttatg

SEQ ID NO: 29256 - DNA, 4648 bp, Homo Sapiens
gggggtgggggaaggagggacggccggtcccgtcagtcaggcagcgggagccgccgggagcggatggcggcggccgtagcggctccactcgccgccgggggtgaggaggcggcagccacgacctccgtgcccgggtctccaggtctgccggggagacgcagtgcagagcgggccctagaggaggccgtggccaccgggaccctgaacctgtctaaccggcgcttgaagcacttcccccggggcgcggcccgtagctacgacctgtcagacatcacccaggctgacctgtcccggaaccggtttcccgaggtgcccgaggcggcgtgccagctggtgtccctggagggcctgagcctctaccacaattgcctgagatgcctgaacccagccttggggaatctcacagccctcacctacctcaacctcagccgaaaccagctgtcgctgctgccaccctacatctgccagctgcccctgagggtcctcatcgtcagcaacaacaagctgggagccctgccccctgacatcggcaccctgggaagcctgcgacagcttgacgtgagcagcaacgagctccaatccctgccctcggaactgtgtggcctctcttccctgcgggacctcaatgtccggaggaaccagctcagtacgctgcccgaagagctgggggacctccctctggtccgcctggatttctcctgtaaccgcgtctcccgaatcccagtctccttctgccgcctgaggcacctgcaggtcattctgctggacagcaaccctctgcagagtccacctgcccaggtctgcctgaaggggaaacttcacatcttcaagtatttgtccacagaggccgggcagcgtgggtcggccctgggggacctggccccttctcggcccccgagtttcagtccctgccctgcagaggatctatttccgggacatcggtacgatggtgggctggactcaggcttccacagcgttgatagtggcagcaagaggtggtctggaaatgagtcaacagatgaattttcagagctgtcattccggatctcagagctggcccgggagccccggggacccagagaacgcaaggaggatggctcagcggacggagaccctgtgcagattgacttcatcgacagccatgtccccggggaggatgaagagcgaggcactgtggaggagcagcgaccacccgaattaagccctggggcaggggacagggagagggcaccaagcagcaggcgggaggagccggcaggggaggagcggcggcgcccggacaccttgcagctgtggcaggagcgggaacggcggcagcagcagcagagcggggcgtggggggccccgaggaaggatagcctcttgaagccagggctcagggctgttgtgggaggggccgccgccgtgtccactcaagccatgcacaacggctcgcctaagtccagtgcctcccaagcaggggctgcagcggggcagggagcccccgcccctgcccctgcctcccaagagccccttcccatagctggaccagcgacagcacctgctccacggccacttggctccattcagagaccaaacagcttcctcttccgttcctcctctcagagtggctcaggcccttcctcaccagactctgtcctgagacctcggcggtacccccaggttccagatgagaaggacttaatgactcagctgcgccaggtccttgagtcccggctgcagcggcccctgcctgaggacctggccgaggctctggccagtggggtcatcctgtgccagctggccaaccagctacggccgcgctccgtgcccttcatccatgtgccctcccctgctgtgccaaaactcagtgccctcaaggctcggaagaatgtggagagttttctagaagcctgtcgaaaaatgggggtgcctgaggctgacctgtgctcgccctcggatctcctccagggcactgcccgggggctgcggaccgcgctggaggccgtgaagcgggtggggggcaaggccctaccgcccctctggcccccctctggtctgggcggcttcgtcgtcttctacgtggtcctcatgctgctgctctatgtcacctacactcggctcctgggttcctaggccccaaaatcggccctccctcacccctttcccttcctctctatttataaggtccctgctccacccgaccccacctgcggtgccttcagccccaaccaaagacactagtgcacccccttcacagacactgacctcagaggccccactctggtgcccccagaccctgggcccccagcctctggcctccctccagtagccccacgagtccccacctctcagtgctgacggtgccttcatgtccccgccggccctgcccctgccctctgtaccccgtgaggggtggcaggagctggagtctcccccttcctcctgtgccctccccttccccccccaacagctgctatgggggggctaaattatctctattttgtagagaggatctatatttgtaggggttcggggcccaggccgggtccctatctctgtgtataaactgtacagaccgtggccgccctgcctgtgtgtgtgtgtgtgtgtgtgtgtgtgtgtgtgtgtgtgcgcgcgcgcgcgcgtctgctccgcgtgttggtggctgtggccatggctctgtgcccaccagcatctccctcctgagatgccggcctctcatgctcccggagcgtccgccaaccccccgtgtcacctcccttctgttatcgctgacagctttcttgcgtctcatttgtcgccgagccccgagcgcacggtgatgctcgggtctgcccccgaccccctgccacaggccggaagccgcagggggcaccgtggggaagctaacccggccccttcccccaggagtcactgtgccagccccaccacatcctggaagaggagggggccccgggaaggggcctcccctacatcgctgctgtcgtccacgccctgctggaccggccttaggggtgaaggtgggggcacagggcccaccccgcccgggaccccgggagcagaagacgcgcctgggctccgcgctctcagagaagcacgtggtgagggtggcctgggcctgggcacccttggcctgccggcctggctgcctctggggtcgagggtctgggtggaaggaccgcgggtgtcgcaggtgtcgtgtcagccgcaataaacagaagccagaagccctctgggtggccctcaggtgtaactgtgtctgagagcacgtgcgtcgcggggttgttgggggggcctctgtttccggaattcaccgcccagtcgccagggggcgcccgcgggagcccggcgggggcacgcgccacgtggccgggagacgcacagggcgccagcgtcgccgcgaggcctctggggtgggttcgccaggagggcacgttcgcgccgcgccgcggagggaggctgagagggccgggccgggcggcggggacacggcggtaccgtcctgcgctcgggaacgcggaatgttgccctggtcgccgccgcggtggggcgcgggcccggaggaggcgcccgagggaccaggccttccggcgggcaaggaccagggcgagccctggagcgccggagcggacgcccccagggagctggggacacccccatgggacaggtgaggggctcggacggagccgtggggggacagcgactgggggcctccatgccttcaccacgcgctctacggaggcttctccattgtccctgctggagattgggtccctcggtctcccttgcaccaggcacccttgggctccaggggagggtgcgtgggggcggtgtggctgcagcctcagtccctgcccctccagcccacagcccccatcccgtagcccttcctggatctggagagagcagctgctgctgccccaccacctgccaggcccggccactgagcagccccccggagccccagatccccgttccccccaggtggcctgggaggtggccccctcgaggatgactccactagcgccctgggaccccaagtatgaagccaaagcaggacctcggccggtgtggggggccaactgtagctcaggagcctcgttctcaggccggacgctgtgtcacccctcattctggccgctgtatgaagcagcctcgggcaggggtctcaggcccgtggcccctgccacagggcactggaatggacagcaggcgcccccagatgcagggttcccggtggtgtgctgtgaagatgtcttcctctcggaccctctgctgccccgggggcagcgtgttcccctgtacctgtccaaggccccccagcagatgatgggctccctgaaactgctgccgccgccccccatcatgtctgccagggtgctcccccgcccatcaccctcccggggcccctccactgcctggctcagcgggccggagctgatcgctctcactggcctgctgcagatgagccagggggagcctaggcccagctcctccgcggttggccccccagaccatacctctgacccacccagcccctgtggtagccccagcagttctcagggtgctgacctctctctcccacagaccccagacacccattgtccatagccttctcagggcagagtgggctggttgtgttgacaataaaacagtgttggtttgc

SEQ ID NO: 29257 - DNA, 14896 bp, Homo Sapiens
cagcggtgcgagctccaggcccatgcactgaggaggcggaaacaaggggagcccccagagctccatcaagccccctccaaaggctcccctacccggtccacgccccccaccccccctccccgcctcctcccaattgtgcatttttgcagccggaggcggctccgagatggggctgtgagcttcgcccggggagggggaaagagcagcgaggagtgaagcgggggggtggggtgaagggtttggatttcggggcagggggcgcacccccgtcagcaggccctccccaaggggctcggaactctacctcttcacccacgcccctggtgcgctttgccgaaggaaagaataagaacagagaaggaggagggggaaaggaggaaaagggggaccccccaactggggggggtgaaggagagaagtagcaggaccagaggggaaggggctgctgcttgcatcagcccacaccatgctgaccccgccgttgctcctgctgctgcccctgctctcagctctggtcgcggcggctatcgacgcccctaagacttgcagccccaagcagtttgcctgcagagatcaaataacctgtatctcaaagggctggcggtgcgacggtgagagggactgcccagacggatctgacgaggcccctgagatttgtccacagagtaaggcccagcgatgccagccaaacgagcataactgcctgggtactgagctgtgtgttcccatgtcccgcctctgcaatggggtccaggactgcatggacggctcagatgaggggccccactgccgagagctccaaggcaactgctctcgcctgggctgccagcaccattgtgtccccacactcgatgggcccacctgctactgcaacagcagctttcagcttcaggcagatggcaagacctgcaaagattttgatgagtgctcagtgtacggcacctgcagccagctatgcaccaacacagacggctccttcatatgtggctgtgttgaaggatacctcctgcagccggataaccgctcctgcaaggccaagaacgagccagtagaccggccccctgtgctgttgatagccaactcccagaacatcttggccacgtacctgagtggggcccaggtgtctaccatcacacctacgagcacgcggcagaccacagccatggacttcagctatgccaacgagaccgtatgctgggtgcatgttggggacagtgctgctcagacgcagctcaagtgtgcccgcatgcctggcctaaagggcttcgtggatgagcacaccatcaacatctccctcagtctgcaccacgtggaacagatggccatcgactggctgacaggcaacttctactttgtggatgacatcgatgataggatctttgtctgcaacagaaatggggacacatgtgtcacattgctagacctggaactctacaaccccaagggcattgccctggaccctgccatggggaaggtgtttttcactgactatgggcagatcccaaaggtggaacgctgtgacatggatgggcagaaccgcaccaagctcgtcgacagcaagattgtgtttcctcatggcatcacgctggacctggtcagccgccttgtctactgggcagatgcctatctggactatattgaagtggtggactatgagggcaagggccgccagaccatcatccagggcatcctgattgagcacctgtacggcctgactgtgtttgagaattatctctatgccaccaactcggacaatgccaatgcccagcagaagacgagtgtgatccgtgtgaaccgctttaacagcaccgagtaccaggttgtcacccgggtggacaagggtggtgccctccacatctaccaccagaggcgtcagccccgagtgaggagccatgcctgtgaaaacgaccagtatgggaagccgggtggctgctctgacatctgcctgctggccaacagccacaaggcgcggacctgccgctgccgttccggcttcagcctgggcagtgacgggaagtcatgcaagaagccggagcatgagctgttcctcgtgtatggcaagggccggccaggcatcatccggggcatggatatgggggccaaggtcccggatgagcacatgatccccattgaaaacctcatgaacccccgagccctggacttccacgctgagaccggcttcatctactttgccgacaccaccagctacctcattggccgccagaagattgatggcactgagcgggagaccatcctgaaggacggcatccacaatgtggagggtgtggccgtggactggatgggagacaatctgtactggacggacgatgggcccaaaaagacaatcagcgtggccaggctggagaaagctgctcagacccgcaagactttaatcgagggcaaaatgacacaccccagggctattgtggtggatccactcaatgggtggatgtactggacagactgggaggaggaccccaaggacagtcggcgtgggcggctggagagggcgtggatggatggctcacaccgagacatctttgtcacctccaagacagtgctttggcccaatgggctaagcctggacatcccggctgggcgcctctactgggtggatgccttctacgaccgcatcgagacgatactgctcaatggcacagaccggaagattgtgtatgaaggtcctgagctgaaccacgcctttggcctgtgtcaccatggcaactacctcttctggactgagtatcggagtggcagtgtctaccgcttggaacggggtgtaggaggcgcaccccccactgtgacccttctgcgcagtgagcggccccccatctttgagatccgaatgtatgatgcccagcagcagcaagttggcaccaacaaatgccgggtgaacaatggcggctgcagcagcctgtgcttggccacccctgggagccgccagtgcgcctgtgctgaggaccaggtgttggacgcagacggcgtcacttgcttggcgaacccatcctacgtgcctccaccccagtgccagccaggcgagtttgcctgtgccaacagccgctgcatccaggagcgctggaagtgtgacggagacaacgattgcctggacaacagtgatgaggccccagccctctgccatcagcacacctgcccctcggaccgattcaagtgcgagaacaaccggtgcatccccaaccgctggctctgcgacggggacaatgactgtgggaacagtgaagatgagtccaatgccacttgttcagcccgcacctgcccccccaaccagttctcctgtgccagtggccgctgcatccccatctcctggacgtgtgatctggatgacgactgtggggaccgctctgatgagtctgcttcgtgtgcctatcccacctgcttccccctgactcagtttacctgcaacaatggcagatgtatcaacatcaactggagatgcgacaatgacaatgactgtggggacaacagtgacgaagccggctgcagccactcctgttctagcacccagttcaagtgcaacagcgggcgttgcatccccgagcactggacctgcgatggggacaatgactgcggagactacagtgatgagacacacgccaactgcaccaaccaggccacgaggccccctggtggctgccacactgatgagttccagtgccggctggatggactatgcatccccctgcggtggcgctgcgatggggacactgactgcatggactccagcgatgagaagagctgtgagggagtgacccacgtctgcgatcccagtgtcaagtttggctgcaaggactcagctcggtgcatcagcaaagcgtgggtgtgtgatggcgacaatgactgtgaggataactcggacgaggagaactgcgagtccctggcctgcaggccaccctcgcacccttgtgccaacaacacctcagtctgcctgccccctgacaagctgtgtgatggcaacgacgactgtggcgacggctcagatgagggcgagctctgcgaccagtgctctctgaataacggtggctgcagccacaactgctcagtggcacctggcgaaggcattgtgtgttcctgccctctgggcatggagctggggcccgacaaccacacctgccagatccagagctactgtgccaagcatctcaaatgcagccaaaagtgcgaccagaacaagttcagcgtgaagtgctcctgctacgagggctgggtcctggaacctgacggcgagagctgccgcagcctggaccccttcaagccgttcatcattttctccaaccgccatgaaatccggcgcatcgatcttcacaaaggagactacagcgtcctggtgcccggcctgcgcaacaccatcgccctggacttccacctcagccagagcgccctctactggaccgacgtggtggaggacaagatctaccgcgggaagctgctggacaacggagccctgactagtttcgaggtggtgattcagtatggcctggccacacccgagggcctggctgtagactggattgcaggcaacatctactgggtggagagtaacctggatcagatcgaggtggccaagctggatgggaccctccggaccaccctgctggccggtgacattgagcacccaagggcaatcgcactggatccccgggatgggatcctgttttggacagactgggatgccagcctgccccgcattgaggcagcctccatgagtggggctgggcgccgcaccgtgcaccgggagaccggctctgggggctggcccaacgggctcaccgtggactacctggagaagcgcatcctttggattgacgccaggtcagatgccatttactcagcccgttacgacggctctggccacatggaggtgcttcggggacacgagttcctgtcgcacccgtttgcagtgacgctgtacgggggggaggtctactggactgactggcgaacaaacacactggctaaggccaacaagtggaccggccacaatgtcaccgtggtacagaggaccaacacccagccctttgacctgcaggtgtaccacccctcccgccagcccatggctcccaatccctgtgaggccaatgggggccagggcccctgctcccacctgtgtctcatcaactacaaccggaccgtgtcctgcgcctgcccccacctcatgaagctccacaaggacaacaccacctgctatgagtttaagaagttcctgctgtacgcacgtcagatggagatccgaggtgtggacctggatgctccctactacaactacatcatctccttcacggtgcccgacatcgacaacgtcacagtgctagactacgatgcccgcgagcagcgtgtgtactggtctgacgtgcggacacaggccatcaagcgggccttcatcaacggcacaggcgtggagacagtcgtctctgcagacttgccaaatgcccacgggctggctgtggactgggtctcccgaaacctgttctggacaagctatgacaccaataagaagcagatcaatgtggcccggctggatggctccttcaagaacgcagtggtgcagggcctggagcagccccatggccttgtcgtccaccctctgcgtgggaagctctactggaccgatggtgacaacatcagcatggccaacatggatggcagcaatcgcaccctgctcttcagtggccagaagggccccgtgggcctggctattgacttccctgaaagcaaactctactggatcagctccgggaaccataccatcaaccgctgcaacctggatgggagtgggctggaggtcatcgatgccatgcggagccagctgggcaaggccaccgccctggccatcatgggggacaagctgtggtgggctgatcaggtgtcggaaaagatgggcacatgcagcaaggctgacggctcgggctccgtggtccttcggaacagcaccaccctggtgatgcacatgaaggtctatgacgagagcatccagctggaccataagggcaccaacccctgcagtgtcaacaacggtgactgctcccagctctgcctgcccacgtcagagacgacccgctcctgcatgtgcacagccggctatagcctccggagtggccagcaggcctgcgagggcgtaggttcctttctcctgtactctgtgcatgagggaatcaggggaattcccctggatcccaatgacaagtcagatgccctggtcccagtgtccgggacctcgctggctgtcggcatcgacttccacgctgaaaatgacaccatctactgggtggacatgggcctgagcacgatcagccgggccaagcgggaccagacgtggcgtgaagacgtggtgaccaatggcattggccgtgtggagggcattgcagtggactggatcgcaggcaacatctactggacagaccagggctttgatgtcatcgaggtcgcccggctcaatggctccttccgctacgtggtgatctcccagggtctagacaagccccgggccatcaccgtccacccggagaaagggtacttgttctggactgagtggggtcagtatccgcgtattgagcggtctcggctagatggcacggagcgtgtggtgctggtcaacgtcagcatcagctggcccaacggcatctcagtggactaccaggatgggaagctgtactggtgcgatgcacggacagacaagattgaacggatcgacctggagacaggtgagaaccgcgaggtggttctgtccagcaacaacatggacatgttttcagtgtctgtgtttgaggatttcatctactggagtgacaggactcatgccaacggctctatcaagcgcgggagcaaagacaatgccacagactccgtgcccctgcgaaccggcatcggcgtccagcttaaagacatcaaagtcttcaaccgggaccggcagaaaggcaccaacgtgtgcgcggtggccaatggcgggtgccagcagctgtgcctgtaccggggccgtgggcagcgggcctgcgcctgtgcccacgggatgctggctgaagacggagcatcgtgccgcgagtatgccggctacctgctctactcagagcgcaccattctcaagagtatccacctgtcggatgagcgcaacctcaatgcgcccgtgcagcccttcgaggaccctgagcacatgaagaacgtcatcgccctggcctttgactaccgggcaggcacctctccgggcacccccaatcgcatcttcttcagcgacatccactttgggaacatccaacagatcaacgacgatggctccaggaggatcaccattgtggaaaacgtgggctccgtggaaggcctggcctatcaccgtggctgggacactctctattggacaagctacacgacatccaccatcacgcgccacacagtggaccagacccgcccaggggccttcgagcgtgagaccgtcatcactatgtctggagatgaccacccacgggccttcgttttggacgagtgccagaacctcatgttctggaccaactggaatgagcagcatcccagcatcatgcgggcggcgctctcgggagccaatgtcctgacccttatcgagaaggacatccgtacccccaatggcctggccatcgaccaccgtgccgagaagctctacttctctgacgccaccctggacaagatcgagcggtgcgagtatgacggctcccaccgctatgtgatcctaaagtcagagcctgtccaccccttcgggctggccgtgtatggggagcacattttctggactgactgggtgcggcgggcagtgcagcgggccaacaagcacgtgggcagcaacatgaagctgctgcgcgtggacatcccccagcagcccatgggcatcatcgccgtggccaacgacaccaacagctgtgaactctctccatgccgaatcaacaacggtggctgccaggacctgtgtctgctcactcaccagggccatgtcaactgctcatgccgagggggccgaatcctccaggatgacctcacctgccgagcggtgaattcctcttgccgagcacaagatgagtttgagtgtgccaatggcgagtgcatcaacttcagcctgacctgcgacggcgtcccccactgcaaggacaagtccgatgagaagccatcctactgcaactcccgccgctgcaagaagactttccggcagtgcagcaatgggcgctgtgtgtccaacatgctgtggtgcaacggggccgacgactgtggggatggctctgacgagatcccttgcaacaagacagcctgtggtgtgggcgagttccgctgccgggacgggacctgcatcgggaactccagccgctgcaaccagtttgtggattgtgaggacgcctcagatgagatgaactgcagtgccaccgactgcagcagctacttccgcctgggcgtgaagggcgtgctcttccagccctgcgagcggacctcactctgctacgcacccagctgggtgtgtgatggcgccaatgactgtggggactacagtgatgagcgcgactgcccaggtgtgaaacgccccagatgccctctgaattacttcgcctgccctagtgggcgctgcatccccatgagctggacgtgtgacaaagaggatgactgtgaacatggcgaggacgagacccactgcaacaagttctgctcagaggcccagtttgagtgccagaaccatcgctgcatctccaagcagtggctgtgtgacggcagcgatgactgtggggatggctcagacgaggctgctcactgtgaaggcaagacgtgcggcccctcctccttctcctgccctggcacccacgtgtgcgtccccgagcgctggctctgtgacggtgacaaagactgtgctgatggtgcagacgagagcatcgcagctggttgcttgtacaacagcacttgtgacgaccgtgagttcatgtgccagaaccgccagtgcatccccaagcacttcgtgtgtgaccacgaccgtgactgtgcagatggctctgatgagtcccccgagtgtgagtacccgacctgcggccccagtgagttccgctgtgccaatgggcgctgtctgagctcccgccagtgggagtgtgatggcgagaatgactgccacgaccagagtgacgaggctcccaagaacccacactgcaccagcccagagcacaagtgcaatgcctcgtcacagttcctgtgcagcagtgggcgctgtgtggctgaggcactgctctgcaacggccaggatgactgtggcgacagctcggacgagcgtggctgccacatcaatgagtgtctcagccgcaagctcagtggctgcagccaggactgtgaggacctcaagatcggcttcaagtgccgctgtcgccctggcttccggctgaaggatgacggccggacgtgtgctgatgtggacgagtgcagcaccaccttcccctgcagccagcgctgcatcaacacccatggcagctataagtgtctgtgtgtggagggctatgcaccccgcggcggcgacccccacagctgcaaggctgtgactgacgaggaaccgtttctgatcttcgccaaccggtactacctgcgcaagctcaacctggacgggtccaactacacgttacttaagcagggcctgaacaacgccgttgccttggattttgactaccgagagcagatgatctactggacagatgtgaccacccagggcagcatgatccgaaggatgcaccttaacgggagcaatgtgcaggtcctacaccgtacaggcctcagcaaccccgatgggctggctgtggactgggtgggtggcaacctgtactggtgcgacaaaggccgggacaccatcgaggtgtccaagctcaatggggcctatcggacggtgctggtcagctctggcctccgtgagcccagggctctggtggtggatgtgcagaatgggtacctgtactggacagactggggtgaccattcactgatcggccgcatcggcatggatgggtccagccgcagcgtcatcgtggacaccaagatcacatggcccaatggcctgacgctggactatgtcactgagcgcatctactgggccgacgcccgcgaggactacattgaatttgccagcctggatggctccaatcgccacgttgtgctgagccaggacatcccgcacatctttgcactgaccctgtttgaggactacgtctactggaccgactgggaaacaaagtccattaaccgagcccacaagaccacgggcaccaacaaaacgctcctcatcagcacgctgcaccggcccatggacctgcatgtcttccatgccctgcgccagccagacgtgcccaatcacccctgcaaggtcaacaatggtggctgcagcaacctgtgcctgctgtcccccgggggagggcacaaatgtgcctgccccaccaacttctacctgggcagcgatgggcgcacctgtgtgtccaactgcacggctagccagtttgtatgcaagaacgacaagtgcatccccttctggtggaagtgtgacaccgaggacgactgcggggaccactcagacgagcccccggactgccctgagttcaagtgccggcccggacagttccagtgctccacaggtatctgcacaaaccctgccttcatctgcgatggcgacaatgactgccaggacaacagtgacgaggccaactgtgacatccacgtctgcttgcccagtcagttcaaatgcaccaacaccaaccgctgtattcccggcatcttccgctgcaatgggcaggacaactgcggagatggggaggatgagagggactgccccgaggtgacctgcgcccccaaccagttccagtgctccattaccaaacggtgcatcccccgggtctgggtctgcgaccgggacaatgactgtgtggatggcagtgatgagcccgccaactgcacccagatgacctgtggtgtggacgagttccgctgcaaggattcgggccgctgcatcccagcgcgttggaagtgtgacggagaggatgactgtggggatggctcggatgagcccaaggaagagtgtgatgaacgcacctgtgagccataccagttccgctgcaagaacaaccgctgcgtgcccggccgctggcagtgcgactacgacaacgattgcggtgacaactccgatgaagagagctgcacccctcggccctgctccgagagtgagttctcctgtgccaacggccgctgcatcgcggggcgctggaaatgcgatggagaccacgactgcgcggacggctcggacgagaaagactgcaccccccgctgtgacatggaccagttccagtgcaagagcggccactgcatccccctgcgctggcgctgtgacgcagacgccgactgcatggacggcagcgacgaggaggcctgcggcactggcgtgcggacctgccccctggacgagttccagtgcaacaacaccttgtgcaagccgctggcctggaagtgcgatggcgaggatgactgtggggacaactcagatgagaaccccgaggagtgtgcccggttcgtgtgccctcccaaccggcccttccgttgcaagaatgaccgcgtctgtctgtggatcgggcgccaatgcgatggcacggacaactgtggggatgggactgatgaagaggactgtgagccccccacagcccacaccacccactgcaaagacaagaaggagtttctgtgccggaaccagcgctgcctctcctcctccctgcgctgcaacatgttcgatgactgcggggacggctctgacgaggaggactgcagcatcgaccccaagctgaccagctgcgccaccaatgccagcatctgtggggacgaggcacgctgcgtgcgcaccgagaaagcggcctactgtgcctgccgctcgggcttccacaccgtgcccggccagcccggatgccaagacatcaacgagtgcctgcgcttcggcacctgctcccagctctgcaacaacaccaagggcggccacctctgcagctgcgctcggaacttcatgaagacgcacaacacctgcaaggccgaaggctctgagtaccaggtcctgtacatcgctgatgacaatgagatccgcagcctgttccccggccacccccattcggcttacgagcaggcattccagggtgacgagagtgtccgcattgatgctatggatgtccatgtcaaggctggccgtgtctattggaccaactggcacacgggcaccatctcctaccgcagcctgccacctgctgcgcctcctaccacttccaaccgccaccggcgacagattgaccggggtgtcacccacctcaacatttcagggctgaagatgcccagaggcatcgccatcgactgggtggccggaaacgtgtactggaccgactcgggccgagatgtgattgaggtggcgcagatgaagggcgagaaccgcaagacgctcatctcgggcatgattgacgagccccacgccattgtggtggacccactgagggggaccatgtactggtcagactggggcaaccaccccaagattgagacggcagcgatggatgggacgcttcgggagacactggtgcaggacaacattcagtggcccacaggcctggccgtggattatcacaatgagcggctgtactgggcagacgccaagctttcagtcatcggcagcatccggctcaatggcacggaccccattgtggctgctgacagcaaacgaggcctaagtcaccccttcagcatcgacgtctttgaggattacatctatggtgtcacctacatcaataatcgtgtcttcaagatccataagtttggccacagccccttggtcaacctgacagggggcctgagccacgcctctgacgtggtcctttaccatcagcacaagcagcccgaagtgaccaacccatgtgaccgcaagaaatgcgagtggctctgcctgctgagccccagtgggcctgtctgcacctgtcccaatgggaagcggctggacaacggcacatgcgtgcctgtgccctctccaacgccccccccagatgctccccggcctggaacctgtaacctgcagtgcttcaacggtggcagctgtttcctcaatgcacggaggcagcccaagtgccgctgccaaccccgctacacgggtgacaagtgtgaactggaccagtgctgggagcactgtcgcaatgggggcacctgtgctgcctccccctctggcatgcccacgtgccggtgccccacgggcttcacgggccccaaatgcacccagcaggtgtgtgcgggctactgtgccaacaacagcacctgcactgtcaaccagggcaaccagccccagtgccgatgcctacccggcttcctgggcgaccgctgccagtaccggcagtgctctggctactgtgagaactttggcacatgccagatggctgctgatggctcccgacaatgccgctgcactgcctactttgagggatcgaggtgtgaggtgaacaagtgcagccgctgtctcgaaggggcctgtgtggtcaacaagcagagtggggatgtcacctgcaactgcacggatggccgggtggcccccagctgtctgacctgcgtcggccactgcagcaatggcggctcctgtaccatgaacagcaaaatgatgcctgagtgccagtgcccaccccacatgacagggccccggtgtgaggagcacgtcttcagccagcagcagccaggacatatagcctccatcctaatccctctgctgttgctgctgctgctggttctggtggccggagtggtattctggtataagcggcgagtccaaggggctaagggcttccagcaccaacggatgaccaacggggccatgaacgtggagattggaaaccccacctacaagatgtacgaaggcggagagcctgatgatgtgggaggcctactggacgctgactttgccctggaccctgacaagcccaccaacttcaccaaccccgtgtatgccacactctacatggggggccatggcagtcgccactccctggccagcacggacgagaagcgagaactcctgggccggggccctgaggacgagataggggaccccttggcatagggccctgccccgtcggactgcccccagaaagcctcctgccccctgccggtgaagtccttcagtgagcccctccccagccagcccttccctggccccgccggatgtataaatgtaaaaatgaaggaattacattttatatgtgagcgagcaagccggcaagcgagcacagtattatttctccatcccctccctgcctgctccttggcacccccatgctgccttcagggagacaggcagggagggcttggggctgcacctcctaccctcccaccagaacgcaccccactgggagagctggtggtgcagccttcccctccctgtataagacactttgccaaggctctcccctctcgccccatccctgcttgcccgctcccacagcttcctgagggctaattctgggaagggagagttctttgctgcccctgtctggaagacgtggctctgggtgaggtaggcgggaaaggatggagtgttttagttcttgggggaggccaccccaaaccccagccccaactccaggggcacctatgagatggccatgctcaacccccctcccagacaggccctccctgtctccagggcccccaccgaggttcccagggctggagacttcctctggtaaacattcctccagcctcccctcccctggggacgccaaggaggtgggccacacccaggaagggaaagcgggcagccccgttttggggacgtgaacgttttaataatttttgctgaattctttacaactaaataacacagatattcttataaataaaattgtaaaaaaaaaaa

SEQ ID NO: 29258 - DNA, 5301 bp, Homo Sapiens
gcggccgccccggctcctcgcctcccccacttctggccacccctcgccggtgagagaagagaacgcgagaagggaagatgggggccgtcctgaggagcctcctggcctgcagcttctgtgtgctcctgagagcggcccctttgttgctttatgcaaacagacgggacttgcgattggttgatgctacaaatggcaaagagaatgctacgattgtagttggaggcttggaggatgcagctgcggtggactttgtgtttagtcatggcttgatatactggagtgatgtcagcgaagaagccattaaacgaacagaatttaacaaaactgagagtgtgcagaatgttgttgtttctggattattgtcccccgatgggctggcatgtgattggcttggagaaaaattgtactggacagattctgaaactaatcggattgaagtttctaatttagatggatctttacgaaaagttttattttggcaagagttggatcaacccagagctattgccttagatccttcaagtgggttcatgtactggacagactggggagaagtgccaaagatagaacgtgctggaatggatggttcaagtcgcttcattataataaacagtgaaatttactggccaaatggactgactttggattatgaagaacaaaagctttattgggcagatgcaaaacttaatttcatccacaaatcaaatctggatggaacaaatcggcaggcagtggttaaaggttcccttccacatccttttgccttgacgttatttgaggacatattgtactggactgactggagcacacactccattttggcttgcaacaagtatactggtgagggtctgcgtgaaatccattctgacatcttctctcccatggatatacatgccttcagccaacagaggcagccaaatgccacaaatccatgtggaattgacaatgggggttgttcccatttgtgtttgatgtctccagtcaagcctttttatcagtgtgcttgccccactggggtcaaactcctggagaatggaaaaacctgcaaagatggtgccacagaattattgcttttagctcgaaggacagacttgagacgcatttctttggatacaccagattttacagacattgttctgcagttagaagacatccgtcatgccattgccatagattacgatcctgtggaaggctacatctactggactgatgatgaagtgagggccatacgccgttcatttatagatggatctggcagtcagtttgtggtcactgctcaaattgcccatcctgatggtattgctgtggactgggttgcacgaaatctttattggacagacactggcactgatcgaatagaagtgacaaggctcaatgggaccatgaggaagatcttgatttcagaggacttagaggaaccccgggctattgtgttagatcccatggttgggtacatgtattggactgactggggagaaattccgaaaattgagcgagcagctctggatggttctgaccgtgtagtattggttaacacttctcttggttggccaaatggtttagccttggattatgatgaaggcaaaatatactggggagatgccaaaacagacaagattgaggttatgaatactgatggcactgggagacgagtactagtggaagacaaaattcctcacatatttggatttactttgttgggtgactatgtttactggactgactggcagaggcgtagcattgaaagagttcataaacgaagtgcagagagggaagtgatcatagatcagctgcctgacctcatgggcctaaaggctacaaatgttcatcgagtgattggttccaacccctgtgctgaggaaaacgggggatgtagccatctctgcctctatagacctcagggccttcgctgtgcttgccctattggctttgaactcatcagtgacatgaagacctgcattgtcccagaggctttccttttgttttcacggagagcagatatcagacgaatttctctggaaacaaacaataataatgtggctattccactcactggtgtcaaagaagcttctgctttggattttgatgtgacagacaaccgaatttattggactgatatatcactcaagaccatcagcagagcctttatgaatggcagtgcactggaacatgtggtagaattcggcttagattatccagaaggcatggcagtagactggcttgggaagaacttgtactgggcagacacaggaacgaatcgaattgaggtgtcaaagttggatgggcagcaccgacaagttttggtgtggaaagacctagatagtcccagagctctcgcgttggaccctgccgaaggatttatgtattggactgaatggggtggaaaacctaagatagacagagctgcaatggatggaagtgaacgtactaccttagttccaaatgtggggcgggcaaacggcctaactattgattatgctaaaaggaggctttattggacagacctggacaccaacttaatagaatcttcaaatatgcttgggctcaaccgtgaagttatagcagatgacttgcctcatccttttggcttaactcagtaccaagattatatctactggacggactggagccgacgcagcattgagcgtgccaacaaaaccagtggccaaaaccgcaccatcattcagggccatttggattatgtgatggacatcctcgtctttcactcatctcgacagtcagggtggaatgaatgtgcttccagcaatgggcactgctcccacctctgcttggctgtgccagttgggggttttgtttgtggatgccctgcccactactctcttaatgctgacaacaggacttgtagtgctcctacgactttcctgctcttcagtcaaaagagtgccatcaaccgcatggtgattgatgaacaacagagccccgacatcatccttcccatccacagccttcggaatgtccgggccattgactatgacccactggacaagcaactctattggattgactcacgacaaaacatgatccgaaaggcacaagaagatggcagccagggctttactgtggttgtgagctcagttccgagtcagaacctggaaatacaaccctatgacctcagcattgatatttacagccgctacatctactggacttgtgaggctaccaatgtcattaatgtgacaagattagatgggagatcagttggagtggtgctgaaaggcgagcaggacagacctcgagccattgtggtaaacccagagaaagggtatatgtattttaccaatcttcaggaaaggtctcctaaaattgaacgggctgctttggatgggacagaacgggaggtcctctttttcagtggcttaagtaaaccaattgctttagcccttgatagcaggctgggcaagctcttttgggctgattcagatctccggcgaattgaaagcagtgatctctcaggtgctaaccggatagtattagaagactccaatatcttgcagcctgtgggacttactgtgtttgaaaactggctctattggattgataaacagcagcaaatgattgaaaaaattgacatgacaggtcgagagggtagaaccaaagtccaagctcgaattgcccagcttagtgacattcatgcagtaaaggagctgaaccttcaagaatacagacagcacccttgtgctcaggataatggtggctgttcacatatttgtcttgtaaagggggatggtactacaaggtgttcttgccccatgcacctggttctacttcaagatgagctatcatgtggagaacctccaacatgttctcctcagcagtttacttgtttcacgggggaaattgactgtatccctgtggcttggcggtgcgatgggtttactgaatgtgaagaccacagtgatgaactcaattgtcctgtatgctcagagtcccagttccagtgtgccagtgggcagtgtattgatggtgccctccgatgcaatggagatgcaaactgccaggacaaatcagatgagaagaactgtgaagtgctttgtttaattgatcagttccgctgtgccaatggtcagtgcattggaaagcacaagaagtgtgatcataatgtggattgcagtgacaagtcagatgaactggattgttatccgactgaagaaccagcaccacaggccaccaatacagttggttctgttattggcgtaattgtcaccatttttgtgtctggaactgtatactttatctgccagaggatgttgtgtccacgtatgaagggagatggggaaactatgactaatgactatgtagttcatggaccagcttctgtgcctcttggttatgtgccacacccaagttctttgtcaggatctcttccaggaatgtctcgaggtaaatcaatgatcagctccctcagtatcatggggggaagcagtggacccccctatgaccgagcccatgttacaggagcatcatcaagtagttcttcaagcaccaaaggcacttacttccctgcaattttgaaccctccaccatccccagccacagagcgatcacattacactatggaatttggatattcttcaaacagtccttccactcataggtcatacagctacaggccatatagctaccggcactttgcaccccccaccacaccctgcagcacagatgtttgtgacagtgactatgctcctagtcggagaatgacctcagtggcaacagccaagggctataccagtgacttgaactatgattcagaacctgtgcccccacctcccacaccccgaagccaatacttgtcagcagaggagaactatgaaagctgcccaccttctccatacacagagaggagctattctcatcacctctacccaccgccaccctctccctgtacagactcctcctgaggaggggccctcctcctctgactgcctccaacgtaaaaatgtaaatataaatttggttgagatctggagggggggagggagctattagagaaggatgaggcagaccatgtacagttaaaattataaaatggggtagggaatactggagatatttgtacagaagaaaaggatatttatatattttcttaaaacagcagatttgctgcttgtgccataaaagtttgtataaaaaaaatttgtactaaaagttttatttttgcaaactaaatacacaaagcatgccttaaacccagtgaagcaactgagtacaaaggaaacaggaataataaaggcatcactgaccaggaatatctgggctttattgataccaaaaaaaaaaaaa

SEQ ID NO: 29259 - DNA, 4225 bp, Homo Sapiens
ggcagtgggcggcgtagagcactgcagcagcaatgacggagggcacgtgtctgcggcgccgagggggcccctacaagaccgagcccgccaccgacctcggccgctggcgactcaactgcgagaggggccggcagacgtggacctacctgcaggacgagcgcgccggccgcgagcagaccggcctggaagcctacgccctggggctggacaccaagaattactttaaggacttgcccaaagcccacaccgcctttgagggggctctgaacgggatgacattttacgtggggctgcaggctgaggatgggcactggacgggtgattatggtggcccacttttcctcctgccaggcctcctgatcacttgccacgtggcacgcatccctctgccagccggatacagagaagagattgtgcggtacctgcggtcagtgcagctccctgacggtggctggggcctgcacattgaggataagtccaccgtgtttgggactgcgctcaactatgtgtctctcagaattctgggtgttgggcctgacgatcctgacctggtacgagcccggaacattcttcacaagaaaggtggtgctgtggccatcccctcctgggggaagttctggctggctgtcctgaatgtttacagctgggaaggcctcaataccctgttcccagagatgtggctgtttcctgactgggcaccggcacacccctccacactctggtgccactgccggcaggtgtacctgcccatgagctactgctacgccgttcggctgagtgccgcggaagacccgctggtccagagcctccgccaggagctctatgtggaggacttcgccagcattgactggctggcgcagaggaacaacgtggcccccgacgagctgtacacgccgcacagctggctgctccgcgtggtatatgcgctcctcaacctgtatgagcaccaccacagtgcccacctgcggcagcgggccgtgcagaagctgtatgaacacattgtggccgacgaccgattcaccaagagcatcagcatcggcccgatctcgaaaaccatcaacatgcttgtgcgctggtatgtggacgggcccgcctccactgccttccaggagcatgtctccagaatcccggactatctctggatgggccttgacggcatgaaaatgcagggcaccaacggctcacagatctgggacaccgcattcgccatccaggctctgcttgaggcgggcgggcaccacaggcccgagttttcgtcctgcctgcagaaggctcatgagttcctgaggctctcacaggtcccagataaccctcccgactaccagaagtactaccgccagatgcgcaagggtggcttctccttcagtacgctggactgcggctggatcgtttctgactgcacggctgaggccttgaaggctgtgctgctcctgcaggagaagtgtccccatgtcaccgagcacatccccagagaacggctctgcgatgctgtggctgtgctgctgaacatgagaaatccagatggagggttcgccacctatgagaccaagcgtggggggcacttgctggagctgctgaacccctcggaggtcttcggggacatcatgattgactacacctatgtggagtgcacctcagccgtgatgcaggcgcttaagtatttccacaagcgtttcccggagcacagggcagcggagatccgggagaccctcacgcagggcttagagttctgtcggcggcagcagagggccgatggctcctgggaaggctcctggggagtttgcttcacctacggcacctggtttggcctggaggccttcgcctgtatggggcagacctaccgagatgggactgcctgtgcagaggtctcccgggcctgtgacttcctgctgtcccggcagatggcagacggaggctggggggaggactttgagtcctgcgaggagcggcgttatttgcagagtgcccagtcccagatccataacacatgctgggccatgatggggctgatggccgttcggcatcctgacatcgaggcccaggagagaggagtccggtgtctacttgagaaacagctccccaatggcgactggccgcaggaaaacattgctggggtcttcaacaagtcctgtgccatctcctacacgagctacaggaacatcttccccatctgggccctcggccgcttctcccagctgtaccctgagagagcccttgctggccacccctgagaacatgcctacctgctgggtgccgtctgtgcgttccagtgaggccaaggggtcctggccgggttggggagccctcccataaccctgtcttgggctccaacccctcaacctctatctcatagatgtgaatctgggggccaggctggaggcagggatggggacagggtgggtggcttagactcttgatttttactgtaggttcatttctgaaagtagcttgtcgggcttgggtgaggaagggggcacaggagccgtgacccctgaggaggcacagcgccttctgccacctctgggcacggcctcaaggtagtgaggctaggaggttttttctgaccaatagctgagttcttgggagaggagcagctgtgcctgtgtgattccttagtgtcgagtgggctctgggctggggtcggccctgggcaggcttctcctgcaccttttgtctgctgggctgagggacacgagggcaaccctgtgacaatggcaggtagtgtgcatccgtgaatagcccagtgcgggggttgctcatggagcatcctgaggccgtgcagcagggagccccatgcccctgggtcgtgagcttgcctgcgtatggggtggtgtcatggagcctcatgcccctgggtcgtgagctcgcctgagtatggggtggtgtcatggagccgcatacccctgggttgtgagctcgcctgcatatgcagggtctgtcatggaacatcccaagtctgtgcagcagggagccccatgcccctgggacatgaacccacctgcgtggaatgctgtttgtgaggtgtctacagggtttatagtagtcttgtggacacagaaatgcacaggggacacttacggacacagaaatgcacaggggaggccgagcataaccaggggtgaggggcaggcagcagttgtagttactgccgcggggcactgctatgtgcagggacagccagcgcccagcccatcaccactccctgggctggctggcaggtatggcaccctgggagcccggcatatacccagggcacccctacggctgccgccagtctcatgcccaggtgggtgctctgggctggagcgagggccaggttttgggccgaggcttccccaggcaatcctgtgagctcccttctagcctctgacccagtctggtctggcttgcatggatgtagggcttggggtgggaagttcaggtcctggctttgcctttgcctgatgtggatgagcagctcacatgctcagggccacctgagactgtcactgctctcccctggctactgggaggagtcactgagagcttcgttacccctgctgccttgcccagggcacaccctatacctcctcatctgctcttcccctccctgccgccttctgggcaggtagcagtccctggcctctccccctggctgatcactctccctcaggcagtggagatctgcgtctggacaccctcagatcctgtcattgcctgcccagagtccttcaggggcacccctctgccttggtgtgcggtccagggctctcacccaggtgccgcaccctctggggtcttctgtccagctcccttgccccatgtgctgtcactgactctccttgggactcgcctgcctgctcagagccctgcagggcttggtcagctgcctgttcagtgtcaacacttccctgcacatcttaaaactgggctttattttcgctgaaggaactgtgttgggacccttgacatctgtcaggtttgcacatgctgtttttttttctcagcccacgtgttctcccccacgtggggtagcagcaggacagacagtgaatcacagagtctgccctgagcagaggctgctgtccctgggactcctagccatggtcagactgtacaaaacggttttccagaaatgaaatgtaaatccatttttatactgaaaatgttactgaaagtcacttttatgagcatctgccttaataaacagacattgattcccttatcagaaaaaaaaaaaaaaaaa

SEQ ID NO: 29260 - DNA, 5043 bp, Homo Sapiens
cggcggcggcggatcccgagcctggtccggcccggccttcccagtgcgctcggcccggcccgcgcaggcggcgagtcctccgagccccgggcccggacccctcgcgccggtccctgccccgcgcggcctcggagcgcgcgcggccccgccccgccccggcctcggcccgccgggcccgcagtgtgagagcgcctgctcgctgtgcccccgggttatgacgacccccaataaaggaaacaaggccttgaaggtgaagcgggagccgggtgagaatggcaccagcctgacggatgaggagctggtgaccatgtcggtgcgggagctgaaccagcacctgcggggcctgtccaaggaggagatcgtccagctgaagcagcgccggcgcacgctcaagaaccgcggctacgctgccagctgccgcgtgaagcgggtgacgcagaaggaggagctggagaagcagaaggcggagctgcagcaggaggtggagaagctggcctcagagaacgccagcatgaagctggagctcgacgcgctgcgctccaagtacgaggcgctgcagaccttcgcccggacggtggcccgcagccccgtggcgccagcccggggcccccttgccgccggcctggggcccctcgtcccaggcaaggtggccgccaccagcgtcatcacaatagtaaagtccaagacggatgcccgatcgtagggacgcgcgtctgcccaggcgggtctttgcggggccactaggcacatggcgaatttggctgccctgtccctctgtttccttctcttctctttcctccctctcttccccacccttctctcttccctgcaaagcacaacctgtaccccaggggcgccgggctgagcccctttgatctcgtcattgtcgtcgtgtgttttgtatgttgggattggtcagttcggcggtgacgtggggtcgccccaaccccttttgtaccagggccatgcaggcttggagtccagagttggtgctgtgggaacggactagagagagttgcgggagagagaaggagcaggcacgctgggcctcgcgtgtccccgagcagtgagggtcccagtgttccctccactcccgagtggccacaggctcgcgggctgggaaggattcactctctttagccccaggggagcagctcagcttagcccagcatgaagagatgggctctgctctgagagtagggcgggcttgaaggccctgatgggtggaccaccagcctgggcgcagtggtgctgggggcgtgcagctgggcccaggggctgtgcactcaggcctgacccgttgcactgaacaagaccaaatcgctggttgtgcgcttaacgtgagggtgggtccagtgtgccctgcgatgggtcccgtgtcactgtttacatgacctatttgtgtggttatatagccctttatttaaaagagagaagttccttttacaaagttattaaattaattatatgtttaaaagttaaagaaaaaagagctgcagagtatttataaaactgtcttttagaaaaaaaacaagcaagaagaccatttgaccatatgaatggaaaagggaagaaagtataatagaaactttgctagttaaaaaaaaaagaaaaaaaaagaaaaaaaatccctttcttgtaaacttacggacacctctttgtggctgttggagtttagtttttatatacacagagttatcagacattatttataaaacttagtttaaaaaaaagacaaaaaaaaaaaagccaagccgtgagccgaccagaaggccgtcctctttgatatcttttgcaattgtaccgaaagtgacttactcctctgcccttcctgcttccgtctcttgccggtgccgtggtgtcgtccgtgcctggtgaggttttgtgcagcggtaaagtgctggtgcttctggtgacctttgacctgtgggtgtcacttcttgtgtctgttttcccgtgttcgttttttgggtttagttgtgcttttgcttctgctggcttgctggacctgggctggggtgccaagtggcgcctgctgcgtcagagctcaaggaatctgtgcccaccaccagctcctggtccgtaggaggtgagacatggggttctgtcatgcccccctccactgagccttggctacatctgtgtctagggcttgggctgatctagtggcggggtaggtgaaactggggtcccttggggcgccccacgctgcttccacacccaccacctctggccttgggtggtggcattacagggatgagggagtcactgtgggtggccacagggctatggccaagcgttccctggccgtcttcctctggcctcagctttgttcctataggctgcccgcgccgtgggctgcaggtctcgccgcccgcttgatccctgaggtgtttccatgctgcgggtggtgcttccaggcagagtgggtgggggcccaccgggcaccgccctttcttccttgtccctgcctcactctgagagccttgggggtctccaccagtgcagacaagggctacagtctccagggccgggtcttgtccctcttctccgctggtccacgctggcagctcttggcttcgggcctgccttctgcctccctttgggatctgtgtcttccagggatcagctgcttggcttctgctggaggtgcctccctgtgggggcgcagcctgcctcctgctctcagttcctcgccagaggctgctgcccttcctggctgggctcaggaggctccttgtaggcatatgatggggagggggtgcccctacccacctccaagaggctacagccctgtgtctggccatgtgagccctggcctttcaccgggttgctggtttcttttctgtggggcccagacttctgtaaagcacacagatgtgggtaagatgaaaaactgtggcccaacagggcttaaccctatggatggtgggatttttatccaatagtttggcctggtgtgcccacaggatgggaacagggaggcaccatcaacacttgtcatgttaatgagcttttctttgctcgaggtgttcagagacaagtcctgtgtctacctgcgtcagcctgaaaatggaaatattggctgttgactcttgtcatttagtgacttcatccccctcccctcagtctgatcttgtctaagtagaatccaggcgttagttggaatcatatcataagtatccatgaagaaaacgtcatgatctgcctcggagtggggagaaacaggccctccttgtccttgtgcagcccccacttttgtcctggctgtgggtggccatccattttgagcacctctgccaggctgcagacctggaggcgaagggagtgtggaagaggagggtgtaagggtcgacgcgtgctgaatgggaggtgcaggtcctcggtgcgttggcagaagaggcttctggagtttcgaggccatacctcctttcaagagctttggatttggggcgacttccctgggtctaggggagtgttcctgtcccctgtcaggtcagccctgcggagccactccacccctcttccccttcccctggatttcctgacatagatggtgtgttcatgtgcaggtgtgagtgtgctgtccttctgatctctgttgatcccgctttcctactgagagggtggtggagagggtggtggtctcttctcacctcagtttttctgacacagcgaatcgagggctttggccaaggccaggtctctcaaacttgtccgccaagtaaaccatgatatatgtcttcccttccaccttaactttgccccaactcctcttttatcctaacatggacgctcagatttcagaggaatacccagcagggacaggtcagctctcaccaggagagtgaggcccctggctgctgctcggggtggcactggtgttgctggctcagctcttggtgcatgtttcagatatgtgtgtacacttctgactggtgatcagggcccggcccacggccctgagcggctgcagcctgctttgggacgatggtcaggtcccatgttgtccctgctgcctccctctggagtggccacttggccaaagcgcccatccacatctggaaagtcggagccgcagcctgctgcaccgtttccgctctgggatcttgtgagttacttttttaggctgtggtttggtgaaaggaaccaacacattaacgatttttcccccagaagccactgaataattctttttggtgtatttttgccttcctgttggctgtctggccttggagcaggtcgggagagtagagtacataatcagtgccacacagaggcagggcgtgtctgagagactaatgcctgtcctgcctctggcctgtgtcctgggtgtgtaccatacctgctgggccagtcccacacatttccaccctgcccctggagcagcagctttgataccatgggtgtcccttgagtctgagctagagtgtgtccccgataaactgtgagacctccctgttcttggtgaccccagttgggctttggcccctccagcaaccttgtgtcccagccctgcccttcttcccaccccctcaatctgctagtccctgaagcctttaaccaaacgggagtgggcacagaaagccttctcctggcaacaggacaagggctgcccgcgtgtccagccctgttgctctcctggcgctgagaggtgggtccaagcagagttgatcagtccctgcctgccctgcctaggtctagccaggggaggttgtgtgtgtgggagaagaccccgggatctgctggggtgggatggaggttattaaagatctaagtgaggaggggctggggtttggatgcggggtgaggcccgagcgctcacacttcgtgtagggcgggcaggggcctgacctcttgcagggcagtggccttggtgccctacccctgccctgcgcagtatttattgctaaattattgtccaggaggggcagcactgggcctggccccccgggtatttattgctgtacatagtgtatgtttgtgatatataaggttttctttattttgtatatgatcaataaaccttttaaagagaaaaaa

SEQ ID NO: 29261 - DNA, 2068 bp, Homo Sapiens
ggtggttcttgcccgtgttgtgtgtgtgtgtgagtgagagagcgagtgagtgagtgagtgagtgtgtgtgtgggggggactcggcttgttgttgtcggtgacttccccctccccttcaccccttcccctccccgccgccgctgcagtggccgctccctgggccgtaggaaatgagcgataacgatgacatcgaggtggagagcgacgaagagcaaccgaggtttcaatctgcggctgacaaacgggctcatcataatgcactggaacgaaaacgtagggaccacatcaaagacagctttcacagtttgcgggactcagtcccatcactccaaggagagaaggcatcccgggcccaaatcctagacaaagccacagaatatatccagtatatgcgaaggaaaaaccacacacaccagcaagatattgacgacctcaagcggcagaatgctcttctggagcagcaagtccgtgcactggagaaggcgaggtcaagtgcccaactgcagaccaactacccctcctcagacaacagcctctacaccaacgccaagggcagcaccatctctgccttcgatgggggctcggactccagctcggagtctgagcctgaagagccccaaagcaggaagaagctccggatggaggccagctaagccactcggggcaggccagcaataaaaactgtctgtctccatcgtctcatcctcctttcagttcgttggtagagccctcagaaccatttaagagactctttatttttctctttctcccttttttttttaaatttttatttttacgtagaagctcttggacaacagctctcgttctccttccccatttccactgtatattttttaatgtattcccttcagggattccctgtccccaacaggaatttttaaaccaaaacaccccaacttggcagctttttctgtggaggacagacggccggccggacctctgagcacatagtgtcctgcccaccctaccagctcctccagccctgccgggcacatgcccgggggacgcctgccctgcccaggtggcctcctggcccgccctcacctctgatagactttgtgaatctgaactgctctactttgagaagatgaccggtttggagtaatcagaatgaaccctcctcctttttaagggttttttttttttcctttttctaaaaagctatgtatcgctcctattgaaagaccagatccttagagaagtttgtggtataaaaaggaagtggggacagattcgcagcacagagtcgctggcatgtttcactcctgcttctctcagccagctgtttaagcctgcggcgccagcctcacggagggccgtgtgacactctcgtggtatgtatgggagatggcagcagtgaagcagcagccaccagggagtggccatttggggttgggacagggagggtgttttgggtggcatagaggttttgtattgagggccagtgatgatgttttgatatttatttcctgctacttaaatttgaatctgagtgaattgtacctatttctgatgatgtcggtcttgcaaagcgacagattcataaagtaatgatgaaatctttctttcttcccgtgtgtatttctaagaaatagagccaactgattttgtatgtaaataccaagagcaatttacctggtactaaacccgcaccccagtgcggacccttcccagccctcatcccacttcctttcctactgtcctggaacctgtctccattgtgtgatccagccctggttctggctgtggtcagcagatgccagtgaagggttttgtgtgtttaggcctcatttctttgtctttttcctactccgttcctggcatttgctgatttctagtgtatactctgtagtctcagttcgtgtttgattccattccatggaaataaaaagtatgttgtacatactgccgaagaattgtcttgcaagttaaggcttccccctttactataagactataaataaaaacttattttatccttaaaaaaaaaaaaaaaaaaaaaaaaaaaaaaaaaaaaaaaaaaaaaaaaaaaaaaaaaaaaaaaaaa

SEQ ID NO: 29262 - DNA, 3198 bp, Homo Sapiens
atttgaggtgttctgaccagaagaagacagagcggatgatcattcattcaccacgttgacaacctcgcctgtgattgacagctggagtggcagaaagccatgagatttggtagttgggtctgaggggcgctcttttttttccttttctttctttctttctttttttttttttaaactgatttttgggggagagaagatctgcttttttttgcccccgctgctgtcttggaaacggagcgcttttatgctcagtgactcgggcgctttgcttcaggtcccgtagaccgaagatctgggaccagtagctcacgttgctggagacgttaagggatttttcgtcgtgcttttttttttttttttttttttttccgggggagtttgaatatttgtttcttttcacactggccttaaagaggatatattagaagttgaagtaggaagggagccagagaggccgatggcgcaaaggtacgacgatctaccccattacgggggcatggatggagtaggcatcccctccacgatgtatggggacccgcatgcagccaggtccatgcagccggtccaccacctgaaccacgggcctcctctgcactcgcatcagtacccgcacacagctcataccaacgccatggcccccagcatgggctcctctgtcaatgacgctttaaagagagataaagatgccatttatggacaccccctcttccctctcttagcactgatttttgagaaatgtgaattagctacttgtaccccccgcgagccgggggtggcgggcggggacgtctgctcgtcagagtcattcaatgaagatatagccgtgttcgccaaacagattcgcgcagaaaaacctctattttcttctaatccagaactggataacttgatgattcaagccatacaagtattaaggtttcatctattggaattagagaaggtacacgaattatgtgacaatttctgccaccggtatattagctgtttgaaagggaaaatgcctatcgatttggtgatagacgatagagaaggaggatcaaaatcagacagtgaagatataacaagatcagcaaatctaactgaccagccctcttggaacagagatcatgatgacacggcatctactcgttcaggaggaaccccaggcccttccagcggtggccacacgtcacacagtggggacaacagcagtgagcaaggtgatggcttggacaacagtgtagcttcccccagcacaggtgacgatgatgaccctgataaggacaaaaagcgtcacaaaaagcgtggcatctttcccaaagtagccacaaatatcatgagggcgtggctgttccagcatctaacacacccttacccttctgaagaacagaaaaagcagttggcacaagacacgggactcaccatccttcaagtgaacaattggtttattaatgcccggagaagaatagtgcagcccatgatagaccagtccaaccgagcagtaagtcaaggaacaccttataatcctgatggacagcccatgggaggtttcgtaatggacggtcagcaacatatgggaattagagcaccaggacctatgagtggaatgggcatgaatatgggcatggaggggcagtggcactacatgtaaccttcatctagttaaccaatcgcaaagcaagggggaaggctgcaaagtatgccaggggagtatgtagcccggggtggtccaatgggtgtgagtatgggacagccaagttatacccaaccccagatgcccccccatcctgctcagctgcgtcatgggccccccatgcatacgtacattcctggacaccctcaccacccaacagtgatgatgcatggaggaccgccccaccctggaatgccaatgtcagcatcaagccccacagttcttaatacaggagacccaacaatgagtggacaagtcatggacattcatgctcagtagcttaagggaatatgcattgtctgcaatggtgactgatttcaaatcatgttttttctgcaatgactgtggagttccattcttggcatctactctggaccaaggagcatccctaattcttcatagggacctttaaaaagcaggaaataccaactgaagtcaatttgggggacatgctaaataactatataagacattaagagaacaaagagtgaaatattgtaaatgctattatactgttatccatattacgttgtttcttatagattttttaaaaaaaatgtgaaatttttccacactatgtgtgttgtttccatagctcttcacttcctccagaagcctccttacattaaaaagccttacagttatcctgcaagggacaggaaggtctgatttgcaggatttttagagcattaaaataactatcaggcagaagaatctttcttctcgcctaggatttcagccatgcgcgcgctctctctctttctctctcttttcctctctctccctctttctagcctggggcttgaatttgcatgtctaattcatttactcaccatatttgaattggcctgaacagatgtaaatcgggaaggatgggaaaaactgcagtcatcaacaatgattaatcagctgttgcaggcagtgtcttaaggagactggtaggaggaggcatggaaaccaaaaggccgtgtgtttagaagcctaattgtcacatcaagcatcattgtccccatgcaacaaccaccaccttatacatcacttcctgttttaagcagctctaaaacatagactgaagatttatttttaatatgttgactttatttctgagcaaagcatcggtcatgtgtgtattttttcatagtcccaccttggagcatttatgtagacattgtaaataaattttgtgcaaaaaggactggaaaaatgaactgtattattgcaatttttttttgtaaaagtagcagtttggtatgagttggcatgcatacaagatttactaagtgggataagctaattatactttttgttgtggataaacaaatgcttgttgatagcctttttctatcaagaaaccaaggagctaattattaataacaatcattgcacactgagtcttagcgtttctgatggaaacagtttggattgtataataacgccaagcccagttgtagtcgtttgagtgcagtaatgaaatctgaatctaaaataaaaacaagattatttttgtcaaaaaaaaaaaaaaaaaa

SEQ ID NO: 29263 - DNA, 5078 bp, Homo Sapiens
taatactcctttattccctgttttaaaaatttttttaaatttgatacaataattatacataataatggagtaccatgtgagattcaatccacatatacattgtgaaatgatcaaattaggatagttagcatgcacatcacccccaaataattattacttttgtggtgagaacacttaaaattgtctcttttagaaatatacgttattattaaccatagtcacctcgctgtgcaatagaacaccagaacttattcctcctaaatgtaactttttacccattgaccactccctcctcacccccctctctcctccccacccctggtaaccactgttctgttatctcctatgatagcaactttttagcttctgcatgtgagattgtacggtagttgcctttctgtgcctggattatttcatttagcataatgtccttcgggtatatccctgttgctgcaaaagacaggatttctctctctttttctggttgaatagtattccattgtcagagaatgttgtaagactaggaaaggaacactgcaggctggagccctggggaaatggtctgaggcaggtggtgggactagagctggggtctggcaaacaggctgggtttgattgtcagcataatagagagcactcatgtgccagctgggtgggaggagcagccgagtgaagaaggggaagcctctcaggaagcatgtgcagggtttatggtaatgagcagaccagcaggtacgtagtgggagaggggtgtgatggggcagaggaacttacgttatgatagtacaagacagaggttgagcctcattttaataggcattgtggtgggtgttgaatagtgatggaatgtatgggtctggaatcaggctgcctggtcaagggctctgaaacatgagtgtgcatcagaatcacctcgaggcttgttaaaggataggctgtggaccacatctcctcagttgctgattcagtgggtgtgggtggggcctgagaattcacatttcccactggtgatgctgctgttactgattgggaccacatttggggaacactggtctagaattgagaggttggcaaaccttctctgttaagaggtagatagtaaatattttaggccttctgggctacaaagagtatctgttacatattttttattgcttttcatgacccattaagcatatatatatcattctctgccatatacaaacaggctgttgggggagtgaggatgatgtagggaaggtggggcatggtttaataacccctgggccatgcctagatgatcagtcctctgccacatagctggctgacctttgccaagttaatcaccttttacctttattttctcatgtttctaataaaacagagacgataatattcatacttcttaccatatagaacttctgaggattcagtgagcaaagccacaaaagatggtatgtcacaatatctgggatatagctagaatttataatttatttttactctgttgataggcaatgggaaaacagtaagaggcagaccaacagtgatccagggctctgaaagctaattgcttcaagatcctgctaccattttcttttgggccgcttgcaaagaagaatcctttgactgaagcatgtatgtacactctgaagtacagcctgggttagtctcttataagggatcggatcattgctcagctctcccttgagtggcacttagaaaatggcgctattcgtaagctgactggtattgggcccaggactctggctgaaggggtgggcatgctggtaaccatttgcaacctatgctcaggtcctacttgttgggaagccctgattgagaagagtggcctggtctgtgctggcattagataggatctggctgcattaatattgaaactactctgccttttaatgtctcattttgcctcatggtgggagtgaaagtgagaaccacagaaaatctgcctgccaggtgttccacatttcttgtgctacagcatgcaagtgagcagtgaggtgtaccttttcctcatgtagctgggaaagcaatacccctgcttgtacctctggcatatcttctctgtgctggtgcacctagagaggttgcctggtggccctgagagagccatctcatcactaaacactgatggtgaaaagctggccatgctcaaataagatgtagcaatctacctcttctttgtctagttacccccaagggggcatccactttcttgctcacctcaccagttgcatgttctagtccttgccagaagcacataataatgactttgtaagcttaagttacaggcacacaaaagggcctgatggtgatatgactccaccctccccgtttttgctgacattccgccaaatatccttctgtctcctccccaccttgcaaaacaaacttcctgttttgaatttggtccaggctggaacagccccaccacacctgttaacacacgcagacgcacacttcccccttcataattgcttagcttcttgttgcctagccagatttcccctcagcttacagttcctgaatcataagatattgaaccagcaaatttaagagttgacattttacttagaggtattcaagtgaaaacatggcttctggtttattttgctgtattgtgccatgaccacttggctaattcttctcctccttcacatcagaatggaagtgaggaaaggcaaccagctgacacaggagccagagtgagaccagcagactctcacactcaacctacaccatgaatttgtgtctatcttctacgcgttaagagccaaggacaggtgaagttgccagagagcaatggctctcttcactccgtggaagttgtcctctcagaagctgggctttttcctggtgacttttggcttcatttggggtatgatgcttctgcactttaccatccagcagcgaactcagcctgaaagcagctccatgctgcgcgagcagatcctggacctcagcaaaaggtacatcaaggcactggcagaagaaaacaggaatgtggtggatgggccatacgctggagtcatgacagcttatgatctgaagaaaacccttgctgtgttattagataacattttgcagcgcattggcaagttggagtcgaaggtggacaatcttgttgtcaatggcaccggaacaaactcaaccaactccactacagctgttcccagcttggttgcacttgagaaaattaatgtggcagatatcattaacggagctcaagaaaaatgtgtattgcctcctatggacggctaccctcactgtgagggaaagatcaagtggatgaaagacatgtggcgttcagatccctgctacgcagactatggagtggatggatccacctgctctttttttatttacctcagtgaggttgaaaattggtgtcctcatttaccttggagagcaaaaaatccctacgaagaagctgatcataattcattggcggaaattcgtacagattttaatattctctacagtatgatgaaaaagcatgaagaattccggtggatgagactacggatccggcgaatggctgacgcatggatccaagcaatcaagtccctggcagaaaagcagaaccttgaaaagagaaagcggaagaaagtcctcgttcacctgggactcctgaccaaggaatctggatttaagattgcagagacagctttcagtggtggccctcttggtgaattagttcaatggagtgatttaattacatctctgtacttactgggccatgacattaggatttcagcttcactggctgagctcaaggaaatcatgaagaaggttgtaggaaaccgatctggctgcccaactgtaggagacagaattgttgagctcatttacattgatattgtaggacttgctcaattcaagaaaactcttggaccatcctgggttcattaccagtgcatgctccgagtccttgattcatttggtactgaacccgaatttaatcatgcaaattatgcccaatcgaaaggccacaagaccccttggggaaaatggaatctgaaccctcagcagttttataccatgttccctcataccccagacaacagctttctggggtttgtggttgagcagcacctgaactccagtgatatccaccacattaatgaaatcaaaaggcagaaccagtcccttgtgtatggcaaagtggatagcttctggaagaataagaagatctacttggacattattcacacatacatggaagtgcatgcaactgtttatggctccagcacaaagaatattcccagttacgtgaaaaaccatggtatcctcagtggacgggacctgcagttccttcttcgagaaaccaagttgtttgttggacttgggttcccttacgagggcccagctcccctggaagctatcgcaaatggatgtgcttttctgaatcccaagttcaacccacccaaaagcagcaaaaacacagactttttcattggcaagccaactctgagagagctgacatcccagcatccttacgctgaagttttcatcgggcggccacatgtgtggactgttgacctcaacaatcaggaggaagtagaggatgcagtgaaagcaattttaaatcagaagattgagccatacatgccatatgaatttacgtgcgaggggatgctacagagaatcaatgctttcattgaaaaacaggacttctgccatgggcaagtgatgtggccacccctcagcgccctacaggtcaagcttgctgagcccgggcagtcctgcaagcaggtgtgccaggagagccagctcatctgcgagccttctttcttccagcacctcaacaaggacaaggacatgctgaagtacaaggtgacctgccaaagctcagagctggccaaggacatcctggtgccctcctttgaccctaagaataagcactgtgtgtttcaaggtgacctcctgctcttcagctgtgcaggcgcccaccccaggcaccagagggtctgcccctgccgggacttcatcaagggccaggtggctctctgcaaagactgcctatagcagctacctgctcagccctgcaccatgctgctggggaagacagtggcccc

SEQ ID NO: 29264 - DNA, 12515 bp, Homo Sapiens
ctaccgggcggaggtgagcgcggcgccggctcctcctgcggcggactttgggtgcgacttgacgagcggtggttcgacaagtggccttgcgggccggatcgtcccagtggaagagttgtaaatttgcttctggccttcccctacggattatacctggccttcccctacggattatactcaacttactgtttagaaaatgtggcccacgagacgcctggttactatcaaaaggagcggggtcgacggtccccactttcccctgagcctcagcacctgcttgtttggaaggggtattgaatgtgacatccgtatccagcttcctgttgtgtcaaaacaacattgcaaaattgaaatccatgagcaggaggcaatattacataatttcagttccacaaatccaacacaagtaaatgggtctgttattgatgagcctgtacggctaaaacatggagatgtaataactattattgatcgttccttcaggtatgaaaatgaaagtcttcagaatggaaggaagtcaactgaatttccaagaaaaatacgtgaacaggagccagcacgtcgtgtctcaagatctagcttctcttctgaccctgatgagaaagctcaagattccaaggcctattcaaaaatcactgaaggaaaagtttcaggaaatcctcaggtacatatcaagaatgtcaaagaagacagtaccgcagatgactcaaaagacagtgttgctcagggaacaactaatgttcattcctcagaacatgctggacgtaatggcagaaatgcagctgatcccatttctggggattttaaagaaatttccagcgttaaattagtgagccgttatggagaattgaagtctgttcccactacacaatgtcttgacaatagcaaaaaaaatgaatctcccttttggaagctttatgagtcagtgaagaaagagttggatgtaaaatcacaaaaagaaaatgtcctacagtattgtagaaaatctggattacaaactgattacgcaacagagaaagaaagtgctgatggtttacagggggagacccaactgttggtctcgcgtaagtcaagaccaaaatctggtgggagcggccacgctgtggcagagcctgcttcacctgaacaagagcttgaccagaacaaggggaagggaagagacgtggagtctgttcagactcccagcaaggctgtgggcgccagctttcctctctatgagccggctaaaatgaagacccctgtacaatattcacagcaacaaaattctccacaaaaacataagaacaaagacctgtatactactggtagaagagaatctgtgaatctgggtaaaagtgaaggcttcaaggctggtgataaaactcttactcccaggaagctttcaactagaaatcgaacaccagctaaagttgaagatgcagctgactctgccactaagccagaaaatctctcttccaaaaccagaggaagtattcctacagatgtggaagttctgcctacggaaactgaaattcacaatgagccatttttaactctgtggctcactcaagttgagaggaagatccaaaaggattccctcagcaagcctgagaaattgggcactacagctggacagatgtgctctgggttacctggtcttagttcagttgatatcaacaactttggtgattccattaatgagagtgagggaatacctttgaaaagaaggcgtgtgtcctttggtgggcacctaagacctgaactatttgatgaaaacttgcctcctaatacgcctctcaaaaggggagaagccccaaccaaaagaaagtctctggtaatgcacactccacctgtcctgaagaaaatcatcaaggaacagcctcaaccatcaggaaaacaagagtcaggttcagaaatccatgtggaagtgaaggcacaaagcttggttataagccctccagctcctagtcctaggaaaactccagttgccagtgatcaacgccgtaggtcctgcaaaacagcccctgcttccagcagcaaatctcagacagaggttcctaagagaggaggagaaagagtggcaacctgccttcaaaagagagtgtctatcagccgaagtcaacatgatattttacagatgatatgttccaaaagaagaagtggtgcttcggaagcaaatctgattgttgcaaaatcatgggcagatgtagtaaaacttggtgcaaaacaaacacaaactaaagtcataaaacatggtcctcaaaggtcaatgaacaaaaggcaaagaagacctgctactccaaagaagcctgtgggcgaagttcacagtcaatttagtacaggccacgcaaactctccttgtaccataataatagggaaagctcatactgaaaaagtacatgtgcctgctcgaccctacagagtgctcaacaacttcatttccaaccaaaaaatggactttaaggaagatctttcaggaatagctgaaatgttcaagaccccagtgaaggagcaaccgcagttgacaagcacatgtcacatcgctatttcaaattcagagaatttgcttggaaaacagtttcaaggaactgattcaggagaagaacctctgctccccacctcagagagttttggaggaaatgtgttcttcagtgcacagaatgcagcaaaacagccatctgataaatgctctgcaagccctcccttaagacggcagtgtattagagaaaatggaaacgtagcaaaaacgcccaggaacacctacaaaatgacttctctggagacaaaaacttcagatactgagacagagccttcaaaaacagtatccactgtaaacaggtcaggaaggtctacagagttcaggaatatacagaagctacctgtggaaagtaagagtgaagaaacaaatacagaaattgttgagtgcatcctaaaaagaggtcagaaggcaacactactacaacaaaggagagaaggagagatgaaggaaatagaaagaccttttgagacatataaggaaaatattgaattaaaagaaaacgatgaaaagatgaaagcaatgaagagatcaagaacttgggggcagaaatgtgcaccaatgtctgacctgacagacctcaagagcttgcctgatacagaactcatgaaagacacggcacgtggccagaatctcctccaaacccaagatcatgccaaggcaccaaagagtgagaaaggcaaaatcactaaaatgccctgccagtcattacaaccagaaccaataaacaccccaacacacacaaaacaacagttgaaggcatccctggggaaagtaggtgtgaaagaagagctcctagcagtcggcaagttcacacggacgtcaggggagaccacgcacacgcacagagagccagcaggagatggcaagagcatcagaacgtttaaggagtctccaaagcagatcctggacccagcagcccgtgtaactggaatgaagaagtggccaagaacgcctaaggaagaggcccagtcactagaagacctggctggcttcaaagagctcttccagacaccaggtccctctgaggaatcaatgactgatgagaaaactaccaaaatagcctgcaaatctccaccaccagaatcagtggacactccaacaagcacaaagcaatggcctaagagaagtctcaggaaagcagatgtagaggaagaattcttagcactcaggaaactaacaccatcagcagggaaagccatgcttacgcccaaaccagcaggaggtgatgagaaagacattaaagcatttatgggaactccagtgcagaaactggacctggcaggaactttacctggcagcaaaagacagctacagactcctaaggaaaaggcccaggctctagaagacctggctggctttaaagagctcttccagactcctggtcacaccgaggaattagtggctgctggtaaaaccactaaaataccctgcgactctccacagtcagacccagtggacaccccaacaagcacaaagcaacgacccaagagaagtatcaggaaagcagatgtagagggagaactcttagcgtgcaggaatctaatgccatcagcaggcaaagccatgcacacgcctaaaccatcagtaggtgaagagaaagacatcatcatatttgtgggaactccagtgcagaaactggacctgacagagaacttaaccggcagcaagagacggccacaaactcctaaggaagaggcccaggctctggaagacctgactggctttaaagagctcttccagacccctggtcatactgaagaagcagtggctgctggcaaaactactaaaatgccctgcgaatcttctccaccagaatcagcagacaccccaacaagcacaagaaggcagcccaagacacctttggagaaaagggacgtacagaaggagctctcagccctgaagaagctcacacagacatcaggggaaaccacacacacagataaagtaccaggaggtgaggataaaagcatcaacgcgtttagggaaactgcaaaacagaaactggacccagcagcaagtgtaactggtagcaagaggcacccaaaaactaaggaaaaggcccaacccctagaagacctggctggctggaaagagctcttccagacaccagtatgcactgacaagcccacgactcacgagaaaactaccaaaatagcctgcagatcacaaccagacccagtggacacaccaacaagctccaagccacagtccaagagaagtctcaggaaagtggacgtagaagaagaattcttcgcactcaggaaacgaacaccatcagcaggcaaagccatgcacacacccaaaccagcagtaagtggtgagaaaaacatctacgcatttatgggaactccagtgcagaaactggacctgacagagaacttaactggcagcaagagacggctacaaactcctaaggaaaaggcccaggctctagaagacctggctggctttaaagagctcttccagacacgaggtcacactgaggaatcaatgactaacgataaaactgccaaagtagcctgcaaatcttcacaaccagacctagacaaaaacccagcaagctccaagcgacggctcaagacatccctggggaaagtgggcgtgaaagaagagctcctagcagttggcaagctcacacagacatcaggagagactacacacacacacacagagccaacaggagatggtaagagcatgaaagcatttatggagtctccaaagcagatcttagactcagcagcaagtctaactggcagcaagaggcagctgagaactcctaagggaaagtctgaagtccctgaagacctggccggcttcatcgagctcttccagacaccaagtcacactaaggaatcaatgactaatgaaaaaactaccaaagtatcctacagagcttcacagccagacctagtggacaccccaacaagctccaagccacagcccaagagaagtctcaggaaagcagacactgaagaagaatttttagcatttaggaaacaaacgccatcagcaggcaaagccatgcacacacccaaaccagcagtaggtgaagagaaagacatcaacacgtttttgggaactccagtgcagaaactggaccagccaggaaatttacctggcagcaatagacggctacaaactcgtaaggaaaaggcccaggctctagaagaactgactggcttcagagagcttttccagacaccatgcactgataaccccacagctgatgagaaaactaccaaaaaaatactctgcaaatctccgcaatcagacccagcggacaccccaacaaacacaaagcaacggcccaagagaagcctcaagaaagcagacgtagaggaagaatttttagcattcaggaaactaacaccatcagcaggcaaagccatgcacacgcctaaagcagcagtaggtgaagagaaagacatcaacacatttgtggggactccagtggagaaactggacctgctaggaaatttacctggcagcaagagacggccacaaactcctaaagaaaaggccaaggctctagaagatctggctggcttcaaagagctcttccagacaccaggtcacactgaggaatcaatgaccgatgacaaaatcacagaagtatcctgcaaatctccacaaccagacccagtcaaaaccccaacaagctccaagcaacgactcaagatatccttggggaaagtaggtgtgaaagaagaggtcctaccagtcggcaagctcacacagacgtcagggaagaccacacagacacacagagagacagcaggagatggaaagagcatcaaagcgtttaaggaatctgcaaagcagatgctggacccagcaaactatggaactgggatggagaggtggccaagaacacctaaggaagaggcccaatcactagaagacctggccggcttcaaagagctcttccagacaccagaccacactgaggaatcaacaactgatgacaaaactaccaaaatagcctgcaaatctccaccaccagaatcaatggacactccaacaagcacaaggaggcggcccaaaacacctttggggaaaagggatatagtggaagagctctcagccctgaagcagctcacacagaccacacacacagacaaagtaccaggagatgaggataaaggcatcaacgtgttcagggaaactgcaaaacagaaactggacccagcagcaagtgtaactggtagcaagaggcagccaagaactcctaagggaaaagcccaacccctagaagacttggctggcttgaaagagctcttccagacaccagtatgcactgacaagcccacgactcacgagaaaactaccaaaatagcctgcagatctccacaaccagacccagtgggtaccccaacaatcttcaagccacagtccaagagaagtctcaggaaagcagacgtagaggaagaatccttagcactcaggaaacgaacaccatcagtagggaaagctatggacacacccaaaccagcaggaggtgatgagaaagacatgaaagcatttatgggaactccagtgcagaaattggacctgccaggaaatttacctggcagcaaaagatggccacaaactcctaaggaaaaggcccaggctctagaagacctggctggcttcaaagagctcttccagacaccaggcactgacaagcccacgactgatgagaaaactaccaaaatagcctgcaaatctccacaaccagacccagtggacaccccagcaagcacaaagcaacggcccaagagaaacctcaggaaagcagacgtagaggaagaatttttagcactcaggaaacgaacaccatcagcaggcaaagccatggacaccccaaaaccagcagtaagtgatgagaaaaatatcaacacatttgtggaaactccagtgcagaaactggacctgctaggaaatttacctggcagcaagagacagccacagactcctaaggaaaaggctgaggctctagaggacctggttggcttcaaagaactcttccagacaccaggtcacactgaggaatcaatgactgatgacaaaatcacagaagtatcctgtaaatctccacagccagagtcattcaaaacctcaagaagctccaagcaaaggctcaagatacccctggtgaaagtggacatgaaagaagagcccctagcagtcagcaagctcacacggacatcaggggagactacgcaaacacacacagagccaacaggagatagtaagagcatcaaagcgtttaaggagtctccaaagcagatcctggacccagcagcaagtgtaactggtagcaggaggcagctgagaactcgtaaggaaaaggcccgtgctctagaagacctggttgacttcaaagagctcttctcagcaccaggtcacactgaagagtcaatgactattgacaaaaacacaaaaattccctgcaaatctcccccaccagaactaacagacactgccacgagcacaaagagatgccccaagacacgtcccaggaaagaagtaaaagaggagctctcagcagttgagaggctcacgcaaacatcagggcaaagcacacacacacacaaagaaccagcaagcggtgatgagggcatcaaagtattgaagcaacgtgcaaagaagaaaccaaacccagtagaagaggaacccagcaggagaaggccaagagcacctaaggaaaaggcccaacccctggaagacctggccggcttcacagagctctctgaaacatcaggtcacactcaggaatcactgactgctggcaaagccactaaaataccctgcgaatctcccccactagaagtggtagacaccacagcaagcacaaagaggcatctcaggacacgtgtgcagaaggtacaagtaaaagaagagccttcagcagtcaagttcacacaaacatcaggggaaaccacggatgcagacaaagaaccagcaggtgaagataaaggcatcaaagcattgaaggaatctgcaaaacagacaccggctccagcagcaagtgtaactggcagcaggagacggccaagagcacccagggaaagtgcccaagccatagaagacctagctggcttcaaagacccagcagcaggtcacactgaagaatcaatgactgatgacaaaaccactaaaataccctgcaaatcatcaccagaactagaagacaccgcaacaagctcaaagagacggcccaggacacgtgcccagaaagtagaagtgaaggaggagctgttagcagttggcaagctcacacaaacctcaggggagaccacgcacaccgacaaagagccggtaggtgagggcaaaggcacgaaagcatttaagcaacctgcaaagcggaacgtggacgcagaagatgtaattggcagcaggagacagccaagagcacctaaggaaaaggcccaacccctggaagacctggccagcttccaagagctctctcaaacaccaggccacactgaggaactggcaaatggtgctgctgatagctttacaagcgctccaaagcaaacacctgacagtggaaaacctctaaaaatatccagaagagttcttcgggcccctaaagtagaacccgtgggagacgtggtaagcaccagagaccctgtaaaatcacaaagcaaaagcaacacttccctgcccccactgcccttcaagaggggaggtggcaaagatggaagcgtcacgggaaccaagaggctgcgctgcatgccagcaccagaggaaattgtggaggagctgccagccagcaagaagcagagggttgctcccagggcaagaggcaaatcatccgaacccgtggtcatcatgaagagaagtttgaggacttctgcaaaaagaattgaacctgcggaagagctgaacagcaacgacatgaaaaccaacaaagaggaacacaaattacaagactcggtccctgaaaataagggaatatccctgcgctccagacgccaagataagactgaggcagaacagcaaataactgaggtctttgtattagcagaaagaatagaaataaacagaaatgaaaagaagcccatgaagacctccccagagatggacattcagaatccagatgatggagcccggaaacccatacctagagacaaagtcactgagaacaaaaggtgcttgaggtctgctagacagaatgagagctcccagcctaaggtggcagaggagagcggagggcagaagagtgcgaaggttctcatgcagaatcagaaagggaaaggagaagcaggaaattcagactccatgtgcctgagatcaagaaagacaaaaagccagcctgcagcaagcactttggagagcaaatctgtgcagagagtaacgcggagtgtcaagaggtgtgcagaaaatccaaagaaggctgaggacaatgtgtgtgtcaagaaaataacaaccagaagtcatagggacagtgaagatatttgacagaaaaatcgaactgggaaaaatataataaagttagttttgtgataagttctagtgcagtttttgtcataaattacaagtgaattctgtaagtaaggctgtcagtctgcttaagggaagaaaactttggatttgctgggtctgaatcggcttcataaactccactgggagcactgctgggctcctggactgagaatagttgaacaccgggggctttgtgaaggagtctgggccaaggtttgccctcagctttgcagaatgaagccttgaggtctgtcaccacccacagccaccctacagcagccttaactgtgacacttgccacactgtgtcgtcgtttgtttgcctatgttctccagggcacggtggcaggaacaactatcctcgtctgtcccaacactgagcaggcactcggtaaacacgaatgaatggataagcgcacggatgaatggagcttacaagatctgtctttccaatggccgggggcatttggtccccaaattaaggctattggacatctgcacaggacagtcctatttttgatgtcctttcctttctgaaaataaagttttgtgctttggagaatgactcgtgagcacatctttagggaccaagagtgactttctgtaaggagtgactcgtggcttgccttggtctcttgggaatacttttctaactagggttgctctcacctgagacattctccacccgcggaatctcagggtcccaggctgtgggccatcacgacctcaaactggctcctaatctccagctttcctgtcattgaaagcttcggaagtttactggctctgctcccgcctgttttctttctgactctatctggcagcccgatgccacccagtacaggaagtgacaccagtactctgtaaagcatcatcatccttggagagactgagcactcagcaccttcagccacgatttcaggatcgcttccttgtgagccgctgcctccgaaatctcctttgaagcccagacatctttctccagcttcagacttgtagatataactcgttcatcttcatttactttccactttgccccctgtcctctctgtgttccccaaatcagagaatagcccgccatcccccagatcacctgtctggattcctccccattcacccaccttgccaggtgcaggtgaggatggtgcaccagacagggtagctgtcccccaaaatgtgccctgtgcgggcagtgccctgtctccacgtttgtttccccagtgtctggcggggagccaggtgacatcataaatacttgctgaatgaatgcagaaatcagcggtactgacttgtactatattggctgccatgatagggttctcacagcgtcatccatgatcgtaagggagaatgacattctgcttgagggagggaatagaaaggggcagggaggggacatctgagggcttcacagggctgcaaagggtacagggattgcaccagggcagaacaggggagggtgttcaaggaagagtggctcttagcagaggcactttggaaggtgtgaggcataaatgcttccttctacgtaggccaacctcaaaactttcagtaggaatgttgctatgatcaagttgttctaacactttagacttagtagtaattatgaacctcacatagaaaaatttcatccagccatatgcctgtggagtggaatattctgtttagtagaaaaatcctttagagttcagctctaaccagaaatcttgctgaagtatgtcagcaccttttctcaccctggtaagtacagtatttcaagagcacgctaagggtggttttcattttacagggctgttgatgatgggttaaaaatgttcatttaagggctacccccgtgtttaatagatgaacaccacttctacacaaccctccttggtactgggggagggagagatctgacaaatactgcccattcccctaggctgactggatttgagaacaaatacccacccatttccaccatggtatggtaacttctctgagcttcagtttccaagtgaatttccatgtaataggacattcccattaaatacaagctgtttttactttttcgcctcccagggcctgtgcgatctggtcccccagcctctcttgggctttcttacactaactctgtacctaccatctcctgcctcccttaggcaggcacctccaaccaccacacactccctgctgttttccctgcctggaactttcccaccagccccaccaagatcatttcatccagtcctgagctcagcttaagggaggcttcttgcctgtgggttccctcacccccatgcctgtcctccaggctggggcaggttcttagtttgcctggaattgttctgtacctctttgtagcacgtagtgttgtgaaactaagccactaattgagtttctggctcccctcctggggttgtaagttttgttcattcatgagggccgactgtatttcctggttactgtatcccagtgaccagccacaggagatgtccaataaagtatgtgatgaaatggtcttaaaaaaaaaaaaaaaaaaaaaa

SEQ ID NO: 29265 - DNA, 5185 bp, Homo Sapiens; identical to SEQ ID NO: 28804

SEQ ID NO: 29266 - DNA, 2823 bp, Homo Sapiens
tgtgtcatttcctttcttcatgtaccagatgctgaaatactatgagataaagattttaggtttcaattgtaaagagagagaagtggataaatcagtgctgctttctttaggacgaaagaagtatggagcagtgggatcactttcacaatcaacaggaggacactgatagctgctccgaatctgtgaaatttgatgctcgctcaatgacagctttgcttcctccgaatcctaaaaacagcccttcccttcaagagaaactgaagtccttcaaagctgcactgattgccctttacctcctcgtgtttgcagttctcatccctctcattggaatagtggcagctcaactcctgaagtgggaaacgaagaattgctcagttagttcaactaatgcaaatgatataactcaaagtctcacgggaaaaggaaatgacagcgaagaggaaatgagatttcaagaagtctttatggaacacatgagcaacatggagaagagaatccagcatattttagacatggaagccaacctcatggacacagagcatttccaaaatttcagcatgacaactgatcaaagatttaatgacattcttctgcagctaagtaccttgttttcctcagtccagggacatgggaatgcaatagatgaaatctccaagtccttaataagtttgaataccacattgcttgatttgcagctcaacatagaaaatctgaatggcaaaatccaagagaataccttcaaacaacaagaggaaatcagtaaattagaggagcgtgtttacaatgtatcagcagaaattatggctatgaaagaagaacaagtgcatttggaacaggaaataaaaggagaagtgaaagtactgaataacatcactaatgatctcagactgaaagattgggaacattctcagaccttgagaaatatcactttaattcaaggtcctcctggacccccgggtgaaaaaggagatcgaggtcccactggagaaagtggtccacgaggatttccaggtccaataggtcctccgggtcttaaaggtgatcggggagcaattggctttcctggaagtcgaggactcccaggatatgccggaaggccaggaaattctggaccaaaaggccagaaaggggaaaaggggagtggaaacacattaagaccagtacaactcactgatcatattagggcagggccctcttaagatcaggtgggttgggcgggacatcctctgctaccatctcattaaaaggcccttcacctctggacaagtcatctgcacaactgacttccaagatccttttgtgactcctccaaatgactttggttcccgtgttgtacctgacttccacatggccttctctcctggtccctggtgctgtttgggcctctgctcccatgctcatacctcttcttactccaattactccaccatcacctctctcccctatcacccccagcctggacacctctcatgcacggactggagggctgctccaaccagtcctcagttctctgccacccattgacctagagtcttgaacccaatttaatttattgggttctaggagaactgctgtgttctcaccctaacttggaagagtgatgtttcagtcaagcaaagcgattcctaccatacaatataacacttgtgtgaggctctgtcctaaatatctcaattaccaatatgtggtttggtagtatttctcgccatgctttgctcatgcgcaatgagactacaactagggtgtaaattttaagtatcccatctaaaactcatacaatgataggaaaaatccatttgtttttcatttgatttttactgaggaatcagctcaatcttcaatgaatactggtctctttccaaagcatttttgatcaaagtaaagactgagtcaagggctttttttttttctttttcttgttttaagagacagagccttgttctattgcacaggctggactacacgcattcacctagagtctagaacacaatttaatttattgggttctaggagaactgtcatgagtattgataatatgagagttctttatattcaaacattattctcaaccagagatagggatgtcatagaagaaaatccattcattcaatcattaattcacatgtccattatgtacctccatgagctggacataacagctaataagagataattgtctctggttttacagagctaattgtccctaagagatgtagacaaatgaacaagcaattacaatacatctaagctatactgggggaggaacagggctggataggtatgcagaggagataaaaaaattttaattccttagaatattttttaaaaattgattcttattttaccttctcatcttcttattttccaaattacagcatatatatatatttttttaagttttgaagtgtagtcgagcttgggcaatttatccaacccatttaaaccaaaaataaaacttttcatgtattacctggtcatttcaaacaaaaatattttgatcatgaaaaagaataccaatattcttttgttctaaaaatctcttatgggattacatgttatatttttggtttctctctactgatcaacagactacattttcacaactcttctttcctttacgttttaacacacagacccaagattcatactattaagattctagtagaactctagatggtatgcctctgtgtatctcagcatttttattcccactcttgtataatgaacatgttaacacctacctcacagggttgttgtgaggatcaagtaagatattgtgtgtgtgaagatgctctgtgaaatcataaagtcctttaaagatgt

SEQ ID NO: 29267 - DNA, 3428 bp, Homo Sapiens
cgcgcggccaggccctcttagccctctgccgtttggggggcacgggtgaacctgccgccccactcccaccccgccccgccccgcccgtacagacaaatcggaagggacgagcctgccctttgaaagggttttttttcttgctcctgcggagggcgccccagccatggccctcaggagctccctagaccccgcagggactgccctccatcccggccgccggggcccgccctctgcatcccgcgggcagcctgtgtgaagcggcctcccgcagcccccggcccctcccccatggaggaggaggagggggcggtggccaaggagtggggcacgacccccgcggggcccgtctggaccgcggtgttcgactacgaggcggcgggcgacgaggagctgaccctgcggaggggcgatcgcgtccaggtgctttcccaagactgtgcggtgtccggcgacgagggctggtggaccgggcagctccccagcggccgcgtgggcgtcttccccagcaactacgtggcccccggcgcccccgctgcacccgcgggcctccagctgccccaggagatccccttccacgagctgcagctagaggagatcatcggtgtggggggctttggcaaggtctatcgggccctgtggcgtggcgaggaggtggcagtcaaggccgcccggctggaccctgagaaggacccggcagtgacagcggagcaggtgtgccaggaagcccggctctttggagccctgcagcaccccaacataattgcccttaggggcgcctgcctcaaccccccacacctctgcctagtgatggagtatgcccggggtggtgcactgagcagggtgctggcaggtcgccgggtgccacctcacgtgctggtcaactgggctgtgcaggtggcccggggcatgaactacctacacaatgatgcccctgtgcccatcatccaccgggacctcaagtccatcaacatcctgatcctggaggccatcgagaaccacaacctcgcagacacggtgctcaagatcacggacttcggcctcgcccgcgagtggcacaagaccaccaagatgagcgctgcggggacctacgcctggatggcgccggaggttatccgtctctccctcttctccaaaagcagtgatgtctggagcttcggggtgctgctgtgggagctgctgacgggggaggtcccctaccgtgagatcgacgccttggccgtggcgtatggcgtggctatgaataagctgacgctgcccattccctccacgtgccccgagccctttgcccgcctcctggaggaatgctgggacccagacccccacgggcggccagatttcggtagcatcttgaagcggcttgaagtcatcgaacagtcagccctgttccagatgccactggagtccttccactcgctgcaggaagactggaagctggagattcagcacatgtttgatgaccttcggaccaaggagaaggagcttcggagccgtgaggaggagctgctgcgggcggcacaggagcagcgcttccaggaggagcagctgcggcggcgggagcaggagctggcagaacgtgagatggacatcgtggaacgggagctgcacctgctcatgtgccagctgagccaggagaagccccgggtccgcaagcgcaagggcaacttcaagcgcagccgcctgctcaagctgcgggaaggcggcagccacatcagcctgccctctggctttgagcataagatcacagtccaggcctctccaactctggataagcggaaaggatccgatggggccagcccccctgcaagccccagcatcatcccccggctgagggccattcgcctgactcccgtggactgtggtggcagcagcagtggcagcagcagtggaggaagtgggacatggagccgcggtgggcccccaaagaaggaagaactggtcgggggcaagaagaagggacgaacgtgggggcccagctccaccctgcagaaggagcgggtgggaggagaggagaggctgaaggggctgggggaaggaagcaaacagtggtcatcaagtgcccccaacctgggcaagtcccccaaacacacacccatcgcccctggcttcgccagcctcaatgagatggaggagttcgcggaggcagaggatggaggcagcagcgtgcccccttccccctactcgaccccgtcctacctctcagtgccactgcctgccgagccctccccgggggcgcgggcgccgtgggagccgacgccgtccgcgccccccgctcggtggggacacggcgcccggcggcgctgcgacctggcgctgctaggctgcgccacgctgctgggggctgtgggcctgggcgccgacgtggccgaggcgcgcgcggccgacggtgaggagcagcggcgctggctcgacggcctcttctttccccgcgccggccgcttcccgcggggcctcagcccacccgcgcgtccccacggccgccgcgaagacgtgggccccggcctgggcctggcgccctcggccaccctcgtgtcgctgtcgtccgtgtccgactgcaactccacgcgttcactgctgcgctctgacagtgacgaggccgcaccggccgcgccctccccaccaccctccccgcccgcgcccacacccacgccctcgcccagcaccaaccccctggtggacctggagctggagagcttcaagaaggacccccgccagtcgctcacgcccacccacgtcacggctgcatgcgctgtgagccgcgggcaccggcggacgccatcggatggggcgctggggcagcgggggccgcccgagcccgcgggccatggccctggccctcgtgaccttctggacttcccccgcctgcccgacccccaggccctgttcccagcccgccgccggccccctgagttcccaggccgccccaccaccctgacctttgccccgagacctcggccggctgccagtcgcccccgcttggacccctggaaactggtctccttcggccggacactcaccatctcgcctcccagcaggccagacactccggagagccctgggccccccagcgtgcagcccacactgctggacatggacatggaggggcagaaccaagacagcacagtgcccctgtgcggggcccacggctcccactaaggcctgcccaccaccgcccgcctgggcagccatgaatgtagcgccccaggccctgccccagcccgccatgccacaaggtgggggaggccctgggcaggatgttcactctatttattggggaaggagggaggggggggacacttaacttattcctttgtaccccagggggtggagccctgtgcccaccctgcactggggggagggtgggcagggatactcagggacagggcatcatgggggatttggcacaaaatggagcattaaaggtaacccct

SEQ ID NO: 29268 - DNA, 4541 bp, Homo Sapiens
ggatcctctagggtcccagctcgcctcgatggagctcctcccgccgctgcctcagtccttcctgttgctgctgctgttgcctgccaagcccgcggcgggcgaggactggcagtgcccgcgcaccccctacgcggcctctcgcgactttgacgtgaagtacgtggtgcccagcttctccgccggaggcctggtacaggccatggtgacctacgagggcgacagaaatgagagtgctgtgtttgtagccatacgcaatcgcctgcatgtgcttgggcctgacctgaagtctgtccagagcctggccacgggccctgctggagaccctggctgccagacgtgtgcagcctgtggcccaggaccccacggccctcccggtgacacagacacaaaggtgctggtgctggatcccgcgctgcctgcgctggtcagttgtggctccagcctgcagggccgctgcttcctgcatgacctagagccccaagggacagccgtgcatctggcagcgccagcctgcctcttctcagcccaccataaccggcccgatgactgccccgactgtgtggccagcccattgggcacccgtgtaactgtggttgagcaaggccaggcctcctatttctacgtggcatcctcactggacgcagccgtggctggcagcttcagcccacgctcagtgtctatcaggcgtctcaaggctgacgcctcgggattcgcaccgggctttgtggcgttgtcagtgctgcccaagcatcttgtctcctacagtattgaatacgtgcacagcttccacacgggagccttcgtatacttcctgactgtacagccggccagcgtgacagatgatcctagtgccctgcacacacgcctggcacggcttagcgccactgagccagagttgggtgactatcgggagctggtcctcgactgcagatttgctccaaaacgcaggcgccggggggccccagaaggcggacagccctaccctgtgctgcaggtggcccactccgctccagtgggtgcccaacttgccactgagctgagcatcgccgagggccaggaagtactatttggggtctttgtgactggcaaggatggtggtcctggcgtgggccccaactctgtcgtctgtgccttccccattgacctgctggacacactaattgatgagggtgtggagcgctgttgtgaatccccagtccatccaggcctccggcgaggcctcgacttcttccagtcgcccagtttttgccccaacccgcctggcctggaagccctcagccccaacaccagctgccgccacttccctctgctggtcagtagcagcttctcacgtgtggacctattcaatgggctgttgggaccagtacaggtcactgcattgtatgtgacacgccttgacaacgtcacagtggcacacatgggcacaatggatgggcgtatcctgcaggtggagctggtcaggtcactaaactacttgctgtatgtgtccaacttctcactgggtgacagtgggcagcccgtgcagcgggatgtcagtcgtcttggggaccacctactctttgcctctggggaccaggttttccaggtacctatccgaggccctggctgccgccacttcctgacctgtgggcgttgcctaagggcatggcatttcatgggctgtggctggtgtgggaacatgtgcggccagcagaaggagtgtcctggctcctggcaacaggaccactgcccacctaagcttactgagttccacccccacagtggacctctaaggggcagtacaaggctgaccctgtgtggctccaacttctaccttcacccttctggtctggtgcctgagggaacccatcaggtcactgtgggccaaagtccctgccggccactgcccaaggacagctcaaaactcagaccagtgccccggaaagactttgtagaggagtttgagtgtgaactggagcccttgggcacccaggcagtggggcctaccaacgtcagcctcaccgtgactaacatgccaccgggcaagcacttccgggtagacggcacctccgtgctgagaggcttctctttcatggagccagtgctgatagcagtgcaacccctctttggcccacgggcaggaggcacctgtctcactcttgaaggccagagtctgtctgtaggcaccagccgggctgtgctggtcaatgggactgagtgtctgctagcacgggtcagtgaggggcagcttttatgtgccacaccccctggggccacggtggccagtgtcccccttagcctgcaggtggggggtgcccaggtacctggttcctggaccttccagtacagagaagaccctgtcgtgctaagcatcagccccaactgtggctacatcaactcccacatcaccatctgtggccagcatctaacttcagcatggcacttagtgctgtcattccatgacgggcttagggcagtggaaagcaggtgtgagaggcagcttccagagcagcagctgtgccgccttcctgaatatgtggtccgagacccccagggatgggtggcagggaatctgagtgcccgaggggatggagctgctggctttacactgcctggctttcgcttcctacccccaccccatccacccagtgccaacctagttccactgaagcctgaggagcatgccattaagtttgagtatattgggctgggcgctgtggctgactgtgtgggtatcaacgtgaccgtgggtggtgagagctgccagcacgagttccggggggacatggttgtctgccccctgcccccatccctgcagcttggccaggatggtgccccattgcaggtctgcgtagatggtgaatgtcatatcctgggtagagtggtgcggccagggccagatggggtcccacagagcacgctccttggtatcctgctgcctttgctgctgcttgtggctgcactggcgactgcactggtcttcagctactggtggcggaggaagcagctagttcttcctcccaacctgaatgacctggcatccctggaccagactgctggagccacacccctgcctattctgtactcgggctctgactacagaagtggccttgcactccctgccattgatggtctggattccaccacttgtgtccatggagcatccttctccgatagtgaagatgaatcctgtgtgccactgctgcggaaagagtccatccagctaagggacctggactctgcgctcttggctgaggtcaaggatgtgctgattccccatgagcgggtggtcacccacagtgaccgagtcattggcaaaggccactttggagttgtctaccacggagaatacatagaccaggcccagaatcgaatccaatgtgccatcaagtcactaagtcgcatcacagagatgcagcaggtggaggccttcctgcgagaggggctgctcatgcgtggcctgaaccacccgaatgtgctggctctcattggtatcatgttgccacctgagggcctgccccatgtgctgctgccctatatgtgccacggtgacctgctccagttcatccgctcacctcagcggaaccccaccgtgaaggacctcatcagctttggcctgcaggtagcccgcggcatggagtacctggcagagcagaagtttgtgcacagggacctggctgcgcggaactgcatgctggacgagtcattcacagtcaaggtggctgactttggtttggcccgcgacatcctggacagggagtactatagtgttcaacagcatcgccacgctcgcctacctgtgaagtggatggcgctggagagcctgcagacctatagatttaccaccaagtctgatgtgtggtcatttggtgtgctgctgtgggaactgctgacacggggtgccccaccataccgccacattgacccttttgaccttacccacttcctggcccagggtcggcgcctgccccagcctgagtattgccctgattctctgtaccaagtgatgcagcaatgctgggaggcagacccagcagtgcgacccaccttcagagtactagtgggggaggtggagcagatagtgtctgcactgcttggggaccattatgtgcagctgccagcaacctacatgaacttgggccccagcacctcgcatgagatgaatgtgcgtccagaacagccgcagttctcacccatgccagggaatgtacgccggccccggccactctcagagcctcctcggcccacttgacttagttcttgggctggacctgcttagctgccttgagctaaccccaaggctgcctctgggccatgccaggccagagcagtggccctccaccttgttcctgccctttaactttcagaggcaataggtaaatgggcccattaggtccctcactccacagagtgagccagtgagggcagtcctgcaacatgtatttatggagtgcctgctgtggaccctgtcttctgggcacagtggactcagcagtgaccacaccaacactgacccttgaaccaataaaggaacaaatgactattaaagcacaaaaaaaaaa

SEQ ID NO: 29269 - DNA, 4937 bp, Homo Sapiens
ctccgcactgctcactcccgcgcagtgaggttggcacagccaccgctctgtggctcgcttggttcccttagtcccgagcgctcgcccactgcagattcctttcccgtgcagacatggcctctggcaccaccaccaccgccgtgaagattggaataattggtggaacaggcctggatgatccagaaattttagaaggaagaactgaaaaatatgtggatactccatttggcaagccatctgatgccttaattttggggaagataaaaaatgttgattgcgtcctccttgcaaggcatggaaggcagcacaccatcatgccttcaaaggtcaactaccaggcgaacatctgggctttgaaggaagagggctgtacacatgtcatagtgaccacagcttgtggctccttgagggaggagattcagcccggcgatattgtcattattgatcagttcattgacaggaccactatgagacctcagtccttctatgatggaagtcattcttgtgccagaggagtgtgccatattccaatggctgagccgttttgccccaaaacgagagaggttcttatagagactgctaagaagctaggactccggtgccactcaaaggggacaatggtcacaatcgagggacctcgttttagctcccgggcagaaagcttcatgttccgcacctggggggcggatgttatcaacatgaccacagttccagaggtggttcttgctaaggaggctggaatttgttacgcaagtatcgccatggcgacagattatgactgctggaaggagcacgaggaagcagtttcggtggaccgggtcttaaagaccctgaaagaaaacgctaataaagccaaaagcttactgctcactaccatacctcagatagggtccacagaatggtcagaaaccctccataacctgaagaatatggcccagttttctgttttattaccaagacattaaagtagcatggctgcccaggagaaaagaagacattctaattccagtcattttgggaattcctgcttaacttgaaaaaaatatgggaaagacatgcagctttcatgcccttgcctatcaaagagtatgttgtaagaaagacaagacattgtgtgtattagagactcctgaatgatttagacaacttcaaaatacagaagaaaagcaaatgactagtaaacatgtgggaaaaaatattacattttaagggggaaaaaaaaacccaccattctcttctccccctattaaatttgcaacaataaagggtggagggtaatctctactttcctatactgccaaagaatgtgaggaagaaatgggactctttggttatttattgatgcgactgtaaattggtacagtatttctggagggcaatttggtaaaatgcatcaaaagacttaaaaatacggacgtactttgtgctgggaactctacatctagcaatttctctttaaaaccatatcagagatgcatacaaagaattatatataaagaagggtgtttaataatgatagttataataataaataattgaaacaatctgaatcccttgcaattggaggtaaattatgtcttagttataattagattgtgaatcagccaactgaaaatcctttttgcatatttcaatgtcctaaaaagacacggttgctctatatatgaagtgaaaaaaggatatggtagcattttatagtactagttttgctttaaaatgctatgtaaatatacaaaaaaactagaaagaaatatatataaccttgttattgtatttgggggagggatactgggataatttttattttctttgaatctttctgtgtcttcacatttttctacagtgaatttaatcaaatagtaaagttgttgtaaaaataaaagtggatttagaaagatccagttcttgaaaacactgtttctggtaatgaagcagaatttaagttggtaatattaaggtgaatgtcatttaagggagttacatctttattctgctaaagaagaggatcattgatttctgtacagtcagaacagtacttgggtttgcaacagctttctgagaaaagctaggtgtttaatagtttaactgaaagtttaactatttaaaagactaaatgcacattttatggtatctgatattttaaaaagtaatgtttgattctcctttttatgagttaaattattttatacgagttggtaatttttgctttttaataaagtggaagcttgcttttttaactctttttttattgttattttatagaaatgctttttgttggccgggcacagttgctcatccatgtaatcccagcactgtgggaggccgagacgggtggatcacaaggtcaggagatcgagaccatcctggctaatgcgttgaaactccgtctctactaaaaatacaaaaaattagctgggcgtggtggtgggcacctgtagtcccagctactcaggaggctgaggcaggagaatggtgtgaacctgggaggtggagcttgcagtgagcagagcttgcagtgagacgagcttgtgccactgcactccagcctgggcaacagagtaagactcagtctcaaaaaaaaaaaaaagagtgaaatgctttttgtttgcttcagttttttatcatggggagatctttttcctcagaattgttttcttttcactgtaggctattacaggatacttcaggatcaagatacagaaccttttatttaaagagtttgtaaagtcaatgtgtttgtttgtgtctctgagattgacttcaagataataagctgctaattgtaaacaaaacagttaccctccagtattaatatgactcattagtgtgagccatttgggtcaagtatgattatgacccttggacttcctgatgtagtattaaatttcaactctggttatccattagcaatctgtagagaacttaatgaacctgaacccaggcttctctagctctggtaacgtgtgattgttttcactacaatatgatacatagatggtaccttacttttcctcattcttaataggtgtctaagaatgtcagggcaaaagtatgggcatttttcttgctatgttcagaaagtacagttctctccaacttgcagaggtacttttcttgattaaatagccttctctagcaacatcattttcagactaactaaatgaatgcagtatactcttttctttgttctcaatcattcactccttatgcaaagccaatataattttcctcataccttatgcttgaggatattgttgaagaacacttcctggaacacttctcacttgtgatgctgtactaattttttttttttaatttaagctagtatactaagtgaacaccatggtcagttgtgagcattttggtttccgcaaaggatggatggtgagcatcatgggaaagctgtagtttagtgacttagcccttagtgattaatagatttgcatgtacatagaagtctttgttggccttataatctgctgttatatttggcatggattttcatggttttgagaatgacatcctggccctgtggtccccgagggtcatggtccttgtgacctggcccctgttcactgcccccttcgctagcacgagttgctgtgcagggctggaggtagctaccatggcttgtttcaaggaaggaaactctggtacggtggcaccctcaggagtggaggacagtgaacttccttgaagagggagtgactaaggtgacctccaacctgccctgagccagctgccctgcaggtgccacgtgagcctgctctggcatccacaggatgctcctggagcctcttctctggctgctacctcagggcatggttgtggccccaccaacacctattttccaaataattattcattcttgtgacagtggcctgaacatgtttttaattttctcaacaagcatttagccagcacttatccagtgaaacaatttgataaggtttcaaggagtatctgatgggttaggaagtcacgaaatgaggagttcttgccacatttgcagagtccctccttgataaggtttggcggtgtccccacccaaatctcatgttgaattgtagttcccataatccccacatgttgtgggagggacccagtgggaggtaattaaatcatgggggtggttacccccacactgctgttctcatgatactgagttctcacaagtcctgtttgttttataaggggcttttcccccttttgctcaacacttcttcctgccatcatgtgaagaaggacgtgtttgtttccccttctgccacgattgtaagtttcctgaggccttcccagctatgtggaactgtgagttaattaaacctctttcctttataaattacccagtcatgggcagtcctttacagcagcatgagaatggactaatacactcctcaaatgttttgaagattgttgcaccttggaactaccagtgtgcacacaatctggctcaatgtatatattggcccagcaaggcaaagaactgaagttccaggatggaagaacctgtgttctcctcataatagtatagaataattcaagataggcaagaaggacagcagtaaatgaagaccatggaagaaaagaaggaatgccaaagatcgaggaaatctaccaagactagtagggtagtccagaagaagctgtttcagggcctgttgccagctatgcctttgagaacctcgggatcccaaagaatgaggggaatttcttcagaaagacaatctcggcatgcattatttctttgttttgaagattcactcatgttgcatgcatctgtagcttgtgccttttttattgcctagtagtattctgtcatatgcctatcttacaatttgattatctattcacctgttgatgaatgtttgaattttttccatttgaggaattttatgaataaagctgctataagcatgaaaaaaaaaaaaaaaaaa

SEQ ID NO: 29270 - DNA, 2961 bp, Homo Sapiens; identical to SEQ ID NO: 28928

SEQ ID NO: 29271 - DNA, 3938 bp, Homo Sapiens
ttgtcacaccgacctgcaccatctctcgcctgcctgtggggtttctgtcaactagtcgtggagggaaggagactctttaaagaataacatcttattgtggccatgccagaacccactaagaaagaggaaaatgaagtgccagccccagccccacccccggaagaaccaagtaaagagaaggaggccggaactacaccagcaaaagatgaagaggaagtctccccgcctagcgccttgcctccaggtttgggtagtcgggccctggagagaaaagattcagactggacccttgtcgaaactcctcctggggaggaacaagccaagcagaatgccaactcccagctgtccatcttgttcattgaaaaacctcaaggaggaacagtgaaagttggtgaagatatcaccttcatagccaaagtcaaggctgaagatcttctgagaaaacccactatcaaatggttcaaaggaaaatggatggacctggccagcaaagccgggaagcaccttcagctgaaggaaacctttgagaggcacagtcgggtgtacacatttgagatgcagatcatcaaggccaaagataactttgcaggaaattacagatgcgaggtcacctataaggataagtttgacagctgttcatttgatcttgaagtgcacgaatctactgggactactccaaacattgacatcagatctgctttcaagagaagtggagaaggtcaagaggatgcaggagaacttgactttagtggtctcctgaaacgtagggaggtgaagcagcaggaggaagaaccccaggtggacgtatgggagttgctgaagaacgcgaaacccagtgagtacgagaagatcgccttccagtatggaatcaccgacctgcgcggcatgctcaagcgactcaagcgcatgcgcagagaggagaagaagagcgcagcttttgcaaaaattcttgatcctgcatatcaggttgacaaaggaggcagagtgaggtttgttgtggagctggcagatccaaagttggaggtgaaatggtataaaaatggtcaagaaattcgacccagtaccaaatacatctttgaacacaaaggatgccagagaatcctgtttatcaataactgtcagatgacagatgattcagagtattatgtgacagccggtgatgagaaatgttccactgagctcttcgtaagagagcctccaattatggtgaccaaacagctggaagatacaactgcttattgtggggagagagtggaattagaatgtgaggtgtctgaagatgatgccaatgtaaaatggtttaagaatggtgaagagattatccctggtccaaaatcaagataccgaattagagttgagggtaaaaaacacatcttgatcatagagggagcaacaaaggctgatgctgcagaatattcagtaatgacaacaggaggacaatcatctgctaaacttagtgttgacttgaaacctctgaagattttgacacctctgactgatcagactgtaaatcttggaaaagaaatctgcctgaagtgtgaaatctctgaaaacataccaggaaaatggactaaaaatggcctacctgttcaggagagtgaccgtctaaaggtggttcacaagggaaggatccacaagttagtgatagccaatgccctcactgaagatgaaggtgattatgtatttgcacctgatgcctacaatgttactctgcctgccaaagttcatgttattgatcctcctaagatcatcctggatggtcttgatgctgacaacacagtgacagtgattgcaggaaacaagcttcgtcttgagatccccatcagcggagaaccacctcctaaagccatgtggagccggggagataaggctattatggaaggcagtggccggataagaacagaatcttaccctgatagcagcactctggtcattgatatagctgaaagagatgactctggtgtttaccacatcaatctgaaaaacgaagctggagaggcacatgcaagcatcaaggttaaagttgtggacttccctgatcctccagtggcaccgactgtgacagaggtgggagatgactggtgtatcatgaactgggagcctcctgcctacgacggaggctctccaatcctaggatattttattgagaggaagaagaaacaaagctccaggtggatgaggctgaattttgatctctgcaaagaaacaacttttgagcccaagaagatgattgaaggtgtggcctatgaggtccgcatctttgcagtcaatgccattggcatctccaagcccagtatgccctccaggccttttgttcctttggctgtaacaagccctcctactcttctgactgtggactctgtcactgacacgactgtcacgatgaggtggcgccccccagaccacattggtgcagcaggtttagatggctatgtgctagagtattgctttgaaggaactgaggactggatagttgcaaacaaagatctgattgacaagacgaagttcaccatcacaggtctgccaacagatgcaaagatctttgtgcgtgtgaaggctgttaatgcagctggtgccagcgagcccaagtactattctcagcccattctcgtgaaggaaatcatagaacctccaaagattcgcattccaagacacctgaagcaaacctatatccgcagagttggagaagctgtcaatctggttatacctttccagggaaaaccaagaccagaattaacttggaagaaggatggtgcagaaattgataagaatcaaataaacattcgcaactctgagactgatacaatcatatttattagaaaagcagagaggagccactctgggaaatatgatctgcaagtcaaagtggacaaattcgtggagaccgcatcaattgacatccagatcattgaccgtccaggtccaccccaaattgtgaagattgaggatgtctggggagaaaatgtcgctctcacatggactccaccaaaggatgatggaaatgctgctatcacaggctataccattcagaaggctgacaagaagagcatggaatggtttactgtcattgagcattatcatcgaaccagtgccaccattactgaattggtcatagggaatgaatattacttccgggtcttttctgaaaacatgtgtggcctcagtgaggatgccaccatgactaaagagagtgcagtgatcgccagggatggtaaaatctacaaaaatccagtgtatgaagactttgatttctcagaggcacccatgtttactcagcctttggttaacacctatgccatagctggttacaatgccaccctaaactgcagtgtgagaggaaatcctaagcctaaaataacctggatgaaaaacaaagttgctattgtggatgatccaagatacaggatgttcagcaaccagggagtctgtaccctggaaattcgcaagcccagcccctatgatggaggcacttactgctgcaaagcagtcaatgaccttgggacagtggagattgaatgcaaactggaggtgaaagtgatatatcaaggagtaaatacccctggacaaccagtcttcctggaggggcagcaacagtcattgcacaataaggatttttgaatgtataatatcatctaaggtgggctctccttctgcagactcctcttgcaaggcgtacctccaaacataattgattcgtatctgcgagacttacactcaagcaatcctgaggaatactgagggagggcctggctactgtctctctgcactctgctgctttgaaatctggttgaaatgagaaaaagcattttctgttttcccaccaggcccccaagtgtggtctttttctttcctcctaatgttgaagagaaaaaaaaaaaaaaaagtttgcccagattgcttaattaaaaattgcaaacaaaatctcatttgaagtcaaa

SEQ ID NO: 29272 - DNA, 1213 bp, Homo Sapiens
cggaatggaggaggtgcctcacgactgtccaggggccgacagcgcccaggcgggcagaggggcttcatgtcagggatgccccaaccagcggctgtgcgcttctggagcgggggccactccggacacggctatagaggaaatcaaagagaaaatgaagactgtaaaacacaaaatcttggtattgtctgggaaaggcggtgttgggaaaagcacattcagcgcccaccttgcccatggcctagcagaggatgaaaacacacagattgctcttctagacatcgatatatgtgggccatcgattcccaagataatgggattggaaggagagcaggttcaccagagtggctcaggctggtctccagtgtacgtggaagacaacctgggggtgatgtcagtgggcttcctgctcagcagtcctgatgatgctgttatctggaggggacccaagaaaaacggcatgatcaagcagttcctccgagatgtggactggggagaggtcgactacctcattgtggacaccccacctgggacgtcggatgaacacctctcggtcgtccggtacctggccacagcacacatcgatggagcagtgatcatcaccactccccaggagctgtcactccaggatgtccggaaagaaatcaacttctgccgcaaggtgaagctgcccatcatcggggtggtggagaacatgagtccgttcatctgtcctaagtgcaagaaagaatctcagatattccctcccacaaccgggggcgcggagctcatgtgccaggacttggaggtccctctcctcggcagagtgcccctggatccgctcataggtaagaattgtgacaaaggccagtcttttttcattgacgccccagattccccagccacgttagcctacagaagtataattcagagaatccaagagttttgtaatctccatcagtcaaaagaagagaacctcatcagttcctgaaacgagagaatgttcaggaccaagcagttaccgagcgaggcactcactgggcagcacatccagccagacccgaccagctccgggatggggtgggtcacagcaaaaggaccagatgctggtgtggtccgaagccactttctcagagacactttaatcattgagtatttgtacacttttctttagaacatatataaagggcattctctacaaatgtgccgttttaagaataaaaccccctcaaatctc

SEQ ID NO: 29273 - DNA, 5297 bp, Homo Sapiens
gggccgggccgggctgggctggagcagcggcgcccgggagccgagcttgcagcgagggaccggctgaggcgcgcgggagggaaggaggcaagggctccgcggcgctgtcgcgctgccgctcactctcggggaagagatggcggcggagcggggagcccggcgactcctcagcaccccctccttctggctctactgcctgctgctgctcgggcgccgggcgccgggcgccgcggcggccaggagcggctccgcgccgcagtccccaggagccagcattcgaacgttcactccattttattttctggtggagccggtggatacactctcagttagaggctcttctgttatattaaactgttcagcatattctgagccttctccaaaaattgaatggaaaaaagatggaacttttttaaacttagtatcagatgatcgacgccagcttctcccggatggatctttatttatcagcaatgtggtgcattccaaacacaataaacctgatgaaggttattatcagtgtgtggccactgttgagagtcttggaactattatcagtagaacagcgaagctcatagtagcaggtcttccaagatttaccagccaaccagaaccttcctcagtttatgctgggaacggagcaattctgaattgtgaagttaatgcagatttggtcccatttgtgaggtgggaacagaacagacaaccccttcttctggatgatagagttatcaaacttccaagtggaatgctggttatcagcaatgcaactgaaggagatggcgggctttatcgctgcgtagtggaaagtggtgggccaccaaagtatagtgatgaagttgaattgaaggttcttccagatcctgaggtgatatcagacttggtatttttgaaacagccttctcccttagtcagagtcattggtcaggatgtagtgttgccatgtgttgcttcaggacttcctactccaaccattaaatggatgaaaaatgaggaggcacttgacacagaaagctctgaaagattggtattgctggcaggtggtagcctggagatcagtgatgttactgaggatgatgctgggacttatttttgtatagctgataatggaaatgagacaattgaagctcaagcagagcttacagtgcaagctcaacctgaattcctgaagcagcctactaatatatatgctcacgaatctatggatattgtatttgaatgtgaagtgactggaaaaccaactccaactgtgaagtgggtcaaaaatggggatatggttatcccaagtgattattttaagattgtaaaggaacataatcttcaagttttgggtctggtgaaatcagatgaagggttctatcagtgcattgctgaaaatgatgttggaaatgcacaagctggagcccaactgataatccttgaacatgcaccagccacaacgggaccactgccttcagctcctcgggatgtcgtggcctccctggtctctacccgcttcatcaaattgacgtggcggacacctgcatcagatcctcacggagacaaccttacctactctgtgttctacaccaaggaagggattgctagggaacgtgttgagaataccagtcacccaggagagatgcaagtaaccattcaaaacctaatgccagcgaccgtgtacatctttagagttatggctcaaaataagcatggctcaggagagagttcagctccactgcgagtagaaacacaacctgaggttcagctccctggcccagcacctaaccttcgtgcatatgcagcttcgcctacctccatcactgttacgtgggaaacaccagtgtctggcaatggggaaattcagaattataagttgtactacatggaaaaggggactgataaagaacaggatgttgatgtttcaagtcactcttacaccattaatgggttgaaaaaatatacagagtatagtttccgagtggtggcctacaataaacatggtcctggagtttccacaccagatgttgctgttcgaacattgtcagatgttcccagtgctgctcctcagaatctgtccttggaagtgagaaattcaaagagtattatgattcactggcagccacctgctccagccacacaaaatgggcagattactggctacaagattcgctaccgaaaggcctcccgaaagagtgatgtcactgagaccttggtaagcgggacacagctgtctcagctgattgaaggtcttgatcgggggactgagtataatttccgagtggctgctctaacaatcaatggtacaggcccggcaactgactggctgtctgctgaaacttttgaaagtgacctagatgaaactcgtgttcctgaagtgcctagctctcttcacgtacgcccgctcgttactagcatcgtagtgagctggactcctccagagaatcagaacattgtggtcagaggttacgccattggttatggcattggcagccctcatgcccagaccatcaaagtggactataaacagcgctattacaccattgaaaatctggatcccagctctcactatgtgattaccctgaaagcatttaataacgtgggtgaaggcatccccctgtatgagagtgctgtgaccaggcctcacacagacacttctgaagttgatttatttgttattaatgctccatacactccagtgccagatcccactcccatgatgccaccagtgggagttcaggcttccattctgagtcatgacaccatcaggattacgtgggcagacaactcgctgcccaagcaccagaagattacagactcccgatactacaccgtccgatggaaaaccaacatcccagcaaacaccaagtacaagaatgcaaatgcaaccactttgagttatttggtgactggtttaaagccgaatacactctatgaattctctgtgatggtgaccaaaggtcgaagatcaagtacatggagtatgacagcccatgggaccacctttgaattagttccgacttctccacccaaggatgtgactgttgtgagtaaagaggggaaacctaagaccataattgtgaattggcagcctccctctgaagccaatggcaaaattacaggttacatcatatattacagtacagatgtgaatgcagagatacatgactgggttattgagcctgttgtgggaaacagactgactcaccagatacaagagttaactcttgacacaccatactacttcaaaatccaggcacggaactcaaagggcatgggacccatgtctgaagctgtccaattcagaacacctaaagcggactcctctgataaaatgcctaatgatcaagcctcagggtctggagggaaaggaagccggctgccagacctaggatccgactacaaacctccaatgagcggcagtaacagccctcatgggagccccacctctcctctggacagtaatatgctgctggtcataattgtttctgttggcgtcatcaccatcgtggtggttgtgattatcgctgtcttttgtacccgtcgtaccacctctcaccagaaaaagaaacgagctgcctgcaaatcagtgaatggctctcataagtacaaagggaattccaaagatgtgaaacctccagatctctggatccatcatgagagactggagctgaaacccattgataagtctccagacccaaaccccatcatgactgatactccaattcctcgcaactctcaagatatcacaccagttgacaactccatggacagcaatatccatcaaaggcgaaattcatacagagggcatgagtcagaggacagcatgtctacactggctggaaggcgaggaatgagaccaaaaatgatgatgccctttgactcccagccaccccagcctgtgattagtgcccatcccatccattccctcgataaccctcaccatcatttccactccagcagcctcgcttctccagctcgcagtcatctctaccacccgggcagcccatggcccattggcacatccatgtccctttcagacagggccaattccacagaatccgttcgaaatacccccagcactgacaccatgccagcctcttcgtctcaaacatgctgcactgatcaccaggaccctgaaggtgctaccagctcctcttacttggccagctcccaagaggaagattcaggccagagtcttcccactgcccatgttcgcccttcccacccattgaagagcttcgccgtgccagcaatcccgcctccaggacctcccacctatgatcctgcattgccaagcacaccattactgtcccagcaagctctgaaccatcacattcactcagtgaagacagcctccatcgggactctaggaaggagccggcctcctatgccagtggttgttcccagtgcccctgaagtgcaggagaccacaaggatgttggaagactccgagagtagctatgaaccagatgagctgaccaaagagatggcccacctggaaggactaatgaaggacctaaacgctatcacaacagcatgacgaccttcaccaggacctgacttcaaacctgagtctggaagtcttggaacttaacccttgaaaacaaggaattgtacagagtacgagaggacagcacttgagaacacagaatgagccagcagactggccagcgcctctgtgtagggctggctccaggcatggccacctgccttcccctggtcagcctggaagaagcctgtgtcgaggcagcttccctttgcctgctgatattctgcaggactgggcaccatgggccaaaattttgtgtccagggaagaggcgagaagtgcaacctgcatttcactttgtggtcaggccgtgtctttgtgctgtgactgcatcacctttatggagtgtagacattggcatttatgtacaattttatttgtgtcttattttattttaccttcaaaaacaaaaacgccatccaaaaccaaggaagtccttggtgttctccacaagtggttgacatttgactgcttgttccaattatgtatggaaagtctttgacagtgtgggtcgttcctggggttggcttgttttttggtttcatttttattttttaattctgagtcattgcatcctctaccagctgttaatccatcactctgagggggaggaaatgttgcattgctgtttgtaagctttttttattatttttttattataattattaaaggcctgactctttcctctcatcactgtgagattacagatctatttgaattgaatgaaatgtaacattgaaaaaaaaaaaaaaaaaaaaaaaaaaaaa

SEQ ID NO: 29274 - DNA, 4898 bp, Homo Sapiens
gaattccggctgccaggggcgtccggttacatccccgccttcctctgtcctggccgcgggaccgggtttgcgggaccgcagttcgggaacatgttggcctcgagcagccggatccgggctgcgtggacgcgggcgctgctgctgccgctgctgctggcggggcctgtgggctgcctgagccgccaggagctctttcccttcggccccggacagggggacctggagctggaggacggggatgacttcgtctctcctgccctggagctgagtggggcgctccgcttctacgacagatccgacatcgacgcagtctacgtcaccacaaatggcatcattgctacgagtgaacccccggccaaagaatcccatcccgggctcttcccaccaacattcggtgcagtcgcccctttcctggcggacttggacacgaccgatggcctggggaaggtttattatcgagaagacttatccccctccatcactcagcgagcagcagagtgtgtccacagagggttcccggagatctctttccagcctagtagcgcggtggttgtcacttgggaatccgtggccccctaccaagggcccagcagggacccagaccagaaaggcaagagaaacacgttccaggctgttctagcctcctctgattccagctcctatgccattttcctttatcctgaggatggtctgcagttccatacgacattctcaaagaaggaaaacaaccaagttcctgccgtggttgcattcagtcaaggttcagtgggattcttatggaagagcaacggagcttataacatatttgctaatgacagggaatcaattgaaaatttggccaagagtagtaactctgggcagcagggtgtctgggtgtttgagattgggagtccagccaccaccaatggcgtggtgcctgcagacgtgatcctcggaactgaagatggggcagagtatgatgatgaggatgaagattatgacctggcgaccactcgtctgggcctggaggatgtgggcaccacgcccttctcctacaaggctctgagaaggggaggtgctgacacatacagtgtgcccagcgtcctctccccgcgccgggcagctaccgaaaggccccttggacctcccacagagagaaccaggtctttccagttggcagtggagacttttcaccagcagcaccctcaggtcatagatgtggatgaagttgaggaaacaggagttgttttcagctataacacggattcccgccagacgtgtgctaacaacagacaccagtgctcggtgcacgcagagtgcagggactacgccacgggcttctgctgcagctgtgtcgctggctatacgggcaatggcaggcaatgtgttgcagaaggttccccccagcgagtcaatggcaaggtgaaaggaaggatctttgtggggagcagccaggtccccattgtctttgagaacactgacctccactcttacgtagtaatgaaccacgggcgctcctacacagccatcagcaccattcccgagaccgttggatattctctgcttccactggccccagttggaggcatcattggatggatgtttgcagtggagcaggacggattcaagaatgggttcagcatcaccgggggtgagttcactcgccaggctgaggtgaccttcgtggggcacccgggcaatctggtcattaagcagcggttcagcggcatcgatgagcatgggcacctgaccatcgacacggagctggagggccgcgtgccgcagattccgttcggctcctccgtgcacattgagccctacacggagctgtaccactactccacctcagtgatcacttcctcctccacccgggagtacacggtgactgagcccgagcgagatggggcatctccttcacgcatctacacttaccagtggcgccagaccatcaccttccaggaatgcgtccacgatgactcccggccagccctgcccagcacccagcagctctcggtggacagcgtgttcgtcctgtacaaccaggaggagaagatcttgcgctacgctttcagcaactccattgggcctgtgagggaaggctcccctgatgctcttcagaatccctgctacatcggcactcatgggtgtgacaccaacgcggcctgtcgccctggtcccaggacacagttcacctgcgagtgctccatcggcttccgaggagacgggcgaacctgctatgatattgatgaatgttcagaacaaccctcagtgtgtgggagccacacaatctgcaataatcacccaggaaccttccgctgcgagtgtgtggagggctaccagttttcagatgagggaacgtgtgtggctgtcgtggaccagcgccccatcaactactgtgaaactggccttcataactgcgacataccccagcgggcccagtgtatctacacaggaggctcctcctacacctgttcctgcttgccaggcttttctggggatggccaagcctgccaagatgtagatgaatgccagccaagccgatgtcaccctgacgccttctgctacaacactccaggctctttcacgtgccagtgcaaacctggttatcagggagacggcttccgttgcgtgcccggagaggtggagaaaacccggtgccagcacgagcgagaacacattctcggggcagcgggggcgacagacccacagcgacccattcctccggggctgttcgttcctgagtgcgatgcgcacgggcactacgcgcccacccagtgccacggcagcaccggctactgctggtgcgtggatcgcgacggccgcgaggtggagggcaccaggaccaggcccgggatgacgcccccgtgtctgagtacagtggctcccccgattcaccaaggacctgcggtgcctaccgccgtgatccccttgcctcctgggacccatttactctttgcccagactgggaagattgagcgcctgcccctggagggaaataccatgaggaagacagaagcaaaggcgttccttcatgtcccggctaaagtcatcattggactggcctttgactgcgtggacaagatggtttactggacggacatcactgagccttccattgggagagctagtctacatggtggagagccaaccaccatcattagacaagatcttggaagtccagaaggtatcgctgttgatcaccttggccgcaacatcttctggacagactctaacctggatcgaatagaagtggcgaagctggacggcacgcagcgccgggtgctctttgagactgacctggtgaatcccagaggcattgtaacggattccgtgagagggaacctttactggacagactggaacagagataaccccaagattgaaacttcctacatggacggcacgaaccggaggatccttgtgcaggatgacctgggcttgcccaatggactgcacttcgatgcgttctcatctcagctctgctgggtggatgcaggcaccaatcgggcggaatgcctgaaccccagtcagcccagcagacgcaaggctctcgaagggctccagtatccttttgctgtgacgagctacgggaagaatctgtatttcacagactggaagatgaattccgtggttgctctcgatcttgcaatttccaaggagacggatgctttccaaccccacaagcagacccggctgtatggcatcaccacggccctgtctcagtgtccgcaaggccataactactgctcagtgaacaatggcggctgcacccacctatgcttggccaccccagggagcaggacctgccgttgccctgacaacaccttgggagttgactgtatcgaacggaaatgaagacaagagtgccttatttcctttccaagtatttcacagcaacactctacttgaagcaacttggtccagattgaaaagtgtcctctggctgagtggccactaggcccagacccagcccagcctgagccccaacaacaacttttccctcactgttccccaaaacatgcaccctggacttctctaatagaaaagtctccacccctacacaaggacagaaccctccacccctacccccaaccctcagacagacttatacacccctgagtgaggattacatgcccatcccagtgtcctaggaccttttcccaatactagccccccagtggtgaacagaacctcccaaatttgagttgcacccttccctgtggccttatgagctcagcctcgctttgaggtacccaccgtcctgtcagctccttgacctatgagctggggcctgactaggaaaagttgggagttaaggaggaaattagcattccttaatgttttgttttggtgctctgaatttcttctttattatagtcctatagttttactcctcagttcctcaccatcatcatcttgtctaagacccccattataatattcatgcgctgctttttcatcaaaacctaccctgtcctagagatctatgggcatttggtggatgataatgagcagcccctcccagatagaatgtcaatatttgagcagtaggatattggcatttgttagttaaaggcttaaatcaaaagaatgtccaatggtaggaatttcaaggtgtaggtcagatatttgagaataggggatttttttgatgtgccttaaattataccaaagattactaattattcctctttgcccaaaatacttgcatccaaggttctagtctctgttgctgtgctggtctttagccccactgctggcactgatgtccctcctttttcacggagacctatctgaggtacaggatggggctggcaccagatgatgtcccaccacagtccctcacctccggcctccacatgacagaaccaatttacactcaaccatgacctcacccctccttggtttctccctccccg

SEQ ID NO: 29275 - DNA, 2389 bp, Homo Sapiens
gggaaggcgagcagtgccaatctacagcgaagaaagtctcgtttggtaaaagcgagaggggaaagcctgagcatgcagagtgtgcagagcacgagcttttgtctccgaaagcagtgcctttgcctgaccttcctgcttctccatctcctgggacaggtcgctgcgactcagcgctgccctccccagtgcccgggccggtgccctgcgacgccgccgacctgcgcccccggggtgcgcgcggtgctggacggctgctcatgctgtctggtgtgtgcccgccagcgtggcgagagctgctcagatctggagccatgcgacgagagcagtggcctctactgtgatcgcagcgcggaccccagcaaccagactggcatctgcacggcggtagagggagataactgtgtgttcgatggggtcatctaccgcagtggagagaaatttcagccaagctgcaaattccagtgcacctgcagagatgggcagattggctgtgtgccccgctgtcagctggatgtgctactgcctgagcctaactgcccagctccaagaaaagttgaggtgcctggagagtgctgtgaaaagtggatctgtggcccagatgaggaggattcactgggaggccttacccttgcagcttacaggccagaagccaccctaggagtagaagtctctgactcaagtgtcaactgcattgaacagaccacagagtggacagcatgctccaagagctgtggtatggggttctccacccgggtcaccaataggaaccgtcaatgtgagatgctgaaacagactcggctctgcatggtgcggccctgtgaacaagagccagagcagccaacagataagaaaggaaaaaagtgtctccgcaccaagaagtcactcaaagccatccacctgcagttcaagaactgcaccagcctgcacacctacaagcccaggttctgtggggtctgcagtgatggccgctgctgcactccccacaataccaaaaccatccaggcagagtttcagtgctccccagggcaaatagtcaagaagccagtgatggtcattgggacctgcacctgtcacaccaactgtcctaagaacaatgaggccttcctccaggagctggagctgaagactaccagagggaaaatgtaacctatcactcaagaagcacacctacagagcacctgtagctgctgcgccacccaccatcaaaggaatataagaaaagtaatgaagaatcacgatttcatccttgaatcctatgtattttcctaatgtgatcatatgaggacctttcatatctgtcttttatttaacaaaaaatgtaattaactgtaaacttggaatcaaggtaagctcaggatatggcttaggaatgacttactttcctgtggttttattacaaatgcaaatttctataaatttaagaaaacaagtatataatttactttgtagactgtttcacattgcactcatcatattttgttgtgcactagtgcaattccaagaaaatatcactgtaatgagtcagtgaagtctagaatcatacttaacatttcattgtacaagtattacaaccatatattgaggttcattgggaagattctctattggctccctttttgggtaaaccagctctgaacttccaagctccaaatccaaggaaacatgcagctcttcaacatgacatccagagatgactattacttttctgtttagttttacactaggaaacgtgttgtatctacagtaatgaaatgtttactaagtggactggtgtcataaactttctccatttaagacacattgactcctttccaatagaaagaaactaaacagaaaactcccaatacaaagatgactggtccctcatagccctcagacatttatatattggaagctgctgaggcccccaagttttttaattaagcagaaacagcatattagcagggattctctcatctaactgatgagtaaactgaggcccaaagcacttgcttacatcctctgatagctgtttcaaatgtgcattttgtggaattttgagaaaaatagagcaaaatcaacatgactggtggtgagagaccacacattttatgagagtttggaattattgtagacatgcccaaaacttatccttgggccataattatgaaaactcatgatcaagatatatgtgtatacatacatgtatctggtttgtcaggctacaaggtaggctgcaaaattaaatctagacattcttttaatgccaccacacgtgttccgcttctctcttttaaagtatttataaaaatataaattgtacattttgtaaaatattatgtttgatttctctacttgtcatatcactaaataaacacgattttattgctgaaaaaaaaaaaaaaaaaaa

SEQ ID NO: 29276 - DNA, 3547 bp, Homo Sapiens
gcactcgcccggctcgcccgctttcgcacccagttcacgcgccacagctatgtgtccccgagccgcgcgggcgcccgcgacgctactcctcgccctgggcgcggtgctgtggcctgcggctggcgcctgggagcttacgattttgcacaccaacgacgtgcacagccggctggagcagaccagcgaggactccagcaagtgcgtcaacgccagccgctgcatgggtggcgtggctcggctcttcaccaaggttcagcagatccgccgcgccgaacccaacgtgctgctgctggacgccggcgaccagtaccagggcactatctggttcaccgtgtacaagggcgccgaggtggcgcacttcatgaacgccctgcgctacgatgccatggcactgggaaatcatgaatttgataatggtgtggaaggactgatcgagccactcctcaaagaggccaaatttccaattctgagtgcaaacattaaagcaaaggggccactagcatctcaaatatcaggactttatttgccatataaagttcttcctgttggtgatgaagttgtgggaatcgttggatacacttccaaagaaaccccttttctctcaaatccagggacaaatttagtgtttgaagatgaaatcactgcattacaacctgaagtagataagttaaaaactctaaatgtgaacaaaattattgcactgggacattcgggttttgaaatggataaactcatcgctcagaaagtgaggggtgtggacgtcgtggtgggaggacactccaacacatttctttacacaggcaatccaccttccaaagaggtgcctgctgggaagtacccattcatagtcacttctgatgatgggcggaaggttcctgtagtccaggcctatgcttttggcaaatacctaggctatctgaagatcgagtttgatgaaagaggaaacgtcatctcttcccatggaaatcccattcttctaaacagcagcattcctgaagatccaagcataaaagcagacattaacaaatggaggataaaattggataattattctacccaggaattagggaaaacaattgtctatctggatggctcctctcaatcatgccgctttagagaatgcaacatgggcaacctgatttgtgatgcaatgattaacaacaacctgagacacacggatgaaatgttctggaaccacgtatccatgtgcattttaaatggaggtggtatccggtcgcccattgatgaacgcaacaatggcacaattacctgggagaacctggctgctgtattgccctttggaggcacatttgacctagtccagttaaaaggttccaccctgaagaaggcctttgagcatagcgtgcaccgctacggccagtccactggagagttcctgcaggtgggcggaatccatgtggtgtatgatctttcccgaaaacctggagacagagtagtcaaattagatgttctttgcaccaagtgtcgagtgcccagttatgaccctctcaaaatggacgaggtatataaggtgatcctcccaaacttcctggccaatggtggagatgggttccagatgataaaagatgaattattaagacatgactctggtgaccaagatatcaacgtggtttctacatatatctccaaaatgaaagtaatttatccagcagttgaaggtcggatcaagttttccacaggaagtcactgccatggaagcttttctttaatatttctttcactttgggcagtgatctttgttttataccaatagccaaaaattctccttgcctttaatgtgtgaaactgcattttttcaagtgagattcaaatctgccttttaggacctggctttgtgacagcaaaaaccatctttacaggctcctagaagctgaaggttagagcattataaaatgaagagacagacatgattactcagggtcagcaacctagtgagttagaaaaaaaattaacatagggccctataaggagaaagccaactatgttaagtttacgtgtccaaattttaatgaaattttactaacaattttaaaccatatttttcttcttcatatccatttctaatccatcaaacagcttatgtttacataaaattttatcattcacaaggaagttttaagcacactgtctcatttgatatccacaacttatttttggtaggaaagagagatgtttttcccacctgtcagatgaaaaaactgaagctcaaaaagggttgacttgaccatacagctaatgctgacagatccaagacctagacctaggtcttttgaactcaagtccagcattctcaactatatcaagttactgttcagaatacttaatatctcctctcttcataattatcaatagccccaagctcatggatgacaaatctctgctttatttcttgtctctattttttcactttatagctcctgttataatagcaagtttaatggtataaacacaggataccatcctctcttgcaacacccatgtgcctttgatgagtcaggtagcaagctgtagtagataatgagaaaggccagaggctgcaaagacagtcaaaggacacgagagaaaggaaggggaagaacaggactccaggactgttttatattatagaaaagcaagagctaaagagcatttacacatgttaaacagatacttgttaagcatagtgcctgacacacggcattagctgttattttatgagattccatcagctctgcctctgtcctctttcttctaacatgaaggtatcatgagaagagaaccttctaacataagctgtaattctaaacctgcacttgtccctctccagcaagaggctagcactgaattcattctactcatactacacacccagttatggaatgtccagagttctcgaagaaaataaatgactttaggaagaggtatacattttttaagtcgctctgcctccaaatctgaacagtcactgtaaatcattcttaagcccagatatgagaacttctgctggaaagtgggaccctctgagtgggtggtcagaaaatacccatgctgatgaaatgacctatgcccaaagaacaaatacttaacgtgggagtggaaccacatgagcctgctcagctctgcataagtaattcaagaaatgggaggcttcaccttaaaaacagtgtgcaaatggcagctagaggttttgataggaagtatgtttgtttcttagtgtttacaaatattaagtactcttgatacaaaatatacttttaaacttcataacctttttataaaagttgttgcagcaaaataatagcctcggttctatgcatatatggattgctataaaaaatgtcaataagattgtacaaggaaaattagagaaagtcacatttagggtttattttttacacttggccagtaaaatagggtaaatcctattagaaattttttaaagaactttttttaagtttcctaaatctgtgtgtgtattgtgaagtggtataagaaatgactttgaaccactttgcaattgtagattcccaacaataaaattgaagat

SEQ ID NO: 29277 - DNA, 1097 bp, Homo Sapiens
ggccgcatgggccgccgggatgtgtagtccgcaggagtccggcatgaccgccttgagcgcgaggatgctgacccggagccggagcctgggacccggggctgggccgcgggggtgtagggaggagcccgggcctctccggagaagagaggctgcagcagaagcgaggaaaagccacagccccgtgaagcgtccgcggaaagcacagagactgcgtgtggcctatgagggctcggacagtgagaaaggtgagggggctgagcccctcaaggtgccagtctgggagccccaggactggcagcaacagctggtcaacatccgtgccatgaggaacaaaaaggatgcacctgtggaccatctggggactgagcactgctatgactccagtgcccccccaaaggtacgcaggtaccaggtgctgctgtcactgatgctctccagccaaaccaaagaccaggtgacggcgggcgccatgcagcgactgcgggcgcggggcctgacggtggacagcatcctgcagacagatgatgccacgctgggcaagctcatctaccccgtcggtttctggaggagcaaggtgaaatacatcaagcagaccagcgccatcctgcagcagcactacggtggggacatcccagcctctgtggccgagctggtggcgctgccgggtgttgggcccaagatggcacacctggctatggctgtggcctggggcactgtgtcaggcattgcagtggacacgcatgtgcacagaatcgccaacaggctgaggtggaccaagaaggcaaccaagtccccagaggagacccgcgccgccctggaggagtggctgcctagggagctgtggcacgagatcaatggactcttggtgggcttcggccagcagacctgtctgcctgtgcaccctcgctgccacgcctgcctcaaccaagccctctgcccggccgcccagggtctctgatggccgcatggctctggccgaggtgccgctgtggccaccgtctgtgaagtggctttacgcttcaggaagccacgcctgttgaataaagctttggtgtgtttgcagatggaaaaaaaaaaaaaaaaaaaaaaaaaaaaaa

SEQ ID NO: 29278 - DNA, 4131 bp, Homo Sapiens
tcaagctcgccccgcgcagcccgagccgggctgggcgctgtcctcgggggcctggggaaccgcgcggtttggagatcggaggcacctggaacccgtggcaagcgccgagccgggagacagcccgaggaaccacgggttctggagctaggagccggaagctgggagtccggaggagagcggagcccggagcccggagcccggggcggcgcgtctgggtctggcgcttcccgactggacggcgcgcccgctggtcttcgccacgcgccctcccctgggctcgcgttcatcggtccccgcctgagacgcgcccactcctgcccggacttccagccccggaggcgccggacagagccgcggactccagcgcccaccatgcgcctcaacagctccgcgccgggaaccccgggcacgccggccgccgaccccttccagcgggcgcaggccggactggaggaggcgctgctggccccgggcttcggcaacgcttcgggcaacgcgtcggagcgcgtcctggcggcacccagcagcgagctggacgtgaacaccgacatctactccaaagtgctggtgaccgccgtgtacctggcgctcttcgtggtgggcacggtgggcaacacggtgacggcgttcacgctggcgcggaagaagtcgctgcagagcctgcagagcacggtgcattaccacctgggcagcctggcgctgtccgacctgctcaccctgctgctggccatgcccgtggagctgtacaacttcatctgggtgcaccacccctgggccttcggcgacgccggctgccgcggctactacttcctgcgcgacgcctgcacctacgccacggccctcaacgtggccagcctgagtgtggagcgctacctggccatctgccaccccttcaaggccaagaccctcatgtcccgaagccgcaccaagaagttcatcagcgccatctggctcgcctcggccctgctgacggtgcctatgctgttcaccatgggcgagcagaaccgcagcgccgacggccagcacgccggcggcctggtgtgcacccccaccatccacactgccaccgtcaaggtcgtcatacaggtcaacaccttcatgtccttcatattccccatggtggtcatctcggtcctgaacaccatcatcgccaacaagctgaccgtcatggtacgccaggcggccgagcagggccaagtgtgcacggtcgggggcgagcacagcacattcagcatggccatcgagcctggcagggtccaggccctgcggcacggcgtgcgcgtcctacgtgcagtggtcatcgcctttgtggtctgctggctgccctaccacgtgcggcgcctcatgttctgctacatctcggatgagcagtggactccgttcctctatgacttctaccactacttctacatggtgaccaacgcactcttctacgtcagctccaccatcaaccccatcctgtacaacctcgtctctgccaacttccgccacatcttcctggccacactggcctgcctctgcccggtgtggcggcgcaggaggaagaggccagccttctcgaggaaggccgacagcgtgtccagcaaccacaccctctccagcaatgccacccgcgagacgctgtactaggctgtgcgccccggaacgtgtccaggaggagcctggccatgggtccttgcccccgacagacagagcagcccccacccgggagccttgatgggggtcaggcagaggccagcctgcactggagtctgaggcctgggacccccccctcccaccccctaacccatgtttctcattagtgtctcccgggcctgtccccaactcctccccacccctcccccatctcctctttgaaagccagaacaagagagcgctcctctcccagataggaaaagggcctctaacaaggagaaattagtgtgcggcaaaaggcagttttctttgttctcagactaatggatggttccagagaaggaaatgaaatgtgctgggtggggccgggcctccggcggcccggctgctgttcccatgtccacatctctgaggcctgcaccccctctgtctagctcggggagtccagccccagtcccgcaggctccgtggctttgggcctcacgtgcagaccctgccatgcagacccatgcccccctcccccaggcagctccaagaaagctccctgactcgccccttcaggcctggcaagctgggggcccatcgccgtggggagtccctcccaccaccctcgccgcaggcagctgcagcccccagaggggaccacaagcccaaaaaggacaaaaatgggctggcctggaatggcccagaccccagcctcccctcctccctcccatcctcacccaggccaaggcccaggggctctgccaggacaccacatgggagggggctcaggcctcagcctcaagatcttcagctgtggcctctcgggctcggcagaagggacgccggatcaggggcctggtctccagcacctgcccgagtggccgtggccaggatggggtgcgcattccgtgtgctttgcttgtagctgtgcaggctgaggtctggagccaggcccagagctggcttcagggtggggccttgagaaggggaatgtgggacaggggcgatggtgcctggtctctgagtaagatgccaggtcccaggaactcaggcttcaggtgagaaggagcggtgtgtccaggcaccgctggccggcagccctgggctgaggcacagactcatttgtcaccttctggcggcggcagccctggccccggcctccaagcagttgaaaaagctggcgcctccttggtctctaggatccaggctccacagagcacatgactagccaggcccctggcttaagaaggtcgcctaagcctaagagaagacagtcccaggagaagctggccgggaccagccaggagctgggagccacaggaagcaaaagtcagccttttcttcaagggatttccctgtctcagagcagcctttgccccagggaaatgggctctgggctggctgcctgcaccggccatgtcgacccaggacccggacacctggtcttgggctgtgttcagccactttgccttctctggactcagtttccccgtctgagaaatgagagtcgaatgctacagtatctgcagtcgcttggatctggctgttgagttgacgggttccttgaaccccacaaaatccctctccaaccacaggacccttcggctcaccaagaacggggcccaggggagtcaggcctattcgctgcacttcctgccaaactttgcccccacaagcctggtcatcagccaggcagccctcccagtgcccaagggccaccaaccccagggaaacagggccagcacagaggggccttcctcccccacagagctcccatgacatagtctgctctgggcggaagagctttgctgccagccagggatgtccagaggtcggtgcagcccctatccctgctcaggagtgggctcagagtctagcaaatgctaaggcccctcaggctgggctctgaacgaggacctggactcagagccagacagggcagcctcagacccttctctggggctcctggaccttgggccataatttctgagcctcggtttccccatctaaggaacagatgtggtcgttccgccctctcagctggatgagactgtcctggaggatccaccccggaacagacagaacggtgtctctcaggatggtgctctgagagagggcagagtggatgccccactgccctagaccctcggtagacgtggggtctctggggcggggtctgtggctgtgactgaagtcggctttcccgttgatgtcttgatgctcctatctgtgcacttaccgtaggtagggacacgtgtccatgcaccacagacacacccacgacacctgatctcgtatcactagcttgcggccaggtcatgatgtggccccggaagctggccctgcgtgccatgagtgcgtcggtcatggagtccggagcccctgagccggcccctggtgacggcacagccctcacagctcaaacgcccacccccactcccaccatctgcaggtggtgaaaacaaaccccgtgtatctctcaataaaggtggccgaagggcctcgatgtgg

SEQ ID NO: 29279 - DNA, 2818 bp, Homo Sapiens
ggggcatgccgggagtggttgtgtacggtccgcagcggcaggtgaagtctagcagaggacgcggccaggcgattcggtgaagcgattcctgcaggcgttggttcccctctttgacctggtaaatgcaggcttttatgcgagaggatttgaatttgttgaaatgagcagtcgtaaatcaaagagtaacagcttaattcacacagagtgcctttcacaggtacaaagaattttacgtgaaagattttgtcgtcagagtccacatagtaacctatttggagtgcaagtacaatacaaacacttaagtgagctgctgaaaagaactgctctccatggagagagtaactctgtccttattatcggaccccgaggatcaggaaaaactatgttaataaatcatgctttgaaagaactcatggaaatagaagaagtgagtgaaaatgtattacaagttcacttaaatggactgctgcagatcaatgacaaaatcgccctaaaggaaatcacaaggcagttaaatctggaaaatgtagttggagataaagtttttggaagctttgctgaaaacctttcatttcttctggaagctttaaaaaaaggtgaccgaactagcagttgcccagtgatcttcatattagatgaatttgatctttttgctcatcataaaaaccaaacacttctctataatctttttgacatttctcagtctgcacagaccccaatagcagttattggtcttacatgtagattggatattttggaactcttagaaaaaagagtgaagtcaagattttctcaccggcagatacacttaatgaattcatttggttttccacagtatgttaaaatatttaaagaacagttatctctacctgcagagtttccagacaaggtttttgctgagaagtggaatgaaaatgttcagtatctctcagaagatagaagtgtgcaagaagtactacagaagcatttcaatatcagcaaaaacctgcggtcattacacatgctattgatgcttgctttaaatcgagtaacagcatcgcacccatttatgactgccgtagatctaatggaagcaagccaactgtgtagcatggactcgaaagcaaatattgtacatggtctatcagtcttggaaatctgtcttataatagcaatgaaacatttaaatgacatctatgaggaagagccatttaattttcaaatggtctataatgagtttcagaagtttgttcaaaggaaagcacattccgtttataattttgaaaaacctgttgtcatgaaggcttttgaacacttgcagcaattagaattaataaagcccatggaaagaacttcaggaaattcacagagagagtaccagctgatgaaactgcttttggataatactcaaattatgaatgctctgcagaaatatcccaactgtcctacagatgtgaggcagtgggcaacatcctcactaagctggttatgaatataaccagtgacttcaactttggcatttcattcatacttctgtagagaacggaaaactattgtccattaacatgatatgctaaacattctataaacattcttgtatttatgtgagacttgcccatctactgtcttggctgtgtcttgccttttaatcatgaacagttacatgatttataatttcactgattgagattactttgtaagtagctgttcagaagaataaaatatgactgttttagggactagaccatgtgcttttttaacacttatatatataatggtctatttgaagagctcacttcaacctaacagctagatgtctttacaaaccttaaaccaaaggagtaaaaaaaacaatggtaagcactgaagtataataagtaacctttggtacagcaggtttgctgcagtgtttttttctgtccacatgcaaattttggattctatcccagacccaggttttctagttcagaagactaaccagcttagtcagaagatggttccatggaagaaaaaggccaaggagtttgaagatttttcttctagacatctcaaaatgtggtactcataccatccacatcagaatcccttgtaggattttctaaaattacagattgttgagcctaccataggtcaaaaggactggaattttccttcttaacaagtatagtcatggcaccacgtaacattttggtcaatgacattgtataaagggtggtctcataagattataccatatttttactgtaccttttctatgtctaaatatacaaatgttttaccattgtgttacagttgcctacagtatgattacagtaacattctgtacagtgctatagctgaagagtaataggctaggctatctgtatagcctaagtgtgtaacaggctatatacatatcatcagggtctgtgtaagtatactctgtgatgttcatacagtgatgaaatcacccaaagacacatttctcagaacgtagccccatcatgaagtgacgtgactaccagagatttctggaaaagcactcccaaaagtaatgagatgtgtatggcaatgttaactgaacctgtttgtattaaaaagtaaatccctatgaggaatgtggaaatgtccgtcaaagcattgtcttttaagtaagttccaagatccatgaattaacagaggcatatatttaaaatgaaatttaatgagcacttagtgacttcatttgttcaagaatatttgatttcctattgtgtgcatgggaggtttacaaaagacagactgtccctatgcttgtgcagcttacaatctatttaactattagaggccctgtgagatgtaggcagttatttacagatga

SEQ ID NO: 29280 - DNA, 4180 bp, Homo Sapiens
gcggggaagcagcagcggccaggatgaatcccaggtgctctggagctggatggtgaaggtcggcactcttcaccctcccgagccctgcccgtctcggccccatgcccccaccagtcagccccgggccacaggcagtgagcaggcacctgggagccgaggccctgtgaccaggccaaggagacgggcgctccagggtcccagccacctgtcccccccatggagctgaggccctggttgctatgggtggtagcagcaacaggaaccttggtcctgctagcagctgatgctcagggccagaaggtcttcaccaacacgtgggctgtgcgcatccctggaggcccagcggtggccaacagtgtggcacggaagcatgggttcctcaacctgggccagatcttcggggactattaccacttctggcatcgaggagtgacgaagcggtccctgtcgcctcaccgcccgcggcacagccggctgcagagggagcctcaagtacagtggctggaacagcaggtggcaaagcgacggactaaacgggacgtgtaccaggagcccacagaccccaagtttcctcagcagtggtacctgtctggtgtcactcagcgggacctgaatgtgaaggcggcctgggcgcagggctacacagggcacggcattgtggtctccattctggacgatggcatcgagaagaaccacccggacttggcaggcaattatgatcctggggccagttttgatgtcaatgaccaggaccctgacccccagcctcggtacacacagatgaatgacaacaggcacggcacacggtgtgcgggggaagtggctgcggtggccaacaacggtgtctgtggtgtaggtgtggcctacaacgcccgcattggaggggtgcgcatgctggatggcgaggtgacagatgcagtggaggcacgctcgctgggcctgaaccccaaccacatccacatctacagtgccagctggggccccgaggatgacggcaagacagtggatgggccagcccgcctcgccgaggaggccttcttccgtggggttagccagggccgaggggggctgggctccatctttgtctgggcctcggggaacgggggccgggaacatgacagctgcaactgcgacggctacaccaacagtatctacacgctgtccatcagcagcgccacgcagtttggcaacgtgccgtggtacagcgaggcctgctcgtccacactggccacgacctacagcagtggcaaccagaatgagaagcagatcgtgacgactgacttgcggcagaagtgcacggagtctcacacgggcacctcagcctctgcccccttagcagccggcatcattgctctcaccctggaggccaataagaacctcacatggcgggacatgcaacacctggtggtacagacctcgaagccagcccacctcaatgccaacgactgggccaccaatggtgtgggccggaaagtgagccactcatatggctacgggcttttggacgcaggcgccatggtggccctggcccagaattggaccacagtggccccccagcggaagtgcatcatcgacatcctcaccgagcccaaagacatcgggaaacggctcgaggtgcggaagaccgtgaccgcgtgcctgggcgagcccaaccacatcactcggctggagcacgctcaggcgcggctcaccctgtcctataatcgccgtggcgacctggccatccacctggtcagccccatgggcacccgctccaccctgctggcagccaggccacatgactactccgcagatgggtttaatgactgggccttcatgacaactcattcctgggatgaggatccctctggcgagtgggtcctagagattgaaaacaccagcgaagccaacaactatgggacgctgaccaagttcaccctcgtactctatggcaccgcccctgaggggctgcccgtacctccagaaagcagtggctgcaagaccctcacgtccagtcaggcctgtgtggtgtgcgaggaaggcttctccctgcaccagaagagctgtgtccagcactgccctccagggttcgccccccaagtcctcgatacgcactatagcaccgagaatgacgtggagaccatccgggccagcgtctgcgccccctgccacgcctcatgtgccacatgccaggggccggccctgacagactgcctcagctgccccagccacgcctccttggaccctgtggagcagacttgctcccggcaaagccagagcagccgagagtccccgccacagcagcagccacctcggctgcccccggaggtggaggcggggcaacggctgcgggcagggctgctgccctcacacctgcctgaggtggtggccggcctcagctgcgccttcatcgtgctggtcttcgtcactgtcttcctggtcctgcagctgcgctctggctttagttttcggggggtgaaggtgtacaccatggaccgtggcctcatctcctacaaggggctgccccctgaagcctggcaggaggagtgcccgtctgactcagaagaggacgagggccggggcgagaggaccgcctttatcaaagaccagagcgccctctgatgagcccactgcccaccccctcaagccaatcccctccttgggcactttttaattcaccaaagtatttttttatcttgggactgggtttggaccccagctgggaggcaagaggggtggagactgcttcccatcctaccctcgggcccacctggccacctgaggtgggcccaggaccagctggggcgtggggagggccgtaccccaccctcagcaccccttccatgtggagaaaggagtgaaacctttagggcagcttgccccggccccggccccagccagagttcctgcggagtgaagaggggcagcccttgcttgttgggattcctgacccaggccgcagctcttgcccttccctgtccctctaaagcaataatggtcccatccaggcagtcgggggctggcctaggagatatctgagggaggaggccacctctccaagggcttctgcaccctccaccctgtcccccagctctggtgagtcttggcggcagcagccatcataggaagggaccaaggcaaggcaggtgcctccaggtgtgcacgtggcatgtggcctgtggcctgtgtcccatgacccacccctgtgctccgtgcctccaccaccactggccaccaggctggcgcagccaaggccgaagctctggctgaaccctgtgctggtgtcctgaccaccctcccctctcttgcacccgcctctcccgtcagggcccaagtccctgttttctgagcccgggctgcctgggctgttggcactcacagacctggagcccctgggtgggtggtggggaggggcgctggcccagccggcctctctggcctcccacccgatgctgctttcccctgtggggatctcaggggctgtttgaggatatattttcactttgtgattatttcactttagatgctgatgatttgtttttgtatttttaatgggggtagcagctggactacccacgttctcacacccaccgtccgccctgctcctccctggctgccctggccctgaggtgtgggggctgcagcatgttgctgaggagtgaggaatagttgagccccaagtcctgaagaggcgggccagccaggcgggctcaaggaaagggggtcccagtgggaggggcaggctgacatctgtgtttcaagtggggctcgccatgccgggggttcataggtcactggctctccaagtgccagaggtgggcaggtggtggcactgagcccccccaacactgtgccctggtggagaaagcactgacctgtcatgcccccctcaaacctcctcttctgacgtgccttttgcacccctcccattaggacaatcagtcccctcccatctgggagtccccttttcttttctaccctagccattcctggtacccagccatctgcccaggggtgccccctcctctcccatccccctgccctcgtggccagcccggctggttttgtaagatgctgggttggtgcacagtgatttttttcttgtaatttaaacaggcccagcattgctggttctatttaatggacatgagataatgttagaggttttaaagtgattaaacgtgcagactatgcaaaccag

SEQ ID NO: 29281 - DNA, 3264 bp, Homo Sapiens
agccccgcgctttcgtgagccccctcgaggaacctggtctccgcatccagttaccacctcctgcctcagaggccatctgagcccttcgcacctcgcccctcagtccccccttccccccccgcccgcgtcgcctcgctccctcccgcccccccatcatcccttccctcgcagttcccctgtcctgaggggagccccgccacgggcagcgcggcggcggcggcaggagggagaaagtgaagcggtagctcgcgcacactcgcgccctcactcccggctaggcggcacccaccgccgggaggaggaggaggagccgagaggagctgagcgagcgcggaagtagctgctgctggtggtgacaatgtcaaataacggcctagacattcaagacaaacccccagcccctccgatgagaaataccagcactatgattggagccggcagcaaagatgctggaaccctaaaccatggttctaaacctctgcctccaaacccagaggagaagaaaaagaaggaccgattttaccgatccattttacctggagataaaacaaataaaaagaaagagaaagagcggccagagatttctctcccttcagattttgaacacacaattcatgtcggttttgatgctgtcacaggggagtttacgggaatgccagagcagtgggcccgcttgcttcagacatcaaatatcactaagtcggagcagaagaaaaacccgcaggctgttctggatgtgttggagttttacaactcgaagaagacatccaacagccagaaatacatgagctttacagataagtcagctgaggattacaattcttctaatgccttgaatgtgaaggctgtgtctgagactcctgcagtgccaccagtttcagaagatgaggatgatgatgatgatgatgctaccccaccaccagtgattgctccacgcccagagcacacaaaatctgtatacacacggtctgtgattgaaccacttcctgtcactccaactcgggacgtggctacatctcccatttcacctactgaaaataacaccactccaccagatgctttgacccggaatactgagaagcagaagaagaagcctaaaatgtctgatgaggagatcttggagaaattacgaagcatagtgagtgtgggcgatcctaagaagaaatatacacggtttgagaagattggacaaggtgcttcaggcaccgtgtacacagcaatggatgtggccacaggacaggaggtggccattaagcagatgaatcttcagcagcagcccaagaaagagctgattattaatgagatcctggtcatgagggaaaacaagaacccaaacattgtgaattacttggacagttacctcgtgggagatgagctgtgggttgttatggaatacttggctggaggctccttgacagatgtggtgacagaaacttgcatggatgaaggccaaattgcagctgtgtgccgtgagtgtctgcaggctctggagttcttgcattcgaaccaggtcattcacagagacatcaagagtgacaatattctgttgggaatggatggctctgtcaagctaactgactttggattctgtgcacagataaccccagagcagagcaaacggagcaccatggtaggaaccccatactggatggcaccagaggttgtgacacgaaaggcctatgggcccaaggttgacatctggtccctgggcatcatggccatcgaaatgattgaaggggagcctccatacctcaatgaaaaccctctgagagccttgtacctcattgccaccaatgggaccccagaacttcagaacccagagaagctgtcagctatcttccgggactttctgaaccgctgtctcgagatggatgtggagaagagaggttcagctaaagagctgctacagcatcaattcctgaagattgccaagcccctctccagcctcactccactgattgctgcagctaaggaggcaacaaagaacaatcactaaaaccacactcaccccagcctcattgtgccaagccttctgtgagataaatgcacatttcagaaattccaactcctgatgccctcttctccttgccttgcttctcccatttcctgatctagcactcctcaagactttgatccttggaaaccgtgtgtccagcattgaagagaactgcaactgaatgactaatcagatgatggccatttctaaataaggaatttcctcccaattcatggatatgagggtggtttatgattaagggtttatataaataaatgtttctagtcttccgtgtgtcaaaatcctcacctccttcataaccatctcccacaattaattcttgactatataaatttatggtttgataatattatcaatttgtaatcaattgagatttctttagtgcttgcttttctgtgactcaactgcccagacacctcattgtacttgaaaactggaacagcttgggaatgccatggggtttgataatctgccagggacatgaagaggctcagcttcctggaccatgactttggctcagctgatcctgacatgggagaacaaccacatttttctttgtgtgtgcttctagcagctgttcgggaggaccttgacccaatagtgttcccatgctgtttcttgtgaaatgctctcggctatgtagcagcttttgattccctgcataccctaggctgctgcccctatcctgtcccttgtttataacattgagaggttttctagggcacatactgagtgagagcagtgttgagaagtcggggaaaatggtgactacttttagagcaaggctgggcatcagcacctgtccagctctacttgtgtgatgtttcaggaactcagcccctttttctgcctaggataaggagctgaaagattaacttggatcttctaatggtccaaatcttttggtcacaataaagagtctccaaattagagactgcatgttagttctggatggatttggtggcctgacatgataccctgccagctgtgaggggaccccgtttttaagatgcatggccaagctctctgcaaatggaaatgcttacactgggtgttggggatgtttgctacctcctgctatttttgtggttttggttctcccactatggtaggacccctggccagcattgtggcttgtcatgtcagccccattgactaccttctcatgctctgaggtactactgcctctgcagcacaaatttctatttctgtcaataaaaggagatgaaaatattctaaaaaaaaaa

SEQ ID NO: 29282 - DNA, 5802 bp, Homo Sapiens
ccccttccctcccctcccctccccgcaccgcgcgctagcccggggcggctccgcagcccgccgggagctctgaccgaggcgcctcgctggggcggggaccttgccttgcccggggccatttcataattctgaatcatgtctgataacggagaactggaagataagcctccagcacctcctgtgcgaatgagcagcaccatctttagcactggaggcaaagaccctttgtcagccaatcacagtttgaaacctttgccctctgttccagaagagaaaaagcccaggcataaaatcatctccatattctcaggcacagagaaaggaagtaaaaagaaagaaaaggaacggccagaaatttctcctccatctgattttgagcacaccatccatgttggctttgatgctgttactggagaattcactggcatgccagaacagtgggctcgattactacagacctccaatatcaccaaactagagcaaaagaagaatcctcaggctgtgctggatgtcctaaagttctacgactccaacacagtgaagcagaaatatctgagctttactcctcctgagaaagatggctttccttctggaacaccagcactgaatgccaagggaacagaagcacccgcagtagtgacagaggaggaggatgatgatgaagagactgctcctcccgttattgccccgcgaccggatcatacgaaatcaatttacacacggtctgtaattgaccctgttcctgcaccagttggtgattcacatgttgatggtgctgccaagtctttagacaaacagaaaaagaagactaagatgacagatgaagagattatggagaaattaagaactatcgtgagcataggtgaccctaagaaaaaatatacaagatatgaaaaaattggacaaggggcttctggtacagttttcactgctactgacgttgcactgggacaggaggttgctatcaaacaaattaatttacagaaacagccaaagaaggaactgatcattaacgagattctggtgatgaaagaattgaaaaatcccaacatcgttaactttttggacagttacctggtaggagatgaattgtttgtggtcatggaataccttgctggggggtcactcactgatgtggtaacagaaacgtgcatggatgaagcacagattgctgctgtatgcagagagtgtttacaggcattggagtttttacatgctaatcaagtgatccacagagacatcaaaagtgacaatgtacttttgggaatggaaggatctgttaagctcactgactttggtttctgtgcccagatcacccctgagcagagcaaacgcagtaccatggtcggaacgccatactggatggcaccagaggtggttacacggaaagcttatggccctaaagtcgacatatggtctctgggtatcatggctattgagatggtagaaggagagcctccatacctcaatgaaaatcccttgagggccttgtacctaatagcaactaatggaaccccagaacttcagaatccagagaaactttccccaatatttcgggatttcttaaatcgatgtttggaaatggatgtggaaaaaaggggttcagccaaagaattattacagcatcctttcctgaaactggccaaaccgttatctagcttgacaccactgatcatggcagctaaagaagcaatgaagagtaaccgttaacatcactgctgtggcctcatactcttttttccattttctacaagaagccttttagtatatgaaaattattactctttttggggtttaaagaaatggtctgcataacctgaatgaaagaagcaaatgactattctctgaagacaaccaagagaaaattgcaaaaagacaagtatgacttttatatgaaccccttctttagggtccagaaggaattgtggactgaatcactagccttaggtctttcagcaaacagcctatcagggccatttatcatgtgtgagatttgcattttactttgctgactttgttgtaatagatcccattcattgtcccctttggggtatttccaatacttgaatggcagattggagtttttcagagtatgtgtttcatctgctagtctttctctccttcatagcttttcttttcctggacttgctccttttgagttgcttttgcgtttctcatgcctaggcaagtgtaatagaaattatgtagctccttatgttggcaaaggagctctatatagtttcactttgtataaaagttaggaccagctgttgttacatgtaatattttagttcagaacttgacctgaaggaagggaagaaaagtatgtgatttttaccttttttaacaaatgtgaaaaagtcagttttagaaatttcgtggtagtaagttcggcatttgttacatgtatagagagaagactaataatctctatttataactaaatcattgagatagaaaaagattcccattgactgtagacttcttcccattttgtcttcccttctgcctgtttccccttcaggcttggctctaggaaccaaagtgatttgttgttgttccaacctgggctttgtgactttggttagtgccactaccttcttccctcctttcccccttcaatttggaaataaatttctgtatatgttgcaattttaggtttaggtttgttctttttctttttcattaatcctctctcacctcacagataccccctcccatggcaaataatataataaccagtgaattttcaggaatttaaaaattagcttttttccacttaaaggagaaaaatatttgggactagcagcagaggcagtaagagatgtgaaccttggtgagctctgatacagtgagaagagattatactcatgaaagagaatgttagtgttacagagaagcagccgatagcaaatcgactgtagagacttggcggcggtggcattgccccaggtcgtcagcagtgtggtattatctatgagaacttgagcgacagagtatttcttgatgaatttatagatcatttgagatgttgagttactttagtttagttttgttttgttttttcaaataagtagagactattgtaaaaaacgagaaaggaaaatgaaatgtgcgtgttgatagcaataatttgtttcttttaaagattctaaaaggtctgagacctgtagcattaattatttgagtgccctcccttctcccctcccctcccttttctcttctcttttttcctctcctctccttctcctttattcattgttttgcttttggagtaggtgttgttcaagtatctgtggtttggttctggcattttgttcccaccatccccttcccccattaacttcccccctgcttgccatcctgcagtagtataaatcatgaataaaaaataattttgctgttgtagtatacattggagaaactggcaggttttatttccattattttatttccactatatctatgataagatgcaattataaggagagaagtgactgttttttattgataaggcaagattttcagaaaaatgagtaaaataattaatgaaacatatttagagcacttaatggtctctgttttcaatataattcttgatttcatttttctctggaatatattggccttctacagctattactgaattatagaaactggtttatttctggcagaaagctgcagtgccacctgagttccaaattttaccattctttgtaaacagttggatggattatgataaagaagatgctaccaatgaaatagaaaaccaacgagatgagaagactgtgatcctcatgtactcagaggcacttccctcctaagtcaaagaccatcctcactgactatgtgccaacgcctcgtttcaggcttgtgactcaacaaagggcttttccattgatagaagcagtttgggatttgtagttgcgacttcttcgatagttacctgcacgtccattgctggcaactgacttgtcattaaaacctggctctttggttaagggagctacgctgtggtttattcttaagttacgtggataaactaacctctaacagaaatatactttggttaattttgaaatgtgtcatttttaaacaatcttaaaagtaatacagaattgtgatttattaattttaaaacattcagaacttgttgaaagaaaaattatatctgaatcaagattcatgttttttatttttattttttttgatacagagtctcactctgtcactcaggctggagtgcagtgacatgatctcagctcactgcaacctccgcttcctgggttcaagcaattctcatgcctcagcctcctgagtagctgagaccacaggcacccgccaccacacccagctatttttttgtatttttagtagagacagagtctcaccacattgcccaggctggtctccaactcctgagctcaggcagtctgcccaccttggcctcccaaagtgctgcagttacaggcgtgagccactgcacctggcctcatgttttttaaataattgccttttatatttaccctttttgtcatcactttagaatgaaaattcccatttaaatctgaaagttaccttaatagtcctcttgtgttattaggacagtattattatagtacttatttattttattttagatttaaagttatcttctctttttcttttttcttctgctgcttttagggacaattaaaactgggaaactatgaaacatggaacattttatcctacctgaaagtaaacgagtaattgtgaagcataagacactgaggctaatacaactctgtcttcatgtgttgactgcctggcacatagtattcattctcttccctttaacatagaagtgtccagctgcgtacagtctagtaaccagcaactgtaaacgaacctgtgcctctaacaagcgattctaaaccacctatgagtatttcttttagggctcacttaaatacatgtttgtatatactgtattctagccagaataattttagatctgatcaggtagtagctaaaattagaaaaaaacaaaatagatgcttaaagaatttgcatccatttttgagtctaaatcttttaaaatatactgagatccacatctagtgaaatgtcagtgtcaaaatattatagattatagctaaaatccagattaatactcatttggggttttttatagtggaacttcatagtaatacaaaaagcagattgtcttcctgtctccgctgctcccacagtaggtattgaaactggtaaaatcagttttttgatagtgtgtgtatataagaaaaaatagatacacacattcttttttctcagtcaacacattgattgaacactctggcaaagatgctgtggtggatgaggttggagttcgaaagaagaagcaagcgctggcctggccttgaaagaaccgaagtctttcccattcacttctctagaaagctgccaagacagaggcagaaagaaatggatgatagttctgtcaagcacacttctgttctcttagaacttagaagtgtttctaagagaacagaagtaataagagaaacagttacgtgtggaattcaacatctttggttggaacgcattggctttttttttcttgttttgatagaaatggaattaagcaaaagtagtttttgtcttttctgttgtcttcaaattttatgccttttatttttaatttaatcccgttcaattatttaattgttatacattgacattaactgctgtattttgactttgttcaataattttgttctttcagggctagaaataaactttttaaaaaaaaaaaaaaaa

SEQ ID NO: 29283 - DNA, 11025 bp, Homo Sapiens
gagcatcttttggggggagggaattcagcggatcagtcttaagaggagcttttttttggagcgagaaatcatataaaataaaatgaaataaaacaaggaggaaggcaaccagctgttaggggaaaaataaggcagataaaggagcggggagagaaattaattgccaaccaggaggagttgggctgtatttttcaaaggtggggagagtggagcacacaccttgaggaggaaagcgagaaagaaaagaaaaaagcaagtggaaaggggggctcgcccaagaagggtgaagaagcgaagaaagtcgaggcgccgaggctcccaaagctggcagctccgggtggcggtgcaggggcgaagggggggcggggggaaccgtcggacatgcggctctggagttgggtgctgcacctggggctgctgagcgccgcgctgggctgcgggctggccgagcgtccccgccgggcccggagagacccgcgggccggccgacccccgcgccccgccgccggcccggccacctgcgccacccgggcggcccgcggccgccgcgcctcgccgccgccgccgccgccgccgggcggtgcctgggaagccgtgcgcgtcccccggcggcggcagcagcgggaggcgaggggcgccaccgaggagccgagcccgccgagccgggcgctctatttcagcgggcgaggcgagcagctgcgcctccgggccgacctcgagctgccccgggacgcgttcacgctgcaagtgtggctgcgagcggaggggggccagaggtctccggcagtgatcacagggctgtatgacaaatgttcttatatctcacgtgaccgaggatgggtcgtgggcattcacaccatcagtgaccaagacaacaaagacccacgctactttttctccttgaagacagaccgagcccggcaagtgaccaccatcaatgcccaccgcagctacctcccaggccagtgggtatacctagctgccacctatgatgggcagttcatgaagctctatgtgaatggtgcccaggtggccacctctggggaacaagtgggtggcatattcagcccactgacccagaagtgcaaagtgctcatgttagggggcagtgccctgaatcacaactaccggggctacatcgagcacttcagtctgtggaaggtggccaggactcagcgggagatactgtctgacatggaaacccatggcgcccacactgctctacctcagctcctcctccaggagaactgggacaatgtgaagcatgcctggtcccccatgaaggatggcagcagccccaaagtggaattcagcaatgcccacggctttctgctggacacgagtctggagcctcctctgtgcggacagacattgtgtgacaacacagaggtcattgccagctacaatcagctctcaagtttccgccagcccaaggtggtgcgctaccgcgtggtcaacctctatgaagatgatcataagaacccgacggtgacgcgcgagcaggtggacttccagcaccatcagctggctgaggccttcaagcaatacaacatctcctgggagctggacgtgctggaggtgagcaactcctcccttcgccgccgcctcatcctggccaactgtgacatcagcaagattggggatgagaactgtgaccccgagtgcaaccacacgctgacgggccacgacggcggggattgccgccacctgcgccaccctgccttcgtgaagaagcagcacaacggggtgtgtgacatggactgcaactatgaacggttcaactttgatggtggagagtgctgtgaccctgaaatcaccaatgtcactcagacttgctttgaccccgactctccacacagagcctacttggatgttaatgagctgaagaacattcttaaattggatggatcaacacatctcaatattttctttgcaaaatcctcagaggaggagttggcaggagtagcaacttggccatgggacaaggaggccctgatgcacttaggtggcattgtcttgaacccatctttctatggcatgcctgggcacacccacaccatgatccatgagattggtcacagcctgggcctctatcacgtcttccgaggcatctcagaaatccagtcctgcagtgacccctgcatggagacagagccctccttcgagactggagacctctgcaatgataccaacccagcccctaaacacaagtcctgtggtgacccagggccaggaaatgacacctgtggctttcatagcttcttcaacactccttacaacaacttcatgagctatgcagatgacgactgtacggactccttcacgcccaatcaagtcgccagaatgcactgttacctggacctggtctaccagggctggcagccctccaggaaaccagcgcctgttgccctcgccccccaagttctgggccacacaacggactctgtgacactggagtggttcccacctatagatggccatttctttgaaagagaattgggatcagcatgtcatctttgcctggaagggagaatcctggtgcagtatgcttccaacgcttcctccccaatgccctgcagcccatcaggacactggagccctcgtgaagcagaaggtcatcctgatgttgaacagccctgtaagtccagtgtccgcacctggagcccaaattcagctgtcaacccacacacggttcctccagcctgccctgagcctcaaggctgctacctcgagctggagttcctctaccccttggtccctgagtctctgaccatttgggtgacctttgtctccactgactgggactctagtggagctgtcaatgacatcaaactgttggctgtcagtgggaagaacatctccctgggtcctcagaatgtcttctgtgatgtcccactgaccatcagactctgggacgtgggcgaggaggtgtatggcatccaaatctacacgctggatgagcacctggagatcgatgctgccatgttgacctccactgcagacaccccactctgtctacagtgtaagcccctgaagtataaggtggtccgggaccctcctctccagatggatgtggcctccatcctacatctcaataggaaattcgtagacatggatctaaatcttggcagtgtgtaccagtattgggtcataactatttcaggaactgaagagagtgagccatcacctgctgtcacatacatccatggaagtgggtactgtggcgatggcattatacaaaaagaccaaggtgaacaatgcgacgacatgaataagatcaatggtgatggctgctcccttttctgccgacaagaagtctccttcaattgtattgatgaacccagccggtgctatttccatgatggtgatggggtatgtgaggagtttgaacaaaaaaccagcattaaggactgtggtgtctacacgccccagggattcctggatcagtgggcatccaatgcttcagtatctcatcaagaccagcaatgcccaggctgggtcatcatcggacagccagcagcatcccaggtgtgtcgaaccaaggtgatagatctcagtgaaggcatttcccagcatgcctggtacccttgcaccatcagctacccatattcccagctggctcagaccactttttggctccgggcgtatttttctcaaccaatggttgccgcagctgtcattgtccacctggtgacggatgggacatattatggggaccaaaagcaggagaccatcagcgtgcagctgcttgataccaaagatcagagccacgatctaggcctccatgtcctgagctgcaggaacaatcccctgattatccctgtggtccatgacctcagccagcccttctaccacagccaggcggtacgtgtgagcttcagttcgcccctggtcgccatctcgggggtggccctccgttccttcgacaactttgaccccgtcaccctgagcagctgccagagaggggagacctacagccctgccgagcagagctgcgtgcacttcgcatgtgagaaaactgactgtccagagctggctgtggagaatgcttctctcaattgctccagcagcgaccgctaccacggtgcccagtgtactgtgagctgccggacaggctacgtgctccagatacggcgggatgatgagctgatcaagagccagacgggacccagcgtcacagtgacctgtacagagggcaagtggaataagcaggtggcctgtgagccagtcgactgcagcatcccagatcaccatcaagtctatgctgcctccttctcctgccctgagggcaccacctttggcagtcaatgttccttccagtgccgtcaccctgcacaattgaaaggcaacaacagcctcctgacctgcatggaggatgggctgtggtccttcccagaggccctgtgtgagctcatgtgcctcgctccaccccctgtgcccaatgcagacctccagaccgcccggtgccgagagaataagcacaaggtgggctccttctgcaaatacaaatgcaagcctggataccatgtgcctggatcctctcggaagtcaaagaaacgggccttcaagactcagtgtacccaggatggcagctggcaggagggagcttgtgttcctgtgacctgtgacccacctccaccaaaattccatgggctctaccagtgtactaatggcttccagttcaacagtgagtgtaggatcaagtgtgaagacagtgatgcctcccagggacttgggagcaatgtcattcattgccggaaagatggcacctggaacggctccttccatgtctgccaggagatgcaaggccagtgctcggttccaaacgagctcaacagcaacctcaaactgcagtgccctgatggctatgccatagggtcggagtgtgccacctcgtgcctggaccacaacagcgagtccatcatcctgccaatgaacgtgaccgtgcgtgacatcccccactggctgaaccccacacgggtagagagagttgtctgcactgctggtctcaagtggtatcctcaccctgctctgattcactgtgtcaaaggctgtgagcccttcatgggagacaattattgtgatgccatcaacaaccgagccttttgcaactatgacggtggggattgctgcacctccacagtgaagaccaaaaaggtcaccccattccctatgtcctgtgatctacaaggtgactgtgcttgtcgggacccccaggcccaagaacacagccggaaagacctccggggatacagccatggctaaggaaggacaagaagttgtcaaagaattcccaacgccaggacccacatccctttggtattgatttcacagtcagctgctcaacggaatggcctctccacaccagggatccttagcacccaaccggtctgcctttaattttacccaggaaggactcacattggggcgaatgaaccaagtttcgccatgctggatgatgaaatggattcccatcccaaagtctgagatggattgcatatacagtgtgcagtcccagagcctcctaaaattctagccatttgtcacacaaccacagcaagaaacgtgttctatatctagagtgtgcccatctgtgtttagtacacatgcatgcatacacacccatacaaacatctgtgtgagggcagttctggagatgagcagagagagaccggaataaactcaatcttttctttcccaagctcctagccaacactatccttgggagaaagaaatttgcagaaactgctaagaccaagtgtggagatgtcaagctagttcacactctgaggctcagaatatgtaggacatgcacaattgtgcagtcctttgggattggaagtgaaacagtctgtgatcccctaccttctagggaactaggacctaggaagaggtaaagattatcaggtatgcaaagcgccccaattcttctgctgccatgggggattttaccccaactccagggttcgaggccaatctgagaatggcttaggattgcaatgtcaaggtattatatcagccccttgcttgaggcttgaggtcataatatccctctaggacttacctgttcccccagatcttgccttgggaccacatttgctgctacttttcctgctgctctatcctatacattgaataatccaagatggtagaactaggttaggaaaaattccacacaaccaaacagtctgccttaaaagtgacccacatttttccatagctcctcactttttagcccttctgcaagagaaaaaccctcatgggtccacatggtgagaagttaagtttcctgtaagtgggcctctcaccctggaaaggagttgagggacatcagatgctggaaccctcactgaaagtccagaatgtctaagccagtgttagattttgtaaacaagtggaacagtgttaaatttctatgatgttggagccatccagagactactggaattgtcgagacttttggattattatccttatccttatcctaatcttcctagcccttcaggctagagtaggcttcgatcctgagaaccttgctgttgctctgaggagatataattctgggagaaagaatcttttataagaacagtacagattgttctcaagagggccatcagaaggaagccaaagagttcacagcctcagcaccaacaactcaacatggtcatcatgttttctatatggtttttccagctagcagtactcccttccatacctgtgactgggcagtgcttttctctctcccatgtctagcctccaaaagttaagtgaaaattagtcaactgcacgtggaagcccccaccactttggggatctctttatttcttttcagccagggacctgtccactccctttgaattaatatgggaagaaattaatacaggatgaactggagagaagggttgagtgtggcatactttctgaaacctggagctgggaattgcggagaagggaaggtctagactagttacatcacatagggattactgtaaatcaagtcatctcaagtctagtgaagacagccaacagaaacaaaacctagcatagggatagaaaataccatgcacgtgtgcagccccacctaattcctgcatccaaggcaggtgttgttaatctatcatagcacttaaaaaaaaaaaaaaaaagagaccaaaaataactttaggaaccaccatattatatcactcccaatagcactgacctggtgatcaaaaacacttgagaagacatctattggccatctctggccaattacactaagaaacatatcaaggtgcttttggcacaggtgcccacaaatacggatgcagtgctgagatagtttatgagacttgtaccatttcacaaactctgaaattgggttccatattggcaaggctgccacagttgttaagaataatcctctatgtttcttcctcacaaaaccatatctcatttatatccagaccattacttcactataattacaaggacaaattattagcaagaaataagaatagtattagaagaattgatcctattttgaacccctctccagtatcttcacactcttgtcaactctccaggcctctctcttgccctgagttatcagcctgtgtggtgttaactaccttagaaggtacaagctaagaaatgtaacagtatcaaccctcccagttgcttaattatacccataggtaatacaaaaagctctgaagacccaaagatgacattactaatgatgtgatttcaggagccacagaagaaccttaccagcttccctcaaatcagtccttatcctctttctatcttcactcccatcatcatctattttcacactatccagctaagcaaagattcctggaggctgacttgtatcttcagactcacagagtgaattcagctcttctgaatcaagacccacccagtctctttcattcagacctgttgctaacaaatttatatttgccaaggatattaggcaaaagaggctacttgattggtggccaacctcgtgcccacatggaaggtatctttaatagggtcttttcaaaccttagtggaggagggtcagctcaatttgggcaatgcatttgttcccagtttcattttcttcctgggaattaactcgtcatttcattccttcagtcatcttctgtgtaggtgaccggagcactgagaggcagctctgatgcactattgtgtgtcagcagctcaaaggccctaaaacactgaaggttctgcatctgaagtattagattgttagcagcaaaatatgaaagatgaggtggacagtcctctaagccctatttagggaagcttttccaagccacaatcttaactacctacccaaaggatttgcattacccccagattctgtgccaacaaccttttaaggaaatacagtccttgggaaatgagttttgatggtgaattggggtgttaaggaagggaaagattgtcatagatggtagggctttgaaaatgcagggtatcagctgccactcctggcttcaacacattgagtcactgcctagacggttctcttggtcttattcccatcctggccaatgcttaaatactatttgttgaaaataattctttgagacagatttcagctacctcccttccaggttcgatttaacttggttgtaattgtcaatttgttgttataggtcttacctgtgtgaaagaaagaaaaagaaagaaagaaagaaagagaaaggaaattataaggtcaagttaacagttttgaggttttgtgtttttttctggaactacttcaagtgagaaaataaaaaaaaatggtgacaaagctgtacagatagagataatagaagacaaagagattaaaaggaaataaaaatgcatgattaaaaactaagaataaaaaacctatttttatgtttcctaaaggaaattgtttattctacagcctcagtaggtagacacaaacataaagatttccctagaagacatagagtgggatttgataacactgtctgttattttctgtacattgtggtaggtccaggaaatatgacattttcccccttgatgtgttattgttgttgttgggtggggtgggcattttgtttatttgtttggtggcaatcagtggtagtagggagtgggagggcttatattggtttttccagctattaaggggacatattgtgtcgttgtgcttttcacgttataaaatgtttatatttaccagtacagcactgggctttataaagactgcactcagaaccacactgcacagtccagttttttaaaaagctgctacatgacagacaggtaatcccactgagtgagttttgagaaacaaatcaaacgaagtaaacaagaaacataaaaaccaaatagcaaatgaataaaagcctgttcttgtaacttattcaacttttgccaaattcctaccaatcacttgctttttaaaagaaatgtataatagccaaaagagaaattatgtccctgttgtacagaagttagaatttttgactccaggcagcagtttgctcagtgatcttgaacaagttatccaattgcctctacatttgcatcagtttctctagctgcaaaatggggataatactatatacctacctcacagtgggagggcaggagattttgaggccctgaggttttaggtgggctgtgagggccaacgcttgacacaaagtccatgggttattattcaagaatgcacaggcccatcggccttttagaaagacaagacagggagtgcttgtttgatatttcaaggaataaagccggagctcctgaattgtagtccaccttaaaagagagacctgtattggagaatattttatttttttggcaaatttgatcttaccctttaccagttctataatttggttaaaagctgattatgtcctacaatgtcaaagtcagctaactgtcgtctacttaagacttctggtcatttccaacttatagaggaagggagtctctaaaatctcttcttcagaaggcacctcacttctcagacttaaaattccacatcaagtgttccattaaaagaagataaggcattctgagtgcaaacaaatgggggcttcttaaactacacaccagcagtcagtgaggaaaactttgaacaattattgagttgctttcttgggtctctataatcaataacctgtctgcagatatctatctatataaagatattatatataaatataaatttacatatatatgcacatgtatatatagttgtacatatatgtgtgtatatatatacttaaatgtaatatttacaaaataaaactgtgatctcgtctagagaaaatgtattcatattacaaactgctcttccatatttatgtaccatattatacctttttattattgttataattattatgggtatttctaattaatatgatgttgaaacctgtttggcaccttctggaagctaccaaaaaaatgacactccattgaagtgcttaaaagctgttctcataagaattctactggcctattgtaaaaaagaaaaaaaaaaagaaaaagaagaaagacacaaagaaaataatctaaacaccaaaaactaaacacaattccaatcctttttctgtacctcacgcgcataaatttgctgctcctatttttttttctgtttatgtgtttttatggatctaagttaaatcttttggcaatatataaaaatgtaaatagtaaactttatttattaagaatgtcatcttttttaatttatatttacacaattgttcatctaatttattttttctatacagttttaaatactcagacatattttgctgttcatgatatttttatcctgttctcatggatttgttttcccatactgttttctctgatctcaattacaggttggatctcacaaataataatgtcagagacagaaatattttgccactgttgattactatactttaaagttctatattatgaaaatatataatagcttgtacgcttcaaaaaaaaaaaaaaaaaaaaaaaaaaaaaaaaaaaaaaaaaaaaaaaaaaaaaaaa

SEQ ID NO: 29284 - DNA, 1311 bp, Homo Sapiens
tcttgccttccggcccggcgcccgatttccgccttccgacccagctgtgggctgcgccccacgccagcccgcgccccgcatggctgccgccggggccaggcctgtggagctgggcttcgccgagtcggcgccggcgtggcgactgcgcagcgagcagttccccagcaaggtgggcgggcggccggcatggctgggcgcggccgggctgccggggccccaggccctggcctgcgagctgtgcggccgcccgctctccttcctgctgcaggtgtatgcgccgctgcctggccgcccggacgccttccaccgctgcatcttcctcttctgctgccgcgagcagccgtgctgtgccggcctgcgagtttttaggaatcaactacccaggaaaaacgatttttactcatatgagccaccttctgagaatcctcccccagaaacaggagaatcagtgtgtctccagcttaagtctggtgctcatctctgcagggtttgtggctgtttaggccccaaaacgtgctccagatgccacaaagcatattactgcagcaaggagcatcagaccctagactggagattgggacataagcaggcttgtgcacaaccagatcatctggaccatataattccagaccacaacttcctttttccagaatttgaaattgtaatagaaacagaagatgagattatgcctgaggttgtggaaaaggaagattactcagagattatagggagcatgggtgaagcacttgaggaagaactggattccatggcaaaacatgaatccagggaagataaaatttttcagaagtttaaaactcagatagcccttgaaccagaacagattcttagatatggcagaggtattgcccccatctggatttctggtgaaaatattcctcaagaaaaggatattccagattgcccctgtggtgccaagagaatattggaattccaggtcatgcctcagctcctaaactacctgaaggctgacagactgggcaagagcattgactggggcatcctggctgtcttcacctgtgctgagagctgcagcttgggtactggctatacagaagaatttgtgtggaagcaggatgtaacagatacaccgtaaaggcatcttaaagccttgaaaaatgttaataatcttttataccttgcaattccatttctgggattttatcctaaggaaatacttataccaaaaatagaggtgcagagatgttgacagattgcttacacagtgtctacttattagtgaaacaaaagtgtccagtgacagggaattaaataaattttggtacatccaca

SEQ ID NO: 29285 - DNA, 3186 bp, Homo Sapiens
gcggccgcggcggtgcagcagaggcgcctcgggcaggaggagggcggcttctgcgagggcagcctgaggtattaaaaagtgtcagcaaactgcattgaataacagacatcctaagaggggatattttccacctctataatgaagaaaagcaggagtgtgatgacggtgatggctgatgataatgttaaagattattttgaatgtagcttgagtaaatcctacagttcttccagtaacacacttgggatcgacctctggagagggagaaggtgttgctcaggaaacttacagttaccaccactgtctcaaagacagagtgaaagggcaaggactcctgagggagatggtatttccaggccgaccacactgcctttgacaacgcttccaagcattgctattacaactgtaagccaggagtgctttgatgtggaaaatggcccttccccaggtcggagtccactggatccccaggccagctcttccgctgggctggtacttcacgccacctttcctgggcacagccagcgcagagagtcatttctctacagatcagacagcgactatgacttgtcaccaaaggcgatgtcgagaaactcttctcttccaagcgagcaacacggcgatgacttgattgtaactccttttgcccaggtccttgccagcttgcgaagtgtgagaaacaacttcactatactgacaaaccttcatggtacatctaacaagaggtccccagctgctagtcagcctcctgtctccagagtcaacccacaagaagaatcttatcaaaaattagcaatggaaacgctggaggaattagactggtgtttagaccagctagagaccatacagacctaccggtctgtcagtgagatggcttctaacaagttcaaaagaatgctgaaccgggagctgacacacctctcagagatgagccgatcagggaaccaggtgtctgaatacatttcaaatactttcttagacaagcagaatgatgtggagatcccatctcctacccagaaagacagggagaaaaagaaaaagcagcagctcatgacccagataagtggagtgaagaaattaatgcatagttcaagcctaaacaatacaagcatctcacgctttggagtcaacactgaaaatgaagatcacctggccaaggagctggaagacctgaacaaatggggtcttaacatctttaatgtggctggatattctcacaatagacccctaacatgcatcatgtatgctatattccaggaaagagacctcctaaagacattcagaatctcatctgacacatttataacctacatgatgactttagaagaccattaccattctgacgtggcatatcacaacagcctgcacgctgctgatgtagcccagtcgacccatgttctcctttctacaccagcattagacgctgtcttcacagatttggagatcctggctgccatttttgcagctgccatccatgacgttgatcatcctggagtctccaatcagtttctcatcaacacaaattcagaacttgctttgatgtataatgatgaatctgtgttggaaaatcatcaccttgctgtgggtttcaaactgctgcaagaagaacactgtgacatcttcatgaatctcaccaagaagcagcgtcagacactcaggaagatggttattgacatggtgttagcaactgatatgtctaaacatatgagcctgctggcagacctgaagacaatggtagaaacgaagaaagttacaagttcaggcgttcttctcctagacaactataccgatcgcattcaggtccttcgcaacatggtacactgtgcagacctgagcaaccccaccaagtccttggaattgtatcggcaatggacagaccgcatcatggaggaatttttccagcagggagacaaagagcgggagaggggaatggaaattagcccaatgtgtgataaacacacagcttctgtggaaaaatcccaggttggtttcatcgactacattgtccatccattgtgggagacatgggcagatttggtacagcctgatgctcaggacattctcgataccttagaagataacaggaactggtatcagagcatgatacctcaaagtccctcaccaccactggacgagcagaacagggactgccagggtctgatggagaagtttcagtttgaactgactctcgatgaggaagattctgaaggacctgagaaggagggagagggacacagctatttcagcagcacaaagacgctttgtgtgattgatccagaaaacagagattccctgggagagactgacatagacattgcaacagaagacaagtcccccgtggatacataatccccctctccctgtggagatgaacattctatccttgatgagcatgccagctatgtggtagggccagcccaccatgggggccaagacctgcacaggacaagggccacctggcctttcagttacttgagtttggagtcagaaagcaagaccaggaagcaaatagcagctcaggaaatcccacggttgacttgccttgatggcaagcttggtggagagggctgaagctgttgctgggggccgattctgatcaagacacatggcttgaaaatggaagacacaaaactgagagatcattctgcactaagtttcgggaacttatccccgacagtgactgaactcactgactaataacttcatttatgaatcttctcacttgtccctttgtctgccaacctgtgtgccttttttgtaaaacattttcatgtctttaaaatgcctgttgaatacctggagtttagtatcaacttctacacagataagctttcaaagttgacaaacttttttgactctttctggaaaagggaaagaaaatagtcttccttctttcttgggcaatatccttcactttactacagttacttttgcaaacagacagaaaggatacacttctaaccacattttacttccttcccctgttgtccagtccaactccacagtcactcttaaaacttctctctgtttgcctgcctccaacagtacttttaactttttgctgtaaacagaataaaattgaacaaattagggggtagaaaggagcagtggtgtcgttcaccgtgagagtctgcatagaactcagcagtgtgccctgctgtgtcttggaccctgcaatgcggccgc

SEQ ID NO: 29286 - DNA, 2797 bp, Homo Sapiens
acgcgcgccctgcggagcccgcccaactccggcgagccgggcctgcgcctactcctcctcctcctctcccggcggcggctgcggcggaggcgccgactcggccttgcgcccgccctcaggcccgcgcgggcggcgcagcgaggccccgggcggcgggtggtggctgccaggcggctcggccgcgggcgctgcccggccccggcgagcggagggcggagcgcggcgccggagccgagggcgcgccgcggagggggtgctgggccgcgctgtgcccggccgggcggcggctgcaagaggaggccggaggcgagcgcggggccggcggtgggcgcgcagggcggctcgcagctcgcagccggggccgggccaggcgttcaggcaggtgatcggtgtggcggcggcggcggcggcggccccagactccctccggagttcttcttggggctgatgtccgcaaatatgcagaattaccggccgggtcgctcctgaagccagcgcggggagcgagcgcggcggcggccagcaccgggaacgcaccgaggaagaagcccagcccccgccctccgccccttccgtccccaccccctacccggcggcccaggaggctccccggctgcggcgcgcactccctgtttctcctcctcctggctggcgctgcctgcctctccgcactcactgctcgccgggcgccgtccgccagctccgtgctccccgcgccaccctcctccgggccgcgctccctaagggatggtactgaatttcgccgccacaggagaccggctggagcgcccgccccgcgcctcgcctctcctccgagcagccagcgcctcgggacgcgatgaggaccttggcttgcctgctgctcctcggctgcggatacctcgcccatgttctggccgaggaagccgagatcccccgcgaggtgatcgagaggctggcccgcagtcagatccacagcatccgggacctccagcgactcctggagatagactccgtagggagtgaggattctttggacaccagcctgagagctcacggggtccacgccactaagcatgtgcccgagaagcggcccctgcccattcggaggaagagaagcatcgaggaagctgtccccgctgtctgcaagaccaggacggtcatttacgagattcctcggagtcaggtcgaccccacgtccgccaacttcctgatctggcccccgtgcgtggaggtgaaacgctgcaccggctgctgcaacacgagcagtgtcaagtgccagccctcccgcgtccaccaccgcagcgtcaaggtggccaaggtggaatacgtcaggaagaagccaaaattaaaagaagtccaggtgaggttagaggagcatttggagtgcgcctgcgcgaccacaagcctgaatccggattatcgggaagaggacacgggaaggcctagggagtcaggtaaaaaacggaaaagaaaaaggttaaaacccacctaagatgtgaggtgaggatgagccgcagccctttcctgggacatggatgtacatggcgtgttacattcctgaacctactatgtacggtgctttattgccagtgtgcggtctttgttctcctccgtgaaaaactgtgtccgagaacactcgggagaacaaagagacagtgcacatttgtttaatgtgacatcaaagcaagtattgtagcactcggtgaagcagtaagaagcttccttgtcaaaaagagagagagagagagagagagagaaaacaaaaccacaaatgacaaaaacaaaacggactcacaaaaatatctaaactcgatgagatggagggtcgccccgtgggatggaagtgcagaggtctcagcagactggatttctgtccgggtggtcacaggtgcttttttgccgaggatgcagagcctgctttgggaacgactccagaggggtgctggtgggctctgcagggcccgcaggaagcaggaatgtcttggaaaccgccacgcgaactttagaaaccacacctcctcgctgtagtatttaagcccatacagaaaccttcctgagagccttaagtggtttttttttttgtttttgttttgttttttttttttttgttttttttttttttttttttttttacaccataaagtgattattaagcttccttttactctttggctagctttttttttttttttttttttttttttttttaattatctcttggatgacatttacaccgataacacacaggctgctgtaactgtcaggacagtgcgacggtatttttcctagcaagatgcaaactaatgagatgtattaaaataaacatggtatacctacctatgcatcatttcctaaatgtttctggctttgtgtttctcccttaccctgctttatttgttaatttaagccattttgaaagaactatgcgtcaaccaatcgtacgccgtccctgcggcacctgccccagagcccgtttgtggctgagtgacaacttgttccccgcagtgcacacctagaatgctgtgttcccacgcggcacgtgagatgcattgccgcttctgtctgtgttgttggtgtgccctggtgccgtggtggcggtcactccctctgctgccagtgtttggacagaacccaaattctttatttttggtaagatattgtgctttacctgtattaacagaaatgtgtgtgtgtggtttgtttttttgtaaaggtgaagtttgtatgtttacctaatattacctgttttgtatacctgagagcctgctatgttcttcttttgttgatccaaaattaaaaaaaaaataccaccaac

SEQ ID NO: 29287 - DNA, 5598 bp, Homo Sapiens
ggcccctcagccctgctgcccagcacgagcctgtgctcgccctgcccaacgcagacagccagacccagggcggcccctctggcggctctgctcctcccgaaggatgcttggggagtgaggcgaagctgggcgctcctctcccctacagcagcccccttcctccatccctctgttctcctgagccttcaggagcctgcaccagtcctgcctgtccttctactcagctgttacccactctgggaccagcagtctttctgataactgggagagggcagtaaggaggacttcctggagggggtgactgtccagagcctggaactgtgcccacaccagaagccatcagcagcaaggacaccatgcggcttccgggtgcgatgccagctctggccctcaaaggcgagctgctgttgctgtctctcctgttacttctggaaccacagatctctcagggcctggtcgtcacacccccggggccagagcttgtcctcaatgtctccagcaccttcgttctgacctgctcgggttcagctccggtggtgtgggaacggatgtcccaggagcccccacaggaaatggccaaggcccaggatggcaccttctccagcgtgctcacactgaccaacctcactgggctagacacgggagaatacttttgcacccacaatgactcccgtggactggagaccgatgagcggaaacggctctacatctttgtgccagatcccaccgtgggcttcctccctaatgatgccgaggaactattcatctttctcacggaaataactgagatcaccattccatgccgagtaacagacccacagctggtggtgacactgcacgagaagaaaggggacgttgcactgcctgtcccctatgatcaccaacgtggcttttctggtatctttgaggacagaagctacatctgcaaaaccaccattggggacagggaggtggattctgatgcctactatgtctacagactccaggtgtcatccatcaacgtctctgtgaacgcagtgcagactgtggtccgccagggtgagaacatcaccctcatgtgcattgtgatcgggaatgaggtggtcaacttcgagtggacatacccccgcaaagaaagtgggcggctggtggagccggtgactgacttcctcttggatatgccttaccacatccgctccatcctgcacatccccagtgccgagttagaagactcggggacctacacctgcaatgtgacggagagtgtgaatgaccatcaggatgaaaaggccatcaacatcaccgtggttgagagcggctacgtgcggctcctgggagaggtgggcacactacaatttgctgagctgcatcggagccggacactgcaggtagtgttcgaggcctacccaccgcccactgtcctgtggttcaaagacaaccgcaccctgggcgactccagcgctggcgaaatcgccctgtccacgcgcaacgtgtcggagacccggtatgtgtcagagctgacactggttcgcgtgaaggtggcagaggctggccactacaccatgcgggccttccatgaggatgctgaggtccagctctccttccagctacagatcaatgtccctgtccgagtgctggagctaagtgagagccaccctgacagtggggaacagacagtccgctgtcgtggccggggcatgccccagccgaacatcatctggtctgcctgcagagacctcaaaaggtgtccacgtgagctgccgcccacgctgctggggaacagttccgaagaggagagccagctggagactaacgtgacgtactgggaggaggagcaggagtttgaggtggtgagcacactgcgtctgcagcacgtggatcggccactgtcggtgcgctgcacgctgcgcaacgctgtgggccaggacacgcaggaggtcatcgtggtgccacactccttgccctttaaggtggtggtgatctcagccatcctggccctggtggtgctcaccatcatctcccttatcatcctcatcatgctttggcagaagaagccacgttacgagatccgatggaaggtgattgagtctgtgagctctgacggccatgagtacatctacgtggaccccatgcagctgccctatgactccacgtgggagctgccgcgggaccagcttgtgctgggacgcaccctcggctctggggcctttgggcaggtggtggaggccacggctcatggcctgagccattctcaggccacgatgaaagtggccgtcaagatgcttaaatccacagcccgcagcagtgagaagcaagcccttatgtcggagctgaagatcatgagtcaccttgggccccacctgaacgtggtcaacctgttgggggcctgcaccaaaggaggacccatctatatcatcactgagtactgccgctacggagacctggtggactacctgcaccgcaacaaacacaccttcctgcagcaccactccgacaagcgccgcccgcccagcgcggagctctacagcaatgctctgcccgttgggctccccctgcccagccatgtgtccttgaccggggagagcgacggtggctacatggacatgagcaaggacgagtcggtggactatgtgcccatgctggacatgaaaggagacgtcaaatatgcagacatcgagtcctccaactacatggccccttacgataactacgttccctctgcccctgagaggacctgccgagcaactttgatcaacgagtctccagtgctaagctacatggacctcgtgggcttcagctaccaggtggccaatggcatggagtttctggcctccaagaactgcgtccacagagacctggcggctaggaacgtgctcatctgtgaaggcaagctggtcaagatctgtgactttggcctggctcgagacatcatgcgggactcgaattacatctccaaaggcagcacctttttgcctttaaagtggatggctccggagagcatcttcaacagcctctacaccaccctgagcgacgtgtggtccttcgggatcctgctctgggagatcttcaccttgggtggcaccccttacccagagctgcccatgaacgagcagttctacaatgccatcaaacggggttaccgcatggcccagcctgcccatgcctccgacgagatctatgagatcatgcagaagtgctgggaagagaagtttgagattcggccccccttctcccagctggtgctgcttctcgagagactgttgggcgaaggttacaaaaagaagtaccagcaggtggatgaggagtttctgaggagtgaccacccagccatccttcggtcccaggcccgcttgcctgggttccatggcctccgatctcccctggacaccagctccgtcctctatactgccgtgcagcccaatgagggtgacaacgactatatcatccccctgcctgaccccaaacccgaggttgctgacgagggcccactggagggttcccccagcctagccagctccaccctgaatgaagtcaacacctcctcaaccatctcctgtgacagccccctggagccccaggacgaaccagagccagagccccagcttgagctccaggtggagccggagccagagctggaacagttgccggattcggggtgccctgcgcctcgggcggaagcagaggatagcttcctgtagggggctggcccctaccctgccctgcctgaagctccccccctgccagcacccagcatctcctggcctggcctgaccgggcttcctgtcagccaggctgcccttatcagctgtccccttctggaagctttctgctcctgacgtgttgtgccccaaaccctggggctggcttaggaggcaagaaaactgcaggggccgtgaccagccctctgcctccagggaggccaactgactctgagccagggttcccccagggaactcagttttcccatatgtaagatgggaaagttaggcttgatgacccagaatctaggattctctccctggctgacaggtggggagaccgaatccctccctgggaagattcttggagttactgaggtggtaaattaacttttttctgttcagccagctacccctcaaggaatcatagctctctcctcgcactttttatccacccaggagctagggaagagaccctagcctccctggctgctggctgagctagggcctagccttgagcagtgttgcctcatccagaagaaagccagtctcctccctatgatgccagtccctgcgttccctggcccgagctggtctggggccattaggcagcctaattaatgctggaggctgagccaagtacaggacacccccagcctgcagcccttgcccagggcacttggagcacacgcagccatagcaagtgcctgtgtccctgtccttcaggcccatcagtcctggggctttttctttatcaccctcagtcttaatccatccaccagagtctagaaggccagacgggccccgcatctgtgatgagaatgtaaatgtgccagtgtggagtggccacgtgtgtgtgccagtatatggccctggctctgcattggacctgctatgaggctttggaggaatccctcaccctctctgggcctcagtttccccttcaaaaaatgaataagtcggacttattaactctgagtgccttgccagcactaacattctagagtattccaggtggttgcacatttgtccagatgaagcaaggccatataccctaaacttccatcctgggggtcagctgggctcctgggagattccagatcacacatcacactctggggactcaggaaccatgccccttccccaggcccccagcaagtctcaagaacacagctgcacaggccttgacttagagtgacagccggtgtcctggaaagccccaagcagctgccccagggacatgggaagaccacgggacctctttcactacccacgatgacctccgggggtatcctgggcaaaagggacaaagagggcaaatgagatcacctcctgcagcccaccactccagcacctgtgccgaggtctgcgtcgaagacagaatggacagtgaggacagttatgtcttgtaaaagacaagaagcttcagatggtaccccaagaaggatgtgagaggtggccgcttggagtttgcccctcacccaccagctgccccatccctgaggcagcgctccatgggggtatggttttgtcactgcccagacctagcagtgacatctcattgtccccagcccagtgggcattggaggtgccaggggagtcagggttgtagccaagacgcccccgcacggggagggttgggaagggggtgcaggaagctcaacccctctgggcaccaaccctgcattgcaggttggcaccttacttccctgggatccccagagttggtccaaggagggagagtgggttctcaatacggtaccaaagatataatcacctaggtttacaaatatttttaggactcacgttaactcacatttatacagcagaaatgctattttgtatgctgttaagtttttctatctgtgtacttttttttaagggaaagattttaatattaaacctggtgcttctcactcac

SEQ ID NO: 29288 - DNA, 4576 bp, Homo Sapiens
gatccccgcccctgctgcccgccacgtccctcacgtaccactcggcagaggcgcggggaaacctggcgtactggctgtggcttctctagcgggactcggcatgaggctggcgcggctgcttcgcggagccgccttggccggcccgggcccggggctgcgcgccgccggcttcagccgcagcttcagctcggactcgggctccagcccggcgtccgagcgcggcgttccgggccaggtggacttctacgcgcgcttctcgccgtccccgctctccatgaagcagttcctggacttcggatcagtgaatgcttgtgaaaagacctcatttatgtttctgcggcaagagttgcctgtcagactggcaaatataatgaaagaaataagtctccttccagataatcttctcaggacaccatccgttcaattggtacaaagctggtatatccagagtcttcaggagcttcttgattttaaggacaaaagtgctgaggatgctaaagctatttatgactttacagatactgtgatacggatcagaaaccgacacaatgatgtcattcccacaatggcccagggtgtgattgaatacaaggagagctttggggtggatcctgtcaccagccagaatgttcagtactttttggatcgattctacatgagtcgcatttcaattagaatgttactcaatcagcactctttattgtttggtggaaaaggcaaaggaagtccatctcatcgaaaacacattggaagcataaatccaaactgcaatgtacttgaagttattaaagatggctatgaaaatgctaggcgtctgtgtgatttgtattatattaactctcccgaactagaacttgaagaactaaatgcaaaatcaccaggacagccaatacaagtggtttatgtaccatcccatctctatcacatggtgtttgaacttttcaagaatgcaatgagagccactatggaacaccatgccaacagaggtgtttacccccctattcaagttcatgtcacgctgggtaatgaggatttgactgtgaagatgagtgaccgaggaggtggcgttcctttgaggaaaattgacagacttttcaactacatgtattcaactgcaccaagacctcgtgttgagacctcccgcgcagtgcctctggctggttttggttatggattgcccatatcacgtctttacgcacaatacttccaaggagacctgaagctgtattccctagagggttacgggacagatgcagttatctacattaaggctctgtcaacagactcaatagaaagactcccagtgtataacaaagctgcctggaagcattacaacaccaaccacgaggctgatgactggtgcgtccccagcagagaacccaaagacatgacgacgttccgcagtgcctagacacacttgggacatcggaaaatccaaatgtggcttttgtattaaatttggaaggtatggtgttcagaactatattataccaagtactttatttatcgttttcacaaaactatttgagtagaataaatggaaactgaattccatttgtgcccgttaaacctcctaaaggatgaaattgcacctattttacacttatattttcacagttaattgaacatatttttaaacaactgtagttttgggcaacttttcactttgtggtagacttcagaagtgtggaaatcttcgggtttctataggaaactagttttttttttttaagaaatactttcatttatgtttgctagaaacattttctaaatgatagtgattagctggttagccatcttcctgttatttggaggagttctgccatcttttattcggtagtgacagctgtaatatggtcttcatgtttatcagtgacttgactacaagtaaagcagaaaacagttggcctgtaatcacagaaccagccacccttcggcgtctacatgcattgtcttagctctgaggttaatttaccatttttaaattttattgtaaagaagtgtaatgactagctctctgtggatctatgccaaaatcatgggccatcttttctaagtgtacttctgattaatgcaaggggaaatttttatactgaaaacaaacaaacaaactagcagctactaaaatagagaagaaattgagggcaaagtaatatgtctccaaaactgaactgattgcttgttgagattacctagaaagcttttggaaaaaaatagagcttttctgcatcctactccagatacactgaatcggaatccctagggctagagcctagaaatctcactttttaaaatgcttccaaggtaagtctgatgcctaccctaggttgggaaccactctttcaaagtaaacagtgatgacacagcatttgctaaagtaacatctgtaggttttggtttccacctatttaaagtcagatttatagactcgaggagacagaaactgaatcccacacctggtgcaattagaagcataattagaagcagaagaacaaaatgccacgtaaccaaagcatcagagccatcattgcacgtgtctttttttcttttttcttttttttttttcaagacagggtctcgctcttttgcccaggatggagtacagtggcatggtcaaggctcactgcagcttcaatcttctgggctcaagtaatccttccacctcagcctcccatatagctggaactacagttgtgcactaccacacccagctaattttttgatttcttgtggagatgaggtctcagtatgttcccaggctagtgttgaactcctgagctcaagaaatcctcctgcctgagtctctgaaagtgctgggattacaggcgtgagccaccacacatggcctattgcacaagtcttgacaaacaacatatattttctaaaactatccagatttcattatcagggaaaagtttgcttaggtttattacagcagtccttggcatttgtatggtaatttgtactttacaaatactttgatatattataactctattggtctttgaaacaaagcgatacagtgtaggtggtatcattctctttctcactcagtgtggcccagagttgctcagaattggagcagagcctgagacgtatctgcagatcctgtcatcagctggcaagtccaggagactgtgtcatttagagactgtgttgttagttatccctcaacatcttctaaggtggcaggaaataatattggaaataacattttaaagtaaaaattttaaagtttaaagaagagttttgccacttaaacaggggagctttgtctggaaaatacactgagttgaaacacttcatccttggaaggattatataagatgaacagttgtgataaatgtgtagattagagggatgtgaatgggcagttagtccagtgccctcatttaagaggccaagatcctgattcagaggaggcatcctttgcccagagctgcttagctaatctgaccaaatgttgggaaaaatgtctcacctaacccactattccttaattatggattttgtgaaaaacaatagaacatgttaatgagtaatttatattagttcgatgtattacaattttttagctttaaattacagttttcttataatgttgaaatgttttagaatcctttgaatctaagtatttgtttcctaaatgaaacatttgtacaacatttgatgtttttacttatgaaatattctcctcccccaagaaaatttaaactttttctctctatttaaaagctaagaaatgttttaaaggaaaaatgaaattatcttcctttagcttatttttaaggtaaaacagctttttactctgttattgtggtaatggacagaatattacatacaaaaatattctgggagagctttttcctagttggttttaaatcattgtgccacctgaaaggtttttagattttataggagctaatttgtccaccagcattaatgtaacacagtgtagttatgaaaatatattgaaggacaggaagtggacacgaagtgatttttgtaacctgagcagttaatgaatgtgccaacattttctaggaagggacagcaagaatattctgctctgtagttaaaatactggctggcttttgatgtcttcatgcttaattgtgatcactttcttgcactgtgatgtttttacgtgaatatgttgaagtagaagtctaccatattattttataaaatgttttctgtatggcaataaactgaaaacatggatcaacccttcttttgaaaataaactgagtcaatttagccttttaaaaatatagtcatctcttttaaatagaatcctcttccaccatcaaggctcaacattttgtaagcatccaaaaaattggtaattagggggcttgcactaaatttcactatcttcagtagagaggaactgtttggaacttagatttccaatgtgtatattctaatggagaaagcaagaggtagagtttgtatgtttgacttaccttagatttttattttccatacatactgcaaatgattgacttgttgcataaatgaagatcttctgttgtgtgcttttcaaacactgtaaataaatttgaaatttgaa

SEQ ID NO: 29289 - DNA, 1937 bp, Homo Sapiens
ggccgcagtttctggagggagccgctgcgggtctttccctcactcgtcctccgcgcgtcgccgctcttcggttctgctctgtccgccgccatggcccaagctgacatcgcgctgatcggattggccgtcatgggccagaacttaattctgaacatgaatgaccacggctttgtggtctgtgcttttaataggactgtctccaaagttgatgatttcttggccaatgaggcaaagggaaccaaagtggtgggtgcccagtccctgaaagagatggtctccaagctgaagaagccccggcggatcatcctcctggtgaaggctgggcaagctgtggatgatttcatcgagaaattggtaccattgttggatactggtgacatcatcattgacggaggaaattctgaatatagggacaccacaagacggtgccgagacctcaaggccaagggaattttatttgtggggagcggagtcagtggtggagaggaaggggcccggtatggcccatcgctcatgccaggagggaacaaagaagcgtggccccacatcaagaccatcttccaaggcattgctgcaaaagtgggaactggagaaccctgctgtgactgggtgggagatgagggagcaggccacttcgtgaagatggtgcacaacgggatagagtatggggacatgcagctgatctgtgaggcataccacctgatgaaagacgtgctgggcatggcgcaggacgagatggcccaggcctttgaggattggaataagacagagctagactcattcctgattgaaatcacagccaatattctcaagttccaagacaccgatggcaaacacctgctgccaaagatcagggacagcgcggggcagaagggcacagggaagtggaccgccatctccgccctggaatacggcgtacccgtcaccctcattggagaagctgtctttgctcggtgcttatcatctctgaaggatgagagaattcaagctagcaaaaagctgaagggtccccagaagttccagtttgatggtgataagaaatcattcctggaggacattcggaaggcactctacgcttccaagatcatctcttacgctcaaggctttatgctgctaaggcaggcagccaccgagtttggctggactctcaattatggtggcatcgccctgatgtggagagggggctgcatcattagaagtgtattcctaggaaagataaaggatgcatttgatcgaaacccggaacttcagaacctcctactggacgacttctttaagtcagctgttgaaaactgccaggactcctggcggcgggcagtcagcactggggtccaggctggcattcccatgccctgttttaccactgccctctccttctatgacgggtacagacatgagatgcttccagccagcctcatccaggctcagcgggattacttcggggctcacacctatgaactcttggccaaaccagggcagtttatccacaccaactggacaggccatggtggcaccgtgtcatcctcgtcatacaatgcctgatcatgctgctcctgtcaccctccacgattccacagaccaggacattccatgtgcctcatggcactgccacctggccctttgccctattttctgttcagttttttaaaagtgttgtaagagactcctgaggaagacacacagtttatttgtaaagtagctctgtgagagccaccatgccctctgcccttgcctcttgggactgaccaggagctgctcatgtgcgtgagagtgggaaccatctccttgcggcagtggcttccgcgtgccccgtgtgctggtgcggttcccatcacgcagacaggaagggtgtttgcgcactctgatcaactggaacctctgtatcatgcggctgaattccctttttcctttactcaataaaagctacatcacactga

SEQ ID NO: 29290 - DNA, 1759 bp, Homo Sapiens
ctgctgtctgcggaggaaactgcatcgacggacggccgcccagctacgggaggacctggagtggcactgggcgcccgacggaccatccccgggacccgcctgcccctcggcgccccgccccgccgggccgctccccgtcgggttccccagccacagccttacctacgggctcctgactccgcaaggcttccagaagatgctcgaaccaccggccggggcctcggggcagcagtgagggaggcgtccagccccccactcagctcttctcctcctgtgccaggggctccccgggggatgagcatggtggttttccctcggagccccctggctcgggacgtctgagaagatgccggtcatgaggctgttcccttgcttcctgcagctcctggccgggctggcgctgcctgctgtgcccccccagcagtgggccttgtctgctgggaacggctcgtcagaggtggaagtggtacccttccaggaagtgtggggccgcagctactgccgggcgctggagaggctggtggacgtcgtgtccgagtaccccagcgaggtggagcacatgttcagcccatcctgtgtctccctgctgcgctgcaccggctgctgcggcgatgagaatctgcactgtgtgccggtggagacggccaatgtcaccatgcagctcctaaagatccgttctggggaccggccctcctacgtggagctgacgttctctcagcacgttcgctgcgaatgccggcctctgcgggagaagatgaagccggaaaggaggagacccaagggcagggggaagaggaggagagagaagcagagacccacagactgccacctgtgcggcgatgctgttccccggaggtaacccaccccttggaggagagagaccccgcacccggctcgtgtatttattaccgtcacactcttcagtgactcctgctggtacctgccctctatttattagccaactgtttccctgctgaatgcctcgctcccttcaagacgaggggcagggaaggacaggaccctcaggaattcagtgccttcaacaacgtgagagaaagagagaagccagccacagacccctgggagcttccgctttgaaagaagcaagacacgtggcctcgtgaggggcaagctaggccccagaggccctggaggtctccaggggcctgcagaaggaaagaagggggccctgctacctgttcttgggcctcaggctctgcacagtcaagcagcccttgctttcggagctcctgtccaaaagtagggatgcggatcctgctggggccgccacggcctggctggtgggaaggccggcagcgggcggaggggatccagccacttccccctcttcttctgaagatcagaacattcagctctggagaacagtggttgcctgggggcttttgccactccttgtcccccgtgatctcccctcacactttgccatttgcttgtactgggacattgttctttccggccaaggtgccaccaccctgccccccctaagagacacatacagagtgggccccgggctggagaaagagctgcctggatgagaaacagctcagccagtggggatgaggtcaccaggggaggagcctgtgcgtcccagctgaaggcagtggcaggggagcaggttccccaagggccctggcacccccacaagctgtccctgcagggccatctgactgccaagccagattctcttgaataaagtattctagtgtggaaaaaaaaaaaaaaaaaaaaaaaaaaaaaa

SEQ ID NO: 29291 - DNA, 3589 bp, Homo Sapiens
actggcggccatggaactcaccggtaatagaggacacatctcttaactgggttgctctaagaactgatgtctaaaccgtctcagcatggcctgtagaggaggagctgggaatggccaccgtgcctcagctacactctctcgggttagccctggaagtctttacacatgtagaacccgtacccataatatatgcatggtatctgactttttctacccaaatatgggaggcgtggaaagccacatttaccagctctctcagtgcctgattgaaagagggcataaggttataattgtcacccatgcttatggaaatcgaaaaggcatccgttacctcaccagtggcctcaaagtctattacttgcctctgaaagtcatgtacaaccagtctacagccacgaccctctttcacagtctgccattgctcaggtacatatttgttcgggagagagtcacgataatccattcacatagttctttttctgctatggcccatgatgctctcttccacgccaagacaatggggcttcagacagtcttcacggaccattccctttttggatttgctgatgtcagctcggtgcttacaaacaagcttctaaccgtgtctctttgtgatacaaaccacatcatttgtgtgtcttatactagtaaggaaaatactgtactaagagcagcactgaatcctgaaatagtgtccgtcattcctaatgctgtagatcctactgacttcactccagacccatttagaaggcatgatagtataactattgttgttgtcagcagacttgtttacagaaaagggatcgatttgcttagtggtataatacctgaactctgtcagaaatatccagatttaaatttcataattggaggagagggaccaaagagaatcattttggaagaagttcgggaaagataccagctgcatgacagggtgcgtcttttgggagctttagaacacaaggatgttagaaatgtcttagttcaaggacatatttttctgaatacctcccttactgaagcattctgcatggcgatcgtggaagcagccagttgtggtttacaggttgtaagtaccagagttggtggaattcctgaggtgcttccagaaaaccttattattttatgtgagccttcagtaaaatctttgtgtgaaggattggaaaaggctattttccaactgaagtcagggacattgccagctccagaaaacatccataacatagtaaagactttctacacctggaggaatgttgcagaaagaactgaaaaggtatatgaccgggtatcagtggaagctgtgttgccaatggacaaacgactggacagacttatttctcactgcggcccagtaacaggctacatctttgctttgttggcagttttcaacttcctcttcctcattttcttgagatggatgactccagattctatcattgatgttgcaatagatgccactgggccacggggtgcctggactaataactattctcacagtaaaagagggggtgagaataatgagatatctgaaaccaggtagaaggaagcctagattgtaagattttaaacatttgtaatagttctataaagactatggaaaataaccttgcttttggggggtttttgtttttttagagttaatttagtaagttatgctacctctatatcattcaatattttctgttgaggaaagataaaaatgtatgcaattcctgagtgtagaaacttcttgcacttatttaaaatttaggagagaacatttaagccactcaggtatgcaatttttcagactactgaaatccctgtagcagagatgttttaacattatattttgagagctttgggtgctgaagggccaaacgttttctgggcattttttggccagtttttaatgtaacaccattagacactcaccagatgtttacaagttttctttaggggaactacaacaattatatgaactgttttatatcatgttcatatacatttattaggaatctaaatcatgtctttgaacatttattaggttcactcagtaggtgttacatgtaattaacaggttccttgagtaagatagtccatcagttaccagcacattttgaacccctgctctgtgtagaatgttgaactagatgcttcccgccattaaggaccaggggtgcattcactctttgtttaccattcaaatggcttacttcatcataattgtggttgatatgagatcaatatccaacatgccaaaaatgctcatgccagttaatgccaggaaaaaaatcaccgacacactactagtactttgttcctgttgtatgcattctcctaggtagagcctccatcttcagttgtgtttgtgaaggtattttttgctttttaaatactggggaccgatatcactgttgatagtgcagagaaaccctccacatttttcagtgcataattgagttttctataaatgccttcgtgttttctgagcagaatgtacgaggtgtgccatcccaaaaccagctgctaccctgtccttttaatgtaagtcactccccttcactgtggcctcgctgatgtctgataagtattgtcagtgtgcaaaaggctttacttcagaatggtttatttatagcaaactaagttgaaaattttagaaacagtctttgtgggtggatgttattaactgtcattgttgttgcccagagccatgggttttttaaccccaaattatccacatggtgtgtattatgaattctttgaactcttaaggtttttgtgagaaaaggactgtgaattcaaaacaataaggcacttgtgggtgcactacatagattctgacagtgttgtgattctgtataggatttttaaaaatgacaacattcacaaaatttattactttttaaaaaataacatgcctattaactggttgcactgatataaaagaaatatatttgtgttttgtttgtactaaaatgcaaaagcaagagtgcaatttttaaaatctagaagttaggggttttgttggagaaaaatggactgatctttaaactattcagtcttactgggatttttatgcatagaaactcacatataaacatgaaataaacagtgccagtattcataggaaagtgagaaactgtaatatttggccattattctattcaacaggttttagaggcatgccaccattttttccttatatttttgcttaatttttttaaattgtcatttaattcttaaactgtcatttatttgagatggaaataagatctaaagttagttgcctttgcctgtaaaacatgtgatttgcaaattattattttcctttttttttaacaaatggaagtaaatttgtttcacgtaaatcttaattttcaacctttctggataccttaattgtaactgtcagtttgcactggtcggtatatggaaacacattgctctaccctgctacttagttgattttaaagtgaatttacagtgatgagaaatttgtgaaaaatatattgtatttcttttgatgtttcaaaaggttgcctatgaaaaactgatttgttaaaacatgctacatgtccaaaaataaagaccagaatgacattttgat

SEQ ID NO: 29292 - DNA, 3083 bp, Homo Sapiens
atgttgtttttcctgtacctaagttcccgctgtaggtggtacctttgcagacggtgcgatgggggaagcagagaagtttcactacatctatagttgtgacctggatatcaacgtccagcttaagataggaagcttggaagggaagagagaacaaaagagttataaagctgtcctggaagacccaatgttgaagttctcaggactatatcaagagacatgctctgatctttatgttacttgtcaagtttttgcagaagggaagcctttggccttgccagtgagaacatcctacaaagcatttagtacaagatggaactggaatgaatggctgaaactaccagtaaaataccctgacctgcccaggaatgcccaagtggccctcaccatatgggatgtgtatggtcccggaaaagcagtgcctgtaggaggaacaacggtttcgctctttggaaaatacggcatgtttcgccaagggatgcatgacttgaaagtctggcctaatgtagaagcagatggatcagaacccacaaaaactcctggcagaacaagtagcactctctcagaagatcagatgagccgtcttgccaagctcaccaaagctcatcgacaaggacacatggtgaaagtagattggctggatagattgacatttagagaaatagaaatgataaatgagagtgaaaaacgaagttctaatttcatgtacctgatggttgaatttcgatgtgtcaagtgtgatgataaggaatatggtattgtttattatgaaaaggacggtgatgaatcatctccaattttaacaagttttgaattagtgaaagttcctgacccccagatgtctatggagaatttagttgagagcaaacaccacaagcttgcccggagtttaagaagtggaccttctgaccacgatctgaaacccaatgctgccacgagagatcagttaaatattattgtgagttatccaccaaccaagcaacttacatatgaagaacaagatcttgtttggaagtttagatattatcttacgaatcaagaaaaagccttgacaaaattcttgaaatgtgttaattgggatctacctcaagaggccaaacaggccttggaacttctgggaaaatggaagccgatggatgtagaggactccttggagctgttatcctctcattacaccaacccaactgtgaggcgttatgctgttgcccggttgcgacaggccgatgatgaggatttgttgatgtacctattacaattggtccaggctctcaaatatgaaaattttgatgatataaagaatggattggaacctaccaagaaggatagtcagagttcagtgtcagaaaatgtgtcaaattctggaataaattctgcagaaatagatagctcccaaattataaccagcccccttccttcagtctcttcacctcctcctgcatcaaaaacaaaagaagttccagatggcgaaaatctggaacaagatctctgtaccttcttgatatcgagagcctgcaaaaactcaacactggctaattatttatactggtatgtgatagtggaatgtgaagatcaagatactcagcagagagatccaaagacccatgagatgtacttgaacgtaatgagaagattcagccaagcattgttgaagggtgataagtctgtcagagttatgcgttctttgctggctgcacaacagacatttgtagatcggttggtgcatctaatgaaggcagtacaacgcgaaagtggaaatcgtaagaaaaagaatgagagactacaggcattgcttggagataatgaaaagatgaatttgtcagatgtggaacttatcccgttgcctttagaaccccaagtgaaaattagaggaataattccggaaacagctacactgtttaaaagtgcccttatgcctgcacagttgttttttaagacggaagatggaggcaaatatccagttatatttaagcatggagatgatttacgtcaagatcaacttattcttcaaatcatttcactcatggacaagctgttacggaaagaaaatctggacttgaaattgacaccttataaggtgttagccaccagtacaaaacatggcttcatgcagtttatccagtcagttcctgtggctgaagttcttgatacagagggaagcattcagaacttttttagaaaatatgcaccaagtgagaatgggccaaatgggattagtgctgaggtcatggacacttacgttaaaagctgtgctggatattgcgtgatcacctatatacttggagttggagacaggcacctggataaccttttgctaacaaaaacaggcaaactcttccacatagactttggatatattttgggtcgggatccaaagcctcttcctccaccaatgaagctgaataaagaaatggtagaaggaatggggggcacacagagtgagcagtaccaagagttccgtaaacagtgttacacggctttcctccacctgcgaaggtattctaatctgattttgaacttgttttccttgatggttgatgcaaacattccagatattgcacttgaaccagataaaactgtgaaaaaggttcaggataaattccgcttagacctgtcggatgaagaggctgtgcattacatgcagagtctgattgatgagagtgtccatgctctttttgctgcagtggtggaacagattcacaagtttgcccagtactggagaaaatgaaactgggattgacccatcaagatgcttggctcaataagaaaaccacgttaggagcaacctttgtatattggagacttcagagtaaccagcaaggaagagaaatcttaatcttcaagttaccatattttccaaatattacatggtacctgagttctgcttccttggatgtcattgcttaaatatagtcttgaagggcttgttttgaaatattgtatatattttttcaaatgtatacattgttaataaattaagaaatgagaaacattcttatttatgtacatgttatgagagttctggaggaagtaatatgttgaaatagtaaaacattttagtttttgagtttaaaaaaaaaaaaaaaaaa

SEQ ID NO: 29293 - DNA, 2373 bp, Homo Sapiens
cccaggcccaccccacccagcacccctggcgcagggactgctggaacctggctgtgcgcgctgtcgctttaagacagactctgccggcgccgtccggagccttagaaaccggccccggatcgcgagccggagccggagccggagccggggccggccgggctgctgaggcccgagcggcaggagcgcagcgcggagcgctgagccaggcgcccagtcgcgagaagctgccgccgcctctgcccgcccggcgccgcagccccgggcggtccatggggcgggcacggcgtcgctgcaggcgccggcagccctggagggcagccgcttaggcgctgcgctcttgtccccgcaggtcgcagccagggcggcggggcgcgcccagccccggcccctggagcgcccgccgcggtccccacctccatggacgccttcaaggggggcatgagcctggagcggctgccggaggggctccggccgccgccgccgccaccccatgacatggggcccgccttccacctggcccggcccgccgacccccgcgagccgctcgagaactccgccagcgagtcgtctgacacggagctgccagagaaggagcgcggcggggaacccaaggggcccgaggacagtggtgcgggaggcacgggctgcggcggcgcagacgacccagccaagaagaagaagcagcggcggcaacgtacgcacttcacaagccagcagttgcaagagctagaggccacgttccagaggaaccgctaccccgacatgagcatgagggaggagatcgccgtgtggaccaacctcaccgagccgcgcgtgcgggtctggttcaagaaccggcgagccaagtggcgtaagcgcgagcgtaaccagcagctggacctgtgcaagggtggctacgtgccgcagttcagcggcctagtgcagccctacgaggacgtgtacgccgccggctactcctacaacaactgggccgccaagagcctggcgccagcgccgctctccaccaagagcttcaccttcttcaactccatgagcccgctgtcgtcgcagtccatgttctcagcacccagctccatctcctccatgaccatgccgtccagcatgggcccaggcgccgtgcctggcatgcccaactcgggcctcaacaacatcaacaacctcaccggctcctcgctcaactcggccatgtcgccgggcgcttgcccgtacggcactcccgcctcgccctacagcgtctaccgggacacgtgcaactcgagcctagccagcctgcggctcaagtccaaacagcactcgtcgtttggctacggcgccctgcagggcccggcctcgggcctcaacgcgtgccagtacaacagctgaccgccccgccgcaccacgcgggccggcggccggagcggggaagggcgcgggcgcggaggacgcacgcggggccccggctcgcaagccccagctcaccgcgccgcggacctcacacctgcgcagccccctcctcccacttcccactccgggttggttttgtgtttgcttttccggaccccactctgccctccaaaaagacaaaaaaaaaaaaaaaaaaaaaagcaaaaagacgtcggagaaaagtgccgcgaaaaaatggatgagttgcaatttctctcgggatggcgcgggtggtgtgtgtgtgttcccacgggccccggaggcccactccgcggagggcacgcggcgcggtaggcgagcgccgaggcccagcggccgggggaggacgacctcgtatcccgcgtccccgccgcgctggatccggactgagtggccgggcctgcggactggatgtgcggggcctggacttgcctaggatttcccgaccccgtacaaaccaagttgccctctccgagctaggcccggccgagagcgccttagctcgagtcggatccgtgttggggcgggcgttgggtttggggggacggtgcccccagcccaggatcgggcactcagtggagccgcacacggccccggcgcgcctggtagagcctcgctggccccgcgccccggagccctatattaaggccacggagcgacagcgggcagtgcgggcctggcgggaggtgggggaggtccatctcagaacaccccagccttgagcttagctgcaggcccaggccctctgctctgctcccgggctaggaggtggccctctgtctgggcgaacagccccctcctcaccgcccgccgtgcaagagtcgagccggcagagcaaggggcgcggccccagggccctgcgcccactttgcacacccgctctccggcccgcgcccctgtttacagcgtccctgtgtatgttggactgactgtaataaatctgtctatatcgactaaaaaaaaaaaaaaaaa

SEQ ID NO: 29294 - DNA, 5640 bp, Homo Sapiens
atggcccgaccgccgccactaccggggcctgagggggcctggcggagcccgagcgcggcccggcccgcagcgtggggccccgagcgcggtgaagagattgttttctgaaagctgcgttggaggctgtgacagagctgagagcctgtgtggagcggatggggaggctttctcaataacatggccctttgccattagccttgccatgaccacatttttcaccagcgtccccccctggattcaagatgcaaagcaggaggaggaagtgggctggaaactagttcccaggcctcggggccgggaggcggagagtcaagtgaagtgccaatgtgaaatttcgggaacacctttctcaaatggggagaagctgaggcctcacagcctcccgcaaccagagcagagaccatatagctgccctcagctgcactgtggcaaggcttttgcttccaaatacaagctgtataggcacatggccacccactcagcccagaaaccccaccagtgtatgtactgtgataagatgtttcaccgcaaggaccatctgcggaaccatctgcagacccatgatcctaacaaagaggccctccactgctctgagtgcggtaagaattacaatacgaagctgggctaccggcgccacctggccatgcatgctgccagcagcggtgacctcagctgcaaggtgtgcctgcagacctttgagagtacccaggccctgctagagcacctgaaggcccactcacgccgggtagcaggcggtgccaaggagaagaagcacccctgtgaccactgcgaccggcggttctatactcgtaaggatgtacggcggcacctagtggtgcacacaggccgtaaggacttcctgtgccagtactgtgcccagcggtttggccgtaaggaccacctgacgcgtcatgtcaagaagagccactcgcaggagctgctcaagatcaagacagagcccgtggacatgttaggcctactcagctgcagctccacagtcagtgtgaaggaagagctgagccctgtgctgtgcatggcctctcgggacgtaatggggaccaaggccttccctggcatgttgcccatgggcatgtatggtgcccacatccctaccatgcccagcacgggcgtgccacactccctggtgcacaacacgctgcccatgggtatgagctaccctctggaatcctcacctatctcttccccagctcagctccctccaaaataccagcttggatctacctcatacttgcccgacaaattgcccaaagtggaggtggatagttttctggcggagcttcctggaagcctgtctctctcatccgctgaaccccagcccgcctcacctcagccggcggcagctgcggccctcctagatgaagcactgcttgccaagagccccgccaacctctctgaggccctctgcgctgctaatgtggacttctcccacctactgggctttcttccactcaacctgcccccgtgtaacccacctggggccacaggaggcctggtcatgggctactcccaggctgaggcacagcccctgcttaccactttgcaagctcagcctcaagattccccaggagctgggggaccactgaactttgggcctctgcactccttgcctcctgtcttcacgtctggcctgagtagcaccaccctgcctcgtttccatcaagcattccagtagcccccacagaggccctcagctcagtttttggctctgttatggagccttagtacccaccccgtctgtgtcccccatgaaggcagctgagctttcagagctgggttcaaaaaaaaaaattccagtgtctgtatacaggagcacttggtttgggggttcaggctctaggatcgattccagaaggagccttgagccccaaccccgtgaaaagatctcataccgtaggacttcaggtattatttacttttatttttttgacctgaatcgggagccacacttggccctcttcctctccaaagcgccagaacctccttctctttggagaatggggaggcctcttggagacacagagggtttcaccttggatgacctctagagaaattgcccaagaagcccaccttctggtcccaacctgcagaccccacagcagtcagttggtcaggccctgctgtagaaggtcacttggctccattgcctgcttccaaccaatgggcaggagagaaggcctttatttctcgcccacccattcctcctgtaccagcacctccgttttcagtcagtgttgtccagcaacggtaccgtttacacagtcacctcagacacaccatttcacctcccttgccaagctgttagccttagagtgattgcagtgaacactgtttacacaccgtgaatccattcccatcagtccattccagttggcaccagcctgaaccatttggtacctggtgttaactggagtcctgtttacaaggtggagtcggggcttgctgacttctcttcatttgaggtcacatttttcccccgtggggaaataaactgactttggactgcttcagtctctgccatcttccatgactgcatttgttcctgcctgcctcggcggtatccacagaagacaggcaagaggattggagcagttttctcacaggtctgcaattctgtttttctccaagtacattatgaccccctcatccttctcttgaactggagaggggaagaaatgaaaggcatgcccacgtccgtcacctccccatcccctagtccccaccttgaacatcatgagctgttgttattagtcttggaagcagagtctgggttggtgtggatagcaaaggaggaagtctgagcccctcattggtcttcctcccacctgtcccttttccgggaagttgtggaattgttggaagaagagtttgcagaaggttaggaatgggtagatagctaagtcctaatctatgggtacattgttgtgtcccaaaccaaaattttccttatccacaatgtcccttctgtctcttccactttacagtggactcggccactgtgcataggcttctctgctctccatcaaatcacttccactttcctgtgcccccacccccgcctccagttttccgctagtatccggcaaggtttcttgcaacaaatgattagttcttttcttctgactcgtggggctccctgctgcagagagcacagcccttgcctggagcccaggaaccccatccttgcttcatctcagttcttcatgggcttcactcttcccactcacggaagggaggtagctcagggacctccactgtgggacccttgagatgcttccactctgattcagaaacacacttctacctctttactgttaactcttaacagatgcagtcagcagtttctgggcacttctctcagtaggtgcctcatgctgacttctccactagggtttcaggacaaactaccaaggaattgcctcagcctcctaccagtcctccctcacccaccttctgtctaggttcacttggtttgtcatcaggaactgagcaggtccaggactcagctttctgcttcagcctaagccagtactccttgtttgaggtaaaagccttaaaatttagctccctagctcttgattagaagcaatttggagtaagtgtgttttgatttaggcagggtagcttgggatacctttttaaaaacaccagatattaaaatgtctggcaaggttagaatcagactagatgatttgcttctaaaaattagtttcagtgagtcccagggactaattaaggtttattttaaaaagtgtctaccttggtacgcagccacctcctgcatgctgtgcatgttattgggacttgtattataggcgatggtatgtgagaatccagttgggactcgctgttgccatcctctttgttgtatctggttttcatcactagactcagcaacccttctcaccttaactgccaccttccctacactctcagtttacagaggccactgggcctctggctgcagaatacaaagtcccgggctgttagaggagtcctttcctctctgcctgccctttcctgtccctccctgaattctctctccccgtaagtgatgctggaaaagtcataggactggcaaagcaactgtttaaaccctttgtaaccggggccttgcccccacctcctgtcttttctccttgccttccccactcctgtgtcctcccatctatcctgtctttcctttcctcctctcagtgtcctcagcacccacaaggaattttcctatcactgtgaactttgctggtacagaggaataatatctgccttcacctttttttttttggaccatagctagccagtcatttcttaaacctcccttcctaaaatctggggggtcggggggaaagaaaaaaaaagccttagtggcctggttgttcaaaggataagaatagctttatcctgcactcagtacccgaactcacttcagtatgcttactgaggccatgagaacctgaggggcatctgcccaggacagaagccatggcatatgacaaagaccaatgagggaccaggaaaaaaagtgatgtcccctttccctgccacctccagcctctgccagcaatgagctgtccccctcccaccctacacagtagctggtcagggctgagtacagtcctgggggtaaggggatgacatgcccaggtgtcagctcaaaggatctctgcatcatcttgaggtgggaggcagggaaaggagcgccaatgaggttccctgcaacccccgccctccagcccaccgcccagccttttacaaatggcattttcttaattgaaaatccgggaagcaggtgtgattacttttttgctcgtagatattgtcctaagttggaattctcccactgccctaaaactttccctagtagtcctttaaactcccccctccctttttggtagctgtttctccgtcctctctccacctgccctcttatctaggagctgtttgtaagcacgatttttttaacaggttatattgtacaggatcaatattttgctttttaacaaggatatttatgtaataagaaactttgccttaggcaggtgttggccagaaaagtccagattcctctgggatcccaccctggcctctcctggaactctgaacctgctgtggaaggaattggccatgaccttcacctctggagagtagggtctatggcgagggaaaagggtgttcaccatgataacctagtgcctccatagaggggtttggaaaaattccagtccgatttctttgtgtgtcagctgacttccttagctgattgttcccacttgcacctctccacctttggcactagaactcctgagacaccacttctcatgcttctccctccctaccagcggtcaaggctttggagccactcttttgtaactccagattatttaaagagaaaagtacaagacagaaatcttctagcactttgtaaacacagtgaataacctcttggagtatttttggctttatataaaacaaggtttttaattgtaaagtataagtgccattagaaaatgcacagggcatatctttgttaaagtagatttttcaatgttttacagaattacattttcaaaaaaaggtttttataatgaagttgtttattaaaaacttctgaatgatgtgttc

SEQ ID NO: 29295 - DNA, 1712 bp, Homo Sapiens
cagagtcagaaaactccccagctaaacacccgtaagacttcatacaacacaatactctatactgtgatgatcacagctgccaaggctacctaaaagaagacagttatctcatatttggctgccagctttttatctttctctcgaccacttaaaacttcagacttcctgtcctgctggtatcatggagaaagtccaatacctcactcgctcagctataagaagagcctcaaccattgaaatgcctcaacaagcacgtcaaaagctacagaatctatttatcaatttctgtctcatcttaatatgtctcttgctgatctgtatcatcgtgatgcttctctgaagttctgctacaacctctagatctgcagcttgccacatcagcttaaaatctgtcatcccatgcagacaggaaaacaatattgtataacagaccacttcctgagtagaagagtttctttgtgaaaaggtcaagattaagactaaaacttattgttaccatatgtattcatctgttggatcttgtaaacatgaaaagggctttattttcaaaaattaacttcaaaataagtgtataaaatgcaactgttgatttcctcaacatggctcacaaatttctatcccaaatcttttctgaagatgaagagtttagttttaaaactgcactgccaacaagttcacttcatatataaagcattatttttactcttttgaggtgaatataatttatattacaatgtaaaagcttctttaatactaagtatttttcaggtcttcaccaagtatcaaagtaataacacaaatgaagtgtcattattcaaaatagtccactgactcctcacatctgttatcttattataaagaactatttgtagtaactatcagaatctacattctaaaacagaaattgtattttttctatgccacattaacatcttttaaagttgatgagaatcaagtatggaaaagtaaggccatactcttacataataaaattccttttaagtaattttttcaaagaatcacagaattctagtacatgtaggtaaatcataaatctgttctaagacatatgatcaacagatgagaactggtggttaatatgtgacagtgagattagtcatatcactaatatactaacaacagaatctaatcttcatttaaggcactgtagtgaattatctgagctagagttacctagcttaccatactatatctttggaatcatgaaaccttaagacttcagaatgattttgcaggttgtcttccattccagcctaacatccaatgcaggcaaggaaaataaaagatttccagtgacagaaaaatatattatctcaagtattttttaaaaatatatgaattctctctccaaatattaactaattattagattatattttgaaatgaacttgttggcccatctattacatctacagctgacccttgaacatgggggttaggggagctgacaattcgtgggtccgcaaaatcttaactacctaatagcctactattgaccataaaccttactgataacataaacagtaaattaacacatattttgcgtgttatatgtattatacactatattcctacaataaagtaagctagagaaaatgttatttagaaaatcataagaaagagaaaatatatttactattcattaaatggaagtgggtcaacaaaaaaaaaaaaaaaaaaaaaaaaaaaaa

SEQ ID NO: 29296 - DNA, 1548 bp, Homo Sapiens
atggtcgaggaggtacagaaacattctgtacacacccttgtgttcaggtcgttgaagaggacccatgacatgtttgtagctgataatggaaaacctgtgcctttagatgaagagagtcacaaacgaaaaatggcaatcaagcttcgtaatgagtatggtcctgtgttgcatatgcctacttcaaaagaaaatcttaaagagaagggtcctcagaatgcaacggattcatatgttcataaacagtaccctgccaatcaaggacaagaagttgaatactttgtggcaggtacacatccatacccaccaggacctggggttgctttgacagcagatactaagatccagagaatgccaagtgaatcagctgcacagtccttagcggtggcattacctttgcagaccaaggctgatgcaaatcgtactgcccctagtggaagtgaataccgacatcctggggcttctgaccgtccacagcctacagcgatgaattcaattgtcatggagactggcaataccaagaactctgcactgatggctaaaaaagcccctacaatgccaaaaccccagtggcacccaccgtggaaactctacagggttatcagtgggcatcttggctgggttcgatgtattgctgtggaacctggaaatcagtggtttgttactggatctgctgacagaactataaagatctgggacttggctagtggcaaattaaaactgtcattgactgggcatattagtactgtgcggggcgtgatagtaagcacaaggagcccatatctgttctcttgtggagaagacaaacaagtgaaatgctgggatctcgaatacaataaggttatacggcattatcatggacatttaagtgcagtgtatggtttggatttgcacccgacaatcgatgtgttggtaacctgtagtcgagattcaactgcacggatttgggatgtgagaactaaagccagtgtacacacattatctggacatacaaatgcagttgctacagtgagatgtcaggctgcagaaccacaaattattacaggaagccatgatactacaattcgattatgggatctggtggctggaaaaacaagagtgacattaacaaatcacaaaaaatcagttagggctgtggttttacatccaagacattacacatttgcatctggttctccagataacataaagcagtggaaattccctgatggaagtttcattcaaaatctttccggtcataatgctattattaacacattgacggtaaattctgatggagtgcttgtatctggagctgacaatggcaccatgcatctttgggactggagaactggctacaattttcagagagttcacgcagctgtgcaacctgggtctttggacagtgaatcaggaatatttgcttgtgcttttgatcagtctgaaagtcgattactaacagctgaagctgataaaaccattaaagtatacagagaggatgacacagccacagaagaaactcatccagtcagctggaaaccagaaattatcaagagaaagagattttaatga

SEQ ID NO: 29297 - DNA, 2759 bp, Homo Sapiens
gtctcctcggccgacaagctctcgcgagacgagccgtgcaggctgaaaaaatggcgccacccagtacccgggagcccagggtcctgtcggcgaccagcgcaaccaaatccgacggagagatggtgctgccaggcttcccggacgccgacagctttgtgaagtttgctcttgggtccgtggtggcagtcaccaaggcatctgggggcctaccacagtttggcgatgagtatgatttttaccgaagttttcctggcttccaagcattttgcgaaacacagggagacaggttgcttcagtgcatgagcagagtaatgcagtaccatgggtgtcgcagcaacattaaggatcgaagtaaagtgactgagctggaagacaagtttgatttactagttgatgccaatgatgtaattctggagagagtgggtattttactggatgaagcctcaggtgtaaacaagaatcaacagcctgtcctccctgccggcttgcaggtccccaaaacggtagtgtccagctggaaccgtaaggcagcagaatatggcaaaaaagcaaaatctgaaactttccggctgcttcatgcaaaaaatatcatccgacctcagctcaagtttcgagagaagattgacaattccaacacaccatttcttcctaaaatcttcatcaaacccaatgctcagaaacctctccctcaagctctctctaaggaaaggcgggaacgcccacaggatcgtcctgaggacttggacgtcccccctgcactggctgatttcatccatcagcagagaacccagcaggttgagcaagacatgtttgcacatccttatcaatatgaactaaatcactttaccccagcagatgcagtgcttcaaaagccacaaccccagttatacagacctatagaagagacaccatgccatttcatatcctccctggatgaactcgtggaactcaacgaaaagctcttgaattgtcaggaatttgcagttgacttggagcaccactcttacaggagcttcctgggactgacctgcctgatgcaaatttctactcggacggaagacttcatcattgacaccctcgagcttcgaagtgacatgtacattctcaatgagagcctcacagacccagccatcgttaaggtctttcatggtgctgattcagacatagaatggctacagaaagactttgggttgtatgtagtaaacatgtttgatactcatcaggcagcacgccttcttaacctgggcaggcactcactcgatcatctcctgaaactctactgcaacgtggactcaaacaagcaatatcagctggctgattggagaatacgccctctgcccgaggagatgctcagctacgcccgggatgacacccattacctgctatatatctatgacaaaatgaggctggagatgtgggagcgcggcaacgggcagccggtgcagctgcaggtggtgtggcaacggagcagggacatctgcctcaagaaattcatcaaacctatcttcacggatgagtcctaccttgaactctataggaagcagaagaagcaccttaacacacagcagttgacagcctttcagctgctgtttgcctggagggataaaacagctcgcagggaagatgaaagttacggatatgtactgccaaaccacatgatgctgaaaatagctgaagaactgcctaaggaacctcagggcatcatagcttgctgcaacccagtaccgccccttgtgcggcagcagatcaacgaaatgcaccttttaatccagcaggcccgagagatgcccctgctcaagtctgaagttgcagccggagtgaagaagagcggaccgctgcccagtgctgagagattggagaatgttctctttggacctcacgactgctcccatgcccctccggatggctatccaatcatcccaaccagtggatctgtgccagttcagaagcaggcgagcctcttccctgatgaaaaagaagataacttgctgggtaccacatgcctgattgccacagctgtcatcacgttatttaatgaacctagtgctgaagacagtaaaaagggtccattgacagttgcacagaaaaaagcccagaacatcatggagtcctttgaaaatccatttaggatgatcagcaaccgctggaagctggcccaggtacaagtacaaaaagactctaaagaagctgtcaagaagaaggcagctgagcaaacagctgcccgggaacaggcaaaggaggcgtgcaaagctgcagcagaacaggccatctccgtccgacagcaggtcgtgctagaaaatgctgcaaagaagagagagcgagcaacaagcgacccaaggaccacagaacagaaacaagagaagaaacgactcaaaatttccaagaagccaaaggacccagagccaccagaaaaagagtttacgccttacgactacagccagtcagacttcaaggcttttgctggaaacagcaaatccaaagtttcttctcagtttgatccaaataaacagaccccgtctggcaagaaatgcattgcagccaaaaaaattaaacagtcggtgggaaacaaaagcatgtcctttccaactggaaagtcagacagaggcttcaggtacaactggccacagagatagtcctggaagacacgtggcgcctgtggaccggaagcaccaaatgctggtgctgcttttgtacatacatatttttaaaccattaaaattcttcctgaagaaaaaaaaaaaaaaaaaaaaaaaaaaaaa

SEQ ID NO: 29298 - DNA, 2048 bp, Homo Sapiens
cgtcaacatgagttgggcctggggcagatgaggctggctggcggggcgggcagcatggttcactccagcatgggggctccagaaataagaatgtctaagcccctggaggccgagaagcaaggtctggactccccatcagagcacacagacaccgaaagaaatggaccagacactaatcatcagaacccccaaaataagacctccccattctccgtgtccccaactggccccagtacaaagatcaaggctgaagaccccagtggcgattcagccccagcagcacccctgccccctcagccggcccagcctcatctgccccaggcccaactcatgttgacgggcagccagctagctggggacatacagcagctcctccagctccagcagctggtgcttgtgccaggccaccacctccagccacctgctcagttcctgctaccgcaggcccagcagagccagccaggcctgctaccgacaccaaatctattccagctacctcagcaaacccagggagctcttctgacctcccagccccgggccgggcttcccacacagccccccaaatgcttggagccaccatcccaccccgaggagcccagtgatctggaggagctggagcaattcgcccgcaccttcaagcaacgccgcatcaagctgggcttcacgcagggtgatgtgggcctggccatgggcaagctctacggcaacgacttcagccagacgaccatttcccgcttcgaggccctcaacctgagcttcaagaacatgtgcaaactcaagcccctcctggagaagtggctcaacgatgcagagactatgtctgtggactcaagcctgcccagccccaaccagctgagcagccccagcctgggtttcgacggcctgcccggccggagacgcaagaagaggaccagcatcgagacaaacgtccgcttcgccttagagaagagttttctagcgaaccagaagcctacctcagaggagatcctgctgatcgccgagcagctgcacatggagaaggaagtgatccgcgtctggttctgcaaccggcgccagaaggagaaacgcatcaacccctgcagtgcggcccccatgctgcccagcccagggaagccggccagctacagcccccatatggtcacaccccaagggggcgcggggaccttaccgttgtcccaagcttccagcagtctgagcacaacagttactaccttatcctcagctgtggggacgctccaccccagccggacagctggagggggtgggggcgggggcggggctgcgccccccctcaattccatcccctctgtcactcccccacccccggccaccaccaacagcacaaaccccagccctcaaggcagccactcggctatcggcttgtcaggcctgaaccccagcacgggccctggcctctggtggaaccctgccccttaccagccttgatggcagcgggaatctggtgctgggggcagccggtgcagccccggggagccctggcctggtgacctcgccgctcttcttgaatcatgctgggctgcccctgctcagcaccccgcctggtgtgggcctggtctcagcagcggctgcggctgtggcagcctccatctccagcaagtctcctggcctctcctcctcatcctcttcatcctcatcctcctcctcctccacttgcagcgagacggcagcacagacccctggaggtccaggggggcccgaggcagggtccaaacctgagtgagggccagccatgcctcccctcccattcctctggtccctgccttggtcccttgcctgggaagaggggcaggaggccagtggtggggacgcagagggtcctcagagcaggagtgacaagggaggaaagaccaaaaaaacaaccaaccaaaaaaaaaaaaaaaaaaggaaagaaactaaccaacaaaagagaaaaccaaaaataatcacaacagaaaccagctgccccaaaggaaccagaggtgaaaaacaaacaaaaaaaaccaaaaacaaaccaaaaaaaaaaaaaaacctctaccccctctagagcc

SEQ ID NO: 29299 - DNA, 2170 bp, Homo Sapiens
gaattccggcggcggcggcggcgggccgagggcggggcggcatggccaccaccgcgcagtacctgccgcggggccccggtggcggagccgggggcaccgggccgcttatgcacccggacgccgcggcggcggcggcggcggcggccgagcgattgcatgcaggggccgcgtaccgcgaagtgcagaagctgatgcaccacgagtggctgggcgcgggcgcgggccaccccgtgggcctagcgcacccccagtggctacccacgggaggaggcggcggcggcgattgggccggcgcgcacctagaacacggcaaggcaggaggcggcggcaccggccgagccgacgacggcggcggcggcggaggtttccacgcgcgcctggtgcaccagggggcggcccacgcgggcgcggcatgggcgcagggcagcacagcgcaccacttgggcccggccatgtcgccctcgcccggggccagcgggggccaccagccccagccgctcgggctgtacgcgcaggcggcctacccggggggcggcggcggcggcctggccgggatgctggcggcgggcggtggcggcgcggggccgggcctgcaccacgcgctgcacgaggatggccacgaggcgcagctggagccgtcgccgccgccgcatctgggcgcccacggacacgcacacggacatgcacacgcgggcggcctgcacgcggcggcggcgcacctgcacccgggcgcgggcggcggcggctcatcggtgggcgagcactcggacgaggatgcgcccagctcggacgacctggagcagttcgccaagcagttcaagcagcggcgcatcaagctgggctttacgcaggccgacgtggggctggcgctgggcacgctctacggtaacgtgttctcgcagaccaccatctgccgcttcgaggccctgcagctgagcttcaagaacatgtgcaagctcaagccgctgctcaacaagtggctggaggagaccgactcgtccagcggcagccccaccaacctggacaagatcgcggcgcagggccgcaagcgcaagaagcgcacgtccatcgaggtgggggtcaaaggcgcgctcgagagccactttctcaagtgccccaagccctcggcgcacgagatcaccggcttggcagacagcctgcagctggagaaggaggtggtgcgcgtctggttctgcaaccggcggcagaaggagaagcgcatgacccctgcggccggcgcgggccacccgcccatggacgatgtatacgcgcctggggagctagggcctggcgggggcggcgcatcgccaccctccgcgcccccaccgcccccgccggcggcgctgcaccaccaccaccaccacacactgcccggctcagtgcagtgaccccgcgggccgggcccccgccggcgcgctgcagggcgggcgcgcagcccgcccgggcctggactctttttgttcggttgctttggattttacaaaaaaaaaaaaaagcccagaaactttcgaacaaaaccaaacacccggagcaccctctccggtgagcggcgaagacagcccggtagctgcgtcgcccgagccccgggagagaggagcgaagatccggaactcgccaactcaccccgggcatcctgcccgccgcctgctctctgcccccatcccctcgacgacccccgcccctgcccccccgggctgttcggggccggatccccgagcggcctcccctttgcgacaggtaacgcagtgcggggttagggattccccgggagagaggacgaagcgaggagagttctccatcccctctccccgcgtggactcctgagcctgcgggtccagggtggggggctgtctctttattcgctacacgcctcttctctcctagaaggatgcgccccaccccgctttcccctttctccgggcttggttttttacggtttttatttattcgtgagcctctcggctcctggggtccttctaactccgcccgcgcccttaatttaaatcgcagtatactgtatttatcggggccccggaggggaggtcgcgagagccgcgtctgtgtataaaagcaggaaatagccaaagctttaatctagcctaatttatttttccccttatatttccctaccctaccctccccccaaaaaaaagcaaaaaaaacggaattc

SEQ ID NO: 29300 - DNA, 3756 bp, Homo Sapiens
gactcggagggggaggagcagggctgagctggccacgccacctagggacagcgcgcgccgccgcagtagctggggccaccctcgggaaggaagagcctgtcgcgagcgcgagcttctgagctcgacgggccgagctggcagctggttggtgcttacaccttggccgcagcggcaggtccttccacgtgctttcggcggcgacatggagctggaggagttggggatccgagaggaatgtggcgtgttcgggtgcatcgcctcaggagagtggcccacgcagctggatgtaccgcatgtgatcactctgggactcgtggggctgcagcaccggggtcaggagagtgctggtattgtgactagtgatgggagttcggtgccaacattcaaatcacacaagggaatgggtcttgtaaatcacgtctttactgaagacaatttgaaaaaattatatgtttcaaatcttggaattggacacaccaggtatgccaccacaggaaaatgtgaactagaaaattgtcagcccttcgttgttgaaacacttcatgggaagatagctgtggcacataatggcgaattggtaaatgctgctcgattaaggaaaaagcttctgcgtcatggtattggtctgtctacaagttctgatagtgaaatgattacccagttactggcgtatacccctcctcaggaacaagatgacaccccagactgggtagccaggattaaaaacttgatgaaggaagcacccacagcatactccctgcttataatgcacagagatgttatttatgcagtacgagatccttatggaaatcgtcccttatgcattggtcgtcttattccagtgtctgatataaatgacaaagagaaaaaaacatcagaaacagaaggatgggtggtgtcttcagaatcttgtagcttcttatctattggtgcaagatattaccgtgaagtcttgcctggagaaattgtggaaatatccagacacaatgtccaaactcttgatattatatcaaggtctgaaggaaacccagtggctttttgtatctttgaatatgtttattttgcaagaccagacagtatgttcgaagaccaaatggtttatacagtaagataccgttgtggccagcagctagcgattgaagcacctgtggatgcagatttggttagcactgttccagaatctgctacgcctgctgctcttgcttacgcaggaaagtgtggacttccatatgtggaggtgctgtgtaaaaaccggtatgtagggagaaccttcattcagccaaacatgaggttaagacaacttggtgttgcaaaaaaatttggagtattgtcagacaactttaaaggcaaaagaattgttcttgtagatgattcaattgtcagaggcaataccatctcacctataataaaactgctcaaagaatctggtgcaaaagaggtacacattcgagtagcttcaccaccaattaaatatccatgcttcatgggaataaacattcctacaaaagaagagctcattgccaataaaccagaatttgatcaccttgcagaatatctaggagcaaacagtgttgtgtatctgtcagtagaaggactggtttcatctgtacaagaagggataaagtttaaaaaacagaaagagaaaaagcacgatattatgatccaagaaaatggaaatggtctggaatgttttgaaaagagtggtcattgtacagcttgtctcactggaaaatatcctgtagaattagaatggtagctggtagggttggatgtgtgtagtttcaagatagaaagttggtcaagaagttatagtggtcacacctcatctatttactgttactcagttggtacaatgtaaaatgccatgcttatgtttataagttttgagattttttttttttctgaaaaggataccaaagtgcgataactgaacatttccaattgcatataatacaacaatatgtggtgttcttttttttacacaagcattggctagcctttttaacctggtcagagaaggcaggtggtcactgacatttcccaagtccatgctttaaagggtttgcaagaagttagggttaaggagaggtgatgccaacaagacaggtgagttaaatataccatttcacacaaagtttgaatagaatacattatacctcataggtgtctagcctctacagttctggctgtagttatgaccttggcttccctgtctaactgtagacaaatctttaaaaaaaaataataataatctggtgcctcagtttccccacatgtgcaatgggatacttattaaataattaataagaatgtgaataagtgtcatacttttgtgatttgagccatcatttcacttctgattttaagacaactcatgattgttagctttcagaaagctaatgattgttaactttttgaaattagtttacaattaattaagatttcattatgatggaaggagacataattggcagatctttgccatctctctttgagatgtcctaaaaagggttgtaaaaatctgtgaaaaagtttttcctacatttgactagaaaatgtgatccatagtatttagtgccctgatactataagctcagcaagtaacctggtacatttgaaataaaaaccaaatttttagattcaaacaatccctttatccttaatttaattaattatcatatgctttttttaatgaagtgcttgatcacttgcaaacatatatacatgtagatgtacatatacatgtacacatacacataaatattattgcaattaagtgatcaagtacagacacaataggggccagttttgtttaaggatcaaagagacaaccactttggggaattagtatcaacttacaatccaagtccaagtatcatcttataatcacttttttctactatattaagatctaatgaatttgatttcttttttgaagttttttcttgtaacatctgagattagaagtttaagatgacttgaccccaaacctttgtttatgtaagaatttttaaacataaaagtgtttgtttctgttatgttaccataatttgatgtatatagtgtccagatccatttagaaatttaatatttattaataactgaaactgtttgtcttcctttggtatatagtctcgcatattatattatagcaggccaagataaaattttgacagctctttaagcccacatgcagcagtgggtcagataaccctgtggcagtgacacgggcaaattggcatttgaataaagccctgggaccacctcaacatgcgtagcctcttgtcttaaatgtactccccatggcagcatggaggaggcaagacctgtgggtcaattttgaactggccttactttgatttttaaaacaagagactcagggaaagtactaaaccaaaatctctgattttactttgcgttttctgtagtttttgttttactgagatgcttttgtaaaggaaaataatactgtgacagtttagtaattctacagattcttaatatttctccatcatggccttttacttcacaattttctgaagtctgaattcaattacaatttttttttaccaatttaatctcaaatgttgtttaactgctttaaattcatatacgtagagtattataaactgcagagatgaaaaatgtgttttcacgggatttatattgtgaactaaactaagcctactttttgtgacttatttgtgatgccttgttgataaatatgtgtaataagtatgtttaaaaaaaaaaaaa

SEQ ID NO: 29301 - DNA, 715 bp, Homo Sapiens
tgcagacttgtaggcagcaactcaccctcactcagaggtcttctggttctggaaacaactctagctcagccttctccaccatgagcctcagacttgataccaccccttcctgtaacagtgcgagaccacttcatgccttgcaggtgctgctgcttctgtcattgctgctgactgctctggcttcctccaccaaaggacaaactaagagaaacttggcgaaaggcaaagaggaaagtctagacagtgacttgtatgctgaactccgctgcatgtgtataaagacaacctctggaattcatcccaaaaacatccaaagtttggaagtgatcgggaaaggaacccattgcaaccaagtcgaagtgatagccacactgaaggatgggaggaaaatctgcctggacccagatgctcccagaatcaagaaaattgtacagaaaaaattggcaggtgatgaatctgctgattaatttgttctgtttctgccaaacttctttaactcccaggaagggtagaattttgaaaccttgattttctagagttctcatttattcaggatacctattcttactgtattaaaatttggatatgtgtttcattctgtctcaaaaatcacattttattctgagaaggttggttaaaagatggcagaaagaagatgaaaataaataagcctggtttcaaccctctaattcttgcctaaaaaaaaaaaaaaaaa

SEQ ID NO: 29302 - DNA, 4540 bp, Homo Sapiens
attctggggttcgtttagaggtttgaattttctcggagaaagacaggccggccacgaggaaaacagaaacaagccgcagcaacatctaagcccttgaaaggatcctgagagaggggggaaagggaaaacagcagccaccagcccaaccacttgtgtcttctgccccttcccacctatcttgcccaccccaccagcccacgctgcttgggacttgaaatctgtggccgaaggaccgtcactacataacttcaaaaataatcaaccaccctcccttcccaaaccacccaaattcactcatccagcgtttacttttttgaatccactcagaacttttttctgcgacccccctccctaaatggagttgggtgggggggaaatgaatactgagttggcctttattttttaaaagactttttgatccaatgaggccccctaaataattgagttttgggtcctggttggttgttttattttttttcctccaaaattttaccccctcccccctgagcccgaggtgctgacgtcgcaaaaaaattggataaaaccaccatcatgggttcgggtcccatagaccccaaagaacttctcaagggcctggacagcttccttaaccgagatggggaagtcaaaagtgtggatgggatttccaagatcttcagtttgatgaaggaagcacgaaagatggtgagtcgatgcacttacttgaacattctcctgcagacccgttcaccagaaatattggtcaaatttattgacgttggcggctacaaacttcttaacaattggctgacgtattcaaagacaaccaacaacattcccctcctccagcaaattctactgaccctgcagcatctaccgctcactgtagaccatctcaagcagaacaacacagctaaactggtgaagcagctgagcaagtcaagtgaggatgaagagctccggaaattggcctcagtccttgtcagcgactggatggctgtcatccgctctcagagcagtacccagcctgctgagaaagataagaagaaacgtaaagatgaaggaaaaagtcgaactacccttcctgagcgacctttgacagaggtgaaggctgagacccgggctgaggaggccccagagaagaagagggagaagcccaagtctcttcgcaccacagcacccagtcatgccaagttccgttccactggactagagctggagacaccatccttggtgcctgtgaagaagaatgccagcacagtggtggtttctgacaagtacaaccttaaacccatccccctcaaacgtcagagcaacgtagctgctccaggagatgccactccccctgcagagaagaaatacaagccactcaacacaacacctaatgccaccaaagagatcaaagtgaagatcatcccgccacagcctatggagggcctgggctttctggatgctcttaattcagcccctgttccaggcatcaaaattaagaagaaaaaaaaagtactgtcacctacggctgccaagccaagcccctttgaagggaaaacgagcacagaaccaagcacagccaaaccttcttccccagaaccagcaccaccttctgaggcaatggacgcagaccgtccaggcaccccggttccccctgttgaagtcccggagctcatggatacagcctctttggagccaggagctctggatgccaagccagtggagagtcctggagatcctaaccaactgacccggaaaggcaggaagaggaaaagtgtgacatggcctgaggaaggcaaactgagagaatatttctattttgaattggatgaaactgaacgagtaaatgtgaataagatcaaggactttggtgaggcggctaagcgagagatactgtcagaccgacatgcatttgagacagcgcggcgtctgagccatgataacatggaggagaaggtgccctgggtgtgcccccggcccctggttctgccctcacctcttgtcacccctggaagcaatagtcaggagcgatatatccaggctgagcgggagaagggaatccttcaggagctcttcctgaacaaggagagtcctcatgagcctgatcctgagccctacgagcccataccccctaaactcatccccctagatgaggagtgttccatggatgagactccgtatgttgagactctggaacctggggggtcaggtggctcacctgatggggcaggaggctccaagttgcctccagttctggccaatcttatgggaagcatgggtgctggaaagggcccccaaggccctggaggaggaggcattaatgtccaagagatcctcacctccatcatgggtagcccaaacagtcatccttcagaggaactactgaaacaaccagactattcggacaagatcaagcagatgctggtgccacatggactcctaggccctggcccaatagccaatggtttcccaccagggggtcctgggggccccaagggcatgcagcactttccccctggacctgggggacctatgccaggtccccatggaggccctggtgggccagtgggtccacgtcttctgggtcctccaccccctccccggggaggtgatcccttctgggatggcccgggcgaccctatgcggggtggcccaatgcgggggggtccaggaccaggtcctggaccataccatagaggccgaggtggccgaggaggaaacgaacctcctcctcctcctcctccattccgaggcgccagaggaggtcgctctggaggaggacccccaaatggacgagggggccctggtgggggcatggttggaggtggtgggcatcgtcctcacgaaggccctggtgggggcatgggcaacagcagtggacatcgtccccacgaaggccctggcggtggcatgggaagtgggcatcgcccccatgaaggccctggtggtagcatgggtgggggtggaggacatcgtccccacgaaggccctggcggtggcatcagtggtggcagtggccatcgtccccatgaaggccctggcggaggaatgggtgccggtggtggacatcgcccccacgaaggccctggcggaagcatgggtggaagtggtggacatcgtccccatgaaggccctggacacggggggccccatggccaccggcctcatgatgtccctggtcaccgaggccatgaccatcgagggccgccacctcatgagcaccgtggccatgatggtcctggccacgggggagggggccaccgagggcacgatggaggccacagccatggaggagacatgtcaaaccgccctgtctgccgacatttcatgatgaagggcaactgccgctatgagaacaactgtgccttctaccacccgggtgtcaatgggccccccctgccctagggaccatttgcctgccctgttcacacaacccctgtggactgcagcctcgctctttccaccctgttatggcttctgtgaggcccattttcccttttccccagctgatgaggagccggccccctcagttcccacttgcttgggttcctgggggttttctgatcactggtgcgcattgatgtacatattttcctccagtctggggaggagagagactggaaacgttcctggactgctgaagaggagacccagttggcttcactttttgagaagattcgccctgtaccccaaacccctttccagtattacccttaatgcttgagaacctaaagctggttatcctggcgaacacccctacccttctattgcgggtccccacatgcacacagaactctgacacaggatcagctgcacttaagaaatcatcccagctaagttcattattcctcatggggtggggagatgctgaaaggggtattgtatatcccactgcactgagagggctcaatcagctggatttgagttctggaacacacatcatccccacccctcccccagcgtgggctcaccattcttagtcctttctcaagtgggaccttcaactttctgtgaacacccagtctgcgtcctgggtctgctaggttcgatgatggcgaactcgtatctgcatccggtgcaagttttagctggcagaggtgagaccggtggtgctggtctgcctttgccaactatagccagtctggagacttgataaaatacttcagtgagaccagcttctcatcaacttgggcccggcgtgctgggcctgaaagtcacactacatgcactgcctttgggagtcagctcactccctgctcccacctggaaccttgccagcgtgaaggaggcttccaggtacttcaccctgtcaaccacctctgaatccccaccaggcgccttcctgggtggattcaacaagatgattttgccctttcccagttctctccttcactttggcatcagttgttttctatgaaaacagtggattggttgggttttgtgcagggtcttgggttagagccaaaatggatttgaggatgagtatttttttttttggttttgtatattttgtacattaataataaacagtggaaagagaagcagcttaaaaaaaaaaaaaaaaaaaaaa

SEQ ID NO: 29303 - DNA, 5587 bp, Homo Sapiens
ggccttcgtccctactgcctgggcgcggggcgggaggcggtgaccagcagcaggaggagaaagaacatggcgggcgcatcagagctcgggaccggcccaggagcagcgggtggagatggagatgattcgctatacccgatcgcggttttaatcgacgagctccgcaatgaagacgtgcagctccgactcaacagtattaagaagttatcaacaattgccctagcacttggagtagaaaggacccgaagtgaattgttgccatttcttacagatacaatttatgatgaagatgaggtactattagctcttgctgagcagctgggaaatttcactggcctagtgggaggtcctgactttgcccactgtctgctgcctcctttggaaaatctggcaactgtggaagagactgttgttcgtgacaaggctgtggagtccctgagacagatctcccaggagcatactcctgttgctctggaagcttattttgtacctctggtgaaacgcttagcaagtggggattggttcacctctcgcacatctgcatgtggtttgttcagcgtttgctatcccagggcatcaaatgctgttaaagcagaaatcagacagcaattccgttccttgtgctcagatgacacaccaatggtacgacgtgctgctgcttccaaattgggtgaatttgcaaaagttttggaattagacagtgtgaaaagtgaaattgttccactgttcactagtctagcttcagatgaacaggattcagtgcgcctccttgctgtggaagcttgtgtcagtattgcccagttattgtctcaggatgaccttgagactttggtgatgcctacacttcgacaagcagcagaagataaatcttggcgcgttcgctatatggtggctgacagattttcagagctccagaaagccatgggtcctaaaatcaccctaaatgacctcatccccgcctttcagaacctacttaaagactgtgaagctgaagtccgggcagctgctgcccacaaagtaaaagaacttggtgagaacttgcccattgaagatagagagaccataattatgaatcaaattctgccttatataaaggaattagtatccgataccaatcaacatgtcaaatcggctctagcttctgtaattatgggattgtctactattttgggcaaagaaaataccattgaacatcttctacctcttttcttagctcagttaaaggatgagtgtcctgacgttcgtttgaatatcatctccaatttggattgtgtaaatgaagtgattggaatccgtcagctctctcagtctctccttcctgccatagtggagctggcagaagatgccaaatggagggtccgcctggccatcattgagtatatgccgctgctggcaggccagctgggtgtggaattctttgatgaaaagctgaattctttatgtatggcttggctcgtggaccatgtatacgccatccgagaagctgccaccaacaacctcatgaaactagttcagaagtttggtacagagtgggcccaaaatactattgttcccaaagtgttagtaatggcaaatgatcctaattacttgcatagaatgaccactttattctgcattaatgcactgtctgaggcctgtggtcaggaaataactactaagcaaatgctgcccatcgtattaaaaatggcaggagaccaagtagcaaatgttcgcttcaatgtggccaaatctctacaaaagattggaccaattctagataccaatgctttacagggagaagtgaagccagtactacagaagttaggtcaagatgaagacatggatgtcaaatactttgcacaggaagctataagtgttcttgcattggcataatgaggagcaggagggaaaaggcctttactagattcttgtcacaaatttctagtcaatgtgttcttaactgggtggagaaagaatggaaaaccttcaagatctcatccaagcaaatggcaacaacttagaagaaatcatttagtgacttaattctttctaaagatgaaatgggattgttttttactcgtcttccttgttaaatcattatttaagccgttcttattgaccaattcctgacacttgattgtctcctaatgctttatccatcaccacctgggctcctgcatcctcactgtggaatcaggcaccagccacataatgttccagacaaagcctggaagggtgtggacccagacgtggagtggagtgattctcttgacgtttacatatatctctgtgtctctccatcattccaaagctaaatgtacatgtttagaataacttattttataaactcttcgggagacatgttgagatttgaccgtaatgaaagccacattttcctgaattatgatggtctgcattagtctcatgtgaaaggggaatgtggaagctcagggttaatgtagtggttgttttggtttttatttgctcaattttgtctgtactcatgtcattcagaaacctgaagtgtggctgcatcttgctgctaatgtgtgatgttgacgcctaactgaatttgaacagctcaccactgtgcctacatttaaaaatacttctctctcttttctaaaaagctttaactgtagtgcctcctaataagcagtatgtttgtttcattgtgagattgcagttctgtatttcgaatgagtctaagaaccacagggataatactgtgcagatttcctgttctttacctggctctgcttccagcagtattgacacctagtccttgctgcattgtacagtagcttttcaaactgcagttttattgctaagtttttagtatgggtgatactggagtcttatcatttgaagtgtttgcttttctacttttacagtaaaacctcattaattctgaaatttaagataatgagttaagctgaagagtttactgaagcaaattaatagtgaggaagcctatttgaactacttaaacagtattaaagccctttttaaaaagcacctatttgggatcatttgaggtcaagaattcgagatcagcctgaccaacatggtgaaaccccatctctactaaaaatacaaaaaagttagctgggcgtggtggcacacacctgtagtcccagctactcaggaggctgaggcaggagaattgcttgaacctgggaggtagaggttgcactgagccgagatcgcgccactgcactctagcctgggccatagagcgagagtccatctcaaaaaaaaacaactatttttcacataatcaaactcaccttgtctcatgacttttggttaagggggttttcccatagtttatttttctctcagtgcatcttgctatgaggtttgcttgttacccttttggtttttgaattgttgattttgttcacaacctcttttaaatctaacaagtcctgttctgtttagtgaaggcccaaagactcctctaagactttgtatatttgttacataaaaccaagttttactaaatactttaaaatttgtcctacattcgaaaaatagaaattgtaaatcagaggttatctgtctgcattttaaactgccaaattaccttatagtaagtttctattttatgactttgggccaagaattaagtattttcctaagcacaaatctttttctatattctcattttaatatcttatgctattattctgtaaacattttaattttagtttcatgagtctttattttttgttacctgcaagttatgttcttcttcattgaatttcatatttgagagacatttgtcttcatgaagcagatttgcactggaaccattgctttactctggttggaaatgccattgttttggggacagacttttaaaatgcccttgtgtctcccagtgaggagccctaagcattgacttctctaccctaaaactgtttgagagagggagagtgggccctggctttctcaagcatgggtcgggggttcagcggggcctctgtcttttgtggtgacccctcaggggtttcattgtttccttctgacttaagcaatagagagagaatttgttttggtactcttcagaggaattgtgctttggctcataacttggccatgttctccatgaattagttctcctatttttttttttaactaccttaaacttaagggaaaagttctcctatcttgatttcactggaatataggctttaggagctctgtaaggctggtatttttgtctgttttatcttctactgtatcgccagtgcctggaacagtgtctggtgcacataataggtgctcaataaaaatgtgttcaatggatgaatttctaaaatatcctccaatgtgtgcatggaacaaataatcaaaagaaccagactgtgtcttattctcccactgacagaaagattttcctgctttcaggaaacaagctttatgtggcccttttctggtcccctggcttagactacagttctgtgtggatttgtctgattgcttcagacatgtaatgttgtttttcatccttggcagcttacatcagttgtttgtttgattagaaaaatgaagcagacacacacacacacacacacacacacacacacacacacacacaaacatataacctatgccaataaaaatgtctcagcaacagtggaattcaccttggtgtttctctctgtaatttgtgtggggtttacccctcacaggtttaagagaccaggtcttgtttctctctctgtgctaccaagaagatgtgaacctgaggatgcatcttgtttcataagaaggaaggcaggtgaatatgtggtttctaacgaggtcttgttgaaataacgggctgccctcagctcacagaaataccacagctcagccactgtgatgcagagccccaggggtctttgccagacaacttgtcctgactcaacagagacggcagcctgacctttgagctggcttgtccaggcattcaggttgcttgcgtagacttccagggaagcaagcctgtccttcctgacccggcggttaacctggtgcacttttgttcctttgttaactgttgtgttgtcactaaactgaaaggctggggcttgcccttagacgtcacattggctctgtccctgtggcgatggcagggcagggtggccaaacaggtcaggtgcttgttctgtcctcttgccttttacttaaattcctctgacttttaaaaatggtgacactcttatcgtaaagcttcttatttttctccactgcttggatatgaaactgtagagggagaggccctgttgcccagtgttctcctggtttagcagctgaggtgactgcagtctgatgtgatgtaactgtttccctttgattctccagtattcctgtttccatccagttccttactctcctctttcctcttccctcgcatgtctccctccagtcctctgtacctagaatagtctcactgtcccccgtttgcctccacgagcctgctgtttccaggaaattacataacgttcagttgggatggaaatcttccggaggacgaatagagtttaattactcattgcgtcggaaagccaagccatttctgtctccagagttgttctcttaaactgatatgagttct

SEQ ID NO: 29304 - DNA, 4167 bp, Homo Sapiens
agttccctccagctgcagagagcttcagtttgtctttttttttttaaactaaaatggaggctggtttcttgccttaaggagcccattgcctttcccgctgaagtctagatgttgacatgtaataaagcgggcagcaggatggtggtggatgcggccaactccaatgggcctttccagcccgtggtccttctccatattcgagatgttcctcctgctgatcaagagaagctttttatccagaagttacgtcagtgttgcgtcctctttgactttgtttctgatccactaagtgacctaaagtggaaggaagtaaaacgagctgctttaagtgaaatggtagaatatatcacccataatcggaatgtgatcacagagcctatttacccagaagtagtccatatgtttgcagttaacatgtttcgaacattaccaccttcctccaatcctacgggagcggaatttgacccggaggaagatgaaccaacgttagaagcagcctggcctcatctacagcttgtttatgaatttttcttaagatttttagagtctccagatttccaacctaatatagcgaagaaatatattgatcagaagtttgtattgcagcttttagagctctttgacagtgaagatcctcgggagagagattttcttaaaaccacccttcacagaatctatgggaaattcctaggcttgagagcttacatcagaaaacagataaataatatattttataggtttatttatgaaacagagcatcataatggcatagcagagttactggaaatattgggaagtataattaatggatttgccttaccactaaaagaagagcacaagattttcttattgaaggtgttactacctttgcacaaagtgaaatctctgagtgtctaccatccccagctggcatactgtgtagtgcagtttttagaaaaggacagcaccctcacggaaccagtggtgatggcacttctcaaatactggccaaagactcacagtccaaaagaagtaatgttcttaaacgaattagaagagattttagatgtcattgaaccatcagaatttgtgaagatcatggaacccctcttccggcagttggccaaatgtgtctccagcccacacttccaggtggcagagcgagctctctattactggaataatgaatacatcatgagtttaatcagtgacaacgcagcgaagattctgcccatcatgtttccttccttgtaccgcaactcaaagacccattggaacaagacaatacatggcttgatatacaacgccctgaagctcttcatggagatgaaccaaaagctatttgatgactgtacacaacagttcaaagcagagaaactaaaagagaagctaaaaatgaaagaacgggaagaagcatgggttaaaatagaaaatctagccaaagccaatccccagtacacagtgtatagtcaagccagcaccatgagcattccggttgcaatggagacagatgggcctttatttgaagatgtgcagatgctgagaaagacagtgaaggacgaggctcatcaggcacagaaagatccgaagaaggaccgtcctcttgcacgccgcaagtccgagctgcctcaggacccccacaccaagaaagccttggaagctcactgcagggccgatgagctggcctcccaggacggccgctagcctccggggcgccgcgtcggggccgggcccgccagttcttttccggattctgtagaaaatacatacttcctgtgccataccaatcagttacactcaaagctttcttggaccccgttccgtaggcaataacgtgcgtccgcctcagcgcgagattaggagttcaaacaatggtgacttcccagagcccgctggcagagccgcgggttgacgacggtgtcctcgcagtgtcgccgccaccccagcgtagtccaagtcagactatttcacaaagtcagagcgataggaaagcaccctgcccttcatcttcatgttctcccaaatggaacttaggatcttttaacataggtggttctgtgataacatcagtgttttccaaatcaaaggaacgctttaaaaaataggacctattttttaagactttacagcctttgaaatggtttccacgtgattgttacgccagcagttctcgttttgtttgtttttcaatctcagtgaaatggctctttgctttcgagttctcacgcaacgtactgggcaaatgacaatcctcagccgctggtattttctaaggggtctcttcactttgatgagtgacatgaacaccgtgtctccttctcttgtgtgtacctaaagccatatttccaagtctgtggtactccaggattccaggagtaagcctgtagaagagatttattttaaaagagattgctctgaaatttatcttaaaagagcttgctctgtctaccttgacagaaattggagttttaaaattatgtgttaatatttttatttgcagatttcgtttccgtcaacttaaacattgttgcccttcaacaaggctcttgaattaataaaattatagtctctaagaattccacattttatggaaagttagagcaaaatcattttgagttaagccagttcttagcctaatgcaaactgcagcgcctttaagcataaagtaacacaacagcattgcacggggccggcactgccgctgccttcactgaaggctgcagtgctgttctgagagcttggaggaggcaccagcgaggatgacgtttagtggagctctttctgttgaaaagagctcacgttatcaacaccttgtaaggaaaatacagtgtctgagttttcatcggtcttcacatgctgctatatattccacagagttccttgcatgtactgagcttttgttttagatggaatagcacaaggagaaaaatctttaaacttagtgctttgtctattctttatttctctcagggtggccagtattttgacttatttatcctgcttgaaagctacttgagatgtgtactgctattctaaacacgtgatctagtttctttcatctctggcataagattatataacttaatgttaagtgtcttgaggcataaaagacaaaatgtggcttattttaggatctgttttttcatcgaggtctcgggtatcctttcaaagatagtgagaagcagacactgctccttgtgcagctctggtacctcctgcccactgctgtcacttcaagccactggcaatgcttctgtcctcgtgtcttggaggaaaatcacctggggggaggggacttcttgtggtaagagcaagtgcaggtatgaaatgcgaagattgccccagctaaaagtggacaagtccgctttgtgagatgaatacttcctgagaaacttgacaagtatctctccattttaccattatgaaaactatcattaaaaaaaacagtttagatgccttctccttttgagggaaaaagggtgctttttattgtataaagcagcgtcttatgtattttgatataccattgtttgaacttccgtctttagctgatagattctcaaatatccttgattttggatgttcagtatgtttgtgagagaggtttctgggaagactctctttttgccctcgggaaaaagcaaaatatcaatgtttgggtgactgtgtaaagctcagtgtgtaagaacatctttttgtctaggttttctttctgctctttattgaagacaaacactcaccaaaaagaaaaataaaagttttcagagaaactaattttctttggcaagagtattacttaatattttggcctcctaaagtttccctagttagtactcggactcctgtgctaattgtcagcttacatatcattgtatagagactgtttattctgtaccaaactgatttcaaaagtactacattgaaaataaaccggtgactgtttttcttcataaagttctgcgtttggcatcttcactctttccaaaatgtatctgtacatcagaaatgtcactattccaagtgtctttttagtgtggctttagtatggcttccttttaatattgtacatacattgtatctttgttttatggtaataagtaataaaaatgtagacttcatattttgtacaaaatgtcctatgtacagaataaaaaagttcatagaaacagcaaaaaaaaaaaaaaaaaa

SEQ ID NO: 29305 - DNA, 5833 bp, Homo Sapiens
cccaagctaacctccccaccccaataggatctggtggaagaaaagtcaggcaaacacaagcacgcacacaccactgggagatcagatcttctagctggctctctgctgccacagctccgccgaagggagggggtggaagaggaggactaaactcagagctgagaggagaggcaggtgtgtgcaggtgcatcacctggatcatgaggtcacccctctgctggctcctcccacttctcatcttggcctcagtggcccaaggccagccaacaagacgaccaagacccgggactgggcccgggcgcagacccaggcccaggcccaggcccacacccagctttcctcagcctgatgaaccagcagagccaacagacctgcctcctcccctccctccaggccctccatctatcttccctgactgtccccgcgaatgctactgcccccctgatttcccatctgccctctactgtgatagccgcaacctgcgaaaggtccctgtcatcccgccccgcatccattacctctatctccagaacaacttcatcactgagctcccggtggagtccttccagaatgccacaggcctgcgatggattaacctggacaacaaccgaatccgcaagatagaccagagggtgctggagaaactgcccggcctggtgttcctctacatggagaagaaccagttggaagaggtcccctcggccctgccccggaacctggagcagctgaggctgagccagaaccacatctccagaatcccgcctggtgtcttcagcaagctggagaacctgctgctcctggatctccagcacaacaggctgagcgacggcgtcttcaagcccgacaccttccatggcctcaagaacctcatgcagctcaacctggcccacaacatcctgagaaagatgccgcccagggtccccaccgccattcaccagctctacctggacagtaacaagattgagaccatccctaacggatacttcaagagctttcccaatcttgccttcattcggcttaactacaacaagctgacagacaggggactccccaagaactcctttaatatctccaacctgcttgtgctccacctgtcccacaacaggatcagcagtgtgcccgccatcaacaacaggctggaacacctgtacctcaacaacaatagcatcgagaaaatcaacggaacccagatttgccccaacgacctagtggcgttccatgacttctcctcggacctggagaacgtgccacacctgcgctacctgcggctggatggaaactacttgaagccgcccatcccgctggacctcatgatgtgcttccgcctcctgcagtccgtggtcatctaggccctactccgccaccggatctgctctgaccgcacttgaaggctggggcccaggcacctgtgccggccattcgttttctctctctccctttctttctcccagctttgcctcccttatcccaccctcgaggcagggaaaagccatctattcttctgcagcctcaggagcgagacttcaaggactcagtttggttccacccagttgaaagacacccagtgcacacccaaactcctggccttctgtggtttccctttgctccagaaacacagatgtgtctaaagacttggtgtccccttctctctcctcccccacccgccactcctgggtacatctgggccgtggactatctgatcttggtcctggccgagcaaacagcccggaggtaaggttcagaaagtccccctggggactcctccatcttcggcagctctggctcaaagaggccgagaaacccagttctcctgggccaaggatcccttctggcaaagctgctgctccgccgcttggttccccggcaccagacatcgccctggccctgctggcccgggtatcgggaaggaggagcgagggaatgacggaggtagggtgcagggtcagggctcccgcaggggcctgcatctggccagcaggacacagggatgcgcagggcgcccccttctgttccagggtgaacatagcacacgccctcctggctgggcctcaggaggaacagccaaggagaagaatggcccaaggaactaggaagcagccatgggagaggggaagggttcaagcccgggatgggcccgcgtgacgtcgatgggtcctgcggcccccttgcccaacctcgggtttagggaggagggttcacagtgtttttgtgggggcgggggaaggaagaggcagccccgcccccgccatctgttctccatcagtgtgcgcggcccagccatttccaccctcgggaggcggctcctgagaaacagggaggaaggggcggagcacctggacgtctcccagaagcccctccacgtttgaaaatgcgcctcctcctcggagacagacgcatcggtgccacctagtggctggtgggagtaacagctggtcccagtcttgcgcctggccctcttcctggggtgattttcctcggtggaggaggcccgtggggtcccaacacggaagagccatgggccgtgtgcatggtgtcgctctcctctagggtctagcgggcacaaacgtccccaggctgggctcattcccatcgtgagtgagcccaggtgaggacatagtcggctcccgtttgttgtaggcccttcccaggtgccttctcagctccctcatctgtaaaccgaggaggtggataagatgctcccggccgggcgcggtggctcacgcctgtaatcccagcactttgggaggccgaggcgggcagattattgcctgagctcaggagttcgaaaccaccctgggcaacatggtgaaacccccgtctctactaaaatacaaaaaaattagccaggcatagtggcgcgcgcctataatcccagctactgggaggctgaggcgggagaatcgcttgagccggggaggcggaggttgcagtgaggcgagattgtgccactgcactccagcttgggcgacagagtgagactccgtctcaaaaaagaaaaaaaaaagatgctcctctgaggtccctccggcgctcatgttccgagtctgcagctccacactttaaatcatactcgaatgcaggacaagtcctaaatatttgccccttcccttgcagtaatttattttctgtatggactgtccctcccccagaggcttccccaccctccattgcctggcccaggtgagcagcttggcaggtctccaagtggaacccggtccagacagggctgcctcgacttcacctttccccctaacttcctccaagggatgctgccccttctcagccccctgcgtgtgtatattggtgggaggcatagaggatggatgttctagaaatgagtaagacacagtgcccacccccaagttaggatgaaaaaagttccagaggtttttaagaaattggattaagctgggtccctaacttcaagaaattcccattatgctccttctcacctttcttttttgctaattatggaaaatagggcccatttcatcatagcctccttcccccgtgctccactacaatcgccgcattctttctagctgcagctggtttcttcaaggctcctgcttaaagtccacacgttattatggccgaaagcaacctggtgcttcggcctggataagagccccttctgcatcttattcacagcttgcagcctcagcccctttgatgaggccctcaggggagaggtcattaccttgatcctgcaaacccagactcgttgagcagcaacgcaatcaccatcatcccactgcccaatctagaatatgtctgctctcctttgctctctgcagctgtaagccagaggggattcaaggtaaataggctttacaggctcccctcctccaaacacacacagaatgggctggtttctttcaagtttaaaaaaagcccccttctccatgcacaagttcattccctccatgctgtcgtcatcgacatatacaggtgtgtacgtaggtgtatgtgtgtactctgcacgtatatctcttctgtcttgaagaccctgttaactttgtgaaataacttccacatttcaacacacttcacagtacaggaaataaagtaatatgaaaaacaccctgcgtgaactcaacggtgtgaacaggtcaagaataacacttcaaagtcatcttgccagccaggcgtggtggatcacgcctgtaatcccagcactctgggaggccaaagcgggcagatcacctgaggtcaggagttcaagaccagcctggccaacatagtgaaaccccttgtttactcaaaatacaaaaattggctgggtgcggtggtacatgcctgtagtcccagctacttgggaggctgaggcaggagaattgcttgaaccctggaggcagaagttgcagtgagccgagatcgcaccactgcactccagcctaggagacaaaacgagacttcatttaaaaaaaataaaaataaaaataaaaataaagtcatcttgccacccaccccctaccattgagccaccatgcccagccccaaagcctcttaattgctctaacaagatgagtggggaaaagattatactcttaagaaattcctacgaaagctatccaaaagccttttctttcctcttttcttattatttttaaatagaggcagggtctcattatgttgcccaggctggtctggaactcctggcctcaagtgatcctcccaccttggcctccccagagtgctgggattacacacgtgagtcaccatgcccagccccaaagccatttcttgaagaatttctcgcaaactcacaaccctcatgaaaaattaatcctcagttccacgagactgcccacccacagacaaaaaaatatatatattcctaaagtcggaccagaaatctgacagctgcctttgaaacccaaagcctcgggttctttcaagctacatgtactaaattgtcgaaggtctcccaggagctctgtactgaggcagacacagaaagacacaaaacggtcgtctttcctgcccaagtaaagcttacagactaactggggagatgtagtgtgcatacaaaacagtaaaagagccatctcaaggacagagagcatagaccaagtcatctggaatggtctacatgccatgcggaagtccaccgaagggttagaacagggtgtcccagactctctcttctgagggaaggttggttgcaaaagtgggattcatgaccctcccaggctacaccatcttctttagaatgagaactgccaggtgacgccctcgctgctcctacctggctactaaacatcgacttcggttcacttcacggatgttcagtggatatcggtcacatgccaggtccccagctacgcattcaaggatggataatatacatagcagcacatccttgaggaactcataccttggtaaagggaaagaaatccatgaatggatacctctgtgtcctaagtgtttgtaataatgctgtgtgtcaggcctctgagcccaagctaagccatcatatcccctgtgacctgcatgtgcacatccagacggctggttcctaccttaactgatgatattccaccacaaaagaagtgaaaatggctggtccctgccttaactgatgacattaccttgtgaaattccttctcctggctcatcctggctcaaaagctcccccactgaacaccttgcaacccccacccctggccaccagagaacaaccccctttgactgtaattttccattacctacccacatcttataaaatggccccatccctatctcccttcgctgactcttttcggactcagcccgcctgcacccaggtgaaataaacagccttgttgctcacacaaaaaaaaaaaaaaaa

SEQ ID NO: 29306 - DNA, 4529 bp, Homo Sapiens
gtctgcccgccgccgccactgctgctgccaccgccgtcgccgccgccgccgccgccgccgctgctgctgccggtgctaaggagttcgctggagccctttcctcagacccggcccggtcttcgcgcccggactcctggcgccagcgctaggcgcactcaccgctctgacgggtgcagacgcgggagttgtcccagactgtggagtggcgggcacggccccagccccccttcccttccctgaccccttcttgccatcgccccagacatggggaacgcggcgaccgccaagaaaggcagcgaggtggagagcgtgaaagagtttctagccaaagccaaagaagactttttgaaaaaatgggagaatccaactcagaataatgccggacttgaagattttgaaaggaaaaaaacccttggaacaggttcatttggaagagtcatgttggtaaaacacaaagccactgaacagtattatgccatgaagatcttagataagcagaaggttgttaaactgaagcaaatagagcatactttgaatgagaaaagaatattacaggcagtgaattttcctttccttgttcgactggagtatgcttttaaggataattctaatttatacatggttatggaatatgtccctgggggtgaaatgttttcacatctaagaagaattggaaggttcagtgagccccatgcacggttctatgcagctcagatagtgctaacattcgagtacctccattcactagacctcatctacagagatctaaaacctgaaaatctcttaattgaccatcaaggctatatccaggtcacagactttgggtttgccaaaagagttaaaggcagaacttggacattatgtggaactccagagtatttggctccagaaataattctcagcaagggctacaataaggcagtggattggtgggcattaggagtgctaatctatgaaatggcagctggctatcccccattctttgcagaccaaccaattcagatttatgaaaagattgtttctggaaaggtccgattcccatcccacttcagttcagatctcaaggaccttctacggaacctgctgcaggtggatttgaccaagagatttggaaatctaaagaatggtgtcagtgatataaaaactcacaagtggtttgccacgacagattggattgctatttaccagaggaaggttgaagctccattcataccaaagtttagaggctctggagataccagcaactttgatgactatgaagaagaagatatccgtgtctctataacagaaaaatgtgcaaaagaatttggtgaattttaaagaggaacaagatgacatctgagctcacactcagtgtttgcactctgttgagagataaggtagagctgagaccgtccttgttgaagcagttacctagttccttcattccaacgactgagtgaggtctttattgccatcatcccgtgtgcgcactctgcatccacctatgtaacaaggcaccgctaagcaagcattgtctgtgccataacacagtactagaccactttcttacttctctttgggttgtctttctcctctcctatatccatttcttccttttccaatttcattggttttctctaaacagtgctccattttattttgttggtgtttcagatgggcagtgttatggctacgtgatatttgaagggaaggataagtgttgctttcagtagttattgccaatattgttgttggtcaatggcttgaagataaactttctaataattattatttctttgagtagctcagacttggttttgccaaaactcttggtaatttttgaagatagactgtcttatcaccaaggaaatttatacaaattaagactaactttcttggaattcactattctggcaataaattttggtagactaatacagtacagctagacccagaaatttggaaggctgtagatcagaggttctagttccctttccctccttttatatcctcctctccttgagtaatgaagtgaccagcctgtgtagtgtgacaaacgtgtctcattcagcaggaaaaactaatgatatggatcatcacccagattctctcacttggtaccagcatttctgtaggtattagagaagagttctaagttttctaaaccttaactgttccttaaggattttagccagtattttaatagaacatgattaatgaaagtgacaaattttaaattttctctaatagtcctcatcataaactttttaaaggaaaataagcaaactaaaaagaacattggtttagataaatacttatactttgcaaagtcaaaaatggcttgatttttggaaacaatatagaggtattcatatttaaatgagggtttacatttgttttgttttgtaaccgttaaaaagaagttgtttccagctaattattgtggtgtactatatttgtgagcctagggtaggggcactgctgcaacttctgctttcatcccatgcctcatcaatgaggaaagggaacaaagtgtataaaactgccacaattgtattttaattttgaggtatgatattttcagatatttcataatttctaacctctgttctctcagtaaacagaatgtctgatcgatcatgcagatacaatgttggtatttgagaggttagtttttttcctacacttttttttgccaactgacttaacaacattgctgtcaggtggaaatttcaagcacttttgcacatttagttcagtgtttgttgagaatccatggcttaacccacttgttttgctatttttttctttgcttttaattttccccatctgattttatctctgcgtttcagtgacctaccttaaaacaacacacgagaagagttaaactgggttcattttaatgatcaatttacctgcatataaaatttatttttaatcaagctgatcttaatgtatataatcattctatttgctttattatcggtgcaggtaggtcattaacaccacttcttttcatctgtaccacaccctggtgaaacctttgaagacataaaaaaaacctgtctgagatgttctttctaccaatctatatgtctttcggttatcaagtgtttctgcatggtaatgtcatgtaaatgctgatattgatttcactggtccatctatatttaaaacgtgcaagaaaaaaataaaatactctgctctagcaagttttgtgtaacaaaggcatatcgtcatgttaataaatttaaaacatcattcgtataaaatattttaattttcttgtatttcatttagacccaagaacatgctgaccaatgtgttctatatgtaaactacaaattctatggtagctttgttgtatattattgtaaaattattttaataagtcatggggatgacaatttgattattacaatttagttttcagtaatcaaaaagatttctatgaattctaaaaaatatttttttctatgaaattactagtgcccagctgtagaatctaccttaggtagatgatccctagacatacgttggttttgagggctattcagccattccattttactctctatttaaaggccgtgagcaagcttgtcatgagcaaatatgtcaagggagtcaatttctgaccaatcaagtacactaaattagaatatttttaaagtatgtaacattcccagtttcagccacaatttagccaagaataagataaaaacttgaataagaagtaagtagcataaatcagtatttaacctaaaattacatatttgaaacagaagatattatgttatgctcagtaaataattaagagatggcattgtgtaagaaggagccctagactgaaagtcaagacatctgaatttcaggctggaaaactatcagtatgatctcagcctcagttctcttgtctgtaaaatggaagaactggattaggcagtttgtaagattcctcctaactttcacagtcgatgacaagattgtctttttatctgatattttgaagggtatattgctttgaagtaagtctcaataaggcaatatattttagggcatctttcttcttatctctgacagtgttcttaaaattatttgaatatcataagagccttggtgtctgtcctaattcctttctcactcaccgatgctgaatacccagttgaatcaaactgtcaacctaccaaaaacgatattgtggcttatgggtattgctgtctcattcttggtatattcttgtgttaactgcccattggcctgaaaatactcattgtaagcctgaaaaaaaaaatctttcccactgttttttctgcttgttgtaagaatcaaatgaaataatgtatgtgaaagcaccttgtaaactgtaacctatcaatgtaaaatgttaaggtgtgttgttatttcattaattacttctttgtttagaatggaatttcctatgcactactgtagctaggaaatgctgaaaacaactgtgttttttaattaatcaataactgcaaaattaaagtaccttcaatggataagacaaaaaaaaaaaaaaaaaa

SEQ ID NO: 29307 - DNA, 3411 bp, Homo Sapiens
gggcgagtgacagccccggctccgcgcgccgcggccgccagagccggcgcaggggaagcgcccgcggccccgggtgcagcagcggccgccgcctcccgcgcctccccggcccgcagcccgcggtcccgcggccccggggccggcacctctcgggctccggctccccgcgcgcaagatggctgacccggctgcggggccgccgccgagcgagggcgaggagagcaccgtgcgcttcgcccgcaaaggcgccctccggcagaagaacgtgcatgaggtcaagaaccacaaattcaccgcccgcttcttcaagcagcccaccttctgcagccactgcaccgacttcatctggggcttcgggaagcagggattccagtgccaagtttgctgctttgtggtgcacaagcggtgccatgaatttgtcacattctcctgccctggcgctgacaagggtccagcctccgatgacccccgcagcaaacacaagtttaagatccacacgtactccagccccacgttttgtgaccactgtgggtcactgctgtatggactcatccaccaggggatgaaatgtgacacctgcatgatgaatgtgcacaagcgctgcgtgatgaatgttcccagcctgtgtggcacggaccacacggagcgccgcggccgcatctacatccaggcccacatcgacagggacgtcctcattgtcctcgtaagagatgctaaaaaccttgtacctatggaccccaatggcctgtcagatccctacgtaaaactgaaactgattcccgatcccaaaagtgagagcaaacagaagaccaaaaccatcaaatgctccctcaaccctgagtggaatgagacatttagatttcagctgaaagaatcggacaaagacagaagactgtcagtagagatttgggattgggatttgaccagcaggaatgacttcatgggatctttgtcctttgggatttctgaacttcagaaagccagtgttgatggctggtttaagttactgagccaggaggaaggcgagtacttcaatgtgcctgtgccaccagaaggaagtgaggccaatgaagaactgcggcagaaatttgagagggccaagatcagtcagggaaccaaggtcccggaagaaaagacgaccaacactgtctccaaatttgacaacaatggcaacagagaccggatgaaactgaccgattttaacttcctaatggtgctggggaaaggcagctttggcaaggtcatgctttcagaacgaaaaggcacagatgagctctatgctgtgaagatcctgaagaaggacgttgtgatccaagatgatgacgtggagtgcactatggtggagaagcgggtgttggccctgcctgggaagccgcccttcctgacccagctccactcctgcttccagaccatggaccgcctgtactttgtgatggagtacgtgaatgggggcgacctcatgtatcacatccagcaagtcggccggttcaaggagccccatgctgtattttacgctgcagaaattgccatcggtctgttcttcttacagagtaagggcatcatttaccgtgacctaaaacttgacaacgtgatgctcgattctgagggacacatcaagattgccgattttggcatgtgtaaggaaaacatctgggatggggtgacaaccaagacattctgtggcactccagactacatcgcccccgagataattgcttatcagccctatgggaagtccgtggattggtgggcatttggagtcctgctgtatgaaatgttggctgggcaggcaccctttgaaggggaggatgaagatgaactcttccaatccatcatggaacacaacgtagcctatcccaagtctatgtccaaggaagctgtggccatctgcaaagggctgatgaccaaacacccaggcaaacgtctgggttgtggacctgaaggcgaacgtgatatcaaagagcatgcatttttccggtatattgattgggagaaacttgaacgcaaagagatccagcccccttataagccaaaagcttgtgggcgaaatgctgaaaacttcgaccgatttttcacccgccatccaccagtcctaacacctcccgaccaggaagtcatcaggaatattgaccaatcagaattcgaaggattttcctttgttaactctgaatttttaaaacccgaagtcaagagctaagtagatgtgtagatctccgtccttcatttctgtcattcaagctcaacggctattgtggtgacatttttatgtttttcattgccaagttgcatccatgtttgattttctgatgagactagagtgacagtgtttcagaacccaaatgtcctcaggtagtttggagcatctctatgagatgggattatgcagatggcctatggaaaatgcagctgcataattaacacattatcaaagtcctcttacaatttattttccgcagcatgtcagctaagtagacccaatggggagagaaaatgcctgctttctttccctctttttctgcactgccatattcacccccaaccatccaatctgtggataattggatgttagcggtactcttccacttccgggcctggagcttggcttgtatccaagtgtatggttgctttgcctaagaggaatccctctatttcacctgttctggaggcaccagaccttgaaaagaacatgctcaaaataaaatgttatctgttatttttgtaaactcaaagttaagatgatcaaagttctaaaattccaagaatgtgcttttagacggtctcaatctaaaagcacttcaaggggtcaaagggcaaccagcttgggtgctacctcagtgttgtagtttctgatactttatgtctttgctcaccctcatccccaaactacttgaaaagggcatttggcaccactctctgaaacaacacagtcactctagcaaggcccccaaagggccctggttttacattacatttcaaactttatttgctttggggttttgtttctgttgttgttcaaatgcaaaaaaaagaaaaaaaaagaaaaaaaaaggtgactcacattgttacacatgctttaaaatatgtattcaaatgttattaaccacaatgacgacctgctttgatttaaccaagaagacggctgcggagcctagcagactcaggcctgtgggaatgggatttgttacaaatctaggtttgttactggcttcagaaagctaattaagtgctctgaaaaagacaccgtttcttgaaacaaagatggttgtattcctcactttgatgttgttttgcaagatgtttgtggaaatgttcatttgtatctggatctctgttatgtgccatttttcttctagcatcgagatacaataaaaaaaaaaaaaaagaaaaaaaaaaaaaaaaaaaaaaaaaaaa

SEQ ID NO: 29308 - DNA, 2934 bp, Homo Sapiens
gcccctccctccgcccgcccgccggcccgcccgtcagtctggcaggcaggcaggcaatcggtccgagtggctgtcggctcttcagctctcccgctcggcgtcttccttcctcctcccggtcagcgtcggcggctgcaccggcggcggcgcagtccctgcgggaggggcgacaagagctgagcggcggccgccgagcgtcgagctcagcgcggcggaggcggcggcggcccggcagccaacatggcggcggcggcggcggcgggcgcgggcccggagatggtccgcgggcaggtgttcgacgtggggccgcgctacaccaacctctcgtacatcggcgagggcgcctacggcatggtgtgctctgcttatgataatgtcaacaaagttcgagtagctatcaagaaaatcagcccctttgagcaccagacctactgccagagaaccctgagggagataaaaatcttactgcgcttcagacatgagaacatcattggaatcaatgacattattcgagcaccaaccatcgagcaaatgaaagatgtatatatagtacaggacctcatggaaacagatctttacaagctcttgaagacacaacacctcagcaatgaccatatctgctattttctctaccagatcctcagagggttaaaatatatccattcagctaacgttctgcaccgtgacctcaagccttccaacctgctgctcaacaccacctgtgatctcaagatctgtgactttggcctggcccgtgttgcagatccagaccatgatcacacagggttcctgacagaatatgtggccacacgttggtacagggctccagaaattatgttgaattccaagggctacaccaagtccattgatatttggtctgtaggctgcattctggcagaaatgctttctaacaggcccatctttccagggaagcattatcttgaccagctgaaacacattttgggtattcttggatccccatcacaagaagacctgaattgtataataaatttaaaagctaggaactatttgctttctcttccacacaaaaataaggtgccatggaacaggctgttcccaaatgctgactccaaagctctggacttattggacaaaatgttgacattcaacccacacaagaggattgaagtagaacaggctctggcccacccatatctggagcagtattacgacccgagtgacgagcccatcgccgaagcaccattcaagttcgacatggaattggatgacttgcctaaggaaaagctcaaagaactaatttttgaagagactgctagattccagccaggatacagatcttaaatttgtcaggacaagggctcagaggactggacgtgctcagacatcggtgttcttcttcccagttcttgacccctggtcctgtctccagcccgtcttggcttatccactttgactcctttgagccgtttggaggggcggtttctggtagttgtggcttttatgctttcaaagaatttcttcagtccagagaattcctcctggcagccctgtgtgtgtcacccattggtgacctgcggcagtatgtacttcagtgcaccttactgcttactgttgctttagtcactaattgctttctggtttgaaagatgcagtggttcctccctctcctgaatccttttctacatgatgccctgctgaccatgcagccgcaccagagagagattcttccccaattggctctagtcactggcatctcactttatgatagggaaggctactacctagggcactttaagtcagtgacagccccttatttgcacttcaccttttgaccataactgtttccccagagcaggagcttgtggaaataccttggctgatgttgcagcctgcagcaagtgcttccgtctccggaatccttggggagcacttgtccacgtcttttctcatatcatggtagtcactaacatatataaggtatgtgctattggcccagcttttagaaaatgcagtcatttttctaaataaaaaggaagtactgcacccagcagtgtcactctgtagttactgtggtcacttgtaccatatagaggtgtaacacttgtcaagaagcgttatgtgcagtacttaatgtttgtaagacttacaaaaaaagatttaaagtggcagcttcactcgacatttggtgagagaagtacaaaggttgcagtgctgagctgtgggcggtttctggggatgtcccagggtggaactccacatgctggtgcatatacgcccttgagctacttcaaatgtggtttatacctcgcagatacaagaatctttatgaatatacaattctttttccttctacagcttagctccgtcttttcaaccacgaacatttaaaacccgacctactagcactgttctgtcctcaagtactcaaatatttctgatactgctgagtcagactgtcagaaaaagctagcactaactcgtgtttggagctctatccatattttactgatctctttaagtatttgttcctgccactgtgtactgtggagttgactcggtgttctgtcccagtgcggtgcctcctcttgacttccccactgctctctgtggtgagaaatttgccttgttcaataattactgtaccctcgcatgactgttacagctttctgtgcagagatgactgtccaagtgccacatgcctacgattgaaatgaaaactctattgttacctctgagttgtgttccacggaaaatgctatccagcagatcatttaggaaaaataattctatttttagcttttcatttctcagctgtccttttttcttgtttgatttttgacagcaatggagaatgggttatataaagactgcctgctaatatgaacagaaatgcatttgtaattcatgaaaataaatgtacatcttctatcttcaaaaaaaaaaaaaaaaaaa

SEQ ID NO: 29309 - DNA, 2517 bp, Homo Sapiens
gcagcagcagcctcccgcgtcgctgtcgctgttgcctccgccacctcctccgccgccgcgcgcccctcggagttccgcgccccaccatgcccaacatcgtgctgttcagcggcagctcgcatcaggacctatcccagcgcgtggccgaccgcctgggcctggagctgggcaaggtggtcacgaagaagttcagcaaccaggagaccagcgtggagattggtgaaagcgtgagaggggaagatgtctacatcatccagagcggctgcggggaaattaacgacaacctgatggaactcctcatcatgatcaatgcctgcaagattgcgtcatcatccagagtaactgccgtgatcccgtgtttcccatacgcccgacaagataaaaaggacaagagtcgtgccccaatttctgcaaaacttgtggccaatatgctgtcggtggctggggcggatcacatcatcaccatggacctgcatgcttctcagatacagggattctttgatattcctgtggataatttgtatgcggagcccgcagtcctgcagtggattcgggaaaacattgccgagtggaagaactgtatcattgtttcacctgacgcagggggagccaaaagggttacatcaattgcagacaggttgaatgtggaatttgctttgatccacaaagagaggaagaaggcgaatgaagtggaccggatggtcctggtgggcgacgtgaaggaccgtgtggccatcctcgtggatgacatggctgacacttgcggcaccatctgccatgctgcggacaagctgctgtcagctggagccaccaaagtgtatgctatccttacccatgggatcttctctggaccagctatttccagaataaataatgccgcctttgaggctgttgtcgtcacaaacacaattccgcaagaggacaaaatgaaacactgcaccaagattcaggtcattgacatttccatgatcttggccgaagcaatccgaaggacacacaatggggaatccgtgtcctacctgttcagccatgtcccgctataaatccagaatgggaagtgtccagcaagcctactctgacttctgacttgtttttgttttctggatttttagctgtaggtattcagcaatgataggttaatcactggcaaaagcatcagatctttgtatatgctaagatttattgtttccccttctaaagctcaagatcatttctttccagtttttggggaaatggtggtggttatttggtctttaagtgaactgtcttaaatgagaaacgtttttgtcattttgacttttaacaggtacaggtgatctcttcctttgttctttcagtactttgaggcgacaactttcaagtatataatttcattgtggaagtcatagtttatatatttcgaggttgccaaaggtgacttcagattaaagccttctgtgtaaatatatactgataatgcctatggacatttgggtaaaaccctgtatagaattaattatccttttactttggagtgaaccttggaaaatttataattataataccatggattttgaattttccttttttttttttttttttggataactcagtttcagataaaccatcttggttactgtgcttaatttggaccaaattttatttagcttaatatggacactgacacattttggggggtatacattagacatatcagagcagtgtatttctggatcattttttaaatgacctcttctaaaacataactgtcacttacctgaaatgctgcatcctaaaattccaaaattatattgagcaatcgccaaggcctaaagccaactgacttaaaggtaatcatttcagctaagattaaatttaaagcctaagaatgtatagagctagttttaaaataatgatctcagatttttaaaaaggatataggaacctgcattgtcattctctgaattaagaactgatggtttctatcattatttagccccacctttgtattttaaaatccttcagaatacatttatgaaccaatgcgactggacttagccacacacaatggaaattcagaccttgactatttggtgtttccagttcacaaaggtgatgaagactgtcttgggagcagcttaatcccaaaatttgtacatttcttgctgctcctggcgtggaaacttaagtgagaccaccaaatacattggtcctgtccaattctactgaatgggggtggacctggcatttatctggccaaaaacaggagccagagaaatatgaatataccaaagttgtttgtttagcctccaacttaaattacattagtcaacttatagatactcatatgatcacttttctttttagatactacatcaactagattcaggagtatatcatttgcagtgcttgtattggtttaaaatgtaagattttaagatcctctaacactgtactaaaacatttcaataaaatcattctgactgcgttaaaaaaaaaaaaaaaaaaaaaaaaaaaaaaaacaaaaaaaaaaaaaaa

SEQ ID NO: 29310 - DNA, 3382 bp, Homo Sapiens
ggcaaatctggcgctgtccccttcagcaccacgcggagtccgcgccgcccctccccgcgctcagctgggcccagcctctcctctgtctctcctcggtctcagctctgggcgagcagcggcccaccccagcccttgggcctggctccaaccggaagttacggctggaagcatccacatcagacccactccccgccagaggaggctcggccctacctggcagccggaaccttgtacatgggccgccagccccaccccaggttggagcagatggcctttactcctctctccccaatgggctggggggcccccctgagcgcctggccacactcttcggaggacctgctgacactggattcatgaaccagggggatacctggtcctccccccgggaagtctcctctcatgcccagagaatcgctagagccaaatgggaattcttctatggctccttggacccccccagctcaggtgctaagcccccagagcaggcccccccatctccacctggggtgggctcaaggcagggctctggggtggctgtggggcgagcagccaagtactccgagacagacctggacacggtgcccctgaggtgctaccgcgagactgacatcgatgaggtgctggctgagcgggaggaggccgactcggccatcgaaagtcagcccagctctgagggcccaccaggcactgcctacccacctgccccacggcccggcccactccctggccctcatcccagcctcggcagtggcaatgaggatgaggacgacgatgaggcaggtggggaagaagatgtggacgacgaggtgtttgaggcctctgaaggggcccggccagggagccggatgcctctcaagtcacctgtgccctttctacctgggacgagcccctcggctgatgggcctgactctttcagttgtgtgttcgaagccatcctggagtcacaccgggccaaaggcacctcctataccagcctcgcctcgctggaggccttggcctcacctggcccaacccagagccccttcttcacctttgagctgcctccccaaccccctgcaccccggcccgacccaccagctcccgccccacttgcccctcttgaaccggattctggtaccagctctgctgctgatggtccttggacacagagaggggaggaggaggaggcagaggccagagccaagctggccccagggagggagccccctagtccctgccactcagaggacagccttgggctgggggcagcaccccttggcagcgaaccacccctgagccagctggtgtccgactcagactcagagctggacagcacagagcggctggccctgggaagcacagacaccttgtccaatgggcagaaagcggacctggaggctgcgcagcgcctggccaagaggctgtaccgactagatggcttcaggaaggccgatgtggcccggcacctgggcaagaacaatgacttcagcaaactggtggctggggagtacctcaagttctttgtcttcacgggcatgactctggaccaagctctcagggtgtttctgaaggagctggccttaatgggtgagacccaggaacgagagcgcgtgctggcccacttctcccagcgatacttccagtgcaatcctgaagccctgtcctcagaggacggcgcccacacgctgacctgtgcgctcatgctgctcaacacggatctccacggccataacatcgggaagcgcatgacctgcggggacttcatcgggaacctggagtgcctcaatgatggcggcgacttccctagggagctgctcaaggccttgtacagctccatcaagaatgagaagctgcagtgggccatagacgaggaggagctgagacgctctctgtctgagttggccgaccccaaccccaaggtcatcaagcggatcagcgggggcagtggcagtggctccagccctttcctggacctgactcccgagcctggggctgccgtctacaagcacggggccctggtgcgaaaggtgcacgcagaccctgactgcaggaagacacctcggggcaagcggggctggaagagcttccacgggatcctcaagggcatgatcctctacctgcagaaggaggagtacaagcctgggaaggccctttcagagacggagctcaagaatgccatcagcatccacaatgccctggccactcgtgccagtgactacagcaagaggccccacgtcttctacctgcgcacagctgactggcgggtcttcctcttcctggccccgagcctggagcagatgcagtcctggatcactcgcatcaatgtagtagccgctatgttctctgcgccccccttcccagctgctgttagctcccaaaagaagttcagccgccctctcctgcccagcgctgccacccgcctctcccaggaggagcaggtgcggacccacgaggccaagctgaaggccatggcaagtgagctgcgggagcaccgggccgcccagctgggcaagaagggccggggcaaggaggctgaagagcagcggcagaaggaggcctacctggagtttgagaaatcccgctacagcacctatgcagcgctgcttcgggtcaagctgaaggcaggcagtgaggagctggatgcagtggaggcagcactggcccaggccgggagcacagaggatggactccctccttctcactccagtccctccctgcagcccaaaccctccagccagccccgggctcagcgtcacagctcagagcctcggccaggggcaggcagtgggcggcggaagccctgagatgaggtttagggtggggagtgcctgctgggcacctgaaggatgacatggccctgcctgagcccgggccggcctcgggccacccacgagggcctcccggcctagggcccgaccgcgccggacgcggtgtccggggcagggcagggctggggcctgggcctcaggagcctaggctaggggcacctctgagagcccctttttgtgataatgttttgcactttttcgtacagggtgggcgggggcgggaggggctagcgcccctgaacttttgatgctttttttttgtgtgggagaggcctgatgccgtttctgctttctgctgagacccccccaccctgacaccatcagtccccctctgtcctggggcctggcttggacagagaccaggatttggggctgagctggtttcccctccttcctccccaagggcttactctttctcttgctggaggtggaggaagggcgtccatgccaaggccccatacctgggccgggggcagcacggcctggctttcccacgcttcagtgggccttgccctttgtacagcctccacccccattaaaactgctctggacttgcaaaaaaaaaaaaaaaa

SEQ ID NO: 29311 - DNA, 1636 bp, Homo Sapiens
ggggaaggaggaaggacagcacagcctacagccgtgctcaggaagtttctggatcctaggctcagctccacagaggagaacacgcaggcgcagagaccatggggcccctctcagcccctccctgcacacagcacatcacctggaagggggtcctgctcacagcatcacttttaaacttctggaacctgcctatcactgctcaagtcacgattgaagccctgccacccaaagtttccgaggggaaggatgttcttctacttgtccacaatttgcctcagaatcttgctggctacatctggtacaaaggacaactgatggacctctaccattacattacatcatatgtagtagacggtcaaataaatatatatgggcctgcatacactggacgagaaacagtatattccaatgcatccctgctgatccagaatgtcacccgggaagacgcaggatcctataccttacacatcataaagcgaggtgataggactagaggagtaactggatatttcaccttcaacttatacctgaagctgcccaagccctacatcaccatcaacaactcaaaacccagggagaataaggatgtcttagccttcacctgtgaacctaagagtgagaactacacctacatttggtggctaaatggtcagagcctcccggtcagtcccagggtaaagcaacccattgaaaacaggatcctcattctacccagtgtcacgagaaatgaaacaggaccctatgaatgtgaaatacgggaccgagatggtggcatgcacagtgacccagtcaccctgaatgtcctctatggtccagacctccccagcatttacccttcattcacctattaccgttcaggagaaaacctctacttgtcctgcttcgcggaatctaacccaccggcagagtatttttggacaattaatgggaagtttcagcaatcaggacaaaagctctctatcccccaaattactacaaagcatagagggctctatacttgctctgttcgtaactcagccactggcaaggaaagctccaaatccatgacagtcgaagtctctgctccttcaggaataggacgtcttcctctccttaatccaatatagcagccgtgaagtcatttctgtatttcaggaagactggcagacagttgctttgattcttcctcaaactacttacaatcacctacagtccaaaattgctttttcttcaaggagatttatggaaaagactctgacaaggactcttgaatacaagttcctgataacttcaagatcataccactggactaagaactttcaaaattttaatgaacaggctgataccttcatgaaattctagacaaagaagaaaaaaactccatgttattggactaaataatcaaaagcataatgttttcataattttctatttgaaaatgtgctgattctttgaatgttttattctccagatttatgaactttttttcttgagcaattggtaaagtatacttttgtaaacaaaaattgaaacatttgcttttactctctatctgagtgccccagaattgggaaactattcatgagtattcatatgtttatggtaataaagttatctgcacaagttcaaaaaaaaaaaaaaaaaaaaaaaaaaaaaa

SEQ ID NO: 29312 - DNA, 850 bp, Homo Sapiens
ctgcaggcgtcgcgccaatcttcgctctgaggtgctgtctcaccggtgagacctggaagcgggcgagtctcgtgctgtgtcggacctgcagcccctggccttccgccaccatggagtacctcatcggtatccaaggccccgactatgttcttgtcgcctccgaccgggtggccgccagcaatattgtccagatgaaggacgatcatgacaagatgtttaagatgagtgaaaagatattactcctgtgtgttggagaggctggagacactgtacagtttgcagaatatattcagaaaaacgtgcaactttataagatgcgaaatggatatgaattgtctcccacggcagcagctaacttcacacgccgaaacctggctgactgtcttcggagtcggaccccatatcatgtgaacctcctcctggctggctatgatgagcatgaagggccagcgctgtattacatggactacctggcagccttggccaaggccccttttgcagcccacggctatggtgccttcctgactctcagtatcctcgaccgatactacacaccgactatctcacgtgagagggcagtggaactccttaggaaatgtctggaggagctccagaaacgcttcatcctgaatctgccaaccttcagtgttcgaatcattgacaaaaatggcatccatgacctggataacatttccttccccaaacagggctcctaacatcatgtcctccctcccacttgccagggaacttttttttgatgggctcctttatttttttctactcttttcaggcgcactcttgataaatggttaattcagaataaaggtgactatggatataattgaaaaaa

SEQ ID NO: 29313 - DNA, 2990 bp, Homo Sapiens
tgcgcgcgcagcgggccggcagtggcggcggagatggaggagggaggccgggacaaggcgccggtgcagccccagcagtctccagcggcggcccccggcggcacggacgagaagccgagcggcaaggagcggcgggatgccggggacaaggacaaagaacaggagctgtctgaagaggataaacagcttcaagatgaactggagatgctcgtggaacgactaggggagaaggatacatccctgtatcgaccagcgctggaggaattgcgaaggcagattcgttcttctacaacttccatgacttcagtgcccaagcctctcaaatttctgcgtccacactatggcaaactgaaggaaatctatgagaacatggcccctggggagaataagcgttttgctgctgacatcatctccgttttggccatgaccatgagtggggagcgtgagtgcctcaagtatcggctagtgggctcccaggaggaattggcatcatggggtcatgagtatgtcaggcatctggcaggagaagtggctaaggagtggcaggagctggatgacgcagagaaggtccagcgggagcctctgctcactctggtgaaggaaatcgtcccctataacatggcccacaatgcagagcatgaggcttgcgacctgcttatggaaattgagcaggtggacatgctggagaaggacattgatgaaaatgcatatgcaaaggtctgcctttatctcaccagttgtgtgaattacgtgcctgagcctgagaactcagccctactgcgttgtgccctgggtgtgttccgaaagtttagccgcttccctgaagctctgagattggcattgatgctcaatgacatggagttggtagaagacatcttcacctcctgcaaggatgtggtagtacagaaacagatggcattcatgctaggccggcatggggtgttcctggagctgagtgaagatgtcgaggagtatgaggacctgacagagatcatgtccaatgtacagctcaacagcaacttcttggccttagctcgggagctggacatcatggagcccaaggtgcctgatgacatctacaaaacccacctagagaacaacaggtttgggggcagtggctctcaggtggactctgcccgcatgaacctggcctcctcttttgtgaatggctttgtgaatgcagcttttggccaagacaagctgctaacagatgatggcaacaaatggctttacaagaacaaggaccacggaatgttgagtgcagctgcatctcttgggatgattctgctgtgggatgtggatggtggcctcacccagattgacaagtacctgtactcctctgaggactacattaagtcaggagctcttcttgcctgtggcatagtgaactctggggtccggaatgagtgtgaccctgctctggcactgctctcagactatgttctccacaacagcaacaccatgagacttggttccatctttgggctaggcttggcttatgctggctcaaatcgtgaagatgtcctaacactgctgctgcctgtgatgggagattcaaagtccagcatggaggtggcaggtgtcacagctttagcctgtggaatgatagcagtagggtcctgcaatggagatgtaacttccactatccttcagaccatcatggagaagtcagagactgagctcaaggatacttatgctcgttggcttcctcttggactgggtctcaaccacctggggaagggtgaggccatcgaggcaatcctggctgcactggaggttgtgtcagagccattccgcagttttgccaacacactggtggatgtgtgtgcatatgcaggctctgggaatgtgctgaaggtgcagcagctgctccacatttgtagcgaacactttgactccaaagagaaggaggaagacaaagacaagaaggaaaagaaagacaaggacaagaaggaagcccctgctgacatgggagcacatcagggagtggctgttctggggattgcccttattgctatgggggaggagattggtgcagagatggcattacgaacctttggccacttgctgagatatggggagcctacactccggagggctgtacctttagcactggccctcatctctgtttcaaatccacgactcaacatcctggataccctaagcaaattctctcatgatgctgatccagaagtttcctataactccatttttgccatgggcatggtgggcagtggtaccaataatgcccgtctggctgcaatgctgcgccagttagctcaatatcatgccaaggacccaaacaacctcttcatggtgcgcttggcacagggcctgacacatttagggaagggcacccttaccctctgcccctaccacagcgaccggcagcttatgagccaggtggccgtggctggactgctcactgtgcttgtctctttcctggatgttcgaaacattattctaggcaaatcacactatgtattgtatgggctggtggctgccatgcagccccgaatgctggttacgtttgatgaggagctgcggccattgccagtgtctgtccgtgtgggccaggcagtggatgtggtgggccaggctggcaagccgaagactatcacagggttccagacgcatacaaccccagtgttgttggcccacggggaacgggcagaattggccactgaggagtttcttcctgttacccccattctggaaggttttgttatccttcggaagaaccccaattatgatctctaagtgaccaccaggggctctgaactgcagctgatgttatcagcaggccatgcatcctgctgccaagggtggacacggctgcagacttctgggggaattgtcgcctcctgctcttttgttactgagtgagataaggttgttcaataaagacttttatccccaaggaaaaaaaaaaaaaaaaaaaaaaaaaaaaaaaaaaaaaaaaaaaaaaaaaaaaaaaaaaaaaaaaaaaa

SEQ ID NO: 29314 - DNA, 2805 bp, Homo Sapiens
gccttctcagccctcaaagacagaccgacagacagacagacagctggcaagaggcagcctgggggccacagctgcttcagcagacctcatggctgagtgagcctcccctgggcccagcaccccacctcagcatggtccaagcccatggggggcgctccagagcacagccgttgaccttgtctttgggggcagccatgacccagcctccgcctgaaaaaacgccagccaagaagcatgtgcgactgcaggagaggcggggctccaatgtggctctgatgctggacgttcggtccctgggggccgtagaacccatctgctctgtgaacacaccccgggaggtcaccctacactttctgcgcactgctggacacccccttacccgctgggcccttcagcgccagccacccagccccaagcaactggaagaagaattcttgaagatcccttcaaactttgtcagccccgaagacctggacatccctggccacgcctccaaggaccgatacaagaccatcttgccaaatccccagagccgtgtctgtctaggccgggcacagagccaggaggacggagattacatcaatgccaactacatccgaggctatgacgggaaggagaaggtctacattgccacccagggccccatgcccaacactgtgtcggacttctgggagatggtgtggcaagaggaagtgtccctcattgtcatgctcactcagctccgagagggcaaggagaaatgtgtccactactggcccacagaagaggaaacctatggacccttccagatccgcatccaggacatgaaagagtgcccagaatacactgtgcggcagctcaccatccagtaccaggaagagcgccggtcagtaaagcacatcctcttttcggcctggccagaccatcagacaccagaatcagctgggcccctgctgcgcctagtggcagaggtggaggagagcccggagacagccgcccaccccgggcctatcgtagtccactgcagtgcagggattggccggacgggctgcttcatcgccacgcgaattggctgtcaacagctgaaagcccgaggagaagtggacattctgggtattgtgtgccaactgcggctagacagaggggggatgatccagacggcagagcagtaccagttcctgcaccacactttggccctgtatgcaggccagctgcctgaggaacccagcccctgacccctgccaccctccggtggcccaggtgcctacctccctcaagcctgggaaggtgggtctggggaaagtgggccgagtgatctgggggtaccccttgggttggtgtggggaaggagtgcctccttagtggtgcttgcagtcacaggaagcagcagcagtaaggacaaggggccggattccaggtcttcaacactggccactcctctgcttcctctgttggccccagatggacagtaaggggaacctccaatgtctctctgaacttaaagacaggagctggcatttatgacagacaaagaaagaagcccaggtgtcctggtgttctctgagacactctttgtgagcttcagtttcctgttctataacatgaacataagtgcttagctgccatgagggaaaagtaatgagagaagtttctagaagccactccagccactccttcctggggctgacaaaagggtgattccaagatcatccttcacccgaggtcctgcccaagcacaggccagatgcaagaatggggaaaagtctggtcctgatctccaagtctcaacatcctatcagtgactctgctccctgaccacacatcggaagggctggatgaccccaatcaaaagaaagaacaaggactctggttacccttgcctccacccatgtgtcataagagtaggctacagaggtgaccaggcctggcagttgaaatctctggaagagggaacatgtggggactactcagaggcaaagaggagctgctcctgcctccatggttgctggccactcccaccaactactcttagggaggctaagcagtctctgttttgcttccatggctcaaataataccctgggtatgcaggacccactataccttgcatttgctgagtacacctagagagcttggctgtttccaaaaacaatcagggtcataaccatccatgcagacatggaggctcggctgaaccaggactcctcactgtctacctgagagaatgagcacccctcatccatctcagcatcaacacaatttccaggggacctcaggtctacctcaggactgaacgccacacctcaggattcctcctccttgaatctgagactggctgcccattctgagatggggatgaaggtaagatgccgcatcaccaggcacgccgcccctgacagctgccttgataccagctctctgtggaaacccccgaggagttggatctggagaacagctgggcctcctcactcaggacttctctcctgaagaacacgcagtgctaaaactgaggatgatttccctaatgcttctgcttggccttatggaggagctgctccttccttacagccttggggatggacttgcccacacctccacctcccctgagccctgtgagaggcacgactgtctatgccaatgaggctcggtggggggctctcaagtgcctgatcctgccctgggctcagagccagcccagagggaagcaactgcacagccccacaggccctccctggcactgtccccccaaccccatctcagagctcagagggtacaagctccagaacagtaaccaagtgggaaaataaagacttcttggatgactgac

SEQ ID NO: 29315 - DNA, 6300 bp, Homo Sapiens
cggccgcggtttccaggaggaagcaaggatgctttggacactgtgcgtggcgcctccgcggagcccccgcgctgccattcccggccgtcgctcggtcctccgctgacgggaagcaggaagtggcggcgggcgtcgcgagcggtgacatcacgggggcgacggcggcgaagggcgggggcggaggaggagcgagccgggccggggggcagctgcacagtctccgggatccccaggcctggaggggggtctgtgcgcggccggctggctctgccccgcgtccggtcccgagcgggcctccctcgggccagcccgatgtgaccgagcccagcggagcctgagcaaggagcgggtccgtcgcggagccggagggcgggaggaacatgacatcgcggagatggtttcacccaaatatcactggtgtggaggcagaaaacctactgttgacaagaggagttgatggcagttttttggcaaggcctagtaaaagtaaccctggagacttcacactttccgttagaagaaatggagctgtcacccacatcaagattcagaacactggtgattactatgacctgtatggaggggagaaatttgccactttggctgagttggtccagtattacatggaacatcacgggcaattaaaagagaagaatggagatgtcattgagcttaaatatcctctgaactgtgcagatcctacctctgaaaggtggtttcatggacatctctctgggaaagaagcagagaaattattaactgaaaaaggaaaacatggtagttttcttgtacgagagagccagagccaccctggagattttgttctttctgtgcgcactggtgatgacaaaggggagagcaatgacggcaagtctaaagtgacccatgttatgattcgctgtcaggaactgaaatacgacgttggtggaggagaacggtttgattctttgacagatcttgtggaacattataagaagaatcctatggtggaaacattgggtacagtactacaactcaagcagccccttaacacgactcgtataaatgctgctgaaatagaaagcagagttcgagaactaagcaaattagctgagaccacagataaagtcaaacaaggcttttgggaagaatttgagacactacaacaacaggagtgcaaacttctctacagccgaaaagagggtcaaaggcaagaaaacaaaaacaaaaatagatataaaaacatcctgccctttgatcataccagggttgtcctacacgatggtgatcccaatgagcctgtttcagattacatcaatgcaaatatcatcatgcctgaatttgaaaccaagtgcaacaattcaaagcccaaaaagagttacattgccacacaaggctgcctgcaaaacacggtgaatgacttttggcggatggtgttccaagaaaactcccgagtgattgtcatgacaacgaaagaagtggagagaggaaagagtaaatgtgtcaaatactggcctgatgagtatgctctaaaagaatatggcgtcatgcgtgttaggaacgtcaaagaaagcgccgctcatgactatacgctaagagaacttaaactttcaaaggttggacaagggaatacggagagaacggtctggcaataccactttcggacctggccggaccacggcgtgcccagcgaccctgggggcgtgctggacttcctggaggaggtgcaccataagcaggagagcatcatggatgcagggccggtcgtggtgcactgcagtgctggaattggccggacagggacgttcattgtgattgatattcttattgacatcatcagagagaaaggtgttgactgcgatattgacgttcccaaaaccatccagatggtgcggtctcagaggtcagggatggtccagacagaagcacagtaccgatttatctatatggcggtccagcattatattgaaacactacagcgcaggattgaagaagagcagaaaagcaagaggaaagggcacgaatatacaaatattaagtattctctagcggaccagacgagtggagatcagagccctctcccgccttgtactccaacgccaccctgtgcagaaatgagagaagacagtgctagagtctatgaaaacgtgggcctgatgcaacagcagaaaagtttcagatgagaaaacctgccaaaacttcagcacagaaatagatgtggactttcaccctctccctaaaaagatcaagaacagacgcaagaaagtttatgtgaagacagaatttggatttggaaggcttgcaatgtggttgactaccttttgataagcaaaatttgaaaccatttaaagaccactgtattttaactcaacaatacctgcttcccaattactcatttcctcagataagaagaaatcatctctacaatgtagacaacattatattttatagaatttgtttgaaattgaggaagcagttaaattgtgcgctgtattttgcagattatggggattcaaattctagtaataggcttttttatttttatttttatacccttaaccagtttaattttttttttcctcattgttggggatgatgagaagaaatgatttgggaaaattaagtaacaacgacctagaaaagtgagaacaatctcatttaccatcatgtatccagtagtggataattcattttgatggcttctatttttggccaaatgagaattaagccagtgcctgagactgtcagaagttgacctttgcactggcattaaagagtcatagaaaaagaatcatggatatttatgaattaaggtaagaggtgtggcttttttttttttcttttttccagccgttgaccaattatagttcggctgttgactgagaagtttgtggtgggaaaacgtttgccatattttctttgcatttgaataattgtcttgtacttagaaaaaaggcgtctatgaatgaccagtgtttttggtcgccaaatgttgctgacaaacttatcccaaaactttagtggcttaaaaaaacctgcccccaactgttagtcaatctgagctgggctcagctgggctgttcttctgccagcctgcaggtggccactcatgtggtcagcaggtcggcggagagactgggatggctgggcttctctctctgcctgcagtcctgagtctctccttcttcgtgtagtctctttcagtggcctggctggcagggtagctagacctctcacatgcagctcagagctcccaagagctcaaaagcagaaatggccaggccttctgaaaacttaagtccagaattgtcacagtgtcccttctacttccctctattgatgatgatgatgatgatgatgatgatgatgatgatgatgatgatggttttttctaatcagaagaaagctggggtatgccctctacttactaaacaagtcacaagcccagctcagattcaagaaaagggtgtgaagtagaggtgcagttaagtggggggccactagtctaacagacggtcacaaccagtgccatggaaaaccaaggatattagcaaaagcagaagttgctagtgaccttgggaagccgaagctgcttacagtagctgggacaagctgaaagtcagactaagaaataaagagagggccttcaagaagcttcctgaatgatttctgctagccctgagcctatttttggaaccagcacttggggaaactgatcttgtgaggatggatgtgtttagggacacagggcttttgagagcagcaccaccccactggggcatccccagacttgggaaacgtgactctttcttaatgccactgggttttagtcaggccacagtgagaaggaacagccctaacaggcctccagccaggttgaatgagctcatttttgttgtagccaaccagtaagatttgctaatgttctacattaagtgccttctccaaagacatccctctttgcctcatatgttgaatcatccagtgcggatatttcaatgaaaatatcattggttgacttttgtgatggtaataatgctatggcatctttgccatgaagttgtggcctccttggattcttctgactttggcttctgaaaggaaggcctagatccagccctggtggtagttcctttctgaggtctctcagtcccttgagactttggggtagtttggctgccattctcactgacaaaatgtatatcagcccccacctccaccccccaatattccttgaactttgaattgcttcagaacacaggtgtggcctgaaggtattcccttattagggaagtgtcactgctgtcttctagtcaaacttgtaaagaaaaagattccagttcagtatttgcagcaagaagcttgaatgctgttctttttatcgcattgttacatcgactcattctccattttgctttggttttgtcttgacttgacttgactttgggggtaaagtctttcaccagcacacaagagtttgattgtacaaatatatcttctgcattaacatctctgcctgttgcttaagatcagttgcttttatactcagaatggaaatacctgatcttggctagttttgttataagatattgatttcatttagatttccctccacgaggtcagcaaactatcatgttcttatgtaaacttaggccaaggccagagttatcatagtccctaggttgctacggcttatcatgtgcttggtaaaaggtgatcgcaggttctcagacgagtttactttacatgagatggaatcaggcagagaggctgggatgatggagaaagctcgaggtgaagttttaaaaaaaaagttgtggaaaggaaagttccaaagaggtggtttctgaggaagtcagagcgcccagggccagagcagtcagtaatgggtgaatgaggttgtttggaaagtcggtgtgacagacacatggatgccatctacttctaggttgctggtgggtattaaatatgcacaatattccatagctcactgaggattttaaaattataagcataggattttatattttggggtgaaagaattatctggcacattaggtattggagtttaaaaaaaaagccaaatttcacagtcttaataactttttttaaaaaaaactaaaaggcgcttcatgtccagtgtgtggcccttctgaaacttatggtcatctctcccactgaaaccaaggtcttttcaaatgtggctaaatggggatgaggagacacgggtaggactttcttggtgtgtgtgcattctttaaagagccaagttgcttcggggaaacagccaggaaaatggtcaagattatttttagaggttattttattggggattttaagaactaataacatcttgagttatttttaattcagggggatgtggaaaggtttgcaattgtcaagtgttttgttgtagcttagtatccataagggaaacttagactatagacataactacaaagccagtgcagcttttgttttctgtatgttgttgggggatcaactttcacacatagcaagcacatggcctccctgatgtcaggatgcctttgttaggatctgtatttgcccttaattttgttgaaatcttttttccttcttcctcttgaaaagttccaaaatatagtttattgtatctttcatcactaaaaatttgttcctttttcactatgggcagttcacacaaggcaaaaactattgaacagttggttttagtgtgttgtataactttgctgtatatcaaactaattttgacaagttttcatcctaagcctcaaatcatgtaattaataatttgcctgtttatttatgacctaattgtgattcttttattaataaaagctaatgggaaaaggatccctgattaagctgatgactagacctacaattaattttcctgcagtatatgaagtattgtaccagagtattaaaagatatgtaatattttattgataaatctatcctttaaaaggaatacgttttaggatgtcatcattttgatgtgaatcatgtaaatgttgataatatgctgtttattatacatttagtgtttcaagagattcacttaattgcctttttgcccacgtatattatgtagtctatttgcaactgttcttaaaaaaatgacattaaaagaatagtttatgtagagaaacattagtggatgttaattgtctccccacctatatttatgggtgttagcgcaactgctttgctagttgcaaagctgtattatcagagtaaaagtgtatttgtaaactgtatgggaactaaaaattaggaataaaaccattttcttatatgaaaaaaaaaaaaaaaaaa

SEQ ID NO: 29316 - DNA, 6331 bp, Homo Sapiens
gtctcctctggatcttaactactgagcgcaatgctgagccatggagccgggttggccttgtggatcacactgagcctgctgcagactggactggcggagccagagagatgtaacttcaccctggcggagtccaaggcctccagccattctgtgtctatccagtggagaattttgggctcaccctgtaactttagcctcatctatagcagtgacaccctgggggccgcgttgtgccctacctttcggatagacaacaccacatacggatgtaaccttcaagatttacaagcaggaaccatctataacttcaagattatttctctggatgaagagagaactgtggtcttgcaaacagatcctttacctcctgctaggtttggagtcagtaaagagaagacgacttcaaccggcttgcatgtttggtggactccttcttccggaaaagtcacctcatatgaggtgcaattatttgatgaaaataaccaaaagatacagggggttcaaattcaagaaagtacttcatggaatgaatacacttttttcaatctcactgctggtagtaaatacaatattgccatcacagctgtttctggaggaaaacgttctttttcagtttataccaatggatcaacagtgccatctccagtgaaagatattggtatttccacaaaagccaattctctcctgatttcctggtcccatggttctgggaatgtggaacgataccggctgatgctaatggataaagggatcctagttcatggcggtgttgtggacaaacatgctacttcctatgcttttcacgggctgtcccctggctacctctacaacctcactgttatgactgaggctgcagggctgcaaaactacaggtggaaactagtcaggacagcccccatggaagtctcaaatctgaaggtgacaaatgatggcagtttgacctctctaaaagtcaaatggcaaagacctcctggaaatgtggattcttacaatatcaccctgtctcacaaagggaccatcaaggaatccagagtattagcaccttggattactgaaactcactttaaagagttagtccccggtcgactttatcaagttactgtcagctgtgtctctggtgaactgtctgctcagaagatggcagtgggcagaacatttccagacaaagttgcaaacctggaggcaaacaataatggcaggatgaggtctcttgtagtgagctggtcgccccctgctggagactgggagcagtatcggatcctactcttcaatgattctgtggtgctgctcaacatcactgtgggaaaggaagaaacacagtatgtcatggatgacacggggctcgtaccgggaagacagtatgaggtggaagtcattgttgagagtggaaatttgaagaattctgagcgttgccaaggcaggacagtccccctggctgtcctccagcttcgtgtcaaacatgccaatgaaacctcactgagtatcatgtggcagacccctgtagcagaatgggagaaatacatcatttccctagctgacagagacctcttactgatccacaagtcactctccaaagatgccaaagaattcacttttactgacctggtgcctggacgaaaatacatggctacagtcaccagtattagtggagacttaaaaaattcctcttcagtaaaaggaagaacagtgcctgcccaagtgactgacttgcatgtggccaaccaaggaatgaccagtagtctgtttactaactggacccaggcacaaggagacgtagaattttaccaagtcttactgatccatgaaaatgtggtcattaaaaatgaaagcatctccagtgagaccagcagatacagcttccactctctcaagtccggcagcctgtactccgtggtggtaacaacagtgagtggagggatctcttcccgacaagtggttgtggagggaagaacagtcccttccagtgtgagtggagtaacggtgaacaattccggtcgtaatgactacctcagcgtttcctggctgctggcgcccggagatgtggataactatgaggtaacattgtctcatgacggcaaggtggttcagtcccttgtcattgccaagtctgtcagagaatgttccttcagctccctcaccccaggccgcctctacaccgtgaccataactacaaggagtggcaagtatgaaaatcactccttcagccaagagcggacagtgcctgacaaagtccagggagtcagtgttagcaactcagccaggagtgactatttaagggtatcctgggtgcatgccactggagactttgatcactatgaagtcaccattaaaaacaaaaacaacttcattcaaactaaaagcattcccaagtcagaaaacgaatgtgtatttgttcagctagtccctggacggttgtacagtgtcactgttactacaaaaagtggacaatatgaagccaatgaacaagggaatgggagaacaattccagagcctgttaaggatctaacattgcgcaacaggagcactgaggacttgcatgtgacttggtcaggagctaatggggatgtcgaccaatatgagatccagctgctcttcaatgacatgaaagtatttcctccttttcaccttgtaaataccgcaaccgagtatcgatttacttccctaacaccaggccgccaatacaaaattcttgtcttgacgattagcggggatgtacagcagtcagccttcattgagggcttcacagttcctagtgctgtcaaaaatattcacatttctcccaatggagcaacagatagcctgacggtgaactggactcctggtgggggagacgttgattcctacacggtgtcggcattcaggcacagtcaaaaggttgactctcagactattcccaagcacgtctttgagcacacgttccacagactggaggccggggagcagtaccagatcatgattgcctcagtcagcgggtccctgaagaatcagataaatgtggttgggcggacagttccagcatctgtccaaggagtaattgcagacaatgcatacagcagttattccttaatagtaagttggcaaaaagctgctggtgtggcagaaagatatgatatcctgcttctaactgaaaatggaatccttctgcgcaacacatcagagccagccaccactaagcaacacaaatttgaagatctaacaccaggcaagaaatacaagatacagatcctaactgtcagtggaggcctctttagcaaggaagcccagactgaaggccgaacagtcccagcagctgtcaccgacctgaggatcacagagaactccaccaggcacctgtccttccgctggaccgcctcagagggggagctcagctggtacaacatctttttgtacaacccagatgggaatctccaggagagagctcaagttgacccactagtccagagcttctctttccagaacttgctacaaggcagaatgtacaagatggtgattgtaactcacagtggggagctgtctaatgagtctttcatatttggtagaacagtcccagcctctgtgagtcatctcagggggtccaatcggaacacgacagacagcctttggttcaactggagtccagcctctggggactttgacttttatgagctgattctctataatcccaatggcacaaagaaggaaaactggaaagacaaggacctgacggagtggcggtttcaaggccttgttcctggaaggaagtacgtgctgtgggtggtaactcacagtggagatctcagcaataaagtcacagcggagagcagaacagctccaagtcctcccagtcttatgtcatttgctgacattgcaaacacatccttggccatcacgtggaaagggcccccagactggacagactacaacgactttgagctgcagtggttgcccagagatgcacttactgtcttcaacccctacaacaacagaaaatcagaaggacgcattgtgtatggtcttcgtccagggagatcctatcaattcaacgtcaagactgtcagtggtgattcctggaaaacttacagcaaaccaatttttggatctgtgaggacaaagcctgacaagatacaaaacctgcattgccggcctcagaactccacggccattgcctgttcttggatccctcctgattctgactttgatggttatagtattgaatgccggaaaatggacacccaagaagttgagttttccagaaagctggagaaagaaaaatctctgctcaacatcatgatgctagtgccccataagaggtacctggtgtccatcaaagtgcagtcggccggcatgaccagcgaggtggttgaagacagcactatcacaatgatagaccgcccccctcctccacccccacacattcgtgtgaatgaaaaggatgtgctaattagcaagtcttccatcaactttactgtcaactgcagctggttcagcgacaccaatggagctgtgaaatacttcacagtggtggtgagagaggctgatggcagtgatgagctgaagccagaacagcagcaccctctcccttcctacctggagtacaggcacaatgcctccattcgggtgtatcagactaattattttgccagcaaatgtgccgaaaatcctaacagcaactccaagagttttaacattaagcttggagcagagatggagagcttaggtggaaaacgcgatcccactcagcaaaaattctgtgatggaccactgaagccacacactgcctacagaatcagcattcgagcttttacacagctctttgatgaggacctgaaggaattcacaaagccactctattcagacacatttttttctttacccatcactactgaatcagagcccttgtttggagctattgaaggtgtgagtgctggtctgtttttaattggcatgctagtggctgttgttgccttattgatctgcagacagaaagtgagccatggtcgagaaagaccctctgcccgtctgagcattcgtagggatcgaccattatctgtccacttaaacctgggccagaaaggtaaccggaaaacttcttgtccaataaaaataaatcagtttgaagggcatttcatgaagctacaggctgactccaactaccttctatccaaggaatacgaggagttaaaagacgtgggccgaaaccagtcatgtgacattgcactcttgccggagaatagagggaaaaatcgatacaacaatatattgccctatgatgccacgcgagtgaagctctccaatgtagatgatgatccttgctctgactacatcaatgccagctacatccctggcaacaacttcagaagagaatacattgtcactcagggaccgcttcctggcaccaaggatgacttctggaaaatggtgtgggaacaaaacgttcacaacatcgtcatggtgacccagtgtgttgagaagggccgagtaaagtgtgaccattactggccagcggaccaggattccctctactatggggacctcatcctgcagatgctctcagagtccgtcctgcctgagtggaccatccgggagtttaagatatgcggtgaggaacagcttgatgcacacagactcatccgccactttcactatacggtgtggccagaccatggagtcccagaaaccacccagtctctgatccagtttgtgagaactgtcagggactacatcaacagaagcccgggtgctgggcccactgtggtgcactgcagtgctggtgtgggtaggactggaacctttattgcattggaccgaatcctccagcagttagactccaaagactctgtggacatttatggagcagtgcacgacctaagacttcacagggttcacatggtccagactgagtgtcagtatgtctacctacatcagtgtgtaagagatgtcctcagagcaagaaagctacggagtgaacaagaaaaccccttgtttccaatctatgaaaatgtgaatccagagtatcacagagatccagtctattcaaggcattgagaatgtacctgaagagctcctggataaaaattattcactgtgtgatttgtttttaaaaacttgcttcatgccctacagaggtgccagctatttctgttgatactatgtataatttattaatctggagaatgtttaaaattttatataatttaaaggtaacagatattattgtacatagttgtattttgtagtttcttctgtaaatatgtatttttcataatgtttaatattaagctttatataatactatttttccacactaaagtgttcatgacttgttctacataaaactaattcaacctgtaaa

SEQ ID NO: 29317 - DNA, 5026 bp, Homo Sapiens
agaggaggaaattgttcctcgtctgataagacaacagtggagaaaggacgcatgctgtttcttagggacacggctgacttccagatatgaccatgtatttgtggcttaaactcttggcatttggctttgcctttctggacacagaagtatttgtgacagggcaaagcccaacaccttcccccactggattgactacagcaaagatgcccagtgttccactttcaagtgaccccttacctactcacaccactgcattctcacccgcaagcacctttgaaagagaaaatgacttctcagagaccacaacttctcttagtccagacaatacttccacccaagtatccccggactctttggataatgctagtgcttttaataccacaggtgtttcatcagtacagacgcctcaccttcccacgcacgcagactcgcagacgccctctgctggaactgacacgcagacattcagcggctccgccgccaatgcaaaactcaaccctaccccaggcagcaatgctatctcagatgtcccaggagagaggagtacagccagcacctttcctacagacccagtttccccattgacaaccaccctcagccttgcacaccacagctctgctgccttacctgcacgcacctccaacaccaccatcacagcgaacacctcagatgcctaccttaatgcctctgaaacaaccactctgagcccttctggaagcgctgtcatttcaaccacaacaatagctactactccatctaagccaacatgtgatgaaaaatatgcaaacatcactgtggattacttatataacaaggaaactaaattatttacagcaaagctaaatgttaatgagaatgtggaatgtggaaacaatacttgcacaaacaatgaggtgcataaccttacagaatgtaaaaatgcgtctgtttccatatctcataattcatgtactgctcctgataagacattaatattagatgtgccaccaggggttgaaaagtttcagttacatgattgtacacaagttgaaaaagcagatactactatttgtttaaaatggaaaaatattgaaacctttacttgtgatacacagaatattacctacagatttcagtgtggtaatatgatatttgataataaagaaattaaattagaaaaccttgaacccgaacatgagtataagtgtgactcagaaatactctataataaccacaagtttactaacgcaagtaaaattattaaaacagattttgggagtccaggagagcctcagattattttttgtagaagtgaagctgcacatcaaggagtaattacctggaatccccctcaaagatcatttcataattttaccctctgttatataaaagagacagaaaaagattgcctcaatctggataaaaacctgatcaaatatgatttgcaaaatttaaaaccttatacgaaatatgttttatcattacatgcctacatcattgcaaaagtgcaacgtaatggaagtgctgcaatgtgtcatttcacaactaaaagtgctcctccaagccaggtctggaacatgactgtctccatgacatcagataatagtatgcatgtcaagtgtaggcctcccagggaccgtaatggcccccatgaacgttaccatttggaagttgaagctggaaatactctggttagaaatgagtcgcataagaattgcgatttccgtgtaaaagatcttcaatattcaacagactacacttttaaggcctattttcacaatggagactatcctggagaaccctttattttacatcattcaacatcttataattctaaggcactgatagcatttctggcatttctgattattgtgacatcaatagccctgcttgttgttctctacaaaatctatgatctacataagaaaagatcctgcaatttagatgaacagcaggagcttgttgaaagggatgatgaaaaacaactgatgaatgtggagccaatccatgcagatattttgttggaaacttataagaggaagattgctgatgaaggaagactttttctggctgaatttcagagcatcccgcgggtgttcagcaagtttcctataaaggaagctcgaaagccctttaaccagaataaaaaccgttatgttgacattcttccttatgattataaccgtgttgaactctctgagataaacggagatgcagggtcaaactacataaatgccagctatattgatggtttcaaagaacccaggaaatacattgctgcacaaggtcccagggatgaaactgttgatgatttctggaggatgatttgggaacagaaagccacagttattgtcatggtcactcgatgtgaagaaggaaacaggaacaagtgtgcagaatactggccgtcaatggaagagggcactcgggcttttggagatgttgttgtaaagatcaaccagcacaaaagatgtccagattacatcattcagaaattgaacattgtaaataaaaaagaaaaagcaactggaagagaggtgactcacattcagttcaccagctggccagaccacggggtgcctgaggatcctcacttgctcctcaaactgagaaggagagtgaatgccttcagcaatttcttcagtggtcccattgtggtgcactgcagtgctggtgttgggcgcacaggaacctatatcggaattgatgccatgctagaaggcctggaagccgagaacaaagtggatgtttatggttatgttgtcaagctaaggcgacagagatgcctgatggttcaagtagaggcccagtacatcttgatccatcaggctttggtggaatacaatcagtttggagaaacagaagtgaatttgtctgaattacatccatatctacataacatgaagaaaagggatccacccagtgagccgtctccactagaggctgaattccagagacttccttcatataggagctggaggacacagcacattggaaatcaagaagaaaataaaagtaaaaacaggaattctaatgtcatcccatatgactataacagagtgccacttaaacatgagctggaaatgagtaaagagagtgagcatgattcagatgaatcctctgatgatgacagtgattcagaggaaccaagcaaatacatcaatgcatcttttataatgagctactggaaacctgaagtgatgattgctgctcagggaccactgaaggagaccattggtgacttttggcagatgatcttccaaagaaaagtcaaagttattgttatgctgacagaactgaaacatggagaccaggaaatctgtgctcagtactggggagaaggaaagcaaacatatggagatattgaagttgacctgaaagacacagacaaatcttcaacttatacccttcgtgtctttgaactgagacattccaagaggaaagactctcgaactgtgtaccagtaccaatatacaaactggagtgtggagcagcttcctgcagaacccaaggaattaatctctatgattcaggtcgtcaaacaaaaacttccccagaagaattcctctgaagggaacaagcatcacaagagtacacctctactcattcactgcagggatggatctcagcaaacgggaatattttgtgctttgttaaatctcttagaaagtgcggaaacagaagaggtagtggatatttttcaagtggtaaaagctctacgcaaagctaggccaggcatggtttccacattcgagcaatatcaattcctatatgacgtcattgccagcacctaccctgctcagaatggacaagtaaagaaaaacaaccatcaagaagataaaattgaatttgataatgaagtggacaaagtaaagcaggatgctaattgtgttaatccacttggtgccccagaaaagctccctgaagcaaaggaacaggctgaaggttctgaacccacgagtggcactgaggggccagaacattctgtcaatggtcctgcaagtccagctttaaatcaaggttcataggaaaagacataaatgaggaaactccaaacctcctgttagctgttatttctatttttgtagaagtaggaagtgaaaataggtatacagtggattaattaaatgcagcgaaccaatatttgtagaagggttatattttactactgtggaaaaatatttaagatagttttgccagaacagtttgtacagacgtatgcttattttaaaattttatctcttattcagtaaaaaacaacttctttgtaatcgttatgtgtgtatatgtatgtgtgtatgggtgtgtgtttgtgtgagagacagagaaagagagagaattctttcaagtgaatctaaaagcttttgcttttcctttgtttttatgaagaaaaaatacattttatattagaagtgttaacttagcttgaaggatctgtttttaaaaatcataaactgtgtgcagactcaataaaatcatgtacatttctgaaatgacctcaagatgtcctccttgttctactcatatatatctatcttatatacttactattttacttctagagatagtacataaaggtggtatgtgtgtgtatgctactacaaaaaagttgttaactaaattaacattgggaaatcttatattccatatattagcatttagtccaatgtctttttaagcttatttaattaaaaaatttccagtgagcttatcatgctgtctttacatggggttttcaattttgcatgctcgattattccctgtacaatatttaaaatttattgcttgatacttttgacaacaaattaggttttgtacaattgaacttaaataaatgtcattaaaataaataaatgcaatatgtattaatattcattgtataaaaatagaagaatacaaacatatttgttaaatatttacatatgaaatttaatatagctatttttatggaatttttcattgatatgaaaaatatgatattgcatatgcatagttcccatgttaaatcccattcataactttcattaaagcatttactttgaatttc

SEQ ID NO: 29318 - DNA, 5787 bp, Homo Sapiens
atgttacttcctgtatggaggcatggccagtttccagcgccgcgctcttcgttccttcccagcctgcgccggagccacaactttcaggagcatggactgaaggcgccctcgccccagcgcccctctgagatcctttgtgttttcctccgtttcctccggccgtttctattttggggggctctccgctccccctgcctctcccctccccttcccctctcgcaaacatgcctccttccttcccggggccctggaaggagctgcctgcctgaagcccggagacgccgcgccgcgctcagccccgccgccgcccgccggctctcgggctgtgctgcgctgccgactcaagttggggatcctcggctgctcgccgccgccgcccgcggtccctgtctgccccaggcccggggcatcgccgccggccgccgactccgcgccctgcccgatcggctctctcctttttaaacggaaagcagcctttctccgccgagaggatcgtccccagcgtggctctgcgttcccggtcactttttgagattttccggggggcgctcggcggcttcccggattccaaggggactcgggccgccgagcgcggggggcccgtggagcgggcgagccggggaagcgccccggcttagcggaggctcgcacggaggcaagaacttattcaacaagtttacctccctgctttcctcttttcgatgtgcgttttcggacatgcggaggttactggaaccgtgttggtggattttgttcctgaaaatcaccagttccgtgctccattatgtcgtgtgcttccccgcgttgacagaaggctacgttggggccctgcacgagaatagacacggcagcgcagtgcagatccgcaggcgcaaggcttcaggcgacccgtactgggcctactctggtgcctatggtcctgagcactgggtcacgtctagtgtcagctgtgggagccgtcaccagtctcctattgacattttagaccagtatgcgcgtgttggggaagaataccaggaactgcaactcgatggcttcgacaatgagtcttctaacaaaacctggatgaaaaacacagggaaaacagtcgccatccttctgaaagacgactattttgtcagtggagctggtctacctggcagattcaaagctgagaaggtggaatttcactggggccacagcaatggctcagcgggctctgaacacagcatcaatggcaggaggtttcctgttgagatgcagattttcttttacaatccagatgactttgacagctttcaaaccgcaatttctgagaacagaataatcggagccatggccatattttttcaagtcagtccgagggacaattctgcactggatcctattatccacgggttgaagggtgtcgtacatcatgagaaggagacctttctggatcctttcgtcctccgggacctcctgcctgcatccctgggcagctattatcggtacacaggttccttgaccacaccaccgtgtagcgaaatagtggagtggatagtcttccggagacccgtccccatctcttaccatcagcttgaggctttttattccatcttcaccacggagcagcaagaccatgtcaagtcggtggagtatctgagaaataactttcgaccacagcagcgtctgcatgacagggtggtgtccaagtccgccgtccgtgactcctggaaccacgacatgacagacttcttagaaaacccactggggacagaagcctctaaagtttgcagctctccacccatccacatgaaggtgcagcctctgaaccagacggcactgcaggtgtcctggagccagccggagactatctaccacccacccatcatgaactacatgatctcctacagctggaccaagaatgaggacgagaaggagaagacgtttacaaaggacagcgacaaagacttgaaagccaccattagccatgtctcacccgatagcctttacctgttccgagtccaggccgtgtgtcggaacgacatgcgcagcgactttagccagacgatgctgtttcaagctaataccactcgaatattccaagggaccagaatagtgaaaacaggagtgcccacagcgtctcctgcctcttcagccgacatggcccccatcagctcggggtcttctacctggacgtcctctggcatcccattctcatttgtttccatggcaactgggatgggcccctcctccagtggcagccaggccacagtggcctcggtggtcaccagcacgctgctcgccggcctggggttcggcggtggtggcatctcctctttccccagcactgtgtggcccacgcgcctcccgacggccgcctcagccagcaagcaggcggctaggccagtcctagccaccacagaggccttggcttctccagggcccgatggtgattcgtcaccaaccaaggacggcgagggcaccgaggaaggagagaaggatgagaaaagcgagagtgaggatggggagcgggagcacgaggaggatggagagaaggactccgaaaagaaggagaagagtggggtgacccacgctgccgaggagcggaatcagacggagcccagccccacaccctcgtctcctaacaggactgccgagggagggcatcagactatacctgggcatgagcaggatcacactgccgtccccacagaccagacgggcggaaggagggatgccggcccaggcctggaccccgacatggtcacctccacccaagtgccccccaccgccacagaggagcagtatgcagggagtgatcccaagaggcccgaaatgccatctaaaaagcctatgtcccgcggggaccgattttctgaagacagcagatttatcactgttaatccagcggaaaaaaacacctctggaatgataagccgccctgctccagggaggatggagtggatcatccctctgattgtggtatcagccttgaccttcgtgtgcctcatccttctcattgctgtgctcgtttactggagagggtgtaacaaaataaagtccaagggctttcccagacgtttccgtgaagtgccttcttctggggagagaggagagaaggggagcagaaaatgttttcagactgctcatttctatgtggaagacagcagttcacctcgagtggtccctaatgaaagtattcctattattcctattccggatgacatggaagccattcctgtcaaacagtttgtcaaacacatcggtgagctctattctaataaccagcatgggttctctgaggattttgaggaagtccagcgctgtactgctgatatgaacatcactgcagagcattccaatcatccagaaaacaagcacaaaaacagatacatcaacattttagcatatgatcacagtagggtgaagttaagacctttaccaggaaaagactctaagcacagcgactacattaatgcaaactatgttgatggttacaacaaagcaaaagcctacattgccacccaaggacctttgaagtctacatttgaagatttctggaggatgatttgggaacaaaacactggaatcattgtgatgattacgaaccttgtggaaaaaggaagacgaaaatgtgatcagtattggccaacagagaacagtgaggaatatggaaacattattgtcacgctgaagagcacaaaaatacatgcctgctacactgttcgtcgtttttcaatcagaaatacaaaagtgaaaaagggtcagaagggaaatcccaagggtcgtcagaatgaaagggtagtgatccagtatcactatacacagtggcctgacatgggagttcccgagtatgcccttccagtactgactttcgtgaggagatcctcagcagctcggatgccagaaacgggccctgtgttggtgcactgcagtgctggtgtgggcagaacaggcacctatattgtaatagacagcatgctgcaacagataaaagacaaaagcacagttaacgtcctgggattcctgaagcatatcaggacacagcgtaactacctcgtccagactgaggagcagtacattttcatccatgatgccttgttggaagccattcttggaaaggagactgaagtatcttcaaatcagctgcacagctatgttaacagcatccttataccaggagtaggaggaaagacacgactggaaaagcaattcaagctggtcacacagtgtaatgcaaaatatgtggaatgtttcagtgctcagaaagagtgtaacaaagaaaagaacagaaactcttcagttgtgccatctgagcgtgctcgagtgggtcttgcaccattgcctggaatgaaaggaacagattacattaatgcttcttatatcatgggctattataggagcaatgaatttattataactcagcatcctctgccacatactacgaaagatttctggcgaatgatttgggatcataacgcacagatcattgtcatgctgccagacaaccagagcttggcagaagatgagtttgtgtactggccaagtcgagaagaatccatgaactgtgaggcctttaccgtcacccttatcagcaaagacagactgtgcctctctaatgaagaacaaattatcatccatgactttatccttgaagctacacaggatgactatgtcttagaagttcggcactttcagtgtcccaaatggcctaacccagatgcccccataagtagtacctttgaacttatcaacgtcatcaaggaagaggccttaacaagggatggtcccaccattgttcatgatgagtatggagcagtttcagcaggaatgttatgtgcccttaccaccctgtcccagcaactggagaatgaaaatgctgtggatgttttccaggttgcaaaaatgatcaatcttatgaggcctggagtattcacagacattgaacaataccagttcatctataaagcaaggcttagcttggtcagcactaaagaaaatggaaatggtcccatgacagtagacaaaaatggtgctgttcttattgcagatgaatcagaccctgctgagagcatggagtccctagtgtgactggaatcctgaaagggcacttaatttgtaaacttctgaagactgagaacttttttgaggccttttttgccagactctaggttatacaataacccagttacttttttacactgataaaagttttgatatttattttttgccattttatgtcttaatggtatcctactgagcatttgcacctctgttcatttcacacagtgaaacgcaattttacctagtttgcactatatgatcagtgttactgcctataatcttatacaacagcaaaccctgatgtgacattccatgacgacatacatgctacttttttttagttcaatacagtgaaggtctttgttatgacagtgaatattgcttttattattattattgctgaagtggttgcattctactagcaggcaatgctgtacttttcttcagtcctcctctcctttttattttaggcactgttcaatactgtatgccttctgtattttaatggagtggatagcattgttttcttttacagactagcaggctactgggacctaaaaaggtctgttaatgtcatggccttgaaacagttccatttatgctggttaagagatcccttaagaagttagaaggcttaagaactgcttcatgtgaacatcccttattagttacaaagttatattcacagttttttaaaaatgtgtcaaaataaaggataactctgtattacagctttcccagtaaaaaaaaaaaaaaaaa

SEQ ID NO: 29319 - DNA, 4767 bp, Homo Sapiens
gcctcccgccgcctcccgcgcggccatggactgagcgccgccggccaggccgcggggatggggccgccgctcccgctgctgctgctgctactgctgctgctgccgccacgcgtcctgcctgccgccccttcgtccgtcccccgcggccggcagctcccggggcgtctgggctgcctgctcgaggagggcctctgcggagcgtccgaggcctgtgtgaacgatggagtgtttggaaggtgccagaaggttccggcaatggacttttaccgctacgaggtgtcgcccgtggccctgcagcgcctgcgcgtggcgttgcagaagctttccggcacaggtttcacgtggcaggatgactatactcagtatgtgatggaccaggaacttgcagacctcccgaaaacctacctgaggcgtcctgaagcatccagcccagccaggccctcaaaacacagcgttggcagcgagaggaggtacagtcgggagggcggtgctgccctggccaacgccctccgacgccacctgcccttcctggaggccctgtcccaggccccagcctcagacgtgctcgccaggacccatacggcgcaggacagaccccccgctgagggtgatgaccgcttctccgagagcatcctgacctatgtggcccacacgtctgcgctgacctaccctcccgggccccggacccagctccgcgaggacctcctgccgcggaccctcggccagctccagccagatgagctcagccctaaggtggacagtggtgtggacagacaccatctgatggcggccctcagtgcctatgctgcccagaggcccccagctccccccggggagggcagcctggagccacagtaccttctgcgtgcaccctcaagaatgcccaggcctttgctggcaccagccgccccccagaagtggccttcacctctgggagattccgaagacccctccagcacaggcgatggagcacggattcataccctcctgaaggacctgcagaggcagccggctgaggtgaggggcctgagtggcctggagctggacggcatggctgagctgatggctggcctgatgcaaggcgtggaccatggagtagctcgaggcagccctgggagagcggccctgggagagtctggagaacaggcggatggccccaaggccaccctccgtggagacagctttccagatgacggagtgcaggacgacgatgatagactttaccaagaggtccatcgtctgagtgccacactcgggggcctcctgcaggaccacgggtctcgactcttacctggagccctcccctttgcaaggcccctcgacatggagaggaagaagtccgagcaccctgagtcttccctgtcttcagaagaggagactgccggagtggagaacgtcaagagccagacgtattccaaagatctgctggggcagcagccgcattcggagcccggggccgctgcgtttggggagctccaaaaccagatgcctgggccctcgaaggaggagcagagccttccagcgggtgctcaggaggccctcagcgacggcctgcaattggaggtccagccttccgaggaagaggcgcggggctacatcgtgacagacagagaccccctgcgccccgaggaaggaaggcggctggtggaggacgtcgcccgcctcctgcaggtgcccagcagtgcgttcgctgacgtggaggttctcggaccagcagtgaccttcaaagtgagcgccaatgtccaaaacgtgaccactgaggatgtggagaaggccacagttgacaacaaagacaaactggaggaaacctctggactgaaaattcttcaaaccggagtcgggtcgaaaagcaaactcaagttcctgcctcctcaggcggagcaagaagactccaccaagttcatcgcgctcaccctggtctccctcgcctgcatcctgggcgtcctcctggcctctggcctcatctactgcctccgccatagctctcagcacaggctgaaggagaagctctcgggactagggggcgacccaggtgcagatgccactgccgcctaccaggagctgtgccgccagcgtatggccacgcggccaccagaccgacctgagggcccgcacacgtcacgcatcagcagcgtctcatcccagttcagcgacgggccgatccccagcccctccgcacgcagcagcgcctcatcctggtccgaggagcctgtgcagtccaacatggacatctccaccggccacatgatcctgtcctacatggaggaccacctgaagaacaagaaccggctggagaaggagtgggaagcgctgtgcgcctaccaggcggagcccaacagctcgttcgtggcccagagggaggagaacgtgcccaagaaccgctccctggctgtgctgacctatgaccactcccgggtcctgctgaaggcggagaacagccacagccactcagactacatcaacgctagccccatcatggatcacgacccgaggaaccccgcgtacatcgccacccagggaccgctgcccgccaccgtggctgacttttggcagatggtgtgggagagcggctgcgtggtgatcgtcatgctgacacccctcgcggagaacggcgtccggcagtgctaccactactggccggatgaaggctccaatctctaccacatctatgaggtgaacctggtctccgagcacatctggtgtgaggacttcctggtgaggagcttctatctgaagaacctgcagaccaacgagacgcgcaccgtgacgcagttccacttcctgagttggtatgaccgaggagtcccttcctcctcaaggtccctcctggacttccgcagaaaagtaaacaagtgctacaggggccgttcttgtccaataattgttcattgcagtgacggtgcaggccggagcggcacctacgtcctgatcgacatggttctcaacaagatggccaaaggtgctaaagagattgatatcgcagcgaccctggagcacttgagggaccagagacccggcatggtccagacgaaggagcagtttgagttcgcgctgacagccgtggctgaggaggtgaacgccatcctcaaggcccttccccagtgagcggcagcctcaggggcctcaggggagcccccaccccacggatgttgtcaggaatcatgatctgactttaattgtgtgtcttctattataactgcatagtaatagggcccttagctctcccgtagtcagcgcagtttagcagttaaaagtgtatttttgtttaatcaaacaataataaagagagatttgtggaaaaatccagttacgggtggaggggaatcggttcatcaattttcacttgcttaaaaaaaatactttttcttaaagcacccgttcaccttcttggttgaagttgtgttaacaatgcagtagccagcacgttcgaggcggtttccaggaagagtgtgcttgtcatctgccactttcgggagggtggatccactgtgcaggagtggccggggaagctggcagcactcagtgaggccgcccggcacacaaggcacgtttggcatttctctttgagagagtttatcattgggagaagccgcggggacagaactgaacgtcctgcagcttcggggcaagtgagacaatcacagctcctcgctgcgtctccatcaacactgcgccgggtaccatggacggccccgtcagccacacctgtcagcccaagcagagtgattcaggggctccccgggggcagacacctgtgcaccccatgagtagtgcccacttgaggctggcactcccctgacctcacctttgcaaagttacagatgcaccccaacattgagatgtgtttttaatgttaaaatattgatttctacgttatgaaaacagatgcccccgtgaatgcttacctgtgagataaccacaaccaggaagaacaaatctgggcattgagcaagctatgagggtccccgggagcacacgaaccctgccaggcccccgctggctcctccaggcacgtcccggacctgtggggccccagagaggggacatttccctcctgggagagaaggagatcagggcaactcggagagggctgcgagcatttccctcccgggagaggagatcagggcgacctgcacgcactgcgtagagcctggaagggaagtgagaaaccagccgaccggccctgcccctcttcccgggatcacttaatgaaccacgtgttttgacatcatgtaaacctaagcacgtagagatgattcggatttgacaaaataacatttgagtatccgattcgccatcaccccctaccccagaaataggacaattcacttcattgaccaggatgatcacatggaaggcggcgcagaggcagctgtgtgggctgcagatttcctgtgtggggttcagcgtagaaaacgcacctccatcccgcccttcccacagcattcctccatcttagatagatggtactctccaaaggccctaccagagggaacacggcctactgagcggacagaatgatgccaaaatattgcttatgtctctacatggtattgtaatgaatatctgctttaatatagctatcatttcttttccaaaattacttctctctatctggaatttaattaatcgaaatgaatttatctgaatataggaagcatatgcctacttgtaatttctaactccttatgtttgaagagaaacctccggtgtgagatatacaaatatatttaattgtgtcatattaaacttctgattcaaaaaaaa

SEQ ID NO: 29320 - DNA, 3492 bp, Homo Sapiens
cagctaagacccggagaggtggaatttcactttgaaattcccttgcctcgtgagggccggcgctgggcatgctcagtagccgcggcgctgctgctgggctgctgggctggcgcggagtccaccctgccgtctccgccttggcttctgggcgtccagaaggccaggcatttgccgcctctgagcgcttctgttccccttacccgcaacctcctactgctcttcctctctccctctcttagggaggttgaagctggtgctggtttctgtcggcgccacagactgactgctctgcaaaccccagccgaggacctgaatcccggagactagaagacccttggcggtggctctttctaatagcactttacctgaagtggggtcgtggtggagtttctcctccacctctcaatgcaaacactatgcggagagcagtctgcttccctgcgctgtgcctgctccttaatcttcacgctgcagggtgcttttcaggaaacaatgatcattttttggcaattaatcagaagaagagtgggaagccggtattcatttataagcattcacaagacattgagaagagcctggatatagccccacaaaaaatctacagacatagctaccattcctcttccgaagctcaagtaagcaaacgccaccagattgtcaattcagcatttcctagacccgcatatgacccgtctctcaatctgctggccatggatggtcaagatcttgaagtggaaaatctcccaatcccagcagcaaatgtaattgtggtgacactgcaaatggatgtaaacaagctgaacataaccttgcttcggatcttccgccaaggagtggctgcagctttaggactcttaccccagcaagtgcacatcaatcgcctcattggaaagaagaacagtattgaactgtttgtgtctcccataaaccgaaaaacaggaatttctgatgctctgccctctgaggaagttcttcgttcacttaatatcaatgttttgcatcaaagtttatcccagtttggaattacagaagtctctcctgagaaaaatgttttacaagggcagcatgaagcggacaaaatctggagcaaagaaggattttatgctgttgtcatttttctcagcatctttgttattatagtaacgtgtttgatgattctttacagattaaaagaaagatttcagctttccttaagacaagacaaagagaaaaaccaggagatccacctatcgcccatcacattacagccagcactgtccgaggcaaagacagtccacagcatggtccaacctgagcaggccccaaaggtactgaatgttgtcgtggaccctcaaggccgaggtgctcctgagatcagagctaccaccgctacctctgtttgcccttctcctttcaaaatgaagcccataggacttcaagagagaagagggtccaacgtatctcttacattggacatgagtagcttggggaacattgaaccctttgtgtctataccaacaccacgggagaaggtagcaatggagtatctgcagtcagccagccgaattctcacaaggtctcagctgagggacgtcgtggcaagttcacatttactccaaagtgaattcatggaaataccaatgaactttgtggatcccaaagaaattgatattccgcgtcatggaactaaaaatcgctataagaccattttaccaaatcccctcagcagagtgtgtttaagaccaaaaaatgtaaccgattcattgagcacctacattaatgctaattatattaggggctacagtggcaaggagaaagccttcattgccacgcagggccccatgatcaacaccgtggatgatttctggcagatggtttggcaggaagacagccctgtgattgttatgatcacaaaactcaaagaaaaaaatgagaaatgtgtgctatactggccggaaaagagagggatatatggaaaagttgaggttctggttatcagtgtaaatgaatgtgataactacaccattcgaaaccttgtcttaaagcaaggaagccacacccaacatgtgaagcattactggtacacctcatggcctgatcacaagactccagacagtgcccagcccctcctacagctcatgctggatgtagaagaagacagacttgcttcccagggccgagggcctgtggttgtccactgcagtgcaggaataggtagaacagggtgttttattgctacatccattggctgtcaacagctgaaagaagaaggagttgtggatgcactaagcattgtctgccagcttcgtatggatagaggtggaatggtgcaaaccagtgagcagtatgaatttgtgcaccatgctctgtgcctgtatgagagcagactttcagcagagactgtccagtgagtcattgaagacttgtcagaccatcaatctcttggggtgattaatcaaattacccacccaaggcttctagaaggagcttcctgcaatggaaggaaggagaagctctgaagcccatgtatggcatggattgtggaagactgggcaacatatttaagatttccagctccttgtgtatatgaatgcatttgtaagcatcccccaaattattctgaaggttttttgatgatggaggtatgataggtttatcacacagcctaaggcagattttgttttgtctgtactgactctatctgccacacagaatgtatgtatgtaatattcagtaataaatgtcatcaggtgatgactggatgagctgctgaagacattcgtattatgtgttagatgctttaatgtttgcaaaatctgtcttgtgaatggactgtcagctgttaaactgttcctgttttgaagtgctattacctttctcagttaccagaatcttgctgctaaagttgcaagtgattgataatggatttttaacagagaagtctttgtttttgaaaaacaaaaatcaaaaacagtaactattttatatggaaatgtgtcttgataatattacctattaaatgtgtatttatagtccctcctatcaaacaattacagagcacaatgattgtcattgggtatatatgtatttactctctattattgggcataaaggtggcttctgctccagaactctatccactgtatttccacatcgtgagtcattttactttaaaagggaaaaacaaatttgtagcaactctgaagtatcaagagttttaactacttgtctctcttttgctaagaagggatttttgaatatgctatctacctggaatctctctctcaacaaaaggtatatgccttcaggaatgatataatctgtcccattttcgaggctccttataaggacatttccatgtatgtccttacatttctgaaagctttcaatcttcaagagccaaaaaaaattaaaataactaccctcagcaaacactagctgttctgctcatatatgaatttttaatgcagcaatgttgactttgtttcatactgccaataaactcttaatact

SEQ ID NO: 29321 - DNA, 2452 bp, Homo Sapiens
cgcagccgtggctgaggagcctgtggcggcagcggcgatggaaccagcggagcagccgagcgagttagtgtcagccgagggccgaaaccggaaggcggtgctgtgccagcgttgcggctcccgggtgctgcagccagggaccgctctcttctctcgccgacagcttttccttccctccatgagaaagaagccagctctgtctgacggcagcaatcctgacggcgatctcctccaggaacactggctggttgaggacatgttcatttttgagaatgtgggcttcaccaaggacgtgggcaacatcaagtttctggtctgcgcagactgtgaaattggaccaattggctggcattgcctagatgacaagaacagtttctatgtggccttggaacgagtttcccatgagtaactgaggggaggggtactcagctccatctccaaagataaacctactccccacaagaactggcctttaatgtggtataactgttccgctgccttcttgtctgtgctaatataaatactgagtaccagcatgtccatttgaacatgcagagggttaatcctgcttcctaaagcctcaagtacatgcctcctgcttagttcactttgtatcacatttcctaagctcccttttcccccagttttgggacactgtgcttacctccaaaaatctcatctcttccctggcattctccctaggctctgttttgcccaggggctcccgctttttcttgctctagaagagcagtattcaaccttttagctatgatgacacataacaaaagatgcttatgtactaatagttgaaatctgcctttttctcattcaagaaggcatacaaatatctgagagtgactttgttgtatggctacccttgtgatctacagtaatttattctttctaaaagtaaagcattttcaaaactcagtatttaaaccactaaccagaaacattactttggatgcatctctaataccatgtttgagcacctctgctctaggttgagaatgacattttattgtgaagatgggtgtggtccctcttcccttgaaatcttgtagtttctttttatattagctcctcactgctacagcctagaaggtgagaagcagattttaaccccatctggcagccattcaaggaaaacccagccctggctgtttactcaggctctcttagaatgagagtggagggtgtaggatatgagggttaggcctttgccacattatacaaaagtttataatttgccacacctggacaagtaactttcttcttttgttcataggcaagacttctttaatggatagtatcatttactgaacctactgggcatggtcctcatggagttttggttcaactggaatctctgtgccaacccaggatacaaacttccatccagatgcatggatacaaatttccatagctccggggctgctctaacagtttgatatcagcagacgtgtttaagccttcaacttgatttccaattattccatcatttctattctgaaatgactcactgtcgtagaaggaagtttattatataaccaaggtttcaggtatcctcctgtcaccacctctactattcaggaggcctaaaattgaaataagtactaaacagaaaccttaccatctgaagtcccttccattgttttctagttgcttcctcattcctttacccccaaactttctaagggctccccgactgcagtgcaaggtggccttgggcacagttttgcaaccaacctactcccctggaaagatggcttccttctccaattagcctgaatgagctttagtaagcaattgagagaactgtgtttttccgacaaacggtcacatgtccatcgttatggcatgtgcagaaaaacagagttatccacacaagtcaggagcaaaacccaagtagatgcctctaggggcacatggcccctcacatcacaagccagaacctaagctaagcattttttaaattgagtttgagactagcctgggcaacatggtgagaccccatctctatttaaaaaatgaacaaaattacctgggcatagtggtgtatgcctgtagtccctgctacttgggaggctcaggtgggaggatcacttgagccccaaagatggtggctgcagtaagccaagatcacaccactggcactccagcctgggcaacagagtgagaccctgtctcaaacaaacaacaacagtaacaacaaaaaaatatatagcgacttgaataggaaaccatagtatttcattgttttaatttgcatttattttatttctagtgaaacttttatatacgtatcggtcatttctatttccttttttgagaactgccaaatgttgccctagtagccaaaaatatcaggttgctattctgccttttcagtttgatctgaaagaaataaaggcatttaagcaatggaaaaaaaaaaaaaaaaaaaaaaaaa

SEQ ID NO: 29322 - DNA, 1516 bp, Homo Sapiens
tgccccaccaccgctgctcctcagcaggcgcctcaccagcctccacaccccttgcgcccgcagaaacgcgcctggccctgagctgtcaccaccgacactctccaggctccggacacgatgcaggccatcaagtgtgtggtggtgggagatggggccgtgggcaagacctgccttctcatcagctacaccaccaacgcctttcccggagagtacatccccaccgtgtttgacaactattcagccaatgtgatggtggacagcaagccagtgaacctggggctgtgggacactgctgggcaggaggactacgaccgtctccggccgctctcctatccacagacggacgtcttcctcatctgcttctccctcgtcagcccagcctcttatgagaacgtccgcgccaagtggttcccagaagtgcggcaccactgccccagcacacccatcatcctggtgggcaccaagctggacctgcgggacgacaaggacaccatcgagaaactgaaggagaagaagctggctcccatcacctacccgcagggcctggcactggccaaggagattgactcggtgaaatacctggagtgctcagctctcacccagagaggcctgaaaaccgtgttcgacgaggccatccgggccgtgctgtgccctcagcccacgcggcagcagaagcgcgcctgcagcctcctctaggggttgcaccccagcgctcccacctagatgggtctgatcctccaggatccccacccaaagcctgatggcaccccggctggccatgctgtcccctccctgtggcgtttcttagcagatggctgcagagcttcgttgatggtcttttctgtactggaggcctcctgaggccaggaacgtgcaaatttgcaggtgctgcatcccaagcccctcatgctcctgccttcctgagggccagaggggagccccaggacccattaagccacccccgtgttcctgccgtcagtgccaactgccgcatgtggaagcatctacccgttcactccagtcccaccccacgcctgactcccctctggaaactgcaggccagatggttgctgccacaacttgtgtaccttcagggatggggctcttactccctcctgaggccagctgctctaatatcgatggtcctgcttgccagagagttcctctacccagcaaaaatgagtgtctcagaagtgtgctcctctggcctcagttctcctcttttggaacaacataaaacaaatttaattttctacgcctctggggatatctgctcagccaatggaaaatctgggttcaaccagcccctgccatttcttaagactttctgctgcactcacaggatcctgagctgcacttacctgtgagagtcttcaaacttttaaaccttgccagtcaggacttttgctattgcaaatagaaaacccaactcaacctgcttaagcagaaaataaatttattgattcaaaaaaaaaaaaaaaaaaaaaaaaaaaaaaaaaaaaaaaaaaaaaaaaaa

SEQ ID NO: 29323 - DNA, 1875 bp, Homo Sapiens
gttttccgcggggaaactgtgtaaagggtggggaaacttgaaagttggatgctgcagacccggcatgggtagcaagaaactaaaacgagtgggtttatcacaagagctgtgtgaccgtctgagtagacatcagatccttacctgtcaggactttttatgtctttccccactggagcttatgaaggtgactggtctgagttatcgaggtgtccatgaacttctatgtatggtcagcagggcctgtgccccaaagatgcaaacggcttatgggataaaagcacaaaggtctgctgatttctcaccagcattcttatctactaccctttctgctttggacgaagccctgcatggtggtgtggcttgtggatccctcacagagattacaggtccaccaggttgtggaaaaactcagttttgtataatgatgagcattttggctacattacccaccaacatgggaggattagaaggagctgtggtgtacattgacacagagtctgcatttagtgctgaaagactggttgaaatagcagaatcccgttttcccagatattttaacactgaagaaaagttacttttgacaagtagtaaagttcatctttatcgggaactcacctgtgatgaagttctacaaaggattgaatctttggaagaagaaattatctcaaaaggaattaaacttgtgattcttgactctgttgcttctgtggtcagaaaggagtttgatgcacaacttcaaggcaatctcaaagaaagaaacaagttcttggcaagagaggcatcctccttgaagtatttggctgaggagttttcaatcccagttatcttgacgaatcagattacaacccatctgagtggagccctggcttctcaggcagacctggtgtctccagctgatgatttgtccctgtctgaaggcacttctggatccagctgtgtgatagccgcactaggaaatacctggagtcacagtgtgaatacccggctgatcctccagtaccttgattcagagagaagacagattcttattgccaagtcccctctggctcccttcacctcatttgtctacaccatcaaggaggaaggcctggttcttcaagcctatggaaattcctagagacagataaatgtgcaaacctgttcatcttgccaagaaaaatccgcttttctgccacagaaacaaaatattgggaaagagtcttgtggtgaaacacccatcgttctctgctaaaacatttggttgctactgtgtagactcagcttaagtcatggaattctagaggatgtatctcacaagtaggatcaagaacaagcccaacagtaatctgcatcataagctgatttgataccatggcactgacaatgggcactgatttgataccatggcactgacaatgggcacacagggaacaggaaatgggaatgagagcaagggttgggttgtgttcgtggaacacataggttttttttttttaactttctctttctaaaatatttcattttgatggaggtgaaatttatataagatgaaattaaccattttaaagtaaacaattccgtggcaactagatatcatgatgtgcaaccagcatctctgtctagttccaaatattttcatcaccccaaaagcaagacccataaccattatgcaagtgttcctatttccccctcctcccagctcctggaaacccaccaatctactttgttgctatggctttacctattctggatatttcatataaatggaatcatatagtgtctgtcttctttcactagtatgttttcaagtctcctccatggtgtagcgtgcatcagtacttcattctttttatggctgaataatattgcattgtcaggaaaaaaaaaaaaaaaaaa

SEQ ID NO: 29324 - DNA, 6237 bp, Homo Sapiens
gagagagcgcgatgggccgcggcggtgggcgcacgttccgcggggactcatgccacgcgcgtcccggcccgacgcgcaattagcagccacctccgcagcccgccgccaccgcctccctgccctcccgggctgccgcagctaggagctccagccgtcgcctcgcgcaggctgcgggcattgtcctctcggttcgccgcccgggctgctgctgccgccgcggactgctgcggggcccggacccgcaccccagggatacgctgccgccgccgccggccggcccggcgcccggcctccgttcggtggtttccgccctgcgttctctgggttgctctctcctgggtttttcctgcgtagctgaggaaggggaagagaagtccagccgccaagcccagccttccccggcgcgcagccccgacggggccgcggcaggcgcggcgagagcgctgacggagccatgagagagtacaaagtggtggtgctgggctcgggcggcgtgggcaagtccgcgctcaccgtgcagttcgtgacgggctccttcatcgagaagtacgacccgaccatcgaagacttttaccgcaaggagattgaggtggactcgtcgccgtcggtgctggagatcctggatacggcgggcaccgagcagttcgcgtccatgcgggacctgtacatcaagaacggccagggcttcatcctggtctacagcctcgtcaaccagcagagcttccaggacatcaagcccatgcgggaccagatcatccgcgtgaagcggtacgagcgcgtgcccatgatcctggtgggcaacaaggtggacctggagggtgagcgcgaggtctcgtacggggagggcaaggccctggctgaggagtggagctgccccttcatggagacgtcggccaaaaacaaagcctcggtagacgagctatttgccgagatcgtgcggcagatgaactacgcggcgcagcccaacggcgatgagggctgctgctcggcctgcgtgatcctctgaggcggccaccgcgcgccggccgcgctctgcgcacaaaagccaaacgcatccgactctctaaatgtgatttatttcttgctttgagattggagaccactttgcattggccagggtgtcttgggagcccggctggcctccgcggccggcgtcccctgcctccaccctgtgcccgagggggtgtccggtcctgcccatccgatactctggtggaaatgtggctctttgcagcatgtacgtttctccctgattttggttgatgcatatttccccgtttaagtagccgttagggcgcagtatcggcagcttgacacccaccaagcaaaagtttcagcctggaaaaaaaatgggggggaagggtggatgaaaaggagggagagaaggtggaaatggtttttttttttttttttctattttctttctttttttttttttttttttttggtcaacagccgtttttctagttccaagttttaaatacatggaaggaagtccgggagaaccatatgaaggagcaggaggagaggaagaaactttttttccttcttttccaggagtagctggaaattaagatcgggttccttttctgccagcttggaagggcaaccccatgactgattgcgattctgaggatgtctatgcaaagttggattcttgttacagtgtatccaatctgaagtattgcacatctgaactgggactgttaacactgatgccaatacagtgtggggtgccagaaagtgtctgctgatatttgtggaaaaaaaatctattttgtttacctactgtatcaaaggggagtctgggggagaatggtagtattttttttttttatcagctgtgaaaaaaatgttacagatctgcacattttcgtgtgtactatggtgtgtgtgtgtatgtgtgtggtgtgtgtgtgttttaagtttagccttttgtttttgttttttggttggcagtaaccgattttaatgactagcttttaaaaatacagtacaaagactttgtaaatgtgattcagggcccccagcacccctgtgtctgcagagtgccttcaaaactcagctgttccagccggtgccaacctgtgaacttcccaccatatcccagaatctgctattccccaaaccacttcccagtttcctttcagtaatctttctgaaggagccaggacaatagggcctgttgtttagtgaatttctttattattttcagcctttaaaatgtaatttccatctcttgcaatgaatttgtttcccttttttttgcttcattttgtttaaattttcaggtatttagctcccctttcatattatttttaaattttttaattacctgttgtagggtgttcctccagaagcaaagagcaaaattttactgttgtgatgtaccaattctaactaattgtaatttttaatttcatgcgtttaatcattgtctcttcattttaagacttttaatacaaatgtcatttttaaagaaacaaacccaaaactattgtttgtgtttctgtgtttcatattcagtgatttaatacagtatcatggctgaggtggatggggcaggtgcatgatactcttcagagctatttgtgaaattttaaagacagaagtgtctcagtgacaagttggatgacactactcccaactttttaaatttggagaaaaccatcaaggtcgaggaagccctgggtatggccattaccatctgattagaagatgaacaggtattttgaatctgatctgacatggaacagtttacctcattgtaggtagggaacaagagaacccatctattaaaattgccttagatctgggaaagtaaccatccttctggcaaagtaggatggcacttttaagtttttcttccttttttccctctgtttatattgcacatcaagtcaaaaacatgtttgggaaagatggttttcaattctgaagttatacctagtgatgttttttgcagtacatttgaatggattgtagacactgcctcaacccttttgaggttttgatttggaaatagatttaaaagaaaacaggctaagataatatccttgttctcatttacaccctgcagtttggaccacatttgacctcataagtttttccttttaacagtaggaggcagtgtgagctttttattttttatttttcttaaggtggtcttagtaatataacatgttcatacatatcaagagagtacttggtataccttaggtctatgaagtgtagctgaaatctgaagagtcttgacaaagggatttacacccttgacaaaaccaaaagaaattaacaggccacaggtttctttaaagctgtgttaacatatcttgccttaaaatgtgtgtgtgtgtttttgctttgcttttttttttttgcccaagaggcatctcagtactccagcaatggaggaagaatagagaattttgcctggcaatggtcctactgccattttttttttcccactctgatctcacttaagtttgatatcaaacacaattgggaggcaatagtatcaatatcctaaatgtagaaattaaaagatactgtataattttatgcctttgcaaagattcgttcttgtatttgaataaattcagttgctaaagtagatccaaagtgttaaaaatgctgaagtcatgtcaagtactgtctggagggtttttttaagaaaaggcatttggcatttaactgtctcttgttttatttttaagtttttggaaaccttttgacataaaatgctgccaagtatctaagaaatgtatatactgacagaagatatttgaaagtggaaaattggaaatgaaatatgttgctgggtgcgttaatcacctccgcccaggatttagtcacttgcaggacctctttatagtctaggatggcagagcagaagattttaatatgcttttattaagtgatgtaaaataaatgctttttggattatcaatgaaagcaattttatgtgtgcctgaagcaagaaaatagcgtttttggttttatctcatattttcttggcaaaattgagagaaattaggaacactgctatttttttcttaaaaatgtttttaagaatatgttcgtttctttgactattaagaaccccttgtggtattagtgtgtgaagagataagggcatttgtttcaatgaaaaagttagtgttaaaggaagtgagtcagggagggcggagtttgttgtaaggcaatcacctgtcaaaacagaaattgggtgggaaaggagtctttatcttggggagcaaaagctgacttttaaacttgacccctgctgtttttaaacagcttttccttttggtctctgacagtcaatccaggttttatgttatttcaaaagggttatttttgtcctccttttttaatagcttcaggaaagttaaaggtatcatcttaggtctaacactctagtctttgagagttacggttctttcgtagaacaatttccatgttgttaactgttgtagacttaattgaatcacattttgggaccagatgtatttggggatagaattctttaaatgtatgggacttcatgcttcctgattatgtaatatttcctgtggttgggaatcctagaatgcctgatctattttatctgttcaggtagttttgttattgtaccctcttttgggtcatattctagtatttctcacagggggtatgagaaacagaaagctatatgtagcagctggtcttgagaagtagaagcatcttaactgtcataagagcatagattttttgtttttcacaacagctggaataagttcctgcattataagtataaagggaaccgagatttaatttggagatcatcactgttaaaacgataccagacatttgtcacagtgtcttatttggggaaagtttgctaatatacattttgtctgtgaaaatatagtaaattttaaaatactaatataatgtggtattcttgattacagtattttatgcagactattaggaatgattcagtgcatttaactgaacacagagctagttctaggtgagtgagatctttatctattaactggattttgaaggtttgagaaggctatggggatcatctggttgaaaggttctcaaacttgaccatatatcaaaatcacctggagcttaaaacatgtactgctgggaccctcctccagtttcttacccagtgggtctcgggtagggtctcaattttcatttctaacaagtttccaagtgattgtgttattgctgttccagggaccacactttgaaaaccagtgatctagactgaactccaaatgagtactatactgacagccacctagatattgagagacacagacttcagactcatgtcacacattttggagtgctgtctactacagttagagaataatctctattgaaatctaagctaaagaggacatataccatttatactaagactaactgttgtgtgtgaaatagaataaacattgcaggtagtttttgatcattttcacattattacaggaacattttgactatggttttcaatgttaattcagaagttgactttaaatgaaaatgtggttagaatagaggcaaagcctaagtgatcagaatcaacattccccttctccccaacctaggggaaaaaaaatttgaaaagtatgtcttcaataaaaggggacactttatttgtcttctcttcaacattaaaaaacaaagattttaagttttcatggcaagggttctaaaaatcattgtgccagagaatttaaatcttcatatcatggtaagcacatgcgtatgtctgtgactcagtttcttagccagacttccaggtgttagttaattccttctcatttagttctactgtaatccattctgggaaaatgcataccacaaaactgtgtatcttgcagcttctttcgttatgcatcttaattccctcagaaggtcccagaactttatgttaaagatctgggtttttaaagacaatttgggggccttctaaagaaacaatagtagatctaattacaagtagtggattgcttacttcaaatttctcttttacaatttagaaagtttagtaccagtttatagactgagggagtagtagctactatttagatgctgagaataatattatcatgcttgggtggggaagaaaggcccttactcaaatctccattttcatttttaatgcttcctggacttcagttattttcttgcttttgcctcaagaataataaatatttttggttaaaa

SEQ ID NO: 29325 - DNA, 4834 bp, Homo Sapiens
cgaggtcagaggggaggaggactctggagctgacagcgcgcacttcacccgcagttgttctagcgactgcgaagatagctcgctgagctggaaccccacagatcaccaacaaaaatgaaggcggcagatgagcctgcctacctgacagtgggaaccgatgtcagtgccaagtaccgaggtgccttctgtgaggcaaagattaagactgtgaaaaggctggtgaaagttaaggtactcctgaaacaggataataccacacaattggtacaagatgaccaagtaaagggtcctttaagagttggagctattgttgaaacaaggacatctgatggatcttttcaggaagctattatcagcaagttgacagatgctagttggtataccgtggtgtttgatgatggtgatgagcgaacattgagacgtacctcactttgtctgaaaggagagagacattttgcagagagtgagacacttgaccagcttccattaacaaatccagagcattttggaactccagtaattgcaaagaagacgaacagaggaaggagatcttctcttcctgttactgaagatgaaaaggaagaagaaagcagtgaagaggaagatgaagacaagcgccgtctcaatgatgaattactaggaaaagttgtaagtgtggtgtctgcaacggagaggactgaatggtatcctgctttggtaatatctcccagctgtaatgatgacatcacagtgaaaaaggatcagtgtttagttcgatcatttattgattctaaattttactctatagcaagaaaggacattaaggaagtagacattctcaatctaccggaatctgagctctccactaaaccagggcttcagaaagcaagcatcttcttaaaaactagagttgttcctgataattggaaaatggatataagtgaaatccttgagtcatccagtagtgatgatgaagatggcccagctgaagaaaatgatgaagagaaggaaaaggaggccaaaaagacagaagaagaggtgcctgaggaagaacttgatcctgaagagagggacaacttcctccagcagctttataagtttatggaagacagaggtactccaatcaacaaaccacctgttttgggctataaagatctcaatctcttcaaactcttcagactggtttatcatcagggtggatgtgacaatattgatagtggtgctgtatggaagcaaatttatatggaccttggcattcctattttgaattcagctgcttcctacaatgtaaaaactgcttatagaaagtatctctatggttttgaggagtactgccgttcggcaaatattcagttcagaactgttcatcaccatgaaccaaaagtaaaagaggaaaaaaaagacttagaagaatcaatggaagaggctctcaaattagatcaagaaatgcctttaacagaagtgaagagtgaacctgaggaaaatatcgattcaaacagtgaaagtgaaagagaagagatagaattaaaatctccgaggggacgaaggagaattgctcgagatgtaaattctattaaaaaggaaattgaagaagagaaaacagaagacaaattaaaagataatgatacagaaaataaggatgtagatgatgactatgaaactgcagagaaaaaagaaaatgagctactactggggagaaaaaatacaccaaagcaaaaagagaagaaaattaaaaaacaggaggattctgacaaagactcagatgaagaggaagagaaaagccaagagagggaagaaactgaaagcaaatgtgactctgaaggagaggaagatgaggaagacatggaaccctgcctaacaggaaccaaagtgaaagtaaaatatggacgagggaagactcagaaaatttatgaagccagtattaaaagcactgaaattgatgacggagaagttttatatttggtacattactatggatggaatgtcaggtatgatgagtgggtgaaggctgacaggataatctggcctttggacaaaggtggaccaaagaaaaaacagaagaaaaaagctaaaaataaagaagatagtgaagtggacgaaaagagagatgaggagaggcagaagtcaaaacggggacgacctcctttaaaatcaaccctctcatcaaacatgccgtatggcttatctaagacagcaaacagtgaaggaaaatcagactcttgttcatctgatagtgaaacagaagatgctttagaaaagaatttaataaatgaagaactttctcttaaagatgaactagaaaaaaatgaaaatttgaatgatgataagctagatgaagaaaatccaaagatttctgcacatatattaaaagaaaatgataggactcaaatgcagcctttagaaaccctgaagttagaagttggagagaatgaacaaatagtacagatttttgggaacaaaatggaaaaaacagaagaagttaagaaagaagccgaaaaatctccaaaaggaaagggaagacgaagcaagacaaaagatctttctttagaaattataaagatttcatcatttggccagaatgaagcaggaagtgaacctcatatagaagctcatagtcttgaattgtcttcattagacaataaaaacttttcttctgctacagaagatgaaattgaccaatgtgtgaaagaaaagaagttgaaacggaaaatactaggacaatcatcgccagagaaaaaaataagaattgagaatggaatggaaatgacaaatactgtatctcaagaaaggaccagtgattgtattggatctgagggaatgaaaaacttaaattttgaacagcactttgaaagagaaaatgaaggaatgccatcattgatagcagagtcaaaccaatgcatccaacaactgactagtgaaagatttgatagtccagctgaagaaactgtaaatattccactaaaagaagatgaggatgcaatgcctctgatcgggcctgaaaccttggtttgccatgaagtagatttggatgatttggatgaaaaggataagaccagcattgaggatgtagcagttgaaagctctgagtctaactctcttgtttctattccacctgccctacctcctgtagtccaacataacttttcagtagcttcaccacttactcttagtcaagatgagtctcgaagcgtaaaaagtgagagtgatataacgattgaagttgatagtattgctgaagaatctcaagaaggtctctgtgagagggaatcggcaaatggatttgaaactaatgttgcctctggtacctgtagtataattgtacaagagagagagagcagagagaagggtcagaagaggccaagtgatggaaatagtggattaatggcaaaaaagcaaaagcgtaccccaaagcgaacaagtgctgcagccaaaaatgaaaagaatggaacaggacaaagcagtgatagtgaagatcttcctgtcctagacaattcaagtaaatgtaccccagtaaagcatcttaatgtatctaagccacagaaacttgcacgatctcctgcaagaatatccccgcacatcaaagatggagagaaagataaacacagagaaaaacatccgaattcatcccctaggacatataaatggagctttcagctcaatgaattagataatatgaacagtacagagagaatctcatttctccaagaaaaactacaggaaatcagaaaatattatatgtctttgaagtctgaagttgcaaccatagacaggaggagaaaaagattaaaaaagaaagacagggaagtgtctcatgcgggagcctccatgtcatctgcttcatcagacactggaatgagtccctcatcatcgtctcccccacaaaatgtacttgctgtagaatgtaggtgataaacattttctctaccttcccagcagtttgctgccatggacataaatccccaaaccctgaattacaaccacagaaagcactcaactggtttgacattgctaagtatatcctgtatacttttccaggctggattgtatctatgcccctctctcttcttttttcttgttgcaaaaaataagctgattaataagtgaaggttaagcagcctgccatatttgtcataatttttcctctttacttttgtttttcgtttgttgtgatatagaacaaagggcacttagcaaatttgaatttgtataataaagctttcaggtgttacagaaatcgtagacaagcaagtgcacatgataaacaatcaaaatattacccagctgaatagttactgctgcactttcactaagatgtatttgaacacttggtgagtagggggtttatgttgtgttttttttcattatcgttttttttatttttgtgaagcacttgctatttagaactgccaaagtatatgttcagcagtgtgcccaggattgaaggtgtaaatgggacaaaataaattgtgaaaggaagtgtagttgactgaaaactacagttgtaataagtcttccactttttataggatttttgagcacacaattatgcaaatattttaatgtttattaatgtttacagtggaattgtgaataagttttcagtggactatcttatcccttgacaaaaatattttgtcttttttctatgtaatttcagagtttttattttgttacaaaaagacaaaaatgaaatatataacaacaatgaagttatttaacaagatttctaaagctgaaatttttgtgtaaaataaggtattatcttgcaacttgttaaatatatttattcagacattggatgttgtatttttatgtattttttaaaatattaataaaatttaaaaaaaaaaaaaaa

SEQ ID NO: 29326 - DNA, 2380 bp, Homo Sapiens
ggaaaacttgtctctgcgttgtggggaggacgcgcgctcgcgcgggattttcaagcgtaggcccccgggaactcgagctgccatgagcctctgggtggacaagtatcggccctgctccttgggacggctggactatcacaaggagcaggcggcccagctgcggaacctggtgcagtgtggtgactttcctcatctgttagtgtacggaccatcaggtgctggaaaaaagacaagaattatgtgtattctacgtgaactttatggtgttggagtggaaaaattgagaattgaacatcagaccatcacaactccatctaaaaaaaaaattgaaattagcaccattgcaagtaactaccaccttgaagttaatcctagtgatgctggaaatagtgaccgagtagtcattcaggagatgttgaaaacagtggcacaatcacaacaacttgaaacaaactctcaaagggattttaaagtggtattattgacagaagttgacaaactcaccaaagatgctcagcatgccttgcgaagaaccatggaaaaatatatgtctacctgcagattgatcttgtgctgcaattctacatctaaagtgatcccacctattcgtagtaggtgcttggcggttcgtgtgcctgctcccagcattgaagatatttgccacgtgttatctactgtgtgtaagaaggaaggtctgaatcttccttcacaactggctcatagacttgcagagaagtcttgtagaaatctcagaaaagccctgcttatgtgtgaagcctgcagagtgcaacaatatccttttactgcagatcaagaaatccctgagacagattgggaggtgtatctgagggagactgcaaatgctattgtcagtcagcaaactccacaaaggctccttgaagttcgtggaaggctgtatgagcttctaactcattgtattcctcctgagataataatgaagggccttctctcagaactgttacataattgtgatggacaactgaaaggggaggtggcacaaatggcagcttactatgagcatcgtctacagctgggtagcaaagccatttatcacttggaagcgtttgtggccaaattcatggcactttataagaagttcatggaggatggattggaaggcatgatgttctgacttctgtcagttattcttgcaaagatttctcagtatcagtatttacatacagcttatattaaaagagctgtgggtaaattaactgaacttaatcatgtcgtatttgcgtttttttggtaataacttctctgtgaactattaatcatcctctgagttaaataattgctcctatactattgaagtatgtagttttgtacataacttagagactttagagtctaagaaaatgatcttaatttactttaagcattggttattcaagtattcattgttgatcctcctattctcttccgtctaatctctcacctgctaaaggagatttacacattagaaagcaaagattattttcatttatccagatgaccattttctgccacaggtaacatgattgtttgacacaccattatatttaattctagtttctctcaatgaataattgtatttttgtaggaaatgtaagatttcattctgaaacataattattggtatggacaaaattgcagataccatttctgttgaggctgcagatttccaacttttatttcagtggttcagattagtattaggtcggtactaagaaataagcatgttttcactaatttaagtacttgagactcttgaagaaaattcagaatgaagttctggagaaaggtatgttactgtagtaattactctttgaacaggttttgtgttttgtcattagctctgccctttttaattaaatattttggttcatggaccaaagggtttacttgacaaatttgtgtgacagactccgaacaattcctttactacgaagtataatttataaaataaaatatacccattttaagggtacagtttgatttttgaccagtgaaactatgatcccaatcaaggtatagatgccgtcaccccaaaaagttccctccatatccctttgcagtcagttcatccctaccctggcccagatgatcactgatcttgtcattatagatgagttttgccagttcaagaatttaatggaatcagatattgtaagcattcttgtgtaatacttcattctctctcattattgagattcatccatattgttgaatgtttcactagttaatgtttattgttcaatatttttgtatatacttttaaagcctattcacttgctgatggatctttggtttgtttccaggtttggttattatgaataaagttgctgtgaatacttacgtgtaaaaaaaaaaaaaaaaa

SEQ ID NO: 29327 - DNA, 1741 bp, Homo Sapiens
cttcgtaaagatggccgcggaggcttttggagccaactgggagcgcagtacgcgttttctggagcatgggcagaggagacaggaacaagcgtagcatccgtgagcaccgattggctgaagcgagcaccccgggagctgactggctccgccattcgcgggaaggcgtttgtggtgccagagaaaagtagccagagcggcgcagtggcggccgcgttctgtggttttccgctattcccccagacccgcaccttctcggcctctttgcggagaatcgtgaccaagatgtggaacagtggattcgaaagctatggcagctcctcatacgggggagccggcggctacacgcagtccccggggggctttggatcgcccgcaccttctcaagccgaaaagaaatcaagagcccgagcccagcacattgtgccctgtactatatctcagctgctttctgccactttggttgatgaagtgttcagaattgggaatgttgagatttcacaggtcactattgtggggatcatcagacatgcagagaaggctccaaccaacattgtttacaaaatagatgacatgacagctgcacccatggacgttcgccagtgggttgacacagatgacaccagcagtgaaaacactgtggttcctccagaaacatatgtgaaagtggcaggccacctgagatcttttcagaacaaaaagagcctggtagcctttaagatcatgcccctggaggatatgaatgagttcaccacacatattctggaagtgatcaatgcacacatggtactaagcaaagccaacagccagccctcagcagggagagcacctatcagcaatccaggaatgagtgaagcagggaactttggtgggaatagcttcatgccagcaaatggcctcactgtggcccaaaaccaggtgttgaatttgattaaggcttgtccaagacctgaagggttgaactttcaggatctcaagaaccagctgaaacacatgtctgtatcctcaatcaagcaagctgtggattttctgagcaatgaggggcacatctattctactgtggatgatgaccattttaaatccacagatgcagaataactggatctaactgggtacctgagatattttacagctggacctagtttcacaatctgttgtctccagctctgcatatgtctggccagggggcttctaggaagtaggtttcatctatcaaatgtctcctctgacttccttttgaaacttactgctcttctgttttattttgttttgtttgaagctcagagggagatgggcaattgacagggatgcaatccagggtgggatttcttgaggaagttacaaataagcttgttacaacatcaagatagatggaattggaaggatgctaccaggagagtacttacatagtgctcaggagtttctcttcttaaaatgtttactgctgaaagatgagcaggaccagggcgttataggcagagccctagccgagaaacctgctggcctctgcctgttttcatttcccactttggttgtgtggcattactttcagaattgcactttcctgcttgtcatgactttttgacacacttgccatgacgtgtgtttctgtgaacatgaagttctgcggtagtgcctccaggggcagaggaaaagaagaagtgttactgcgttttgtacaaaataaatacagtcatatgtttaataaaacagttctattgtaaaaaaaaaaaaaaaaaaaaaa

SEQ ID NO: 29328 - DNA, 7552 bp, Homo Sapiens
ttcagacacctgagagcatcctgttctgggtacagtgtgtgtatgtatatgtttgtttgaagccgctggtcctcgccttttactccttagctggacagcgggttcgggatctgccccatgactaaggctgaagtggaaagttgcgaagatagaacaagagttgttccttagggtggtgtccctaaacttgaaagtggacttggtcctgctcgcaggttgctccgactgtgtgttccaggagtggtggctctgaggtgtgaccctgcccacgtttgggcccagccaggttcagccccccaataaggagggcagcttgataacacaaagaaaacagtgtcaacgagtactaccaagagaagaagacaagaggtcaacacagactcattttctactccgtgtgaatgatagctacagcaggggaaagtttcatagtctatcagtgggtcagaaaatggagttttatagcagaggcttcttagaagcttaaacccctgtcccaatgacgtcaagttcgcccgctggcttggaaggttcagacctatcttccatcaacaccatgatgtcggcggtcatgagtgtagggaaggtcacagagaatggcgggagcccccaggggatcaagtccccctcgaagcctccaggaccaaatcggattggcagaaggaaccaggaaacgaaagaggagaagtcttcctataactgccccctgtgtgagaagatttgcactacccagcaccagctgaccatgcacattcgccagcacaacacagacactggaggagccgaccactcatgcagcatctgcggaaagtcactgagctcggccagctccctcgatcgccacatgctggtgcactctggcgagaggccttacaagtgcactgtgtgtggccagtcatttaccaccaatgggaacatgcacagacatatgaagatccatgagaaggaccctaacagtgccacagccacagcccctccatctcctctgaaacgtaggcgattgtcctccaagaggaaactgagtcacgatgccgagtcagagagagaagacccagcaccagctaaaaagatggtagaagacgggcagtcaggtgacttggagaagaaagctgatgaagtctttcactgcccagtatgtttcaaggagtttgtttgcaagtatggactggagacccacatggagacccattcagataacccactaagatgtgacatttgttgtgtcacctttcgaacacatcgaggactgctgcgtcacaacgcgcttgtccacaaacaacttcccagggatgcaatgggcagacctttcatacagaacaacccttcaattcctgctggcttccacgacttaggattcacggacttctcctgtaggaagtttcctcgcatttctcaggcctggtgcgaaacaaacctgcggaggtgcatcagcgagcaacaccgttttgtctgcgacacctgtgacaaggcgttccccatgctctgctcactggctctgcacaagcagacccatgtggcggcagaccagggtcaagaaaagccgcaggccacgcccctgcctggtgacgccctggaccagaagggcttcctggccttgcttggcctgcagcacaccaaagacgtcaggcctgcccccgccgaggagcccctgccggatgacaaccaggcaattcagctccagacactcaagtgtcagctacctcaggaccccggctgcaccaacctgctgagcctgtcacctttcgaagctgcttccctaggcggttctctcacagttctccccgcgaccaaggacagcataaagcacctgtccctgcagcccttccagaagggcttcatcatccagcctgacagcagcattgtggtcaagcccatctctggcgagtcggccatcgagctggcagacatccagcaaattctgaagatggcagcctcggctccccctcagatcagtcttccgcccttctccaaggcccctgccgccccactgcaggcgatcttcaagcacatgccccctctgaagccaaagcccctggtcacaccacggacggtggtggccacctccacgcccccgcctctcatcaacgcccagcaggcttccccgggctgtatcagccccagcctgccgccaccgcccctgaagctcctcaaaggctcagtggaggcggcctccaacgcccacctgctgcagtccaagtccgggacccagccccacgcggccacgcggctctccctgcagcagccgcgggcggagctgccgggccagcctgagatgaagacgcagctggagcaggacagcatcatcgaggccctgctgccgctgagcatggaggccaagatcaagcaggagatcacagagggggaactcaaggccttcatgacagcgcccggcggcaagaagacgcccgccatgcgcaaggtgctctacccctgccgcttctgcaaccaggtgtttgccttctcgggggtcttgcgtgcccacgtgcgctcccacctgggcatctcgccataccagtgcaacatctgcgactacatcgccgccgacaaggccgcgctcatccgccacctgcgcacgcacagtggggagcggccctacatttgcaagatctgccactaccccttcactgtcaaagccaactgcgagcggcacctgcgcaagaagcacctcaaggccacccgcaaggatatcgagaagaacatcgagtatgtgagtagcagcgcggccgagctggtggacgccttctgcgccccggacaccgtgtgccggctgtgcggcgaggacctcaagcactatcgtgccctgcgcatccacatgcgcacgcactgcggccgcggcctgggcgggggccacaagggccgcaagcccttcgagtgcaaggagtgcagcgccgcgttcgcggccaagcgcaactgcatccaccacatcctcaagcagcacctgcacgtgcccgagcaggacatcgagagctacgtgctggccgccgacggcctgggccccgcagaggcgccggccgctgaggcgtcggggcgcggggaggacagtggctgcgctgcccttggtgactgcaagcccctcactgccttcctggaaccccagaacggctttcttcacaggggccccacccagcctccacctccccatgtctcgatcaagttggagcccgccagtagctttgcggtggacttcaatgagcccctggacttctcgcagaagggcctggccctggtccaagtgaagcaggaaaacatctcctttctgagcccttcttccctggtcccctatgactgctccatggagcccatcgacctgtccatccccaagaacttcaggaaaggggacaaggatttggccactcccagcgaagccaagaagcctgaggaggaggcggggagcagcgagcagccctctccctgcccagcacccggcccttctcttcctgtaactttggggcccagcggaatcctggaaagccccatggcccctgctccggcggccaccccggaacccccagcacagcccctgcagggccctgttcagctggcggtcccaatctactcctcagccctggtcagcagccctccactcgtgggcagctcagccctcctgagtggcacagccttgctgcgtccactgcggcccaagcccccgctgcttttgccaaagccccccgtgacagaagagctgcccccgctggcctccattgcccagatcatctcatctgtatcctcggcccccaccctgctgaaaaccaaggtggcggacccagggcccgcaagcactggcagtaacaccacggcttcagacagcttaggaggttctgtccccaaagccgccaccaccgccacccccgctgccaccaccagcccaaaagagtctagtgagcctcccgctccagccagcagcccagaggctgcctctcccaccgagcagggcccagcgggcacgtcgaagaagaggggccggaaaagggggatgaggagccgaccccgcgccaacagcggcggggtggacctggactccagcggggagtttgccagcatcgagaagatgctggccaccacagacaccaacaagttcagtccgtttctgcagacagcggaggacaacactcaggatgaggtggccggagcccctgccgaccaccatgggcccagtgatgaagagcagggcagtcccccagaagacaagctgctgagggccaagcggaactcgtacaccaactgcctgcagaagatcacctgtccccactgtccccgggttttcccttgggccagctccctacagaggcacatgctcacacacactgacagtcagtcggatgcggagactgcagccgccgcgggcgaagtgctagacctcacctcacgggacagagagcagccgtcggagggcgccactgagctccgccaggtcgcaggggatgcgcctgtggagcaggccacggcggaaacggcctcgccggtgcaccgggaagagcacgggcgtggggagagccatgagccggaggaggagcatggcactgaggagagcactggggacgccgacggcggaagaggacgcgtcgagcaaccagagcctggacctggacttcgccaccaagctcatggacttcaagctggcggagggcgacggcgaggcaggcccgggggcgcggcctcgcaggagcagaagctcgcctgcgacacctgtgggaagagcttcaagttcctgggcaccctgagccgccaccggaaggcgcacggccgccaggagcccaaggacgagaagggagatggcgccagcactgcagaggaggggccccagcccgcccctgaacaggaggagaagccccccgagaccccggcagaggtggtggagtcggccccgggtgccggggaggccccggcggaaaagctcgcggaggagacggagggcccctccgacggggagagcgcggccgagaaaaggtcctcagagaagagcgacgatgacaagaaaccaaagacagactcccccaaaagcgtggccagcaaggcagacaagaggaagaaggtctgcagcgtgtgcaacaagcggttctggtcgctgcaggacctgacccggcacatgcgctcccacacaggggaaaggccatacaaatgtcagacctgcgagcgaaccttcaccttgaagcacagcctggttcgccaccagcggatccaccagaaagccaggcatgccaaacaccacgggaaggacagcgacaaggaagagcggggtgaggaggacagcgagaatgagtccacccacagcggcaacaacgccgtctcagagaacgaggctgagctggctcccaatgccagcaaccacatggctgtcacccggagccggaaggagggcttggccagtgccaccaaggactgcagccacagggaggagaaggtcacggcagggtggccgtctgagcctggccagggtgaccttaacccagagagcccggcggccctggggcaggacctgctggagccgcgcagcaagaggcctgcccacccaatcctggccacagctgatggcgcctcccagctcgtggggatggagtgacagcctcagtccccctcagcacagacaaaagccagcagagcaaagcgtctatacttcatggggtttcctcagtgccctttggctgttgaggagtgagagagagagagagagagagagagagagagagagagagacaagcaggagcgtggctgctcgctcagtgccatagccttaccgcagcctgcgcgggaggccacagcccgtgccgattccagtgccttaactacttaccggatccctccatattatcatgggtgttgtatttttccaaaatgacttcttaaacaaaacaaatattataatgaattgtctggagaggacctcttcatttgagcattagcgttattttgtattggtgtgtgtgagcttgttcttgtgaatctgtgatagcaccgtttgttctgtgagctggaaacagaaggaaaaaacatacccttgggtacccatagccaataactggaagaaaatgatgtgaatttcatgtaaatgaccagaggaaagatggataagatgataatttcttaaatagacattttccttttttctttgtgcttcatggtggagctgtcatctggtccttggtattacaggatgtggttgatgaaggtttccaatatggtttcaggccaaaaccagggaagattctagcttcagcctcatgtccatttccagtctgtcagcattagacatggtcactgttcaagtttcaagacatccattcttaactatagagaagagttactcccctggcgtcttaacctatggaaaacatgcacggataggatatatttgattgcctcctcttccctttcagtatatgtattattaatattattattattattattattattagttcatcagtttgctgttctctgcagtgagcagaatcaaatgggcaatatttgtcctgggagacctgtgccgcacccaggtccccgtgttaacgtgtgcctgcggttgtggttggcaccctcgggtggtagctcttctactgtaatgagacaagcctttcttctgtcactgcagaatttagaaggggccgtgagcagtcttcccaagcatggtccaggagcagctcagagagggtggagtgaggatgcatgcatccagggaacaggcatcaagaagccagggccgtgcctggagcactgcagagatgactttggagaaagcaaagcagtgacccagtgaccaggcacattactcgtgagcgaggtattcccagtcttcctgctaagcctaatccaagccttacccagctgtgctactgtcatttgcaaagcaaggaaatactactactggtaataaaactacactagcaagatgtcagataagaaataggtttatatttaccttcctgcgatgtggggttggtgcttgaagataaatgtgctgtttctagtttcttaaatagcccacacccctggatgcaaaaaggcagggttatttttacccatgagcatcctgtgcaggcaatagacttccctcactgtctccgcctgcagggaggagaatgtaccccactgcacctgagctcctggtccctcagccaagacctcaggggtccccagccagcctgctgctggggacccctgtgcttgctgcagtgtatggagcctcttgccttcccctggggaggcacccctgtaccccagcttccttcccctggccttttctggccccagtgctcctcctttacatagacttgttcacacagaaacgtgcacgcccccttttctccgccacttcaccagtttctgaaatccaacctcccagacttcacaggaagatagatattcttgagataatgaaaagtgatatcttcgcatacgaaaggaaaaaaggttgaggtatatatgatttttaactgtattaggggtgtatgaaccagtttaaaaacgaggttttatttactgtagagatgaatgcaaatcagaaccaatgatcccttggcctacttagttaaaaccagttcatacatcccttagg

SEQ ID NO: 29329 - DNA, 5898 bp, Homo Sapiens
gctgctgctgcagtgggacaggtggcggcgaccggcggcgtccgaggagatttaatccagagactgacttcactatagaacccacagttgtatcaatggttggggaaagatagtggcaacaggcaaaggagaaacagctctgacatacaaagaaaatgagtatgctaaagccaagtgggcttaaggcccccaccaagatcctgaagcctggaagcacagctctgaagacacctacggctgttgtagctccagtagaaaaaaccatatccagtgaaaaagcatcaagcactccatcatctgagactcaggaggaatttgtggatgactttcgagttggggagcgagtttgggtgaatggaaataagcctggatttatccagtttcttggagaaacccagtttgcaccaggccagtgggctggaattgttttagatgaacccataggcaagaacgatggttcggtggcaggagttcggtatttccagtgtgaacctttaaagggcatatttacccgaccttcaaagttaacaaggaaggtgcaagcagaagatgaagctaatggcctgcagacaacgcccgcctcccgagctacttcaccgctgtgcacttctacggccagcatggtgtcttcctccccctccaccccttcaaacatccctcagaaaccatcacagccagcagcaaaggaaccttcagctacgcctccgatcagcaaccttacaaaaactgccagtgaatctatctccaacctttcagaggctggctcaatcaagaaaggagaaagagagctcaaaatcggagacagagtattggttggtggcactaaggctggtgtagtccggtttcttggggagaccgactttgccaagggggagtggtgtggcgtggagttagatgagccacttgggaagaatgatggcgctgttgctggaacaaggtattttcagtgtcaacccaaatatggcttgttcgctcctgtccacaaagttaccaagattggcttcccttccactacaccagccaaagccaaggccaacgcagtgaggcgagtgatggcgaccacgtccgccagcctgaagcgcagcccttctgcctcttccctcagctccatgagctcagtggcctcctctgtgagcagcaggcccagtcggacaggactattgactgaaacctcctcccgttacgccaggaagatctccggtaccactgccctccaggaggccctgaaggagaagcagcagcacattgagcagctgctggcggaacgggatctggagagggcggaggtggccaaggccacgagccacgtgggggagatagagcaggagctagctctggcccgggacggacatgaccagcatgtcctggaattggaagccaaaatggaccagctgcgaacaatggtggaagctgctgacagggagaaggtggagcttctcaaccagcttgaagaggagaaaaggaaggttgaggaccttcagttccgggttgaagaagaatcaattaccaaaggtgatcttgagacgcagaccaaactggagcatgcccgcattaaggagcttgaacagagcctgctctttgaaaagaccaaagctgacaaactccagagggagttagaagacactagggtggctacagtttcagaaaagtcacgtataatggaactggagaaagacctagcattgagagtacaggaagtagctgagctccgaagaaggctagagtccaataagcctgctggggatgtggacatgtcactttcccttttgcaagagataagctctttgcaagaaaagttagaagtcacccgtactgaccaccagagagaaataacttctctgaaggagcattttggagcccgggaagaaactcatcagaaggagataaaggctctgtataccgccacggaaaagctttccaaagagaacgagtcattgaaaagcaagctggagcatgccaacaaagagaactcagatgtgatagctctatggaagtccaaactggagactgccatcgcatcccaccagcaggcgatggaagaactgaaggtatctttcagcaaagggcttggaacagagacggcagaatttgctgaactaaaaacacaaatagagaaaatgagactagattaccaacacgaaatagaaaatttgcagaatcaacaagactctgaacgggctgcccatgctaaagagatggaagccttgagggctaaactgatgaaagttattaaagaaaaggaaaacagtctggaagccatcaggtcgaaactggacaaagcagaagaccagcatctcgtagaaatggaagacacgttaaacaaattacaggaagctgaaataaaggtaaaggagctagaggtactgcaagccaaatgcaatgaacaaaccaaggttattgataattttacatcacagctcaaggctactgaagaaaagctcttggatcttgatgcacttcggaaagccagttccgaaggtaaatcggaaatgaagaaacttagacagcagcttgaggcagctgagaaacagattaaacatttagagattgaaaagaatgctgaaagtagcaaggctagtagcattaccagagagctccaggggagagagctaaagcttactaaccttcaggaaaatttgagtgaagtcagtcaagtgaaagagactttggaaaaagaacttcagattttgaaagaaaagtttgctgaagcttcagaggaggcagtctctgttcagagaagtatgcaagaaactgtaaataagttacaccaaaaggaggaacagtttaacatgctgtcttctgacttggagaagctgagagaaaacttagcagatatggaggcaaaatttagagagaaagatgagagagaagagcagctgataaaggcaaaggaaaaactggaaaatgacattgcagaaataatgaagatgtcaggagataactcttctcagctgacaaaaatgaacgatgaattacgtctgaaagaaagagatgtagaagaattacagctaaaacttacaaaggctaatgaaaatgcaagttttctgcaaaaaagtattgaggacatgactgtcaaagctgaacagagccagcaagaagcagctaaaaagcatgaggaagaaaagaaagaattggagaggaaattgtcggacctggaaaagaaaatggaaacaagccacaaccagtgtcaggagctgaaagccaggtatgagagagccacttctgagacaaaaaccaagcatgaagaaatcctacagaacctccagaagacgctgctggacacagaggacaagctgaagggcgcacgggaggagaacagtggcttgctgcaggagctggaggagctgagaaagcaagccgacaaagccaaagctgctcaaacagcggaagatgccatgcagataatggaacagatgaccaaagagaagactgagactctggcctccttggaggacaccaagcaaacaaatgcaaaactacagaatgaattggacacacttaaagaaaacaacttgaaaaatgtggaagagctgaacaaatcaaaagaactcctgactgtagagaatcaaaaaatggaagaatttaggaaagaaatagaaaccctaaagcaggcagcagctcagaagtcccagcagctttcagcgttgcaagaagagaacgttaaacttgctgaggagctggggagaagcagggacgaagtcacaagtcatcaaaagctggaagaagaaagatctgtgctcaataatcagttgttagaaatgaaaaaaagagaatccaagttcataaaagacgcagatgaagagaaagcttccttgcagaaatccatcagtataactagtgccttactcacagaaaaggatgccgagctggagaaactgagaaatgaggtcacagtgctcaggggagaaaacgcctctgccaagtccttgcattcagttgttcagactctagagtctgataaggtgaagctcgagctcaaggtaaagaacttggagcttcaactcaaagaaaacaagaggcagctcagcagctcctcaggtaatacagacactcaggcagacgaggatgaaagagcccaggagagtcagattgatttcctaaattcagtaatagtggaccttcaaaggaagaatcaagacctcaagatgaaggtggagatgatgtcagaagcagccctgaatgggaacggggatgacctaaacaattatgacagtgatgatcaggagaaacagtccaagaagaaacctcgcctcttctgtgacatttgtgactgctttgatctccacgacacagaggattgtcctacccaggcacagatgtcagaggaccctccccattccacacaccatggcagtcggggtgaggaacgcccatactgtgaaatctgtgagatgtttggacactgggccaccaactgcaatgacgacgaaaccttctgatgaagcctccagtggagaactgggcttgctcagacgcactcgcattgacacaacgtaacaccagcattgtgtgtgcagacttcaggagaactcatgttattttttaaccccgtcaacaaatctaggaaaatattttgatcttcaacaaattgccctttagtctccccgtatgagttagaataataaatatttagtaggtgagttttcacctcgaattttgttttcttgatttttacgtttgaagacattgcaccagatgccattacatttattggccccccgaccttgtagaaaaacccctaccctcacaataccttatttaagtaactttaaattatgccgttacttttcatatttgcactaagatatttccaggctgcatttgtatatttagattttttggttaagctttgacactggaatgagttgaaaaaatgtgccattttgcattttcatctactcatttaaagtattttattcttattcaaagaaatatctgagctctttgcactacctgttatcagtagtgcctttacttcaggcttgataatacttaggtgtgattataaaatcatgaagcaggtaaagggaggggcaagcccccaaactgctgtggggacattttataatctatatgctgcacccacttaatctactgtggtgttttgtttattagttttgcataatttcagcttctatatattgtatgtatatattttttaaaaatctatattttgggaaaaaaacatacacaatgtgtctttctttttggacatttacctttttgaaaaagaaaacacttaaaatgatcattaggacataacagactaggccagacatagcatcttgtggctttgcaaccattttcatttgtttgttttccttttatttcttcaccagatttaaataactggaggaattttctccaatttttttttccttctctggcaggtatccccagcagtcaattaacaataagccagtataaaacacctaaataaccaatctacaatctcccttcacaagtttttttactgtttttagatgaatgtacgatgagaaattcaacgttaataattctggattttcttatcacaaaaaagaaaatgaaggacctcaaagcacctgaacagtttatcgaccagtttgaatctatttatcttcatttgaatgtcttctagaatatgtaaaaagtcataaaatgtatcttccatgctacatgtacaataagaacttctataattgtatatatgcctttgatgtattttcccctcaagattatcaactgtgtgttcgacagtgaatattcaatctggtaccagttgaaatttttggttataaatgtaatacgaattgtttcacaaacagaaaacatgtaaagcagtattaaaatttggccaaacaagtgttctgtatctactttaataaatggttattctttaaaaaaaaaaaaaaaaaa

SEQ ID NO: 29330 - DNA, 3031 bp, Homo Sapiens
ccgcacccccggctcggggctgtgagcggctcggggccgggggtgggcggcggtgcggcgggcggccgacgctcctcttcggcggcggcggcggcggcggcccatgcgtggggcggcgcggctggggcggccgggccggagttgcctcccggggcccgcgctgagggccgccgccgcgcccgccctgctgcttgctcgttgcgctgttgccgctgctgccggcctgcgtgccgccgcccgtccgcggcccccggagctgcagtcggcttccgcggggcccagcgtgagtctctacctgagcgaggacgaggtgcgccggctgatcggtcttgatgcagaactttattatgtgagaaatgaccttattagtcactacgctctatcctttaatctgttagtacccagtgagacaaatttcctgcacttcacctggcatgcgaagtccaaggttgaatataagctgggattccaagtggacaatgttttggcaatggatatgccccaggtcaacatttctgttcagggggaagttccacgcactttatcagtgtttcgggtagagctttcctgtactggcaaagtagattctgaagttatgatactaatgcagctcaacttgacagtaaattcttcaaaaaattttaccgtcttaaattttaaacgaaggaaaatgtgctacaaaaaacttgaagaagtaaaaacttcagccttggacaaaaacactagcagaactatttatgatcctgtacatgcagctccaaccacttctacgcgtgtgttttatattagtgtaggggtttgttgtgcagtaatatttctcgtagcaataatattagctgttttgcaccttcataatatgaaaaggattgaactggatgacagcattagtgccagcagtagttcccaagggctgtctcagccatccacccagacgactcagtatctgagagcagacacgcccaacaatgcaactcctatcaccagttatcctaccttgcggatagagaagaacgacttgagaagtgtcactcttttggaggccaaaggcaaggtgaaggatatagcaatatccagagagaggataactctaaaagatgtactccaagaaggtacttttgggcgtattttccatgggattttaatagatgaaaaagatccaaataaagaaaaacaagcatttgtcaaaacagttaaagatcaagcttctgaaattcaggtgacaatgatgctcactgaaagttgtaagctgcgaggtcttcatcacagaaatcttcttcctattactcatgtgtgtatagaagaaggagaaaagcccatggtgatattgccttacatgaattgggggaatcttaaattgtttttacgacagtgcaagttagtagaggccaataatccacaggcaatttctcagcaagacctggtacacatggctattcagattgcctgtggaatgagctacctggccagaagggaagtcatccacaaagacctggctgccaggaactgtgtcattgatgacacacttcaagttaagatcacagacaatgccctctccagagacttgttccccatggactatcactgtctgggggacaatgaaaacaggccagttcgttggatggctcttgaaagtctggttaataacgagttctctagcgctagtgatgtgtgggcctttggagtgacgctgtgggaactcatgactctgggccagactccctacgtggacattgaccccttcgagatggccgcatacctgaaagatggttaccgaatagcccagccaatcaactgtcctgatgaattatttgctgtgatggcctgttgctgggccttagatccagaggagaggcccaagtttcagcagctggtacagtgcctaacagagtttcatgcagccctgggggcctacgtctgactcctctccaatcccacaccatcaggaagaaggtgcctgtcggggctcacttgaagcctgtcagggatgctttgtatctaacacaacgccaacagaagcacatttgtcttccagaacaccgtgccttagaaatgctttagaatctgaactttttaagacagacttaataatgtggcatattttctagatatcacttttattaggttgaactgaaagggtttttgtaaattttttggccaaaattttttaaaacatacttactttggactaggggtacattcttacaaaataaataaacagtttttaaaattgtttagacacagatatttggaattagctatcttagggccaactgctttttatttttttacttcatcaaggtgatgtaagtgactttgtttagacacagatatttggaattagcctatcttagtgccaactgctttttatttttttccttcatcaaggtgatgtaagtgactcacctttaaagtttttttagtgttattttttatcactactctgggaaatggtttgtcttcaagatgcaatacttttcttagataaggaaaaacagcataaaaagatacctggtctgccttgtacaagaaaaccgaatattagaggaagaaaatttaaagaaaagctagagaaaaaaaaaattttttaaaaaatacttattagaagcaaactgcccttgcatggaaaactgtttatttttttcagtgaaaaaggaattctgctttcgtgtttttgggaaagcaggaactgagttcattacatctttaatttggcagaaattagcctttctgtgaaccagatgtggtttggggcagatctgtagtaaacaatggtgattttatttatttttactctctggaaaaggagataatacaattccagaaagtgaactcatatttctaaggtaagatcccttttatgcacctagaatatgctatgcacagagcgggtgcttgagttgttgtcgttttttgtttgttttttaaatgtaaactggtaaattttgtgcttatcttcaaggctggcttaagtataaaattgttttttaaacacttgaaaaattaaaggatttgttttatattaaaaaaaaaa

SEQ ID NO: 29331 - DNA, 6134 bp, Homo Sapiens
gctggctgggaagatggcggcgggaacctgggccgccgccgccgccgccgccgccgccgcggagcgaaccaggggtgtccggggtgcgcggtccagggccggggccgggccatgagcgcgccgtcctcgagtccccgagccgcggagcccgcccgcgcccctcgggccgccccgcgtccctcgccatggcgcggctcgcggactacttcgtgctggtggcgttcgggccgcacccgcgcgggagtggggaaggccagggccagattctgcagcgcttcccagagaaggactgggaggacaacccattcccccagggcatcgagctgttttgccagcccagcgggtggcagctgtgtcccgagaggaatccaccgaccttctttgttgctgtcctcaccgacatcaactccgagcgccactactgcgcctgcttgaccttctgggagccagcggagccttcacaggaaacgacgcgcgtggaggatgccacagagagggaggaagagggggatgagggaggccagacccacctgtctcccacagcacctgccccatctgcccagctgtttgcaccgaagacgctggtactggtgtcgcgactcgaccacacggaggtgttcaggaacagccttggcctcatctatgccatccacgtggagggcctgaatgtgtgcctggagaacgtgattgggaacctgctgacgtgcactgtgcccctggctgggggctcgcagaggacgatctctttgggggctggtgaccggcaggtcatccagactccactggccgactcgctgcccgtcagccgctgcagcgtggccctgctcttccgccagctaggcatcaccaacgtgctgtctttgttctgtgccgccctcacggagcacaaggttctcttcctgtcccggagctaccagcggctcgccgatgcctgtaggggcctcctggcactgctgtttcctctcagatacagcttcacctatgtgcccatcctgccggctcagctgctggaggtcctcagcacacccacgcccttcatcattggggtcaacgcggccttccaggcagagacccaggagctgctcgatgtgattgttgctgatctggatggagggacggtcaccattcctgagtgtgtgcacattccacccttgccagagccactgcagagtcagacgcacagtgtgctgagcatggtcctggacccggagctggagttggctgacctcgccttccctccgcccacgacatccacctcctccctgaagatgcaggacaaggagctgcgcgcggtcttcctgcggctgttcgctcagctgctgcagggctatcgctggtgcctgcacgtcgtgcgcatccacccggagcctgtcatccgcttccataaggcagccttcctgggccagcgtgggctggtagaggacgatttcctgatgaaggtgctggagggcatggcctttgctggctttgtgtcagagcgtggggtcccataccgccctacggacctgttcgatgagctggtggcccacgaggtggcaaggatgcgggcggatgagaaccacccccagcgtgtcctgcgtcacgtccaggaactggcagagcagctctacaagaacgagaacccgtacccagccgtggcgatgcacaaggtacagaggcccggtgagagcagccacctgcgacgggtgccccgacccttcccccggctggatgagggcaccgtgcagtggatcgtggaccaggctgcagccaagatgcagggtgcacccccagctgtgaaggccgagaggaggaccaccgtgccctcagggccccccatgactgccatactggagcggtgcagtgggctgcatgtcaacagcgcccggcggctggaggttgtgcgcaactgcatctcctacgtgtttgaggggaaaatgcttgaggccaagaagctgctcccagccgtgttgagggccctgaaggggcgagctgcccgccgctgcctcgcccaggagctgcacctgcatgtgcagcagaaccgtgcggtcctggaccaccagcagtttgactttgtcgtccgtatgatgaactgctgcctgcaggactgcacttctctggacgagcatggcattgcggcggctctgctgcctctggtcacagccttctgccggaagctgagcccgggggtgacgcagtttgcatacagctgtgtgcaggagcacgtggtgtggagcacgccacagttctgggaggccatgttctatggggatgtgcagactcacatccgggccctctacctggagcccacggaggacctggcccccgcccaggaggttggggaggcaccttcccaggaggacgagcgctctgccctagacgtggcttctgagcagcggcgcttgtggccaactctgagtcgtgagaagcagcaggagctggtgcagaaggaggagagcacggtgttcagccaggccatccactatgccaaccgcatgagctacctcctcctgcccctggacagcagcaagagccgcctacttcgggagcgtgccgggctgggcgacctggagagcgccagcaacagcctggtcaccaacagcatggctggcagtgtggccgagagctatgacacggagagcggcttcgaggatgcagagacctgcgacgtagctggggctgtggtccgcttcatcaaccgctttgtggacaaggtctgcacggagagtggggtcaccagcgaccacctcaaggggctgcatgtcatggtgccagacattgtccagatgcacatcgagaccctggaggccgtgcagcgggagagccggaggctgccgcccatccagaagcccaagctgctgcggccgcgcctgctgccgggtgaggagtgtgtgctggacggcctgcgcgtctacctgctgccggatgggcgtgaggagggcgcggggggcagtgctgggggaccagcattgctcccagctgagggcgccgtcttcctcaccacgtaccgggtcatcttcacggggatgcccacggaccccctggttggggagcaggtggtggtccgctccttcccggtggctgcgctgaccaaggagaagcgcatcagcgtccagacccctgtggaccagctcctgcaggacgggctccagctgcgctcctgcacattccagctgctgaaaatggcctttgacgaggaggtggggtctgacagcgccgagctcttccgtaagcagctgcataagctgcggtacccgccggacatcagggccacctttgcgttcaccttgggctctgcccacacacctggccggccaccgcgagtcaccaaggacaagggtccttccctcagaaccctgtcccggaacctggtcaagaacgccaagaagaccatcgggcggcagcatgtcactcgcaagaagtacaacccccccagctgggagcaccggggccagccgccccctgaggaccaggaggacgagatctcagtgtcggaggagctggagcccagcacgctgaccccgtcctcagccctgaagccctccgaccgcatgaccatgagcagcctggtggaaagggcttgctgtcgcgactaccagcgcctcggtctgggcaccctgagcagcagcctgagccgggccaagtctgagcccttccgcatttctccggtcaaccgcatgtatgccatctgccgcagctacccagggctgctgatcgtgccccagagtgtccaggacaacgccctgcagcgcgtgtcccgctgctaccgccagaaccgcttccccgtggtctgctggcgcagcgggcggtccaaggcggtgctgctgcgctctggaggcctgcatggcaaaggtgtcgtcggcctcttcaaggcccagaacgcaccttctccaggccagtcccaggcggactcgagtagcctggagcaggagaagtacctgcaggctgtggtcagctccatgccccgctacgccgacgcgtcgggacgcaacacgcttagcggcttctcctcagcccacatgggcagtcacggtaagtggggcagtgtccggaccagtggacgcagcagtggccttggcaccgatgtgggctcccggctagctggcagagacgcgctggccccaccccaggccaacgggggccctcccgacccgggcttcctgcgtccgcagcgagcagccctctatatccttggggacaaagcccagctcaagggtgtgcggtcagaccccctgcagcagtgggagctggtgcccattgaggtattcgaggcacggcaggtgaaggctagcttcaagaagctgctgaaagcatgtgtcccaggctgccccgctgctgagcccagcccagcctccttcctgcgctcactggaggactcagagtggctgatccagatccacaagctgctgcaggtgtctgtgctggtggtggagctcctggattcaggctcctccgtgctggtgggcctggaggatggctgggacatcaccacccaggtggtatccttggtgcagctgctctcagaccccttctaccgcacgctggagggctttcgcctgctggtggagaaggagtggctgtccttcggccatcgcttcagccaccgtggagctcacaccctggccgggcagagcagcggcttcacacccgtcttcctgcagttcctggactgcgtacaccaggtccacctgcagttccccatggagtttgagttcagccagttctacctcaagttcctcggctaccaccatgtgtcccgccgtttccggaccttcctgctcgactctgactatgagcgcattgagctggggctgctgtatgaggagaagggggaacgcaggggccaggtgccgtgcaggtctgtgtgggagtatgtggaccggctgagcaagaggacgcctgtgttccacaattacatgtatgcgcccgaggacgcagaggtcctgcggccctacagcaacgtgtccaacctgaaggtgtgggacttctacactgaggagacgctggccgagggccctccctatgactgggaactggcccaggggccccctgaacccccagaggaagaacggtctgatggaggcgctccccagagcaggcgccgcgtggtgtggccctgttacgacagctgcccgcgggcccagcctgacgccatctcacgcctgctggaggagctgcagaggctggagacagagttgggccaacccgctgagcgctggaaggacacctgggaccgggtgaaggctgcacagcgcctcgagggccggccagacggccgtggcacccctagctccctccttgtgtccaccgcaccccaccaccgtcgctcgctgggtgtgtacctgcaggaggggcccgtgggctccaccctgagcctcagcctggacagcgaccagagtagtggctcaaccacatccggctcccgtcaggctgcccgccgcagcaccagcaccctgtacagccagttccagacagcagagagtgagaacaggtcctacgagggcactctgtacaagaagggggccttcatgaagccttggaaggcccgctggttcgtgctggacaagaccaagcaccagctgcgctactacgaccaccgtgtggacacagagtgcaagggtgtcatcgacttggcggaggtggaggctgtggcacctggcacgcccactatgggtgcccctaagactgtggacgagaaggccttctttgacgtgaagacaacgcgtcgcgtttacaacttctgtgcccaggacgtgccctcggcccagcagtgggtggaccggatccagagctgcctgtcggacgcctgagcctcccagccctgcccggctgctctgcttccggtcgttaccgaccactaggggtgggcagggccgccccggccatgtttacagccccggccctcgacagtattgaggccccgagcccccagcacttgtgtgtacagcccccgtccccgccccgccccgcccggccggccctaacttattttggcgtcacagctgagcaccgtgccgggaggtggccaaggtacagcccgcaatgggcctgtaaatagtccggccccgtcagcgtgtgctggtccagccagcggctgcaggcgagtttctagaaccagagtctatataaagagagaactaacgccaaaaaaaaaa

SEQ ID NO: 29332 - DNA, 1237 bp, Homo Sapiens
gctgcagaggattcctgcagaggatcaagacagcacgtggacctcgcacagcctctcccacaggtaccatgaaggtctccgcggcagccctcgctgtcatcctcattgctactgccctctgcgctcctgcatctgcctccccatattcctcggacaccacaccctgctgctttgcctacattgcccgcccactgccccgtgcccacatcaaggagtatttctacaccagtggcaagtgctccaacccagcagtcgtctttgtcacccgaaagaaccgccaagtgtgtgccaacccagagaagaaatgggttcgggagtacatcaactctttggagatgagctaggatggagagtccttgaacctgaacttacacaaatttgcctgtttctgcttgctcttgtcctagcttgggaggcttcccctcactatcctaccccacccgctccttgaagggcccagattctaccacacagcagcagttacaaaaaccttccccaggctggacgtggtggctcacgcctgtaatcccagcactttgggaggccaaggtgggtggatcacttgaggtcaggagttcgagaccagcctggccaacatgatgaaaccccatctctactaaaaatacaaaaaattagccgggcgtggtagcgggcgcctgtagtcccagctactcgggaggctgaggcaggagaatggcgtgaacccgggaggcggagcttgcagtgagccgagatcgcgccactgcactccagcctgggcgacagagcgagactccgtctcaaaaaaaaaaaaaaaaaaaaaaatacaaaaattagccgggcgtggtggcccacgcctgtaatcccagctactcgggaggctaaggcaggaaaattgtttgaacccaggaggtggaggctgcagtgagctgagattgtgccacttcactccagcctgggtgacaaagtgagactccgtcacaacaacaacaacaaaaagcttccccaactaaagcctagaagagcttctgaggcgctgctttgtcaaaaggaagtctctaggttctgagctctggctttgccttggctttgccagggctctgtgaccaggaaggaagtcagcatgcctctagaggcaaggaggggaggaacactgcactcttaagcttccgccgtctcaacccctcacaggagcttactggcaaacatgaaaaatcggcttaccattaaagttctcaatgcaaccataaaaaaaaaa

SEQ ID NO: 29333 - DNA, 2475 bp, Homo Sapiens
gtgcagaaggcacgaggaagccacagtgctccggatcctccaatcttcgctcctccaatctccgctcctccacccagttcaggaacccgcgaccgctcgcagcgctctcttgaccactatgagcctcctgtccagccgcgcggcccgtgtccccggtccttcgagctccttgtgcgcgctgttggtgctgctgctgctgctgacgcagccagggcccatcgccagcgctggtcctgccgctgctgtgttgagagagctgcgttgcgtttgtttacagaccacgcaaggagttcatcccaaaatgatcagtaatctgcaagtgttcgccataggcccacagtgctccaaggtggaagtggtagcctccctgaagaacgggaaggaaatttgtcttgatccagaagccccttttctaaagaaagtcatccagaaaattttggacggtggaaacaaggaaaactgattaagagaaatgagcacgcatggaaaagtttcccagtcttcagcagagaagttttctggaggtctctgaacccagggaagacaagaaggaaagattttgttgttgtttgtttatttgtttttccagtagttagctttcttcctggattcctcactttgaagagtgtgaggaaaacctatgtttgccgcttaagctttcagctcagctaatgaagtgtttagcatagtacctctgctatttgctgttattttatctgctatgctattgaagttttggcaattgactatagtgtgagccaggaatcactggctgttaatctttcaaagtgtcttgaattgtaggtgactattatatttccaagaaatattccttaagatattaactgagaaggctgtggatttaatgtggaaatgatgtttcataagaattctgttgatggaaatacactgttatcttcacttttataagaaataggaaatattttaatgtttcttggggaatatgttagagaatttccttactcttgattgtgggatactatttaattatttcactttagaaagctgagtgtttcacaccttatctatgtagaatatatttccttattcagaatttctaaaagtttaagttctatgagggctaatatcttatcttcctataattttagacattctttatctttttagtatggcaaactgccatcatttacttttaaactttgattttatatgctatttattaagtattttattaggagtaccataattctggtagctaaatatatattttagatagatgaagaagctagaaaacaggcaaattcctgactgctagtttatatagaaatgtattcttttagtttttaaagtaaaggcaaacttaacaatgacttgtactctgaaagttttggaaacgtattcaaacaatttgaatataaatttatcatttagttataaaaatatatagcgacatcctcgaggccctagcatttctccttggataggggaccagagagagcttggaatgttaaaaacaaaacaaaacaaaaaaaaacaaggagaagttgtccaagggatgtcaattttttatccctctgtatgggttagattttccaaaatcataatttgaagaaggccagcatttatggtagaatatataattatatataaggtggccacgctggggcaagttccctccccactcacagctttggcccctttcacagagtagaacctgggttagaggattgcagaagacgagcggcagcggggagggcagggaagatgcctgtcgggtttttagcacagttcatttcactgggattttgaagcatttctgtctgaatgtaaagcctgttctagtcctggtgggacacactggggttgggggtgggggaagatgcggtaatgaaaccggttagtcagtgttgtcttaatatccttgataatgctgtaaagtttatttttacaaatatttctgtttaagctatttcacctttgtttggaaatccttcccttttaaagagaaaatgtgacacttgtgaaaaggcttgtaggaaagctcctccctttttttctttaaacctttaaatgacaaacctaggtaattaatggttgtgaatttctatttttgctttgtttttaatgaacatttgtctttcagaataggattctgtgataatatttaaatggcaaaaacaaaacataattttgtgcaattaacaaagctactgcaagaaaaataaaacatttcttggtaaaaacgtatgtatttatatattatatatttatatataatatatattatatatttagcattgctgagctttttagatgcctattgtgtatcttttaaaggttttgaccattttgttatgagtaattacatatatattacattcactatattaaaattgtacttttttactatgtgtctcattggttcatagtctttattttgtcctttgaataaacattaaaagatttctaaacttcaaaaaaaaaaaaaaaaaa

SEQ ID NO: 29334 - DNA, 3310 bp, Homo Sapiens
ggcacgagggcactgagctctgccgcctggctctagccgcctgcctggcccccgccgggactcttgcccaccctcagccatggctccgatatctctgtcgtggctgctccgcttggccaccttctgccatctgactgtcctgctggctggacagcaccacggtgtgacgaaatgcaacatcacgtgcagcaagatgacatcaaagatacctgtagctttgctcatccactatcaacagaaccaggcatcatgcggcaaacgcgcaatcatcttggagacgagacagcacaggctgttctgtgccgacccgaaggagcaatgggtcaaggacgcgatgcagcatctggaccgccaggctgctgccctaactcgaaatggcggcaccttcgagaagcagatcggcgaggtgaagcccaggaccacccctgccgccgggggaatggacgagtctgtggtcctggagcccgaagccacaggcgaaagcagtagcctggagccgactccttcttcccaggaagcacagagggccctggggacctccccagagctgccgacgggcgtgactggttcctcagggaccaggctccccccgacgccaaaggctcaggatggagggcctgtgggcacggagcttttccgagtgcctcccgtctccactgccgccacgtggcagagttctgctccccaccaacctgggcccagcctctgggctgaggcaaagacctctgaggccccgtccacccaggacccctccacccaggcctccactgcgtcctccccagccccagaggagaatgctccgtctgaaggccagcgtgtgtggggtcagggacagagccccaggccagagaactctctggagcgggaggagatgggtcccgtgccagcgcacacggatgccttccaggactgggggcctggcagcatggcccacgtctctgtggtccctgtctcctcagaagggacccccagcagggagccagtggcttcaggcagctggacccctaaggctgaggaacccatccatgccaccatggacccccagaggctgggcgtccttatcactcctgtccctgacgcccaggctgccacccggaggcaggcggtggggctgctggccttccttggcctcctcttctgcctgggggtggccatgttcacctaccagagcctccagggctgccctcgaaagatggcaggagagatggcggagggccttcgctacatcccccggagctgtggtagtaattcatatgtcctggtgcccgtgtgaactcctctggcctgtgtctagttgtttgattcagacagctgcctgggatccctcatcctcatacccacccccacccaagggcctggcctgagctgggatgattggaggggggaggtgggatcctccaggtgcacaagctccaagctcccaggcattccccaggaggccagccttgaccattctccaccttccagggacagagggggtggcctcccaactcaccccagccccaaaactctcctctgctgctggctggttagaggttccctttgacgccatcccagccccaatgaacaattatttattaaatgcccagccccttctgacccatgctgccctgtgagtactacagtcctcccatctcacacatgagcatcaggccaggccctctgcccactccctgcaacctgattgtgtctcttggtcctgctgcagttgccagtcaccccggccacctgcggtgctatctcccccagccccatcctctgtacagagcccacgcccccactggtgacatgtcttttcttgcatgaggctagtgtggtgtttcctgggcactgcttccagtgaggctctgcccttggttaggsattgtgggaaggggagataagggtatctggtgactttcctctttggtctacactgtgctgagtctgaaggctgggttctgatcctagttccaccatcaagccaccaacatactcccatctgtgaaaggaaagagggaggtaaggaatacctgtccccctgacaacactcattgacctgaggcccttctctccagcccctggatgcagcctcacagtccttaccagcagagcaccttagacagtccctgccaatggactaacttgtctttggaccctgaggcccagagggcctgcargggagtgagttgatagcacagaccctgccctgtgggcccccaaatggaaatgggcagagcagagaccatccctgaaggccccgcccaggcttagtcactgagacagcccgggctctgcttcccatcacccgctaagagggagggagggctccagacacatgtccaagaagcccaggaaaggctccaggagcagccacattcctgatgcttcttcagagactcctgcaggcagccaggccacaagacccttgtggtcccaccccacacacgccagattctttcctgaggctgggctcccttcccacctctctcactccttgaaaacactgttctctgccctccaagaccttctccttcacctttgtccccaccgcagacaggaccaggggatttccatgatgttttccatgagtcccctgtttgtttctgaaagggacgctacccgggaagggggctgggacatgggaaaggggaagttgtaggcataaagtcaggggttcccttttttggctgctgaaggctcgagcatgcctggatggggctgcaccggctggcctggcccctcagggtccctggtggcagctcacctctcccttggattgtccccgacccttgccgtctacctgaggggcctcttatgggctgggttctacccaggtgctaggaacactccttcacagatgggtgcttggaggaaggaaacccagctctggtccatagagagcaaaacgctgtgctgccctgcccaccctggcctctgcactcccctgctgggtgtggcgcagcatattcaggaagctcagggccctggctcaggtggggtcactctggcagctcagagagggtgggagtgggtccaatgcactttgttctggctcttccaggctgggagagcctttcaggggtgggacaccctgtgatggggccctgcctcctttgtgaggaagccgctggggccagttggtcccccttccatggactttgttagtttctccaagcaggacatggacaaggatgatctaggaagactttggaaagagtaggaagactttggaaagacttttccaaccctcatcaccaacgtctgtgccattttgtattttactaataaaatttaaaagtcttgtgaaaaaaaaaaaaaaaaaaaaaaa

SEQ ID NO: 29335 - DNA, 3148 bp, Homo Sapiens
gtgggaagggcctgtgggtttattataaggcggagctcggcgggagaggtgcgggccgaatccgagccgagcggagaggaatccggcagtagagagcggactccagccggcggaccctgcagccctcgcctgggacagcggcgcgctgggcaggcgcccaagagagcatcgagcagcggaacccgcgaagccggcccgcagccgcgacccgcgcagcctgccgctctcccgccgccggtccgggcagcatgaggcgcgcggcgctctggctctggctgtgcgcgctggcgctgagcctgcagccggccctgccgcaaattgtggctactaatttgccccctgaagatcaagatggctctggggatgactctgacaacttctccggctcaggtgcaggtgctttgcaagatatcaccttgtcacagcagaccccctccacttggaaggacacgcagctcctgacggctattcccacgtctccagaacccaccggcctggaggctacagctgcctccacctccaccctgccggctggagaggggcccaaggagggagaggctgtagtcctgccagaagtggagcctggcctcaccgcccgggagcaggaggccaccccccgacccagggagaccacacagctcccgaccactcatcaggcctcaacgaccacagccaccacggcccaggagcccgccacctcccacccccacagggacatgcagcctggccaccatgagacctcaacccctgcaggacccagccaagctgaccttcacactccccacacagaggatggaggtccttctgccaccgagagggctgctgaggatggagcctccagtcagctcccagcagcagagggctctggggagcaggacttcacctttgaaacctcgggggagaatacggctgtagtggccgtggagcctgaccgccggaaccagtccccagtggatcagggggccacgggggcctcacagggcctcctggacaggaaagaggtgctgggaggggtcattgccggaggcctcgtggggctcatctttgctgtgtgcctggtgggtttcatgctgtaccgcatgaagaagaaggacgaaggcagctactccttggaggagccgaaacaagccaacggcggggcctaccagaagcccaccaaacaggaggaattctatgcctgacgcgggagccatgcgccccctccgccctgccactcactaggcccccacttgcctcttccttgaagaactgcaggccctggcctcccctgccaccaggccacctccccagcattccagcccctctggtcgctcctgcccacggagtcgtggggtgtgctgggagctccactctgcttctctgacttctgcctggagacttagggcaccaggggtttctcgcataggacctttccaccacagccagcacctggcatcgcaccattctgactcggtttctccaaactgaagcagcctctccccaggtccagctctggaggggagggggatccgactgctttggacctaaatggcctcatgtggctggaagatcctgcgggtggggcttggggctcacacacctgtagcacttactggtaggaccaagcatcttgggggggtggccgctgagtggcaggggacaggagtccactttgtttcgtggggaggtctaatctagatatcgacttgtttttgcacatgtttcctctagttctttgttcatagcccagtagaccttgttacttctgaggtaagttaagtaagttgattcggtatccccccatcttgcttccctaatctatggtcgggagacagcatcagggttaagaagacttttttttttttttttaaactaggagaaccaaatctggaagccaaaatgtaggcttagtttgtgtgttgtctcttgagtttgtcgctcatgtgtgcaacagggtatggactatctgtctggtggccccgtttctggtggtctgttggcaggctggccagtccaggctgccgtggggccgccgcctctttcaagcagtcgtgcctgtgtccatgcgctcagggccatgctgaggcctgggccgctgccacgttggagaagcccgtgtgagaagtgaatgctgggactcagccttcagacagagaggactgtagggagggcggcaggggcctggagatcctcctgcagaccacgcccgtcctgcctgtggcgccgtctccaggggctgcttcctcctggaaattgacgaggggtgtcttgggcagagctggctctgagcgcctccatccaaggccaggttctccgttagctcctgtggccccaccctgggccctgggctggaatcaggaatattttccaaagagtgatagtcttttgcttttggcaaaactctacttaatccaatgggtttttccctgtacagtagattttccaaatgtaataaactttaatataaagtagtcctgtgaatgccactgccttcgcttcttgcctctgtgctgtgtgtgacgtgaccggacttttctgcaaacaccaacatgttgggaaacttggctcgaatctctgtgccttcgtctttcccatggggagggattctggttccagggtccctctgtgtatttgcttttttgttttggctgaaattctcctggaggtcggtaggttcagccaaggttttataaggctgatgtcaatttctgtgttgccaagctccaagccccatcttctaaatggcaaaggaaggtggatggccccagcacagcttgacctgaggctgtggtcacagcggaggtgtggagccgaggcctaccccgcagacaccttggacatcctcctcccacccggctgcagaggccagaggcccccagcccagggctcctgcacttacttgcttatttgacaacgtttcagcgactccgttggccactccgagaggtgggccagtctgtggatcagagatgcaccaccaagccaagggaacctgtgtccggtattcgatactgcgactttctgcctggagtgtatgactgcacatgactcgggggtggggaaaggggtcggctgaccatgctcatctgctggtccgtgggacggtgcccaagccagaggctgggttcatttgtgtaacgacaataaacggtacttgtcatttcgggca

SEQ ID NO: 29336 - DNA, 5434 bp, Homo Sapiens
caagtgccgtcgccgcgccccttccccctcccgcctccccggccccctccccggaaccggcggtcgagctacggtcgcggacgagtggaaccgagactgccccgcggagccgccggtatgagcgcccctcgccaccccgtgtcccaggcccggcctttctgacaagagctagacttcgggctccttgaggatattcagttttgtatgtttgaatatcctctcaccatgttcagcataaagtaccattcttaatgattatcctcaacaagacaggtgtgagagggttgctgttgcattgcaatcatggtgcaaaaataccagtccccagtgagagtgtacaaatacccctttgaattaattatggctgcctatgaaaggaggttccctacatgtcctttgattccgatgttcgtgggcagtgacactgtgagtgaattcaagagcgaagatggggctattcatgtcattgaaaggcgctgcaagctggatgtagatgcacccagactgctgaagaagattgcaggagttgattatgtttattttgtccagaaaaactcactgaattctcgggaacgtactttgcacattgaggcttataatgaaacgttttccaatcgggtcatcattaatgagcattgctgctacaccgttcaccctgaaaatgaagattggacctgttttgaacagtctgcaagtttagatattaaatctttctttggttttgaaagtacagtggaaaaaattgcaatgaaacaatataccagcaacattaaaaaaggaaaggaaatcatcgaatactaccttcgccaattagaagaagaaggcataacctttgtgccccgttggagtccgccttccatcacgccctcttcagagacatcttcatcatcctccaagaaacaagcagcgtccatggccgtcgtcatcccagaagctgccctcaaggaggggctgagtggtgatgccctcagcagccccagtgcacctgagcccgtggtgggcacccctgacgacaaactagatgccgaccacatcaagagatacctgggcgatttgactccgctgcaggagagctgcctcattagacttcgccagtggctccaggagacccacaagggcaaaattccaaaagatgagcatattcttcggttcctccgtgcacgggattttaatattgacaaagccagagagatcatgtgtcagtctttgacgtggagaaagcagcatcaggtagactacattcttgaaacctggacccctcctcaggtccttcaggattactacgcgggaggctggcatcatcacgacaaagatgggcggcccctctacgtgctcaggctggggcagatggacaccaaaggcttggtgagagcgctcggggaggaagccctgctgagatacgttctctccgtaaatgaagaacggctaaggcgatgcgaagagaatacaaaagtctttggtcggcctatcagctcatggacctgcctggtggacttggaagggctgaacatgcgccacttgtggagacctggtgtgaaagcgctgctgcggatcatcgaggtggtggaggccaactaccctgagacactgggccgccttctcatcctgcgggcgcccagggtatttcctgtgctctggacgctggttagtccgttcattgatgacaacaccagaaggaagttcctcatttatgcaggaaatgactaccagggtcctggaggcctgctggattacatcgacaaagagattattccagatttcctgagtggggagtgcatgtgcgaagtgccagagggtggactggtccccaaatctctgtaccggactgcagaggagctggagaacgaagacctgaagctctggactgagaccatctaccagtctgcaagcgtcttcaaaggagccccacatgagattctcattcagattgtggatgcctcgtcagtcatcacttgggatttcgacgtgtgcaaaggggacattgtgtttaacatctatcactccaagaggtcgccacaaccacccaaaaaggactccctgggagcccacagcatcacctctccgggtgggaacaatgtgcagctcatagacaaagtctggcagctgggccgcgactacagcatggtggagtcgcctctgatctgcaaagaaggagaaagcgtgcagggttcccatgtgaccaggtggccgggcttctacatcctgcagtggaaattccacagcatgcctgcgtgcgccgccagcagccttccccgggtggacgacgtgcttgcgtccctgcaggtctcttcgcacaagtgtaaagtgatgtactacaccgaggtgatcggctcggaggatttcagaggttccatgacgagcctggagtccagccacagcggcttctcccagctgagtgccgccaccacctcctccagccagtcccactccagctccatgatctccaggtagtgccgcgctgcctgcacctagtgtgcagaggggacggccgcccctcctcggacagcagctgcacccgcccacccagcggcgacattgtacagactcctctcacctctagatagcaaatagctctcagatggtaaacgtagtcgtttgatcccaaaactaccttggcaggtagttttaactctgatcctaacttaactcaatagccatagattttgtatacgttgtgcacaaaatccaaccagagcgcaagggctctcttgaaagaaaagtagtttctgtaccaattaaaggattgacgtggtctcagatattgatgcaaaaaatttttccaacgaactccgcattgtccattagtgaatgaattcctgtgacatcctccagagatggcccctcctcacctgggacggaagctgccagctcgcttcccccaagctgcctcatggcccgcacgccgcctcacggcccccatgcttcccgccagtcaagatggtctgtggacttagggccagcccttgaggtccttatcctctgaggattcagaggttgcctgcggagtaccttgtcccagggccagacacacccacaccacccactgtctgcagtggggccgggggctcaggaggggctctcagggactcctggtgactccaggaaaatgctgccatcgttaaacattactttctctttcctccttttcaaatctttttgatactttttagagcaggatttttctgtatgtgaacttgggtgggggggttcttcccgtttccttccgtgcgtcgcccctctcacctgcagtcagctcccagcccagtgtaggccatctcctctgtgccctctggaggctcattgtctcagagcccagacagttccagccactaggaggccgtcttggaaccagcaagtcgcatttgccacttgacactgtccatggggttttattagtagctaagcagcagctctcgcatccacttcagggtggcgtgtggcatgtaggagtcctgcttctttgtacatgggaattgtggactcatgcgtgtgtgtgtgtgcatgtgctgtgtgtgtgcatgtgtgcatgacggtgggggtgctggggggacggggtgagtggaaacttagtttgagtaatgaaggaatcttcacagaagcaaatcagaatatgggatttgtttgccttttacattttgtttaattcctgattttaaagcctgctctatctggtacaggcccttattttttcagctttttatgggaaaagcaggttatttgagaatctgtccagaagttgcataggggatggcctccacgataaggacatgcaacacgtgtttctgtgtgcagcagaggccgtgtttttcatgccaaaccccacgcggctgtcaactgtgtgcgtggtaggcatggagatcctggttgtgccgtctcagctccgctctgaaggcactgtgtgggtgctgcgtgactggagagctgtgtggaggccatgtgtgccccgtgcagggatcaggagggcgggggagggaccgagcagccctcttgcccggtcgggtcagccctagtggctgcctgcacactgtagacgtcccagggcctgtgctgtgatcacctgcctttggaccacatttgtgtttgctcttagagatcgagctcctcagtggtacctgaagcctttgcttccggaaagcgcggtagggttcgtaggtagggctagtaggtagggttagtaggtagggctagtaggtagggctagtaggtagggttagtaggtagggttcgtaggtagggctggtaggtagggttagtaggtagggctagtaggtagggttcgtaggtagggctagtaggtagggttagtaggtagggctagtaggtagggctagtaggtagggttagtaggtagggttcgtaggtagggctggtaggtagggttagtaggtagggctagtaggtagggttcgtaggtagggctagtaggtagggttagtaggtagggctagtaggtagggctagtaggtagggttagtaggtagggttcgtaggtagggctggtaggtagggttagtaggtagggctagtaggtagggctagtaggtagggctagtaggtagggttagtaggtagggctagtaggtagggctagtaggtagggttagtaggtagggttcgtaggtagggctggtaggtagggttagtaggtagggctagtaggtagggctagtaggtagggctagtaggtagggctagtaggtagggctagtaggtagggctagtaggtagggctagtaggtagggttcgtaggtagggttcgtaggtagggttcgtaggtagggttagtagcgcgtctgtgctgcttccacctggtgcttcctgttcccaaatcacaagggcctgaaggtggtccctgctttctctttctctttctctgtgtctcagatggcgattttgctgacagctgccaagaaaatgcttcactcaacagtcctcatgtgcccagagatgtttatagaactgtttgaattgcagccatcccctgccccctcccaggctgaagatctgttctttttaagttgattcgggagtggcattcttttatacccaaagactgtagtgcatcttgaagagctcaaagcacatgaccgcacaaatgcttacagggtttcctcccgagtaatccaatctcactccccttgtaagggaattctggggcagctatggtttgagtatgcagtttgcatcgtgtttctacctttagtaccttgccactcttttaaaacgctgctgtcatttcccatttcttagtactaatgattctttgattctccctctattatgtcttaattcactttccttcctaaatttgttatttgcatatcaaattctgtaaatgttttgtaaacatattacctcacttggtaatacaatactgatagtctttaaaagatttttttattgttatcaataataaatgtgaactatttaaag

SEQ ID NO: 29337 - DNA, 1982 bp, Homo Sapiens
agacaagatttttcaagcaagatgaagtccatcatcctctttgtcctttccctgctccttatcttggagaagcaagcagctgtgatgggacaaaaaggtggatcaaaaggccaattgccaagcggatcttcccaatttccacatggacaaaagggccagcactattttggacaaaaagaccaacaacatactaaatccaaaggcagtttttctattcaacacacatatcatgtagacatcaatgatcatgactggacccgaaaaagtcagcaatatgatttgaatgccctacataaggcgacaaaatcaaaacaacacctaggtggaagtcaacaactgctcaattataaacaagaaggcagagaccatgataaatcaaaaggtcattttcacatgatagttatacatcataaaggaggccaagctcatcatgggacacaaaatccttctcaagatcaggggaatagcccatctggaaagggattatccagtcaatgttcaaacacagaaaaaaggctatgggttcatggactaagtaaagaacaagcttcagcctctggtgcacaaaaaggtagaacacaaggtggatcccaaagcagttatgttctccaaactgaagaactagtagttaacaaacaacaacgtgagactaaaaattctcatcaaaataaagggcattaccaaaatgtggttgacgtgagagaggaacattcaagtaaactacaaacttcactccatcctgcacatcaagacagactccaacatggacccaaagacatttttactacccaagatgagctcctagtatataacaagaatcaacaccagacaaaaaatctcagtcaagatcaagagcatggccggaaggcacataaaatatcatacccgtcttcacgtacagaagaaagacaacttcaccatggagaaaagagtgtacagaaagatgtatccaaaggcagcatttctatccaaactgaagagaaaatacatggcaagtctcaaaaccaggtaacaattcatagtcaagatcaagagcatggccataaggaaaataaaatatcataccaatcttcaagtacagaagaaagacatctcaactgtggagaaaagggcatccagaaaggtgtatccaaaggcagtatttcgatccaaactgaagagcaaatacatggcaagtctcaaaaccaggtaagaattcctagtcaagctcaagagtatggccataaggaaaataaaatatcataccaatcttcgagtacagaagaaagacgtctcaacagtggagaaaaggatgtacagaaaggtgtatccaaaggcagtatttctatccaaactgaagagaaaatacatggcaagtctcaaaaccaggtaacaattcctagtcaagatcaagagcatggccataaggaaaataaaatgtcataccaatcttcaagtacagaagaaagacgactcaactatggaggaaagagcacgcagaaagatgtatcccaaagcagtatttctttccaaattgaaaagctagtagaaggcaagtctcaaatccagacaccaaatcctaatcaagatcaatggtctggccaaaatgcaaaaggaaagtctggtcaatctgcagatagcaaacaagacctactcagtcatgaacaaaaaggcagatacaaacaggaatccagtgagtcacataatattgtaattactgagcatgaggttgcccaagatgatcatttgacacaacaatataatgaagacagaaatccaatatctacatagccctgttgcttagcaaccacttgaaaagctggaccaatagcaaggtgtcacccgacctcagtgaagtctttgatgtttctgagaggcagactcccatgtggtcccagatccttggtccatggatgacaccaccttcccatgcttccttgcattaggctttctaaacccggagccccttcaaacttccaataaagggatcattttctgcttta

SEQ ID NO: 29338 - DNA, 7300 bp, Homo Sapiens
cagccgggtgacccaggccgaggccggcagaagacagcctgatgccttgaagacttcctcttgcacttttgttggagggtgctggtttgctaaaagcagagagtatttttctttttatttattttgtttttaattttttaattttagctccagctcagttgcccagactggagagcagtggccaatcatagcttactgcctcctggaactcctggctcaatcgatcctcctggataagcctcctccgggtactatagcttcatggcggctgaagagatgcattggcctgtccctatgaaggccattggtgcccagaacctgctaaccatgcctgggggcgtggccaaggctggctacctgcacaagaagggcggtacccagctgcagctgctgaaatggcccctgcgctttgtcatcatccacaaacgctgcgtctactacttcaagagtagcacctctgcctccccgcagggcgccttctccctgagtggctataaccgggtgatgcgggcggctgaggagaccacgtccaacaacgttttccccttcaagatcatccacatcagcaagaagcaccgcacgtggttcttctcggcctcctccgaggaggagcgcaagagctggatggccttgctgcgcagggagattggccacttccacgaaaagaaagacctgcccttggacaccagcgactccagctcggacacagacagcttctacggcgcagttgagcggcctgtggatatcagcctttccccgtaccccacggacaatgaagactatgagcacgacgatgaggatgactcctacctggagcctgactccccggagcccggaaggcttgaggatgccctgatgcacccaccggcttacccaccacccccagtgcccacgcccaggaagccagccttctctgacatgccccgggcccactcctttacctccaagggccccggtcccctactgccacccccgccccctaagcacggcctcccagatgttggcctggctgctgaggactccaagagggacccactgtgcccgaggcgggctgagccttgccccagggtacctgctaccccccgaaggatgagcgatccccctctgagcaccatgcccaccgcacccggcctccggaaacccccttgcttccgggagagtgccagccccagcccggagccctggacccctggccacggggcctgctccacttccagtgctgccatcatggccactgccacctccagaaactgtgacaaactcaagtccttccacctgtccccccgaggaccacccacatctgagcccccacctgtgccagccaacaagcccaagttcctgaagatagctgaagaggaccccccaagggaggcagccatgcccggactctttgtgccccccgtggctccccggcctcctgcgctgaagctgccagtgcctgaggccatggcgcggcccgcagtcctgcccaggccagagaagccgcagctcccgcacctccagcgatcacccctcgatgggcagagtttcaggagcttctcctttgaaaagccccggcaaccctcacaggctgacactggcggggacgactcggacgaggactatgagaaggtgccactgcccaactcggtcttcgtcaacaccacggagtcctgcgaagtggaaaggttgttcaaggctacaagcccccggggagagccccaggatggactctactgcatccggaactcctctaccaagtcggggaaggtcctggttgtgtgggacgaaacctctaacaaagtgaggaactatcgcatttttgagaaggactctaagttctacctggagggcgaggtcctgtttgtgagtgtgggcagcatggtggagcactaccacacccacgtgctgcccagccaccagagcctgctgctgcggcacccctacggctacactgggcctaggtgatggcagtccatgtggctgccaggccaaggcagtcacaggggccctgaccccaggccacacagacggacatgggcccacatgggagggtgagcaggagcaaggctgtgcttgcctagggcctctgtgatggacatctcgtaggacccagccagtctcatccagcaggttgggttctagggctgaaccaggcgccaggctccagaggacgaagggactctgttgccccacactaacttgccctgtcccaatcccagaaacccaggaccaagctgtgcctgggctccaaggacaggaacactggtccccccatcacactcacccctaagtgggctgggagccaggcagggccagggcagctgggtgggggccggggctggccctgggacccccaggaacgctaagacacaggctccagtaggggctgttgcctccaataaagcagcagtgagctttgccttggtggctggggcttgattgggaaggaggggattaccagcttactgggtgcccatgctgatgtctaagtggtgaccgcagcagtacccgggaaccccaacagttggttgtcttgtcttccagggtgcaggtcactgagtgacttccccagggtgcacagcgagtaacagatcaggacccaaacttgggcagtctgggctgggagcccacaccccactcaccagttctgctgcctcaggtcaggccagggcagtgctgctgcagagctagaaggccctgcagctacagctgcttcattccctgcattagtgcctggttactgggtacctcctgagtggctgtccccgttccagaacttgcatacactgagcgggctacagagctagaagccctgcagctacagctgcttcattccctgcattagcgagcagttattgggtacctcctgcatgcctggtcccattccagacaggggcctctggcctggctgagttcacagcccagtctggggacagctgggtatgaggtgcttacggcacagtgtccagggcagctgggtgtgcagggactgggggctcccggaagattttttggaggaagtaacagctacgatgggatgggaacagtggaccctaagcaggccaagggtgcgtagggacggtggtacccagatgcccaagtcttccaggcaatacctggctcaggcccagccccaatccatccccttactttctgccatggagttccagcaggtcactctccctggcacaccttccaggctggatttttaatgaaacagactcagggaggtaggggctggcagggaccctagaatccttgtgatttttcttagcaccttatgtcagggaaacctaaactgaggtcagcacttgggcccactgacagtgactgactgggggagaaggtcctgcagcccccttcccctgggtgtgttctggggacctgtggtttgctggcggaaacaaatgatgaggctggttagcggatgtgggaggctgtgaccccagggggccatagggtgcggtggaactgcaggccctgcagatgacggcagccagctgcttccaggaaccaggtgtccaaggccacctctgcaggggtttcctcttcagcctgcctggggtgagaggtcagtgcaccacagccgaggctggagcacagggagcttctgttgttctgatctatctctggaaaaccagccattcctcctccctgcagtcagaattctttgccctgtctgacctgaacttgcttagggagtcatgccactccccactgtggccatagtttctcttcctgtaaaattttattattttagttttttgtttttgagatgtagtctcaccctgtcgcccaggctggagtgcaatgccgtgatctccgctcactgccacctccgcctctctagttcaagcgattttcctgcctcagcctcccgagtagctgggattccaggcgcccgccaccacgcctggctaattttttgtatttttagtagagacgggattttatcatgttggccaggctggtctcgaactcctgacctcaggtgatctgcccaccttggcctcccaaagtgctgggattacaggcatgagccactgtgcctggccccttcctgtaaaatttttaaatggagaattgggtgcgagatgtggtttccagcctggtgcctggggtgctgagctagtgagtggtgcagtccaggacacctttgctttatgtcacttacacggtcacctggagccggctcaagtggctaaagcatcctggggcccagagccaggtgatagtccctctggccaactggacagttgaggcttgtggttaacccgaagcccagctggggccttggtccagcttcgcttcccagattctgcacctgctagcacagctgtccacgtctgtgtgagctgttctaggccgagggcctcagtttcaagagtgtgttggggtgggatggggcaggccgtggtcctccagcatgaagaaggagccatgaggagttcccatgacctcccgagacttgccataagtgttctagtccacatataagggtagggttgggattaccatttactgaccacatctgtgaggtgccgagctgggtgcttgacatcatttgcttggagaagcagctgttagtagacccattttacaggtgagagaaccaagtctcacagaggcctgggttcaagtcccacctctgccactaactggcatgtgaccctatctatccttcactgctctgagcctagaccctggcccctgcctggctccctgccaggctccctgccacccctcacgacctctgatggtcgttgtgggggtctcttgcctggctcccagggctagggttagggctctggaggtgctttcactcaaccaagggggccacagcactggggagtgaaactgccccgcctcaccctgcgttgccctctgggtctgtgagggtgggctggcaggaggcctaggccttgccctaggggcagtcctgcttcctcattttatagatagggaaactgaggctttgggaggactcactgacatacctaccttcaagatgagttcaggtgggctcagttctggggcttgggaaaagggccccagtggctttgggaagcacccccagcccagggtgaaacatgcttcttctcttcctgtggttccatccgaaggattgtggtgagccccgtgccttcagttaataaagatttgtattgtgaaaagattttttcttttttttttgggacacagtctcactctgtcgcccaggctagagtggattggcgtgatctcggctcaatgcaaatctccagggttcaatcgattctcctgcctcaccctcccatgtagctgggattacagctgcctgccaaatttttgtatttttagtggaaccggggtttcaccatgttggccaggctggtcttgaactcctgacctcaactgatccgcccaccttggcctcccaagtgctgggattacaggcgcgagccacggcgcccagccttgaaaagatgtttttagaaccagaagaaacctcggttcccactgatccttctgggccacgttgtgcggagctcccctgctggttggggctcagcgcagccccagggaggtgcttcctgcacctcaggatgggcgagggtgggcattgggggagagggggacctgggacctgcggcttagttccctgaggcaggcagggcttattggggccatttcatagaaaggcagattgaagctcagcagggaagaagcttttgagggtgatccaggcgctggagggatggcctaggacaccagggtcacaccaggaacatgggagggccgtgcttgtctctagacgaggggaatgggggaagggccacaacctctgtttctgtgacccagcagcatcaagcccctcgctgggcacctcgcacacaccccctgccttatctctgcctgcacgccctgttccctccacctagactgcctgctgagggggcagtgccaggaggttgcctgtccttggggaagaggggcagtgaccctgtgaagatgcttgacagacaacccccaccacctcagaagtgtgtgtgagtggtgaacccttttaagccatcttccagccattctcactggagggagatttgatgggtacagagcagacccctacctgtctaccctccttcggacccctaggaagcttcgcaggccttccaggctgccagacagctgccctggcgttgccgtctgcttcttccctggccccactctgaggggctcagagctgaggcagaatccctttttcattcatttcctgcagaataaaacaacatacagaaaagtgaataaaacataaatgcacaacctaacacactgttaggaagtaaacgatctgcaaccaccatcaggaaatagttttgccagcacccaagtgccctcccctcacagtgtcacttccggcctctctgccctggcttatgtgagtcttgtgttcttgtttttctaaaaagtcttcagcacccaattatgcaagcattgcagtattttcctgtttctgtgctttatccccttgaatcatacagatgcaaattctggcagctggcttctttggctcgttattatgtctgtgagatttattcatgttgctgtgcgtagtatagtttgtgcatgttcattgctaaaaacttccattgtttggctgtatcgtagttcacagattcatttcactgtcagtcaagcttgtccaatgcatgcagcccaggatgcctttgaatgtggcccaacacaaatttgtaaactttcttaaaacattataaagatttttgtttgcgatttttttttttagctcatcagctatagttagtggtagtgtattttatgcgtgacccgagacagttcttccggtatggtccatggaagccaaaagattggacatgcctgctgtagatggacagttggtttgtttctagtttggggtaactacacacaatgctgctagcaacagttttgtccatgtctctgatgcacgtgtgttttttgcaaatggtgcacaaatttttctagggtttgtactcaggagtctgactcctgggttctagggtatgaagatctttctaaatattgttctagtttacgtgcccaccagcagtaaaacagaattcccttgccttcccatccttggcagacatttcacttttgccagtctggtggggtgtatagttatggccttaatttgcatttagctaattaccaaggagattgagcatatttttatgtttttattaaccattttgattttgtctcctgtgaagtgtctatcatcttttgcccattttttaacttgttgtctttttctttttcttttctttttttttttttt

SEQ ID NO: 29339 - DNA, 2306 bp, Homo Sapiens
cgggccgccgggacgggcacgggcgcgcgggctccggcgggcgccggctgccttcctccgtcgctcgctgtctctcccggccgcattctcctccgctgcggggccgagctctccccagcgctcgcaggaaggaagaagggagccgaggacgccgagaagttcccgcggcagccgcggatcccggccaaggcggaggctgcggctccgacggggcaggagcgcgatccacggcgaggggcgtacggccaaagggtccgcggcgtggagcgctcggaccttccgctctcccccgggcgtgggccgggaccccatgagacgcgcccacgaggggcgcgagattcctagcttgggcggcgctaggcggagggaggtgttgcaggccggccggagccagagagctgccggcaggaggcggcggcggcaagaacttgaacttggcgtcgggagcgggcgccccggaggccccccgccggggccggggcgccgagggacctgcgccgcagcgctgccccccgaatggccgcggcggcggaccgggctcccgcgccgcggccctaggccgcctctcgccatggccaagtggctaaacaagtacttcagcttgggcaacagcaagaccaagagccccccgcagccgccgcggccagactaccgcgagcagcggcgccgaggcgagcggccttcgcagcccccccaggccgtgccgcaggcctcctccgccgcctcggcgtcctgcggtccggccaccgcctcctgcttctcagcctcttcgggctcgctgcccgacgacagcggcagcaccagcgacctcatccgcgcctaccgcgcgcagaaggagcgacacttccaggacccctacaacgggcctggctcgtcgctgcgcaaactgcgcgccatgtgccgcctggactactgcggcggcagcggggagccaggcggggtccagcgcgccttctcggcctcgtccgcgtcgggcgccgcgggctgttgctgcgcctcctcgggcgcgggcgccgccgcgtcctcgtcctcgtcctccggctctccgcatctctaccgcagcagcagcgagcggcggcccgccacgccggccgaggtgcgctacatctcccccaagcaccgcctcatcaaagtggagagcgccgcgggcggtggggccggggaccccctggggggcgcctgcgcgggcggccgcacctggagcccgacggcctgcggaggcaagaaactgctcaacaagtgcgccgcctcagccgcggaggagagcggggccggcaagaaggacaaggtgaccatagccgatgactactcagatccctttgatgccaagaatgatctcaagagcaaagcaggaaagggggagagtgctggctacatggagccctatgaggcacagaggatcatgacagaatttcagaggcaggaaagtgtccggtcccagcataaaggtatccagttatatgacaccccttacgaacctgaaggccaaagtgttgactcggactcggagagcacagtcagcccccgactgcgggagagcaagctgccccaggatgacgacaggcccgccgatgagtacgaccagccttgggagtggaaccgggtcaccagcccagccctggcagcacagtttaatggcaacgagaagcggcagtcatccccctcaccttcgcgggaccggcggcgccagcttcgtgcccctggagggggctttaagcctatcaaacatgggagccctgagttctgcgggatcctaggagaaagggtggatcctgccgtccccctggagaagcaaatatggtatcacggagccatcagcagaggagacgccgagaacctgctgcgactctgcaaggagtgtagctaccttgtccggaacagccagaccagcaagcatgactaccccctctccctgaggagcaaccagggttttatgcacatgaaactggccaaaaccaaagagaaatacgttctgggtcagaacagccctccgttcgacagtgtcccggaagtcatccactactacaccaccagaaagctacccatcaaaggggctgagcacttgtccctcctctatcccgtggctgtgaggaccctgtgagcggaccagacctgccctgctctgtgacagagcctggagacttggaggtgccagaggccccccaccaaccagcccccagccactgttgctggctgtgtcgtttgtgttgtgtgtatggtactagcacaccactgcatgtctctagaatgctgttgccacttacgggggctggaggcctggataaagacagaagggcggcaacacc

SEQ ID NO: 29340 - DNA, 5198 bp, Homo Sapiens; identical to SEQ ID NO: 28995

SEQ ID NO: 29341 - DNA, 4562 bp, Homo Sapiens
cccgcactctgcgcctctcctcgcctttctcgcacctgctcctgcgccaggccgcgagacccccggggcggcttcccagaacctgcggagcacaactggccgaccgacccattcattgggaaccccgtcttttgccagagcccacgtcccctgccacctctagctcggagcggcgtgtagcgccatggagaagagcaacgagaccaacggctaccttgacagcgctcaggcggggcctgcggccgggcccggagctccggggaccgcggcgggacgcgcacggcgttgcgcgggcttcctgcggcgccaagcgctggtgctgctcaccgtgtccggggtgctggcgggcgcgggcctgggcgcggcgttgcgcgggctcagcctgagccgcacgcaggtcacctacctggccttccccggcgagatgctgctccgcatgctgcgcatgatcatcctgccgctggtggtctgcagcctggtgtcgggcgccgcctccctcgatgccagctgcctcgggcgtctgggcggcatcgctgtcgcctactttggcctcaccacactgagtgcctcggcgctcgccgtggccttggcgttcatcatcaagccaggatccggtgcgcagacccttcagtccagcgacctggggctggaggactcggggcctcctcctgtccccaaagagacggtggactctttcctcgacctggccagaaacctgtttccctccaatcttgtggttgcagctttccgtacgtatgcaaccgattataaagtcgtgacccagaacagcagctctggaaatgtaacccatgaaaagatccccataggcactgagatagaagggatgaacattttaggattggtcctgtttgctctggtgttaggagtggccttaaagaaactaggctccgaaggagaagacctcatccgtttcttcaattccctcaacgaggcgacgatggtgctggtgtcctggattatgtggtacgtacctgtgggcatcatgttccttgttggaagcaagatcgtggaaatgaaagacatcatcgtgctggtgaccagcctggggaaatacatcttcgcatctatattgggccatgttattcatggaggaattgttctgccacttatttattttgttttcacacgaaaaaacccattcagattcctcctgggcctcctcgccccatttgcgacagcatttgctacctgctccagctcagcgacccttccctctatgatgaagtgcattgaagagaacaatggtgtggacaagaggatcagcaggtttattctccccatcggggccaccgtgaacatggacggagcagccatcttccagtgtgtggccgcggtgttcattgcgcaactcaacaacgtagagctcaacgcaggacagattttcaccattctagtgactgccacagcgtccagtgttggagcagcaggcgtgccagctggaggggtcctcaccattgccattatcctggaggccattgggctgcctactcatgacctgcctctgatcctggctgtggactggattgtggaccggaccaccacggtggtgaatgtggaaggggatgccctgggtgcaggcattctccaccacctgaatcagaaggcaacaaagaaaggcgagcaggaacttgctgaggtgaaagtggaagccatccccaactgcaagtctgaggaggagacatcgcccctggtgacacaccagaaccccgctggccccgtggccagtgccccagaactggaatccaaggagtcggttctgtgatggggctgggctttgggcttgcctgccagcagtgatgtcccaccctgttcacccagccgccagtcatggacacagggcactgcccttgccaacttttaccctcccaagcaatgctttggcccagtcgctggcctgaggcttacctctcggcactggcattgggctccccagccggaactggttaccaaggacaaggacactctgacattcggcttgatccatgtccaggtgcaactgtgtgtacaccagggatctgtttggaaacaaccccttgagctgccaggctcaagaaatcatggactcacagggtcctgtgtggttacatcttggaaaaaatgcagatgtatttcactctccccggtcagctctgcatcaggtgttttctgagcaaaccaagggggtttatagtcatctgtcgcattgcctcgagttgcagtaattgaaaaaatgctcaaattcttagccatggctggcctttgctgagctgggactcaggtgtttaaagagtttgtgctatagctaggtgtggatagcttctgatccctgggttctgggagactgcaggtgccgcacattgtcaagttagaaatactccaggtgggtgttagcactgtggtggtctctggtccacagccttaggtaaacaacttagattctgaggtcaaagaaaaaaggagagggaatgcagccttgtgggggagaagcggggcagagggttctctaatctaatcaggacaggacaggtttcacatacaattgtcccagttcgcatcccagccctggggcacttttctgcttccttccagaggcctgggcctctgataacactttggctttttctccattcacgctgatttggcaaaaggccagagatgggcctccttccctggggaggtgtgatgtagttatcacattcaggacccttgttgatttatcatctattatttgaattcaactggacactctgtaaaatgctgcactgcagcaaaaacaaaaccaccaccaccccagagaaaaccatgtactaattggagtggggtacccccattcacaggttcccaggtcccctggctttggctgatttcaaaatatagagccctttcttgccagtacatccaagtttaaaattatcagcgaaatggtccatgtttttccaattacctgctgacacggttctaagctaagtgaaggggaagatctgagagcgtgctgtttgtggctgttgatgcatattcgtgatgtaacaggtcctggggcctcactttaccccatttgtaaaatggggctaatgtcacctgcctcttacctacctcagagggatttggtgaagcaaactgttaatcttcgaaaacgaccatttcacttcttggatatcaagtgctaacccagtatgttcttcttttttatgtaagggacagctttggagaaaggactgctctgtggagcagagtcctttctgctggtgaggacagcatttctgagcagggctttgttctctatgtgcattaggacttttatcatgcccttgttctgtgtgtagttacttgacagcatcaaatgccgcctcttcctaatgtccttcaagttttcatgaactagcaaccccaccttccaccatggttctgggcgcctgattttgctgtgactcccagacccagccactgtttctgccaccctgtaacaggccattaaagctccccagtgttcagcctccttcactcccttgttttccctgttgctatgtgtcacctgggccctacagacaggggcacacgcttatggatgtgtgtaccattgagatgagaatgggtagatggaacggagaccatcaagccacacccccttcttaaaactggggacatgagcctgagcagaaagggtgaagaagagccatgggacacagagttgacccagccagggggaaagcccagctctctttaaaccagctaagccattccagtctcctgtgaagccaaaagggaccaggaaccgtgcaaaggaaactggaaacttttccccgctgggtagagcatgttgctgatactcttctgttttcaagggaaacaatcacattgtttgattccaaatggtaaatgaacactcactattcttcaggcttcagtaaatctttttttcttccttcatatatatatacacaacacacacacacatatgtatatctatacacacatgtgtgttgtgtatatgcatgtgtgtgtgtgtgcgtgtgtgtatagttttagctccaagccaagcaagtttgtgtttggatagaggggaacttaactattaactacaagttgtatgtctgtggtatcttgattttcccatttctaaagatgaatttcacaaagccataaagcgtgaaattagagctggacttaagactcattggccgaccatcctgtgtcctggcctggccctgcagtaagaagcgtgtctgggtctggagaagggtgcttccgagagtgtgcaggtggcccttccccttggaggcgagaagagagaatgtgctgtctatcttcctggttttcagtccacagagtcggtagaccaggggttacgtgactggggaaaatctcacatctccttgtctgaaaacatttcccctgctgttctctttctaacatgttgtggtaaatctgttcagatactgctcatctgactgttttgtacatgtgacaattgccttaaaacctagcacagtcctcagaaatgaataccgtgtttccactggaaaaaaaaaaaaaaaaaaaaaaaaaaaaaaaaaaaaaaaaaa

SEQ ID NO: 29342 - DNA, 5446 bp, Homo Sapiens
ccggtgccgcagcagcggcgggtggctgtcgctgccctgccctgcacggggcagggcggagcgggctgagcagcccgggcgcgatgcgttgagcgctcggagggccaaccgccggtccccttggcggcaaccggcggcacccatggaaccactgggcaactggaggagcctgcgggcgccactgcctccgatgctgttgctgctgctcctgcaggtggcggggcccgtgggcgccctggcggagaccttgctgaacgcgccgagggccatgggcaccagttccagcccgcctagccctgcgagcgtggtggctcccggaacgacgctgttcgaggagagccggctgcctgtgtttacgctggattacccccacgtgcagatccccttcgagatcaccctttggatcctgctggcctccctggccaagattggcttccatctgtatcacaagttgcccacaatagtgcctgagagctgccttcttataatggttggacttctactaggtgggattatttttggtgttgatgagaagtctccccctgcaatgaagactgatgtatttttcttgtacctcctcccacccatcgtgctggatgccggctatttcatgcccactcgcccattctttgagaacattggcacgattttctggtatgctgtggtagggacactttggaattccattggcattggggtgtctttgtttggtatctgccagatcgaagcattcggcctcagcgacatcactttgctccagaacctgctctttggcagcttaatctcagctgtcgatcctgtggctgtgcttgctgtctttgagaacattcacgtcaatgagcagctctacatcctggtctttggagagtccctgctgaatgatgcagtaacagtggtcctgtacaacttgttcaagtcgttttgccagatgaaaaccattgagaccattgatgtgtttgcaggaatcgccaacttctttgttgtgggaatcggtggggtgctgattggcatcttcttgggctttatagcggcatttactactcgattcacccataatatccgagtgatcgagccactgtttgttttcctgtacagttatttgtcctacatcacagctgaaatgtttcacctctcaggcatcatggcaatcactgcttgtgcaatgactatgaataagtacgtagaagaaaatgtatctcagaaatcctacacgaccatcaagtacttcatgaagatgctgagcagtgtcagcgaaaccttgatcttcatcttcatgggtgtgtctaccgtgggcaagaaccacgagtggaactgggccttcgtctgcttcaccctggccttctgcctcatgtggcgagccctgggtgtttttgtcctgactcaggtcattaataggttccggaccattcccctgacctttaaggaccagttcatcattgcctatggaggacttcgaggtgccatctgttttgcgttagtgtttctccttcctgctgctgtgtttcctcggaaaaaattgtttattacggctgccattgttgtcatattctttactgtcttcattctgggaataactattcgaccactggtggagtttcttgatgtcaagaggtccaataagaaacaacaagctgtcagtgaagaaatctattgtcggttgtttgatcatgtgaagactggaattgaagatgtttgtggacattggggtcacaacttttggagagacaagtttaagaagtttgatgataaatatctgcggaagcttttgattcgggaaaaccaaccaaagtcaagtattgtatctttatataaaaagcttgaaataaaacatgccattgagatggcagagactgggatgataagtactgtccctacatttgcatctctaaatgattgtcgtgaagaaaaaataaggaaggtcacgtccagtgaaactgatgaaattcgagaactcttatcaagaaatctctatcaaatccgtcagcgaactttatcctacaacagacacagtctgacagccgacacaagtgagagacaagccaaggagattctgattcgccggcgacacagtttgcgagaaagcattaggaaggacagcagcttgaatcgagaacacagggcttccacttcaacctcccgatatttatccttacctaaaaatacgaagcttccagaaaagctacaaaagaggaggactatttctattgcagatggcaatagcagcgactcagacgcagatgccgggaccaccgtgctcaatttgcagcccagagccaggcgcttcttgccagaacagttctccaagaaatccccccagtcctataaaatggaatggaagaatgaggtagatgttgattctggccgagatatgcccagcacccccccaacaccccacagcagagaaaagggcacccagacgtcaggcttactacagcagccccttctctctaaagaccagtctggctcagagagggaagacagtttgactgaaggcatcccgcccaagccgccaccacggctggtctggagggcatcggaacctggaagccggaaagcccgatttgggagtgagaagccttaagagaagcagcgaaagcagatctgagtgtctgacccaggacagctgtggtttgtcactctgaaacctgatgcaacagtggaatccatgtaaaactctctgtgcatctaaatacttctggagggcgacagattcatgccacggataaatgaggcaaatccgaagaaaaggaaaatcgaataaaaaatagtcccacaaaataccttttgtgactaatgggtagcaatcgtattatttgctggcctgaagagaaaaaatggtaatgtgtgcctttattgaacttgaatgacagaacttgaaatttttaacacatccttcttggtgaagattttaatatattacttatatgcttcaaattttatttatgaaaaaatatgtatatctgtaatcagttgttaagtgaatggcactaaaagtatcgagaacagctttctttcccaggggtgaaggatggcgctcgggggtgactcctaagctcagcgtggaagcttttccctgtcctgacccgatggagcagccggtaagtgaagagcacagctggaagcagagacaccttatgactcaaactgggcaaacaatcggaacgtcatgcagaaggaatggcctgactcctgcagtgcagattggaggccccagaactcctatgaactactgagagtctactggtttttaacttgttcctctgtctactgtgtgtttgggggtgacatctaaattccatttcttcttcttgtttaaatggtgcagagagaaaggttgcccagacatccaccagcttactgtgttgacagatttgggagcagcttttgatgaagttccacccatgagggtccatgtggcaagtagggccacagggcagcacctggttacaacttgctggtgggttttatgttgtgcaatactaggaggaggaggcaggtgatctatgctgatctatgatcacctgcttcagtagaatttttctgtagagtgttgtttgaattttgagcctccaggttagaggctccaagcagacaaagaagaaagtttgtagacacaatattctaacattgcacaagttgatgagatatcaagttttgaatattattcaggaagcactttggagaatgtgggagtcctactgttttgcactagtctgtaatttgttacctctccccattcgataatatagtaactcagaattttcatataaaattgaattctactcattagagtactttttaaaagtacagcagaaagaaaagaagtggaacataagcattcaagattaatatttgattctctatctcttaactgtagattttattggcctgttttttttttctaaataattctttaaaacttgactggaacatgcctctgcatttctgagtgtagaaattaaatgaagccactcacagtcctttgatttcccactgaagataccccaaaggatgcaagtgcctacagtattatcaggaggagaacatgaaaatattaagacaaaaatcctcagcagttgttctccaccccttctccacctccaccagcaaggagaagtcaatctacacttttttctcatgttctaaagtcttagaatactgctggattgttgagcatgagacagagcaaaggttagatacacaaggtacaagttcataggagcacaattccttgattcagggaaagtagcacagaatgcaatttgaaaactacaggcttaggactctgtgccaaaaatctctattttaaatgaaaatatttatataaaaatacatttattctgcttaacacaaattaaaactgacataaaattttatgataataacatgattcaagaaatgtgatgtagatttttgagaatgccaaaaatcaggtttcagaaaagctacagtatgaaatctgaaaagcaacagaaattgaaagtgaccttaaagaataaatttcctaatttttcccagtttcctatgtttataactattataaagagtttaactttctggaactgaaggagaaaacatgaaaatgtttatattgcttcttgttaagcaggtagaccaaattccgctttcagtaattcatccatacagaatttggatgactatgtataaaggaaaacttaaatcttaattattatcagtttaaattttttttgtttgttgaatgacaaaggcaataaaaataaatttgactttagctttttttctatactttcctctttttgtaattcttaaattctagtcactagtcattatgagagtattgactaaatattttcacaatctaaatattgtcacaatctaaatttctgtagtacagagagccgtagccctttgtaaaggctttcgttcgtccaaacaacacttgatccaaccaaagttccaatgtgactgtggatctttgataggtctttggtgttggttgtaacaaaatttgatttgaactacctataaatgaaaagtcggggtttattactttatatgtaatgctgagaggagactgttgggaacagttatgtcaatgagcaaactagaaattggcttcaaagtctgatacttttaaaagcatgtgttttgtgtatatgctcacaaaatgtctgtgaagagatttctttcagcttttgctcagctttatggtggggtgtactgttttatctgggcggtgagggtattgatttacataaaaactgtagacaaacacagtacgagtctcagcacgttttgcatttattgtactgcccaaattgtttttatgttaaaagtcacgtttcataatctgcaatatttttgtcaaagtgcacactgtactttcttcttaaaaacgtgattaaagagatcactttgtccggatgaagcagctgttggcattatccgctgaggcttgaaaaaa

SEQ ID NO: 29343 - DNA, 2677 bp, Homo Sapiens
ctgctgagcagaagctgaaacacagaattctaagcgttgctgagacccactgacctgcagacctcatagtgggtgcccaggatgttgtcctacggagagaggctggggtcccctgctgtctccccactcccagtccgtggggggcatgtgatgcgagggacggcctttgcctacgtgcccagccctcaggtcctacacaggatcccggggacctctgcctatgccttccccagcctgggccctgtggcccttgctgagcacacctgcccctgtggggaggtcctggagcgccatgaaccactgcctgccaagctggccctggaggaggagcagaagccagagtccaggctggtccccaagctgcgccaggctggcgccatgctgctcaaggtgccactgatgctcaccttcctctacctcttcgtctgctccctggacatgctcagctcggccttccagctggctggagggaaggtggctggtgacatcttcaaggataacgccatcctgtccaacccggtggccgggctggtggtggggatcctggtgaccgtgctggtgcagagctccagcacctccacatccatcatcgtcagcatggtctcctctggcttgctggaggtgagctctgccatccccatcatcatgggctccaacatcggcacctctgtcaccaacaccatcgtggccctgatgcaggcgggggacaggactgacttccggcgggccttcgcgggggccacggtgcatgactgctttaactggctgtcagtgctggtcctgctgcccctggaggctgccactggctacctgcaccacatcactcgacttgtggtggcctccttcaacatccatggtggccgtgatgctcctgacctgctcaagatcatcacagagcccttcacgaagctcatcatccagctggacgagtctgtgataaccagcattgccactggtgatgagtccctgaggaaccacagtctcatccagatctggtgccacccagactccttacaggctcccacctccatgtccagagcagaggccaactccagccagacccttggaaatgccaccatggagaaatgcaaccacatctttgtggacactggcctaccggacctggctgtggggctcatcctgctggcaggagccctggtgctgctgtgcacctgcctcatcctcctagtcaagatgctcaactccctgctcaagggccaagtggccaaggtcatccagaaggtcatcaatacggacttccctgcccccttcacctgggtcacaggctactttgccatggtggtgggcgccagcatgaccttcgtggtccagagcagttctgtgttcacctcggccatcaccccactcatcggtcttggtgtgatcagcattgagagggcctacccgctcacactgggttccaacatcggcaccaccaccacggccatcctggctgccctggccagccccagggagaagctgtccagcgctttccagattgccctctgtcacttcttcttcaacatctcgggtatccttctgtggtacccggtgccctgcacacgcctgcccatccgcatggccaaggcgctggggaaacgcacggccaagtaccgctggtttgccgtcctctatctccttgtctgcttcctgctgctgccctcactggtgtttggcatctccatggcaggctggcaggtcatggtaggtgtgggcacgcccttcggggccctgctggccttcgtggtgctcatcaatgtcctgcagagtcggagtcccgggcacctgcccaagtggttacagacatgggacttcctgcctcgctggatgcactccctgaagcccctggaccacctcatcacccgcgccaccctatgctgtgccaggcctgagccccgctcacccccgctgccccccagggtcttcctggaggagctaccccctgccacaccctccccccgtcttgcactgcctgctcaccacaatgccacccgcctctaggctgtgggcccagactacagcctggaatggggaaggcctggggtggaaaggcaggggagggagggtgtgtgtaggtatgtgcatgtgcctgtgccaccctgggtgccagtctctccttctgtagctccgcaaagctctgggcttgtgtgagagtgtcggtgtgtgtgcatgtgtgggggtgagtctgcatgtgcacctgtcatgtgtagaagcttgtatttgtgtacaggtgtgccagcccatgcaggtgtacacagacacacctgtgggaggctgtgtgcaggctgcaggatatctgggtatgatttcaggtcctctgcacgtgtacacatgactaggataggcaggagtaagggtgggtctgggtatatgactgtgcagctgtttgtgcatagatgttggtgcctgcgttactgaatttgcacacctccttgccaccttccttcctccaagataccatctcctcatcctaacccaggtcttcggcaccaccacaattaattcccttcccaacacttgcctgatggaaaaaaaacaaaggaattaaaactctcctcaggcaaaaaaaaaaaaaaaaaaaaaaaaaaaaaaaaaaaaaaaaaaaaaaaaaaaaaaaaaaaaaaaaaaaaaaaaaaaaaaaaaaaaaaaaaaaaaaaaaaaaaaaaaaaaaaaaaaa

SEQ ID NO: 29344 - DNA, 3252 bp, Homo Sapiens
gcggcccaggcccgcaaccttccctggtcgtgcgccctatgtaaggccagccgcggcaggaccaaggcggcggtgtcagctcgcgagcctaccctccgcggacggtcttgggtcgcctgctgcctggcttgcctggtcggcggcgggtgccccgcgcgcacgcgcaaagcccgccgcgttccccgaccccaggccgcgctctgtgggcctctgagggcggcatgcgggactacgacgaggtgaccgccttcctgggcgagtgggggcccttccagcgcctcatcttcttcctgctcagcgccagcatcatccccaatggcttcaccggcctgtcctccgtgttcctgatagcgaccccggagcaccgctgccgggtgccggacgccgcgaacctgagcagcgcctggcgcaaccacactgtcccactgcggctgcgggacggccgcgaggtgccccacagctgccgccgctaccggctcgccaccatcgccaacttctcggcgcttgggctggagccggggcgcgacgtggacctggggcagctggagcaggagagctgtctggatggctgggagttcagtcaggacgtctacctgtccaccattgtgaccgagtggaacctggtgtgtgaggacgactggaaggccccactcacaatctccttgttcttcgtgggtgtgctgttgggctccttcatttcagggcagctgtcagacaggtttggccggaagaatgtgctgttcgtgaccatgggcatgcagacaggcttcagcttcctgcagatcttctcgaagaattttgagatgtttgtcgtgctgtttgtccttgtaggcatgggccagatctccaactatgtggcagcatttgtcctggggacagaaattcttggcaagtcagttcgtataatattctctacgttaggagtgtgcatattttatgcatttggctacatggtgctgccactgtttgcttacttcatccgagactggcggatgctgctggtggcgctgacgatgccgggggtgctatgcgtggcactctggtggttcatccctgagtccccccgatggctcatctctcagggacgatttgaagaggcagaggtgatcatccgcaaggctgccaaagccaatgggattgttgtgccttccactatctttgacccgagtgagttacaagacctaagttccaagaagcagcagtcccacaacattctggatctgcttcgaacctggaatatccggatggtcaccatcatgtccataatgctgtggatgaccatatcagtgggctattttgggctttcgcttgatactcctaacttgcatggggacatctttgtgaactgcttcctttcagcgatggttgaagtcccagcatatgtgttggcctggctgctgctgcaatatttgccccggcgctattccatggccactgccctcttcctgggtggcagtgtccttctcttcatgcagctggtacccccagacttgtattatttggctacagtcctggtgatggtgggcaagtttggagtcacggctgccttttccatggtctacgtgtacacagccgagctgtatcccacagtggtgagaaacatgggtgtgggagtcagctccacagcatcccgcctgggcagcatcctgtctccctacttcgtttaccttggtgcctacgaccgcttcctgccctacattctcatgggaagtctgaccatcctgacagccatcctcaccttgtttctcccagagagcttcggtaccccactcccagacaccattgaccagatgctaagagtcaaaggaatgaaacacagaaaaactccaagtcacacaaggatgttaaaagatggtcaagaaaggcccacaatccttaaaagcacagccttctaacatcgcttccagtaagggagaaactgaagaggaaagactgtcttgccagaaatggccagcttgtgcagactccgagtccttcagtgacaaaggcctttgctgtttgtcctcttgacctgtgtctgacttgctcctggatgggcacccacactcagaggctacatatggccctagagcaccaccttcctctagggacactggggctacctacagacaacttcatctaagtcctaactattacaatgatggactcagcacctccaaagcagttaatttttcactagaaccagtgagatctggaggaatgtgagaagcatatgctaaatgtacattttaattttagactacttgaaaaggcccctaataaggctagaggtctaagtcccccacccctttccccactcccctctagtggtgaactttagaggaaaaggaagtaattgcacaaggagtttgattcttaccttttctcagttacagaggacattaactggatcattgcttccccagggcaggagagcgcagagctagggaaagtgaaaggtaatgaagatggagcagaatgagcagatgcagatcaccagcaaagtgcactgatgtgtgagctcttaagaccactcagcatgacgactgagtagacttgtttacatctgatcaaagcactgggcttgtccaggctcataataaatgctccattgaatctactattcttgttttccactgctgtggaaacctccttgctactatagcgtcttatgtatggtttaaaggaaatttatcaggtgagagagatgagcaacgttgtcttttctctcaaagctgtaatgtgggttttgttttattgtttatttgtttgttgttgtatccttttctccttgttatttgcccttcagaatgcacttgggaaaggctggttccttagcctcctggtttgtgtctttttttttttttttttaaacacagaatcactctggcaattgtctgcagctgccactggtgcaaggccttaccagccctagcctctagcacttctctaagtgccaaaaacagtgtcattgtgtgtgttcctttcttgatacttagtcatgggaggatattacaaaaaagaaatttaaattgtgttcatagtctttcagagtagctcactttagtcctgtaactttattgggtgatattttgtgttcagtgtaattgtcttctctttgctgattatgttaccatggtactcctaaagcatatgcctcacctggttaaaaaagaacaaacatgtttttgtgaaagctactgaagtgccttgggaaatgagaaagttttaataagtaaaatgattttttaaatatcaaaaaaaaaaaaaaaa

SEQ ID NO: 29345 - DNA, 5758 bp, Homo Sapiens
tttctgtactctgggtgactcagagagggaagagattcagccagcacactcctcgcgagcaagcattactctactgactggcagagacaggagaggtagatgtccacgcccacagaccctggtgcgatgccccacccagggccttcgccggggcctgggccttcccctgggccaattcttgggcctagtccaggaccaggaccatccccaggttccgtccacagcatgatggggccaagtcctggacctccaagtgtctcccatcctatgccgacgatggggtccacagacttcccacaggaaggcatgcatcaaatgcataagcccatcgatggtatacatgacaaggggattgtagaagacatccattgtggatccatgaagggcactggtatgcgaccacctcacccaggcatgggccctccccagagtccaatggatcaacacagccaaggttatatgtcaccacacccatctccattaggagccccagagcacgtctccagccctatgtctggaggaggcccaactccacctcagatgccaccaagccagccgggggccctcatcccaggtgatccgcaggccatgagccagcccaacagaggtccctcacctttcagtcctgtccagctgcatcagcttcgagctcagattttagcttataaaatgctggcccgaggccagcccctccccgaaacgctgcagcttgcagtccaggggaaaaggacgttgcctggcttgcagcaacaacagcagcagcaacagcagcagcagcagcagcagcagcagcagcagcagcagcaacagcagccgcagcagcagccgccgcaaccacagacgcagcaacaacagcagccggcccttgttaactacaacagaccatctggcccggggccggagctgagcggcccgagcaccccgcagaagctgccggtgcccgcgcccggcggccggccctcgcccgcgccccccgcagccgcgcagccgcccgcggccgcagtgcccgggccctcagtgccgcagccggccccggggcagccctcgcccgtcctccagctgcagcagaagcagagccgcatcagccccatccagaaaccgcaaggcctggaccccgtggaaattctgcaagagcgggaatacagacttcaggcccgcatagctcataggatacaagaactggaaaatctgcctggctctttgccaccagatttaagaaccaaagcaaccgtggaactaaaagcacttcggttactcaatttccagcgtcagctgagacaggaggtggtggcctgcatgcgcagggacacgaccctggagacggctctcaactccaaagcatacaaacggagcaagcgccagactctgagagaagctcgcatgaccgagaagctggagaagcagcagaagattgagcaggagaggaaacgccgtcagaaacaccaggaatacctgaacagtattttgcaacatgcaaaagattttaaggaatatcatcggtctgtggccggaaagatccagaagctctccaaagcagtggcaacttggcatgccaacactgaaagagagcagaagaaggagacagagcggattgaaaaggagagaatgcggcgactgatggctgaagatgaggagggttatagaaaactgattgatcaaaagaaagacaggcgtttagcttaccttttgcagcagaccgatgagtatgtagccaatctgaccaatctggtttgggagcacaagcaagcccaggcagccaaagagaagaagaagaggaggaggaggaagaagaaggctgaggagaatgcagagggtggggagtctgccctgggaccggatggagagcccatagatgagagcagccagatgagtgacctccctgtcaaagtgactcacacagaaaccggcaaggttctgttcggaccagaagcacccaaagcaagtcagctggacgcctggctggaaatgaatcctggttatgaagttgcccctagatctgacagtgaagagagtgattctgattatgaggaagaggatgaggaagaagagtccagtaggcaggaaaccgaagagaaaatactcctggatccaaatagcgaagaagtttctgagaaggatgctaagcagatcattgagacagctaagcaagacgtggatgatgaatacagcatgcagtacagtgccaggggctcccagtcctactacaccgtggctcatgccatctcggagagggtggagaaacagtctgccctcctaattaatgggaccctaaagcattaccagctccagggcctggaatggatggtttccctgtataataacaacttgaacggaatcttagccgatgaaatggggcttggaaagaccatacagaccattgcactcatcacttatctgatggagcacaaaagactcaatggcccctatctcatcattgttcccctttcgactctatctaactggacatatgaatttgacaaatgggctccttctgtggtgaagatttcttacaagggtactcctgccatgcgtcgctcccttgtcccccagctacggagtggcaaattcaatgtcctcttgactacttatgagtatattataaaagacaagcacattcttgcaaagattcggtggaaatacatgatagtggacgaaggccaccgaatgaagaatcaccactgcaagctgactcaggtcttgaacactcactatgtggcccccagaaggatcctcttgactgggaccccgctgcagaataagctccctgaactctgggccctcctcaacttcctcctcccaacaatttttaagagctgcagcacatttgaacaatggttcaatgctccatttgccatgactggtgaaagggtggacttaaatgaagaagaaactatattgatcatcaggcgtctacataaggtgttaagaccatttttactaaggagactgaagaaagaagttgaatcccagcttcccgaaaaagtggaatatgtgatcaagtgtgacatgtcagctctgcagaagattctgtatcgccatatgcaagccaaggggatccttctcacagatggttctgagaaagataagaaggggaaaggaggtgctaagacacttatgaacactattatgcagttgagaaaaatctgcaaccacccatatatgtttcagcacattgaggaatcctttgctgaacacctaggctattcaaatggggtcatcaatggggctgaactgtatcgggcctcagggaagtttgagctgcttgatcgtattctgccaaaattgagagcgactaatcaccgagtgctgcttttctgccagatgacatctctcatgaccatcatggaggattattttgcttttcggaacttcctttacctacgccttgatggcaccaccaagtctgaagatcgtgctgctttgctgaagaaattcaatgaacctggatcccagtatttcattttcttgctgagcacaagagctggtggcctgggcttaaatcttcaggcagctgatacagtggtcatctttgacagcgactggaatcctcatcaggatctgcaggcccaagaccgagctcaccgcatcgggcagcagaacgaggtccgggtactgaggctctgtaccgtgaacagcgtggaggaaaagatcctcgcggccgcaaaatacaagctgaacgtggatcagaaagtgatccaggcgggcatgtttgaccaaaagtcttcaagccacgagcggagggcattcctgcaggccatcttggagcatgaggaggaaaatgaggaagaagatgaagtaccggacgatgagactctgaaccaaatgattgctcgacgagaagaagaatttgacctttttatgcggatggacatggaccggcggagggaagatgcccggaacccgaaacggaagccccgtttaatggaggaggatgagctgccctcctggatcattaaggatgacgctgaagtagaaaggctcacctgtgaagaagaggaggagaaaatatttgggagggggtcccgccagcgccgtgacgtggactacagtgacgccctcacggagaagcagtggctaagggccatcgaagacggcaatttggaggaaatggaagaggaagtacggcttaagaagcgaaaaagacgaagaaatgtggataaagatcctgcaaaagaagatgtggaaaaagctaagaagagaagaggccgccctcccgctgagaaactgtcaccaaatccccccaaactgacaaagcagatgaacgctatcatcgatactgtgataaactacaaagataggtgtaacgtggagaaggtgcccagtaattctcagttggaaatagaaggaaacagttcagggcgacagctcagtgaagtcttcattcagttaccttcaaggaaagaattaccagaatactatgaattaattaggaagccagtggatttcaaaaaaataaaggaaaggattcgtaatcataagtaccggagcctaggcgacctggagaaggatgtcatgcttctctgtcacaacgctcagacgttcaacctggagggatcccagatctatgaagactccatcgtcttacagtcagtgtttaagagtgcccggcagaaaattgccaaagaggaagagagtgaggatgaaagcaatgaagaggaggaagaggaagatgaagaagagtcagagtccgaggcaaaatcagtcaaggtgaaaattaagctcaataaaaaagatgacaaaggccgggacaaagggaaaggcaagaaaaggccaaatcgaggaaaagccaaacctgtagtgagcgattttgacagcgatgaggagcaggatgaacgtgaacagtcagaaggaagtgggacggatgatgagtgatcagtatggacctttttccttggtagaactgaattccttcctcccctgtctcatttctacccagtgagttcatttgtcatataggcactgggttgtttctatatcatcatcgtctataaactagctttaggatagtgccagacaaacatatgatatcatggtgtaaaaaacacacacatacacaaatatttgtaacatattgtgaccaaatgggcctcaaagattcagattgaaacaaacaaaaagcttttgatggaaaatatgtgggtggatagtatatttctatgggtgggtctaatttggtaacggtttgattgtgcctggttttatcacctgttcagatgagaagatttttgtcttttgtagcactgataaccaggagaagccattaaaagccactggttattttatttttcatcaggcaattttcgaggtttttatttgttcggtattgtttttttacactgtggtacatataagcaactttaataggtgataaatgtacagtagttagatttcacctgcatatacatttttccattttatgctctatgatctgaacaaaagctttttgaattgtataagatttatgtctactgtaaacattgcttaatttttttgctcttgatttaaaaaaaagttttgttgaaagcgctattgaatattgcaatctatatagtgtattggatggcttcttttgtcaccctgatctcctatgttaccaatgtgtatcgtctccttctccctaaagtgtacttaatctttgctttctttgcacaatgtctttggttgcaagtcataagcctgaggcaaataaaattccagtaatttcgaagaatgtggtgttggtgctttcctaataaagaaataatttagcttgacaaaa

SEQ ID NO: 29346 - DNA, 5750 bp, Homo Sapiens
gctgggcggggccgggaagcggcagtggcggctacgcgcgcgggggtgcgcgcgggaacgaccgggaaacaccgcgagggccggggtgggccaggctgtggggacgacgggctgcgacgatggccgcagcggcgggcggcggcgggccggggacagcggtaggcgccacgggctcggggattgcggcggcagccgcaggcctagctgtttatcgacggaaggatgggggcccggccaccaagttttgggagagcccggagacggtgtcccagctggattcggtgcgggtctggctgggcaagcactacaagaagtatgttcatgcggatgctcctaccaataaaacactggctgggctggtggtgcagcttcttcagttccaggaagatgcctttgggaagcatgtcaccaacccggccttcaccaaactccctgcaaagtgtttcatggatttcaaagctggaggcgccttatgtcacattcttggggctgcttacaagtataaaaatgaacagggatggcggaggtttgacctacagaacccatctcgaatggatcgtaatgtggaaatgtttatgaacattgaaaaaacattggtgcagaacaattgtttgaccagacccaacatctacctcattccagacattgatctgaagttggctaacaaattgaaagatatcatcaaacgacatcagggaacatttacggatgagaagtcaaaagcttcccaccacatttacccatattcttcctcacaagacgatgaagaatggttgagaccggtgatgagaaaagagaagcaagtgttagtgcattggggcttttacccagacagctatgatacttgggtccatagtaatgatgttgatgctgaaattgaagatccaccaattccagaaaaaccatggaaggttcatgtgaaatggattttggacactgatattttcaatgaatggatgaatgaggaggattatgaggtggatgaaaataggaagcctgtgagttttcgtcagcggatttcaaccaagaatgaagagccagtcagaagtccagaaagaagagatagaaaagcatcagctaatgctcgaaagaggaaacattcgccttcgcctccccctccgacaccaacagaatcacggaagaagagtgggaagaaaggccaagctagcctttatgggaagcgcagaagtcagaaagaggaagatgagcaagaagatctaaccaaggatatggaagacccaacacctgtacccaatatagaagaagtagtacttcccaaaaatgtgaacctaaagaaagatagtgaaaatacacctgttaaaggaggaactgtagcggatctagatgagcaggatgaagaaacagtcacagcaggaggaaaggaagatgaagatcctgccaaaggtgatcagagtcgatcagttgaccttggggaagataatgtgacagagcagaccaatcacattattattcctagttatgcatcatggtttgattataactgtattcatgtgattgaacggcgtgctcttcctgagttcttcaatggaaaaaacaaatccaagactccagaaatatacttggcatatcgaaattttatgattgacacgtatcgtctaaacccccaagagtatttaactagcactgcttgtcggaggaacttgactggagatgtgtgtgctgtgatgagggtccatgccgggggagagcagtggggactcgttaattaccaagttgacccggaaagtagacccatggcaatgggacctcctcctactcctcattttaatgtattagctgataccccctctgggcttgtgcctctgcatcttcgatcacctcaggttcctgctgctcaacagatgctaaattttcctgagaaaaacaaggaaaaaccagttgatttgcagaactttggtctccgtactgacatttactccaagaaaacattagcaaagagtaaaggtgctagtgctggaagagaatggactgaacaggagacccttctactcctggaggccctggagatgtacaaggatgattggaacaaagtgtcggaacatgttggaagtcgtactcaggatgaatgcatcctccactttttgagacttcccattgaggacccataccttgagaattcagatgcttcccttgggcctttggcctaccagcctgtccccttcagtcagtcaggaaatccagttatgagtactgttgcttttttggcatctgtggtggaccctcgcgtggcatctgctgcagcaaaagcggctttggaggagttttctcgggtccgggaggaggtaccactggaattggttgaagctcatgtcaagaaagtacaagaagcagcacgagcctctgggaaagtggatcccacctacggtctggagagcagctgcattgcaggcacagggcccgatgagccagagaagcttgaaggagctgaagaggaaaaaatggaagccgaccctgatggtcagcagcctgaaaaggcagaaaataaagtggaaaatgaaacggatgaaggtgataaagcacaagatggagaaaatgaaaaaaatagtgaaaaggaacaggatagtgaagtgagtgaggataccaaatcagaagaaaaggagactgaagagaacaaagaactcactgatacatgtaaagaaagagaaagtgatactgggaagaagaaagtagaacatgaaatttccgaaggaaatgttgccacagccgcagcagctgctcttgcctcagcggctaccaaagccaagcacctggctgcagtggaagaaagaaagatcaagtccctggtagctctcttggttgagacacaaatgaagaaactagagatcaaacttcgacattttgaagagctggaaactatcatggacagagagaaagaagctctagaacaacagaggcagcagttgcttactgaacgccaaaacttccacatggaacagctgaagtatgctgaattacgagcacgacagcaaatggaacagcagcagcatggccagaaccctcaacaggcacaccagcactcaggaggacctggcctggccccacttggagcagcagggcaccctggcatgatgcctcatcaacagccccctccctaccctctgatgcaccaccagatgccaccacctcatccaccccagccaggtcagataccaggcccaggttccatgatgcccgggcagcacatgccaggccgcatgattcccactgttgcagccaacatccacccctctgggagtggccctacccctcctggcatgccaccaatgccaggaaacatcttaggaccccgggtacccctgacagcacctaacggcatgtatccccctccaccacagcagcagccaccgccaccaccacctgcagatggggtccctccgcctcctgctcctggcccgccagcctcagctgctccttagcctggaagatgcagggaacctccacgcccaccaccatgagctggagtggggatgacaagacttgtgttcctcaactttcttgggtttctttcaggatttttcttctcacagctccaagcacgtgtcccgtgcctccccactcctcttaccacccctctctctgacactttttgtgttgggtcctcagccaacactcaaggggaaacctgtagtgacagtgtgccctggtcatccttaaaataacctgcatctcccctgtcctggtgtgggagtaagctgacagtttctctgcaggtcctgtcaactttagcatgctatgtctttaccatttttgctctcttgcagttttttgctttgtcttatgcttctatggataatgctatataatcattatctttttatctttctgttattattgttttaaaggagagcatcctaagttaataggaaccaaaaaataatgatgggcagaagggggggaatagccacaggggacaaaccttaaggcattataagtgaccttatttctgcttttctgagctaagaatggtgctgatggtaaagtttgagacttttgccacacacaaatttgtgaaaattaaacgagatgtggaaggagaacctcagtgattttattccctagtgaggcctctgagggcctccacactgcctggcagaacataccactgaactagtatgtgctagaggagggcacaaacatccgctccttccctaggcctgctggctctggttttctatgcagatgattcattggattgggggtgagtgttttgtttttctgggggcagtgtgagctttgagggttggaatattgggaggcattccttagtttcctcaactagcctggaaagttaggagtctagggtaattaccccccaatgagtctagcctactattcactgctttgtgtgcatttttttctccctctttaaaaaaccctttaaaagaaaaaaaaaagtagatagtgctaaatattttagctcatgaaacttggttaggatggctgggggtacaagtccccaaactacctcttgttacagtagccagggagtggaatttcgtcaaccggtacttttaaggttaggatgggacgggaaaagtgaagcaggatattagctccttataccttctcccttccatttctgagatctcacattccatctatcacagggttttcaaagagatgctgagggtaacaaggaactcacttggcagtcagagcatcatgctttgaggtttggggtgctcaggctgggagggtagaatgccattccagaggacaagccacaaaaatgccttaatttgagctcgtatttacccctgctgataagtgacttgagagttcccggttttttcctcttgtccttccctcccttctgtccttccatgtgtggggaaagggtgtttttggtagagcttggtttccaaagcgcctggctttctcacttcacattctcaagtggcagtttcattatttagaatgcaaggtggacatcttttggatatctttttctatatattttctaaagctttacatatgagagggtatagggaggtgtttataaaacacttgagaacttttttccttaatatcagaaagcaaaaaaataaaaccacaattgagatttgcctttcaaaccctcaggtttgcctctaaccaggtgtccctggtcaccatcagagtactggaatacgggaaccgaggagaccttggtccttttgtttttgttctggactcttgggagtggaaatgagaatgagtttattctcactggagcttagttccaatgcatttggctccagaaagaccccagtgccttttgacaatggccagggttttacctacttcctgccagtctttcccaaaggaaactcattccaaatacttcttttttcccctggagtccgagaaggaaaatggaattctggttcatactgtggtcccttgtaacctcaggtctttaatgtgatcactttcaaatttaaaagatccaggtggaaatatttttactatagtaataattctacaaaatacctgaattcttaacactgttatatttcagtataagtggtggctttttcttttcatgtctttgatctggttttattcctgtaattcagccacctgattttgtgaggggggggaataatatgtggtttttgtacaaacatgtttctcagtgtgttgttattttggaaaaaatgaggggagggagtttggcaagaatggagaaaatgaatgaagaaggcctaatctctctctttttcagtgaataaatggaacaccatttc

SEQ ID NO: 29347 - DNA, 2345 bp, Homo Sapiens
cccttctgacccaccccgctaggtagtcccacacggcggccctcggctcccgggccccgccccggcctcctgcatttgcccgaggccccctccccagcactggccacaccccagggtagccccgcccccagagctcctcccccagcggccggggtagggtggcggctggcccagccgggcccccgctgccctctgccctgggcgcttggtcggagcgggctgggcaaagcgggacagggcgagcgcggcggcccgggggctcggaggcgaagatggcgtccggcaggcgcgccccgcgcaccgggctgctggagctgcgcgccggggcgggctcgggggccggcggcgagcgatggcagcgggtgctgctgagtctggcggaggacgtgctgaccgtgagccccgccgacggcgaccctggtcccgagcccggcgctccgcgggagcaggagcccgcgcagctcaacggcgccgcggagccgggcgccgggcccccgcagctgccagaggcgctactgctccagcggcgccgcgtgacggtgcgcaaggccgacgccggtgggctgggcatcagcatcaaaggcggccgggagaacaagatgcctattctcatttccaagatcttcaagggattggcagctgaccagacagaggccctttttgtgggggatgccatcctgtctgtgaatggggaagacttgtcctctgctacccatgatgaggcggtgcaggtcctcaagaagacaggcaaggaggtggtgctggaggtcaagtatatgaaggacgtctcaccgtatttcaagaactctactggtgggacctcggtcggctgggactcacctcctgcctcaccccttcagcggcagccttcctcccctggccccacaccccggaacttcagcgaggccaaacacatgtccttgaagatggcatatgtctcgaagaggtgcacccccaatgacccggagcccaggtatctggagatctgctcggcagatggtcaagacaccctcttcctgagggccaaggatgaggctagtgcgaggtcgtgggcgactgccatccaagcccaggtcaatactctgacgccgcgggtcaaggatgagctgcaggcactgttggcagccaccagcacagctgggagccaggacatcaagcagattggctggctaactgagcagctgcccagtgggggcacagcccccaccctggccctgctaactgaaaaggaactgctcctctacttgtctctccccgagacccgcgaggccctgagccggccagcccgtactgccccactcatcgccaccagactggtgcactcaggcccctccaagggctcagtgccctacgatgcagagctctcttttgccctgcgcacgggcacgcgtcacggtgtggacactcacctgttcagcgtggagtcaccgcaggagctggctgcctggacccgccagcttgtggatggctgtcaccgggccgccgagggtgtgcaggaggtgtctacagcctgcacgtggaatgggcgtccctgcagcctgtctgtgcacatcgacaagggcttcacactgtgggcggctgagccaggtgcagcccgagctgtgctcctgcgacagcccttcgagaagctgcagatgtcttcagatgacggtgccagtctccttttcctggattttggaggtgctgaaggcgagatccagctggacctgcactcgtgtcccaaaaccatagtcttcatcatccactccttcctgtcggccaaagtcacccgcctcgggctgttggcctagaagtcgccggatgcactagccctgaagaggggtgtccatgacatggcctgagctgggcctccaccgactgcctgctcacccctgggctgagggaagggagaggagaggaacaagggcctccgaaaccccaaccctgagggagactggattggtcttggggcccaggacccagacgcaggacagagtggactctgcctgtgatggggtggccttcctgctgcccccctccaccagtgccttttgcagagagatattttgtgtacacagaagccattccgagtctgggacctgcccctgtgcggatcctgaccccagccaacagctgagctgccgggcctcctcgaggcccctaagccacccccagaggtcccatctgaagctggagtaccctggggtcagcagcaagagaaagaagaggagattttctgtttgtttttcccctcagccctgccaccgtggggagtctggtttttctcttcatcctgtctctctcctccttactcttggataaataaacagcctgtgagcacacaggcagcccggcccagtgaaaaa

SEQ ID NO: 29348 - DNA, 3920 bp, Homo Sapiens
ttttgtgtttcccgcacagtcaatcaaaataggaaaaaaaaatccccggaccgctccggccgtgtccgccgccgcttcccgcatcctctcccgccgccgccgccttcgctcctcaccatgtgtaaggcggcggggagccccgcctgaggtgccctaaacacactatgaccgctcccgaaaagcccgtgaaacaagaggaaatggctgccttggacgtggatagcggcggcggcggtggcggcggcggcggccacggcgagtatctgcagcagcagcaacagcacggaaacggtgcggtggcggcggcagcggcggcccaggacactcagccgtcaccgctcgctctgctggccgctacctgcagcaagatagggccgccatcgccgggcgacgacgaggaggaggcggccgccgcagccggggcccccgccgccgccggagcgacaggtgatttggcttctgcacagttaggaggagcaccaaaccgatgggaggttttgtcagccacacctacaactataaaagatgaagctggtaatctagtccagattccaagtgctgctacttcaagtgggcagtatgttcttccccttcagaatttgcagaatcaacaaatattttccgttgcaccaggatcagattcatcaaatggtacagtgtccagtgttcaatatcaagtgataccacagatccagtcagcagatggtcagcaggttcaaattggtttcacaggctcttcagataatgggggtataaatcaagaaagcagtcaaattcagatcattcctggctctaatcaaaccttacttgcctctggaacaccttctgctaacatccagaatctcataccacagactggtcaagtccaggttcagggagttgcaattggtggttcatcttttcctggtcaaacccaagtagttgctaatgtgcctcttggtctgccaggaaatattacgtttgtaccaatcaatagtgtcgatctagattctttgggactctcgggcagttctcagacaatgactgcaggcattaatgccgacggacatttgataaacacaggacaagctatggatagttcagacaattcagaaaggactggtgagcgggtttctcctgatattaatgaaactaatactgatacagatttatttgtgccaacatcctcttcatcacagttgcctgttacgatagatagtacaggtatattacaacaaaacacaaatagcttgactacatctagtgggcaggttcattcttcagatcttcagggaaattatatccagtcgcctgtttctgaagagacacaggcacagaatattcaggtttctacagcacagcctgttgtacagcatctacaacttcaagagtctcagcagccaaccagtcaagcccaaattgtgcaaggtattacaccacagacaatccatggtgtgcaagccagtggtcaaaatatatcacaacaggctttgcaaaatcttcagttgcagctgaatcctggaacctttttaattcaggcacagacagtgaccccttctggacaggtaacttggcaaacgtttcaagtacaaggggtccagaacttgcagaatttgcaaatacagaatactgctgcccaacaaataactttgacgcctgttcaaaccctcacacttggtcaagttgcggcaggtggagccttcacttcaactccagttagtctaagcactggtcagttgccaaatctacaaacagttacagtgaactctatagattctgctggtatacagctacatccaggagagaatgctgacagtcctgcagatattaggatcaaggaagaagaacctgatcctgaagagtggcagctcagtggtgattctaccttgaataccaatgacctaacacacttaagagtacaggtggtagatgaagaaggggaccaacaacatcaagaaggaaaaagacttcggagggtagcttgcacctgtcccaactgtaaagaaggtggtggaagaggtaccaatcttgggaaaaagaagcaacacatttgtcatataccaggatgtggtaaagtctatgggaagacctcacatctgagagctcatctgcgttggcattctggagaacgcccttttgtttgtaactggatgtactgtggtaaaagatttactcgaagtgatgaattacagaggcacagaagaacacatacaggtgagaagaaatttgtttgtccagaatgttcaaaacgctttatgagaagtgaccaccttgccaaacatattaaaacacaccagaataaaaaaggtattcactctagcagtacagtgctggcatctgtggaagctgcgcgagatgatactttgattactgcaggaggaacaacgcttatccttgcaaatattcaacaaggttctgtttcagggataggaactgttaatacttccgccaccagcaatcaagatatccttaccaacactgaaatacctttacagcttgtcacagtttctggaaatgagacaatggagtaaatattacacaaatacttattcattgtggttatttttatacagtagtgagaagaatattgttcctaagttcttagatatctttttattgatgtgcaaaaatttttggattgacagtaacttggttatacatgacactgaaatgccttactttgtatgatattccatagtatattaaaaatggtaaaattgcatgggttttgtaggtacttttggaatctagaagaaatgaaattttaccaagttatataaagagaaaattgaatttaacaatgcgaatggtagtctaaccaaatgcatcaatcctgtgtggtttagtgtaaaaatgagaacatgttggtatttatctattgtaagataaaaaagctggtgggtgaaagaaatcatgttatgataaaaaattttgtaattttcttgatgactggaatttttattatgcataactgacaaatcaagtttccaagcaaatgttacatagtgtaggctttacttagcttatcaatttgtcattttgaagctaattattttaattaggttaactatgtacaatattttaagcattactcttgtaagattttgaaaactacattttaacatggaactctagggatagtcaccttttaaatcctgttgaaaagccatgtttaagatttaatttgccaaaataatgtcttgttaatattctttcaataacgaagttgggcaatataaccaatgtttaaaaaagtttaaaatgtataagttgaggcatttgggtggtaagagaatgttatagtgaattatcccttttcttgactattggaggaccaaaaaaataaggtgtattgcgtcttagcagtgatttttatccaatcttgtttccaaaaaccatgtctcccagggccttaaaagccatcatgtaaattaccagtaaagtgtaacatatgcaaacataacaaaatcacttccatagtgacgatactccaaccatatggatattagtcatagaagaactagaggttttatgatatttttttaagtcttttttttttttgtctaggtagtcagtctgcacttaaatatcaatcattttccttttttgcttcttcccttaaaatttatatgtatccagtacatttaattgagaagcgtatgttttttattatgctgtattttctttttattttttaattattgtttatattttcaattcaaaaatgtacaaaataaagttacattgctggtcttgtaagagctatacagttttcctaaatgtatacctgtaactgcagcagttcacctatttcaaaaatttggaattctgttcatttgttattcttaagaccacctcaaatttaaaggctaccttattgtacgtttaaagtgtattataacagtgtggtagttaataaaacactatttttttttcttttg

SEQ ID NO: 29349 - DNA, 2288 bp, Homo Sapiens
ggagcctcgggaggtggtggagtgacctggccccagtgctgcgtccttatcagccgagccggtcccagctcttgctcctgcctgtttgcctggaaatggccacgcttctccttctccttggggtgctggtggtaagcccagacgctctggggagcacaacagcagtgcagacacccacctccggagagcctttggtctctactagcgagcccctgagctcaaagatgtacaccacttcaataacaagtgaccctaaggccgacagcactggggaccagacctcagccctacctccctcaacttccatcaatgagggatcccctctttggacttccattggtgccagcactggttcccctttacctgagccaacaacctaccaggaagtttccatcaagatgtcatcagtgccccaggaaacccctcatgcaaccagtcatcctgctgttcccataacagcaaactctctaggatcccacaccgtgacaggtggaaccataacaacgaactctccagaaacctccagtaggaccagtggagcccctgttaccacggcagctagctctctggagacctccagaggcacctctggaccccctcttaccatggcaactgtctctctggagacttccaaaggcacctctggaccccctgttaccatggcaactgactctctggagacctccactgggaccactggaccccctgttaccatgacaactggctctctggagccctccagcggggccagtggaccccaggtctctagcgtaaaactatctacaatgatgtctccaacgacctccaccaacgcaagcactgtgcccttccggaacccagatgagaactcacgaggcatgctgccagtggctgtgcttgtggccctgctggcggtcatagtcctcgtggctctgctcctgctgtggcgccggcggcagaagcggcggactggggccctcgtgctgagcagaggcggcaagcgtaacggggtggtggacgcctgggctgggccagcccaggtccctgaggagggggccgtgacagtgaccgtgggagggtccgggggcgacaagggctctgggttccccgatggggaggggtctagccgtcggcccacgctcaccactttctttggcagacggaagtctcgccagggctccctggcgatggaggagctgaagtctgggtcaggccccagcctcaaaggggaggaggagccactggtggccagtgaggatggggctgtggacgccccagctcctgatgagcccgaagggggagacggggctgccccttaagtgtcggtgaatagtgaggctggaggccggaatctcagccagcctccagcaccttccctctcaccatcccactgccccctcgctcccatgtttccacccggcaccctgatcctcacccgaatctcctttttttttttcttttgagacagagtttcgctttgtcgcccaggctggagtgcaatgcacgatctcagttcactgcaacctctgcctcctaagttcaggcgattctcctgcctcagcttcccgagtaactgagattacaggcacccaccaccatgcccagctgcttttttgtatttttggtagagatggggtttcaccatgttggctaggctggtctcaaactcctgacctcaggtgatctacctgcctcagcctcccaaagtgctgagattacagacatgagcctccgcgccttgcctcctcacccacctcttcactctgaatcctcatgaggcttctcagccctggatttcctgctgccatcctcacccagcacccacaactagcgcctgggcagggcagggctggcacctctcaacgtctgtggactgaatgaataaaccctcctcttacaaatgccaaaattcattcagctttgatgataaacactgaggcccaatggcctttatcatctagggagtatgaagaatgagcaagaggctaactcagcgtgagttaccctgggaaaggaaagaagaaatggttcatataggacacacatagataccttcaagggtgtttgtagagttgtttcttaagtagttggtttccttcacagaaagttcttaaactcagaatatacccatccatgcaccccaccagcaatacaaagaccccaaacaaaaaattactatattcttaccctacgcatggcttcctcctcttcttgacgcttttcataatgtgcaaagtcatcaaagattgaggtggtatgcttgaaagtagcaattattttaagcacttgcttagctttttcaagggacg

SEQ ID NO: 29350 - DNA, 4201 bp, Homo Sapiens; identical to SEQ ID NO: 28795

SEQ ID NO: 29351 - DNA, 2963 bp, Homo Sapiens
gttcctccgggagcccaacaccgttcccgcgcggccacgatgatccctccgagcagcccccgcgaggacggcgtggacgggctgcccaaggaggcggtgggcgccgagcaaccgccctctcctgcatccaccagcagccaggaatccaagctccagaaactaaaacgatcactttctttcaagaccaagagtttacggagcaaaagtgctgacaacttcttccagcgaaccaacagcgaagacatgaaactgcaagcacacatggtggctgagatcagccccagctccagcccactccctgctccaggaagcctgacgtccacacccgccagggctggtctgcatccaggtggcaaggctcatgcctttcaggaatacatcttcaagaagcccactttctgtgatgtctgcaaccacatgatagtgggaacaaatgctaagcatggactgcgctgcaaagcctgtaagatgagcatccaccacaagtgcacagatggcctggcaccccagcggtgcatgggcaagctgccaaaggggtttcggcgttactacagctcccccttgctcattcatgaacagtttggctgcattaaagaagttatgcccattgcctgtggcaataaggtggaccctgtctacgagaccctccgcttcggcacctccctggcccagaggacaaagaagggcagctccggcagtggctctgactcacctcacagaacctctacttcagatcttgtggaggttcctgaggaagccaatgggccaggaggcgggtatgacctaaggaaacgcagcaacagcgtgtttacatatccagaaaatggcactgatgatttcagagatccagcgaagaacataaaccaccagggatctctttccaaagacccattacagatgaacacctatgttgccttgtacaaatttgtaccacaggagaatgaagatttggaaatgaggccaggagacataattactcttttagaggattccaatgaagactggtggaaagggaaaattcaagacagaattggcttctttccagccaactttgttcagagactacaacaaaatgagaagatttttagatgtgttagaaccttcattgggtgtaaggaacaggggcagataacactgaaagagaatcagatctgcgtgagttctgaagaagaacaagatggttttatcagagtcctcagtggaaaaaagaaaggcctcatcccccttgatgtactagaaaacatctgattgctggctcctcctccgtttgcagtaggcaagctctgctgcgatgcctctgcctcatctcacactgcgtcaacccaaaggagctgccgcactgacccagccccccaggaaacagtgagacaagaatcaagtatctgagactgtggagtaatagccacaaaacagagggcccactgcacagcatatccaggctgccacaggtggggacgaggctgagagagtcagcaggcagagccagatgccatgcttggcagcagcagtaggactataaaccacagctgtcccccaggatcccactcctttcctgtctgtgtggtgtaagttaacacactggagtgtgctccagtttgcagggtagcccagtgcaaggttcagatccatgtagctaagtattatcctgcttccagacctatgtcaccagtaccaatcagtcagtgtcatcacatttcaggccccaagcaatctctgtgcaaagcatcagaaagacctgcttcccagcccccagcattccagtgctctccaggcttcctctctttgtgattgtgctgtccagagtgtccagcttgttctttctttctcttcagtcctctgagtacatctggtggtgtgcattagatgtgagggctatgttgacatggcatcacctccaaagacctgacctgcctaaagactgatgacaggccatccttcctgctgttctaggtactggcctgggtgacagagcaggacatgagacatagatacagtggggaggagaagtggggaaaggtggagcagagagttcttacttattgaagattatacagccctttcggttatgaagtccctgcttgaaggcaatggacctggggaagagactatcacaaaaagtctccattttcattttacatcctctctattggaggcagcacttttccctcatgctgtcctataggactccactttgaaggttgtgcctacgttgcagggaactaggaacatggaggggaaccaacaacagcatcttagaagaaatgtagccaaattggagtccattcttctttagggcagtatatgaaatcctagcagatgtaaaatggaaaagaatcctaatgcttcttccttcagaaagtagaggaactaggggcccaattagcatcatctaggggaatctctattactctgtacttatactaatgtttacaagaatgcaatatactgtgatgccttcctactcaagcctcctagcattcaaacttccatcctattagtcattaacgtggttaaacttcaattcacaatcaccttggaatcaatgtcagtttgatttattttgttacagagcaataaaatcattagaacaatggtttttaaaagacttaagtggatgcatcctatgcatgtaagcattatttcccaaaccaaagcatcattcatctccatttatttcttttgttcccgctcagtgtgaagttgggaactgagaggggatggctgctggtttcacagaagtttggatgccttactcttatcttaaagccagcatccagaatttcctccctctctgatgccacatgcaaaaccaggtgtacgatgtcaagatggattctttgagagccagggtagatcatatgactgcctttctgtaaaattggatgcctagtacaaatgctctttgcctctaattcagtattccatttaataaaaacaatacagtggctggaaaggagcatcag

SEQ ID NO: 29352 - DNA, 2790 bp, Homo Sapiens
gcggccgccatggacgagcaggcgggtcccggcgtcttcttcagcaacaaccacccgggcgccggcggtgccaaggggctcgggcctctggcggaggctgccgcggccggcgacggggcggctgcggcgggggcggcccgagcccagtacagtctcccggggatcctgcacttcctgcagcacgagtgggcccgcttcgaggtggagagagcccagtgggaggtggagcgggcggagctgcaggcccagattgccttcctgcagggagaaaggaagggccaagaaaatttgaagaaggatcttgtgaggaggatcaaaatgttggagtatgctcttaaacaggaaagagccaaataccacaagttgaaatacgggacagaattgaatcagggagatatgaagcctccaagctatgattctgatgaaggtaatgaaacagaagtgcagccacaacaaaacagccagttaatgtggaaacaaggtcgacaactactcagacagtatctacaggaggtgggttatacagatactattctagatgtgaaatctaaacgagtgcgagctttgttgggcttttcaattgatgtcacggacagggaagatgacaaaaatcaggactcagttgtaaatggcacagaggctgaagttaaagagacagcaatgattgcaaaatctgagttaacagattctgcctccgtgctggataatttcaaattccttgaaagtgcagctgcagatttcagtgatgaagatgaagatgatgatgttgatggaagagagaaaagcgtcattgatacttcaacaattgttaggaaaaaagcattgcctgacagcggtgaagatcgagatacaaaagaagctctaaaggagtttgacttcttggttacatcagaggaaggagacaatgaatctagaagtgcaggcgatggaacagactgggaaaaggaagaccagtgtctcatgcctgaagcctggaatgtggaccagggagtaattaccaaactcaaggaacaatacaaaaaggagagaaaggggaaaaagggggtgaagaggcccaataggtcaaaactacaagatatgcttgctaatttgagagatgttgatgaacttccttcattgcagccatctgtgggttcaccttccagacccagcagctccaggcttcctgaacatgaaattaatagggcagatgaagtggaagcattgacatttcctccttcttctggaaagtcattcatcatgggagcagatgaagcccttgaaagtgaactgggacctggagaactagcaggccttacggtggccaatgaagcagactcactaacttatgatatagcaaacaataaagatgcattgaggaagacatggaaccctaagtttacattgagaagtcactttgatggcatccgagcccttgctttccatcccattgagcctgttttgataacagcatcagaggatcacacattaaaaatgtggaatttacagaaaacagccccagccaaaaagagcacttctcttgatgtagaacctatctatacattcagagcccataaaggtccagtgctttgtgtggtaatgagcagcaatggtgagcagtgttacagtggtggtactgatggactgatccagggctggaataccactaatcccaacatcgacccctatgattcttatgatccttctgttttacgaggccctctgctaggccacacggatgcagtctggggtttggcttatagtgcagcacatcagcgtttgttgtcctgttcagcagatggcactctgcgtttatggaatacaactgaggttgctccagcactaagtgtatttaatgatattaaagaactgggaatccctgcctctgtggatctagtgagcagtgacccgagccatatggtagcatcattcagcaagggatatacaagcatttttaacatggaaacacaacaacgcattctcactttagaatccaatgtagatacaacagccaactcttcctgccaaataaatagagtcatcagtcatcctactctttcgatcagcatcactgctcatgaagacaggcacatcaaattctatgataacaatacaggcaaactgatccactcgatggtagcccacctagaagctgttacaagtttagcagttgatcccaatggcctttacttgatgtctggcagtcatgactgttcaatacgtttatggaatctagaaagtaagacgtgtatccaagaattcacagctcatcgaaaaaagtttgaagaatcgattcatgatgtagctttccacccatccaaatgctatatagccagtgctggagctgacgcactggctaaagtctttgtatgacgcaatgcatcatcttcaccttctagctgtttataagtaatcaactgcacacaagagatacagaagacgagggcaagaatcatctcgtcctgcccttttgttctgctgaaggagcacagagaacatttgttgaagtatagttttgcaattcatatactgttttctaaaactaaggtttgttcaggttgctgcaagctcagctgaatctgtgagcctgaggtctgtttcaaatttctccccaataggcgcctwtatttctgaggtggttctaattcgctaggcaggcctgagcgaatacaagtttagcttgtccctgttgagtaagtagggcatgctacaatggataatttaaaagcttgatagctgggactgaatagaagaaaacgggaaacttagacaagttctccctgagaaatctggttaaaacacattaattat

SEQ ID NO: 29353 - DNA, 2672 bp, Homo Sapiens
aggaagagccgcgggcccggcggctgaggccaccccggcggcggctggagagcgaggaggagcgggtggccccgcgctgcgcccgccctcgcctcacctggcgcaggtggacacctgcgcaggtgtgtgccctccggcccctgaagcatggccagcagcggcatggctgacagcgccaaccacctgcccttctttttcggcaacatcacccgggaggaggcagaagattacctggtccaggggggcatgagtgatgggctttatttgctgcgccagagccgcaactacctgggtggcttcgccctgtccgtggcccacgggaggaaggcacaccactacaccatcgagcgggagctgaatggcacctacgccatcgccggtggcaggacccatgccagccccgccgacctctgccactaccactcccaggagtctgatggcctggtctgcctcctcaagaagcccttcaaccggccccaaggggtgcagcccaagactgggccctttgaggatttgaaggaaaacctcatcagggaatatgtgaagcagacatggaacctgcagggtcaggctctggagcaggccatcatcagtcagaagcctcagctggagaagctgatcgctaccacagcccatgaaaaaatgccttggttccatggaaaaatctctcgggaagaatctgagcaaattgtcctgataggatcaaagacaaatggaaagttcctgatccgagccagagacaacaacggctcctacgccctgtgcctgctgcacgaagggaaggtgctgcactatcgcatcgacaaagacaagacagggaagctctccatccccgagggaaagaagttcgacacgctctggcagctagtcgagcattattcttataaagcagatggtttgttaagagttcttactgtcccatgtcaaaaaatcggcacacagggaaatgttaattttggaggccgtccacaacttccaggttcccatcctgcgacttggtcagcgggtggaataatctcaagaatcaaatcatactccttcccaaagcctggccacagaaagtcctcccctgcccaagggaaccggcaagagagtactgtgtcattcaatccgtatgagccagaacttgcaccctgggctgcagacaaaggcccccagagagaagccctacccatggacacagaggtgtacgagagcccctacgcggaccctgaggagatcaggcccaaggaggtttacctggaccgaaagctgctgacgctggaagacaaagaactgggctctggtaattttggaactgtgaaaaagggctactaccaaatgaaaaaagttgtgaaaaccgtggctgtgaaaatactgaaaaacgaggccaatgaccccgctcttaaagatgagttattagcagaagcaaatgtcatgcagcagctggacaacccgtacatcgtgcgcatgatcgggatatgcgaggccgagtcctggatgctagttatggagatggcagaacttggtcccctcaataagtatttgcagcagaacagacatgtcaaggataagaacatcatagaactggttcatcaggtttccatgggcatgaagtacttggaggagagcaattttgtgcacagagatctggctgcaagaaatgtgttgctagttacccaacattatgccaagatcagtgatttcggactctccaaagcactgcgtgctgatgaaaactactacaaggcccagacccatggaaagtggcctgtcaagtggtacgctccggaatgcatcaactactacaagttctccagcaaaagcgatgtctggagctttggagtgttgatgtgggaagcattctcctatgggcagaagccatatcgagggatgaaaggaagtgaagtcaccgctatgttagagaaaggagagcggatggggtgccctgcagggtgtccaagagagatgtacgatctcatgaatctgtgctggacatacgatgtggaaaacaggcccggattcgcagcagtggaactgcggctgcgcaattactactatgacgtggtgaactaaccgctcccgcacctgtcggtggctgcctttgatcacaggagcaatcacaggaaaatgtatccagaggaattgattgtcagccacctccctctgccagtcgggagagccaggcttggatggaacatgcccacaacttgtcacccaaagcctgtcccaggactcaccctccacaaagcaaaggcagtcccgggagaaaagacggatggcaggatccaaggggctagctggatttgtttgttttcttgtctgtgtgattttcatacaggttatttttacgatctgtttccaaatccctttcatgtctttccacttctctgggtcccggggtgcatttgttactcatcgggcccagggacattgcagagtggcctagagcactctcaccccaagcggccttttccaaatgcccaaggatgccttagcatgtgactcctgaagggaaggcaaaggcagaggaatttggctgcttctacggccatgagactgatccctggccactgaaaagctttcctgacaataaaaatgttttgaggctttaaaaagaaaatcaagtttgaccagtgcagtttctaagcatgtagccagttaaggaaagaaagaaaaaaaaaaaaaaaaaa

SEQ ID NO: 29354 - DNA, 5019 bp, Homo Sapiens
acagacaagatgtcggcggatggtagcttcgagcccttgcggagaggagcatctctgtgacagaagcttgtcgacggcggcttctaggagctagtcgaaggagcgaggttgaggcgggcagcgacccgtcaggtcgctcacctgggcaccggccagctgcgagacgtgacttggggaccgcaggggagtggagagtgtgaggtgccaaagactagtaatgccccgtatccccctaggaagccgggaagccaagctccgcgggaccgcttcatgccgctgactggtgtagagcccgccagaatgaacaggaagaaaggagacaagggctttgaaagcccaaggccatataaattaacccatcaggtcgtctgcatcaacaacataaatttccagagaaaatctgttgtgggatttgtggaactgactatatttcccacagttgcaaacttgaatagaatcaagttgaacagcaaacagtgtagaatataccgagtaaggatcaatgatttagaggctgcttttatttataatgacccaaccttggaagtttgtcacagtgaatcaaaacagagaaacctcaattatttttccaatgcttatgcagctgcagttagtgctgtggaccctgatgcaggaaatggagaactttgcattaaggttccatcagagctatggaaacacgttgatgagttaaaggtcctgaagatacacatcaatttttctttggatcagcccaaaggaggtcttcattttgtggtacccagtgtagagggaagtatggcagagagaggtgctcatgttttctcttgtgggtatcaaaattctacaagattttggttcccttgtgttgattcatactctgaattgtgtacatggaaattagaatttacagtagatgctgcaatggttgctgtttctaatggcgatttggtggagacagtgtatactcatgatatgaggaagaaaactttccattatatgcttaccattcctacagcagcgtcaaatatctccttggccattggaccatttgaaatactggtagatccatacatgcatgaggttactcatttttgtttgccccaacttcttccattgctgaaacataccacatcataccttcatgaagtctttgaattttatgaagaaattcttacatgtcgttacccatactcctgttttaagactgtcttcattgatgaggcttatgttgaagtggctgcttatgcttccatgagcatttttagcacaaatcttttacacagtgccatgattatagatgagacacctttgactagaaggtgtttagcccaatccttggcccagcagttttttggttgtttcatatctagaatgtcttggtctgatgaatgggtgctgaagggaatttcaggctatatctatggactttggatgaaaaaaacttttggtgttaatgagtaccgccattggattaaagaggagctagacaaaatagtggcatatgaactaaaaactggtggggttttactacatcccatatttggtggaggaaaagagaaggataatccggcttcccatctacacttttcaataaagcatccacatacactgtcctgggaatactacactatgtttcagtgtaaagcccaccttgtgatgagattgattgaaaataggatcagtatggaatttatgctacaagttttcaataaactgctaagtctggctagtactgcttcatctcagaagttccagtcacatatgtggagtcagatgttggtttccacatctgggtttttgaaatccatttcaaatgtctctggcaaagatattcagccgttaataaagcagtgggtagatcagagtggagtggtaaaattttatggaagttttgcatttaatagaaaacgaaatgtcttggaactggaaataaaacaggactatacatctcctggaactcagaaatacgtgggaccacttaaagtgacagtgcaggagttagatggatccttcaatcatacactgcaaattgaagaaaacagccttaaacatgatataccctgccattccaaaagtagaaggaataaaaagaaaaaaatcccactgatgaatggagaagaagttgatatggatctttctgcaatggatgctgattcccctttgctgtggataaggatagacccagatatgtcagtattgaggaaggtagaatttgagcaagctgattttatgtggcagtatcagctccgctatgagagagatgttgttgcacagcaggaatccattttggctttggaaaaattccctactccagcatctcggcttgcactcactgatatattagaacaagagcagtgtttctacagagtaagaatgtcagcttgcttctgtcttgcaaagattgcaaattcaatggtgagcacatggacaggaccaccagccatgaagtcactcttcactaggatgttttgttgtaaaagttgtccaaacattgtgaaaacaaacaactttatgagctttcaaagctattttctacagaagactatgccagttgcaatggctttattaagagatgttcataatctttgtcctaaagaagtcttaacgtttattttagacttaatcaagtacaatgacaacaggaaaaataagttttcagataactattatcgtgcagaaatgattgatgccctggccaactctgttacacctgcagtcagtgtgaataatgaagttagaactttggataacttaaatcctgatgtgcgactcattcttgaagaaatcaccagatttttgaatatggaaaaacttcttccgagttacaggcataccatcactgtcagttgtttgagagccatacgggtacttcagaagaacggacatgtgccaagtgatccagctctttttaaatcttatgctgaatatggccactttgtggacattaggatagcagctttggaagcagttgttgattatactaaagtggacagaagttatgaagaactgcaatggctacttaatatgattcagaatgaccctgtaccctatgtaaggcataagattctcaacatgttgactaagaacccaccatttactaagaacatggagtctcccttatgcaatgaagccctggtagatcaactttggaaacttatgaattctggtacttcacatgactggaggttacggtgtggtgctgtggacttgtacttcacactttttggcctcagtagaccttcctgtttacccttgccagagcttgggttggttcttaatctaaaggagaaaaaagctgtcttgaatcctaccataattccagagtcagtagcaggcaaccaagaagctgcaaataatccaagcagtcacccacagctagttggatttcagaaccctttttccagttctcaagatgaggaggagattgatatggatactgttcatgatagccaggccttcatttcccatcatttaaacatgcttgaaaggccgtcaactccagggctctcgaaatatcggccagctagctcccgatctgctttaataccccagcactcagcaggctgtgacagcacacccaccacaaaaccccagtggagtttggaacttgcacggaagggaacaggtaaagaacaagcacctttggagatgagtatgcatccagcggcaagcgctccactctcagtctttactaaggaatctacagcctccaaacacagtgaccaccatcaccaccatcaccatgagcacaagaaaaagaagaagaagcataaacataagcacaaacacaagcataagcatgacagtaaagaaaaggacaaggagcctttcactttctccagccctgccagtggcaggtctattcgttctccttccctttcagactgagaaggggacaaaaagacctttcctttcatgtccagaagaatgtatgtaactaaagctttgtcctctgtgaagaattataaaagggaggggggaaaggattcgcctctcctacagaaattctgaattcatttaagttctaagcatttgatttatgttatttatacagttgggatctaattaggaaaatgtgttttgtagttctggataaactatttcatccgctgtttcctccccaaaacacacacacagagcaaactccctttcataaaagccctcatatccactggcagtccccgttcgcatcatggtctccatgtgtaccgccaaagtcaattatgtttgaaagcctttggtggatgttatggggcaaagttatgatttacacagaagcaactgccaaatctgtggtgcaaccactatctccagtgaaatattgtataacaccatttggaactactgaaaagacagtggcttttctacagtactcttccttattgcaccatttttgtattaacgtagaaactaagcatcagaatttatgaacaaagaatatgttatttttccttttgctctaaaatactgagatttggggaagcaattcttttttaaaaaaattttgaataactatcttttgataacacattcggcggttacgatgttggaatttagcagaactatcaaatccaaaattattttcaaatcaagatgtttaaattataagtttttttgttttgttttccagtaagtataaatgaaaatattcatatgtaaaatatgttttgcttaatgtggacaatttacacacccaacacatactgtttccaaaattatttctatatgacacaaagtatgatacctttaaaaaggtgagcttatatattgtttattaacctggaaatagacaatttggctctcataccataagcatttaaaaacatatgaaatattttgatttctttatatggtggtgtgtttttatttctgaattttccatgtgctttaatatttgtttaagaatattttttatatctgttcaatttttatcattccccttatcattagaaagtttgacaaaaatacttgaatcttggacctctaaatatacttttagttgtgtttaacttgtttaataaataactttttaagttg

SEQ ID NO: 29355 - DNA, 5000 bp, Homo Sapiens
gcccgggactatcccttcgcggtgtagcggcagccggagacctggctgaggaggcaaccgcgtagacacctccctgcttagaaaacaaacactgaaccagaccgatcccagttggagggttcgaaaatgttccagacagcctgtcgggaggggttgttgttgctgttggactaaatagctattcctgattggtcatgtatagggttttttaaggcgggtggggggaggagggggtagaggaaaggctccaaacacctgcaggttgggggcggaaagctgtttgcgattccctggactggttggtcggggacaggaggtaattcccagccattgacccccatttctctctctccctccctcttgccctgcctctttctctccacccctatctttcctggaaactcgctttgggcgcggcagatcgcccaggaccacaccgcagcgtaactgcaggcctctcagcgaaaaagggggaaagcaaagacccgggtgtgcatcctcttcctcggcttccgcccctttccggcggagtggagatcctattcagaggggccggtctctctaaatatgccccaggatgaccgagcggccgccgagcgaggcggctcgcagtgacccccagctagagggacgggacgcggccgaggccagcatggcccccccgcacctggtcctgctgaacggcgtcgccaaggagacgagccgcgcggccgcagcggagcccccagtcatcgaactgggcgcgcgcggaggcccggggggcggccctgccggtgggggcggcgccgcgagagacttaaagggccgcgacgcggcgacggccgaagcgcgccatcgggtgcccaccaccgagctgtgcagacctcccgggcccgccccggcccccgcgcccgcctcggttacagcggagctgcccggcgacggccgcatggtgcagctgagtcctcccgcgctggctgcccccgccgcccccggccgcgcgctgctctacagcctcagccagccgctggcctctctcggcagcgggttctttggggagccggatgccttccctatgttcaccaccaacaatcgagtgaagaggagaccttccccctatgagatggagattactgatggtccccacaccaaagttgtgcggcgtatcttcaccaacagccgggagcgatggcggcagcagaatgtgaacggggcctttgccgagctccgcaagctgatccccacacatcccccggacaagaagctcagcaagaatgagatcctccgcctggccatgaagtatatcaacttcttggccaagctgctcaatgaccaggaggaggagggcacccagcgggccaagactggcaaggaccctgtggtgggggctggtgggggtggaggtgggggagggggcggcgcgcccccagatgacctcctgcaagacgtgctttcccccaactccagctgcggcagctccctggatggggcagccagcccggacagctacacggaggagcccgcgcccaagcacacggcccgcagcctccatcctgccatgctgcctgccgccgatggagccggccctcggtgatgggtctgggccaccaggatcagccaggagggcgttcttaggctgctgggatggtgggcttcagggcaggtggggtgagaattgggcggctctgaagcaaggcggtggacttgaactttcctggatgtctgaactttgggaagcctttactgaccctggggctggcttttctgtttcctgtaccagtaggagatcagaaaaatggagcaaagtggtaggtactttttgtgaagacggcacggtcttccctcttccctcagtcccaaatccttcccaagtaagaggctggagttgtcactgcttttggcctggagtttgggatccctgtctttcctaagacctggggttgtcagctctcatctgaggcatccagcagtctctgccttgcctttagcccctcccaagctggctggggtggcctgtgtggccacttctgtccatatttataggtacccaatagctgcccatttcgtgagccccatcttcacccaggcctatgttgatccatccagcttgccagatgctgcagagtcacaagcctcgaggtgccttcttcagggcctggttgaagaagatgatcagtggacagtctgctctagatgagctgggccggagggtcaggaaacccagtcgcccttacttcttgccctggggatcaaagttctgctttctccccaatgagacttgccttcctaagcctgtggctgtggagaccatgtctgcagccctgagaaagccctgtcgggctttgtgtgaaggcagagaaagggacaatgatagtagagtgatatggagcaagagatattttgggcatgtgggcttcaactcctcgacatcactgttcatgctggcgagtgaatgccagtgtgctgatgggcgtacgctggtgctgagtagatgcgcagccccatctgtgcattctcctggatgcttagagggatttctttgctgtaagatgtctgtttgctgatggtctggtctatgttccgaattgagcacaaaacctgtcctatgaatgctttgcatttggaatttttgcttgacttcagttattggtggaatctttagcgctcaataggaccaggatccagcctcacttctagggtatgggaaatccaatcagagaccaggccctggctagacccaaacatatgcacattcacttagcagaaccttaaacacccctcagttgtgcagcttttggtcatcaagggtgcgtctgggaggttggtttaatgcaatagaagtgctcccctctgaaagttgtacatgaaatttttgtaaatcacatccttatccttcatcttttaaagaaataaccactgcaagtccttttgtaaagtgaagaatccttttgtagaatgaaccactgccccttcattgatttcctgtgtcaatccagatggtgggatgtggttttcttaaggtgaggcctgtctgtgacctgcatctaagcccatgggacaaattgcacagaagtcctgtatgtctgtcattgtacccttaagtcaccctagccctctccctctaggctctgccttcgaggtcagaggagagatagcctgtggccctgtcctgccatgcaagaactcatcactgtggctgtctggaaagcccccccttatagtttgggcttcagcctagtggcttgtcctcaccatgatggggccctaattcagccatgtacagacagagaatatgtctgctcctttccccttccttttaagtaaggtccaattctcgagcttggggcaacattgttcacctttgtagcactcaggctctccattcaatttcaggctccccagatcatgttttggtgaaaattagggttggttcctttccaacgtttggaagatcctgtgaggagccccatctgtctaaagatagagtcattgctgtaggatctaaggctgtttgcttcaccgtggattcgcttgagttaggaatgagaagtagccacagtatggatgggtggatgggttttatgagatggatcacatattttattaagaactcaaacttctggctccctcttctttcagacttgccatgtgactctggcttggcctatctcctagggctatggtgtggactgaatgggatcatgaaagtagacagttttgagaacgtaaagaactttttcttttccctcaatctcaatcctgcagtggggtttcgcagcctgagtccacgacctaggcagtaggccggtgtgcctgactgcccagcatttgggtaatttagattgtaaaccgctttggcctgagttattgagattgtcctcatttctccagattatctatttgtgtgtgtgtgtgtgtgtgtgtgagagacggtgtcttgttctgtcactcaggctggagtacagtggtgccatcattgctgtctgcagccttgaactctgggctcaagcaatcctctcacctcagcctcccgagtagggaggaccacaggtgtgagccaccacacctggctaatttttacttttttttttttttggtagagatggagtcttgctatattgcccaggctggtcttgaagtcctggcttcaggcaattctcctgcctttgcctccagaagcactgggatcacaggtgtcagccattgcacccagcccagattgtcttaatttctatcttgttccaaggccagggacagtaataagaatggaaaagagatatgggaacactggcagactgtgtaaaatgtaatgcaactacccaaaacaagcctggtaggaaagggcaagtctttaggtctttgtaagaactaaagaagatctgtaatttttattttcaccctctgtaccccatgaccttatccttcctctccttccttgttacccatgaaaaactggcaacattccaagaatagcatctgtacaaaggggaaagaacataaaggtaaaacaaaacaaaacaacattttgagaacaaagatgaccataaccactgaagggaatcacatcttttaagacaaattcatattcttttatttgttatggcagatgacaagatggtacaacctttattcttttccaaaataaaacaaagggcacagcatctgtagtcagccgacaactctttcggccttttgggggtgggtctggccgtacttgtgatttcgatggtacgtgaccctctgctgaagacttgccccctgcccgtgtacatagtgcattgtttctgtgggcgggcccagcactttccgtcaacgttgtactgtatgtgatgaattgcgttggtctctgcatttttctgcagaagaggagtaaccgctccaggtaccttgacctttgtacagcccagaggccaacactgtgggtgtgtgactctttagcaaaaaaaacccatgtggtgatgatgtgtctatatatgtgaggatgtatcgggaagatttctaaataaaagttttacaaaggg

SEQ ID NO: 29356 - DNA, 3629 bp, Homo Sapiens
ctggagaggatctacccgggtccctgcctggccagtggggaaacaccggtcccccaggcaccttcacctaaccagagcggggatttccaccgcccctcatgccgccctttggaggaaagtgaaagtgaaaggaggaagaggaggcttcatggctgaggaggtcgcagcgccatgaagtccctgtctctgctcctcgctgtggctttgggcctggcgaccgccgtctcagcaggacccgcggtgatcgagtgttggttcgtggaggatgcgagcggaaagggcctggccaagagacccggtgcactgctgttgcgccagggaccgggggaaccgccgccccggccggacctcgaccctgagctctatctcagtgtacacgaccccgcgggcgccctccaggctgccttcaggcggtatccccggggcgcccccgcaccacactgcgagatgagccgcttcgtgcctctccccgcctctgcgaaatgggccagcggcctgacccccgcgcagaactgcccgcgggccctggatggggcttggctgatggtcagcatatccagcccagtcctcagcctctccagcctcttgcgaccacagccagagcctcagcaggagcctgttctcatcaccatggcaacagtggtactgactgtcctcacccacacccctgcccctcgagtgagactgggacaagatgctctgctggacttgagctttgcctacatgccccccacctccgaggccgcctcatctctggctccgggtccccctccctttgggctagagtggcgacgccagcacctgggtaagggacatctgctcctggctgcaactcctgggctgaatggccagatgccagcagcccaagaaggggccgtggcatttgctgcttgggatgatgatgagccatggggcccatggaccggaaatgggaccttctggctgcctacagttcaaccctttcaggagggcacctatctggccaccatacacctgccatacctgcaaggacaggtcaccctggagcttgctgtgtacaaaccccccaaagtgtccctgatgccagcaacccttgcacgggccgccccaggggaggcacccccggaattgctctgccttgtgtcccacttctacccttctgggggcctggaggtggagtgggaactccggggtggcccagggggccgctctcagaaggccgaggggcagaggtggctctcggccctgcgccaccattccgatggctctgtcagcctctctgggcacttgcagccgcccccagtcaccactgagcagcatggggcacgctatgcctgtcgaattcaccatcccagcctgcctgcctcggggcgcagcgctgaggtcaccctggaggtagcaggtctttcagggccctcccttgaggacagcgtaggccttttcctgtctgcctttcttctgcttgggctcttcaaggcactgggctgggctgctgtctacctgtccacctgcaaggattcaaagaagaaagcagagtgagggcactcactgccatcctgtggaagccaccatcatctctggcccaagcttctgtagtagctccctaaaataataccctatcatctgctcctaatccctccaatctctctccactgagtggctggaatgcttttttttttttctttcacttatataagggataatttttcttttttttttttttttgagacggagtctcactcttccgcccaggctgcagtgcagtggcatgatcttggcttactgcaacctccgcctcctgggttcaagcaattctgtggcttcagcctccggagtagctgggattacaggcacatgccaccacacccagtgaatttttgtatttttagtagagacggggtttcaccatgttggccaggctggtcttgaattcctgacctcaggtgatctgcccacctcagcctcccaaagtgctgggattacaggcgtgagccaccacaccaggcccgagaaatgcttttttaaaaaacacacatcttatggcattcaccttcttggagctctaggacagtggttctcaaaatttttttctctcaggacctcttaaaaatcatcaaggaccccaaaaagcttttgggtatgtgggttatagctatcaatatttatggtactagaacttaaaagtgagaaaaatttaaaacacgagaatacataggcacacattctattcatcgtgggaaccatggtgtcaatacatatcatgtagcttctgaaaaactccactgtacacttatagaatgaagaaggcaaaaaacttttttttttttttttttgagacggagtctcgctctgtcgcccaggctggagtgcagtggcgcgatctcggctcactgcaagctccgcctctcgggttcacgccattctcctgcctcagcctcccaagtagctcggactacaggcgtcctccaccatgcctggctaatattttgtattttttagtagagacggggtttcaccgtgttagccaggatggtctcgatctcctaacctggtgatccgcccgcctcggcctcccaaagtattgggattacccgcgtgagccaccgcgcccggctgcaaataatctttctttttttctgagacagagtctcgctctgttgcccaggctggagtgcagtggcacgatctcggctcacggcacgctccgcctcccgggttcacgccattctcctgcctcagcttcccgagtagctgggactacaggggcccgccaccacgcccggctaactttttgtgtttttagtagagacggggtttcaccgtgttagccaggatggtctcgatctcctgaccttgtgatctgcccgcctcggcctcccaaagtgctgggattacaggcgtgagccaccgcgcccggcggcgaaacacgatattgtactaacatcttaattttgttataaaatctcacaaaccccctgacatagtctcagagatctgtagggccgaggttacatttggagaacccgtactctagggccaaatccattcttcttgccctggctcacttgtcccccccaccgccccgcgctggagccactgcctagttcttcagccctagatggtgctcgccagacctcctctcaatgctcatcacacacagggctattcctttcctccaatgaaccaaacgcctcccgcccacctccaggtcccagtcctctgttccctttgcctggtccacccttgccctccctgggtcgcagacgaggtcggcctcgtcattccccgcagaccgccgcgcgtccctcttgtgcggttcaccacagttgtatttaagtgatcgtgtgagtcgtcgttaaatgcctgtctccccgcggatcatgggctcctcgaggacagggactggcctgtctgtccactgctgtaaccccgcgccggcatagggacctaaggcccactggagggcgctcatcaagtagctgctggatgttgacgaaggaagcggcggcgcagctcagggatctccgagtcaggacggtcggccagacccacggggtaacgggtctaatcgtgtaggaataaagctgtattccagtgcttccaaaaaaaaaaaaaaaaaaaaaaaaaaaaaaaaaaaaaaaaaaaaaaaa

SEQ ID NO: 29357 - DNA, 1867 bp, Homo Sapiens
ggttcgctgtggcgggcgcctgggccgccggctgtttaacttcgcttccgctggcccatagtgatctttgcagtgacccagcagcatcactgtttcttggcgtgtgaagataacccaaggaattgaggaagttgctgagaagagtgtgctggagatgctctaggaaaaaattgaatagtgagacgagttccagcgcaagggtttctggtttgccaagaagaaagtgaacatcatggatcagaacaacagcctgccaccttacgctcagggcttggcctcccctcagggtgccatgactcccggaatccctatctttagtccaatgatgccttatggcactggactgaccccacagcctattcagaacaccaatagtctgtctattttggaagagcaacaaaggcagcagcagcaacaacaacagcagcagcagcagcagcagcagcagcagcagcagcagcagcagcagcagcagcagcagcagcagcagcagcagcagcagcagcagcagcaacaggcagtggcagctgcagccgttcagcagtcaacgtcccagcaggcaacacagggaacctcaggccaggcaccacagctcttccactcacagactctcacaactgcacccttgccgggcaccactccactgtatccctcccccatgactcccatgacccccatcactcctgccacgccagcttcggagagttctgggattgtaccgcagctgcaaaatattgtatccacagtgaatcttggttgtaaacttgacctaaagaccattgcacttcgtgcccgaaacgccgaatataatcccaagcggtttgctgcggtaatcatgaggataagagagccacgaaccacggcactgattttcagttctgggaaaatggtgtgcacaggagccaagagtgaagaacagtccagactggcagcaagaaaatatgctagagttgtacagaagttgggttttccagctaagttcttggacttcaagattcagaatatggtggggagctgtgatgtgaagtttcctataaggttagaaggccttgtgctcacccaccaacaatttagtagttatgagccagagttatttcctggtttaatctacagaatgatcaaacccagaattgttctccttatttttgtttctggaaaagttgtattaacaggtgctaaagtcagagcagaaatttatgaagcatttgaaaacatctaccctattctaaagggattcaggaagacgacgtaatggctctcatgtacccttgcctcccccacccccttctttttttttttttaaacaaatcagtttgttttggtacctttaaatggtggtgttgtgagaagatggatgttgagttgcagggtgtggcaccaggtgatgcccttctgtaagtgcccaccgcgggatgccgggaaggggcattatttgtgcactgagaacaccgcgcagcgtgactgtgagttgctcataccgtgctgctatctgggcagcgctgcccatttatttatatgtagattttaaacactgctgttgacaagttggtttgagggagaaaactttaagtgttaaagccacctctataattgattggactttttaattttaatgtttttccccatgaaccacagtttttatatttctaccagaaaagtaaaaatcttttttaaaagtgttgtttttctaatttataactcctaggggttatttctgtgccagacacattccacctctccagtattgcaggacagaatatatgtgttaatgaaaatgaatggctgtacatatttttttctttcttcagagtactctgtacaataaatgcagtttataaaagtgttaaaaaaaaaaaaaaaaaaaaaa

SEQ ID NO: 29358 - DNA, 1586 bp, Homo Sapiens
cgcccccgccgggcgtgtgtgtcgtgtgtgtttggggcccgcgcgggttgcgcgccctccgccttcgcgcctcctgcccccgaggccctactgctgcccctgtgcccctcgccccgccgggcgtcgcgggccaacatgggccaggaagaggagctgctgaggatcgccaaaaagctggagaagatggtggccaggaagaacacggaaggggccctggaccttctgaagaagctgcacagctgccagatgtccatccagctactacagacaaccaggattggagttgctgttaatggggtccgcaagcactgctcagacaaggaggtggtgtccttggccaaagtccttatcaaaaactggaagcggctgctagactcccctggacccccaaaaggagaaaaaggagaggaaagagaaaaggcaaagaagaaggaaaaagggcttgagtgttcagactggaagccagaagcaggcctttctccaccaaggaaaaaacgagaagaccccaaaaccaggagagactctgtggactccaagtcttctgcctcctcctctccaaaaagaccatcggtggaaagatcaaacagcagcaaatcaaaagcggagagccccaaaacacctagcagccccttgacccccacgtttgcctcttccatgtgtctcctggccccctgctatctcacaggggactctgtccgggacaagtgtgtggagatgctgtcagcagccctgaaggcggacgatgattacaaggactatggagtcaactgtgacaagatggcatcagaaatcgaagatcatatctaccaagagctcaagagcacggacatgaagtaccggaaccgcgtgcgcagccgcataagcaacctcaaggaccccaggaaccccggcctgcggcggaacgtgctcagtggggccatctccgcagggcttatagccaagatgacggcagaggaaatggccagtgatgaactgagggagttgaggaatgccatgacccaggaggccatccgtgagcaccagatggccaagactggcggcaccaccactgacctcttccagtgcagcaaatgcaagaagaagaactgcacctataaccaggtgcagacacgcagtgctgatgagcccatgactacctttgtcttatgcaatgaatgtggcaatcgctggaagttctgctgatggaacagccagccatgaacaaggtgaggaagaagaaagaggaagcgctgaattatctgaactggagaagcaataaaaattaaagtgaaggaaaatactgaactctgtctgagtgggatggtatgagttagaggaagaattctcttgcaaattaataatcggtcattagaaacaattggttaatgggggagcctaattggagaatgatgctgagaatttgtattgatgaacctcttttagaaactgcagagggctgggcacggtggtttatggctgtaatctgcaaactctgggaggctgaggtgggagaatcgcttaaccccagaagtttgagtccagcccaggcaacacagcaagaccccatctctataaaaagaaaaaataaagaaactgcagcgccttag

SEQ ID NO: 29359 - DNA, 2676 bp, Homo Sapiens
gttccggcgaggaggccgcgccagtgacagcgatggcggcggagtcggcgctccaagttgtggagaagctgcaggcgcgcctggccgcgaacccggaccctaagaagctattgaaatatttgaagaaactctccaccctgcctattacagtagacattcttgcggagactggggttgggaaaacagtaaatagcttgcgaaaacacgagcatgttggaagctttgccagggacctagtggcccagtggaagaagctggttcctgtggaacgaaatgctgagcctgatgaacaggactttgagaagagcaattcccgaaagcgccctcgggatgccctgcagaaggaggaggagatggagggggactaccaagaaacctggaaagccacggggagccgatcctatagccctgaccacaggcagaagaaacataggaaactctcggagctcgagagacctcacaaagtgtctcacggtcatgagaggagagatgagagaaagaggtgtcacagaatgtcaccaacttactcttcagaccctgagtcttctgattatggccatgttcaatcccctccatcttgtaccagtcctcatcagatgtacgtcgaccactacagatccctggaggaggaccaggagcccattgtttcacaccagaagcctgggaaaggccacagcaatgcctttcaggacagactcggggccagccaagaacgacacctgggtgaaccccatgggaaaggggttgtgagtcaaaacaaggagcacaaatcttcccacaaggacaaacgccccgtggatgccaagagtgatgagaaggcctctgtggtgagcagagagaaatcacacaaggccctctccaaagaggagaaccgaaggccaccctcaggggacaatgcaagggagaaaccgccctctagtggcgtaaagaaagagaaggacagagagggcagcagcctgaagaagaagtgtttgcctccctcagaggccgcttcagacaaccacctgaaaaagccaaagcacagagacccagagaaagccaaattggacaaaagcaagcaaggtctggacagctttgacacaggaaaaggagcaggagacctgttgcccaaggtaaaagagaagggttctaacaacctaaagactccagaagggaaagtcaaaactaatttggatagaaagtcactgggctccctccctaaagttgaggagacagatatggaggatgaattcgagcagccaaccatgtcttttgaatcctacctcagctatgaccagccccggaagaaaaagaaaaagattgtgaaaacttcagccacggcacttggagataaaggacttaaaaaaaatgactctaaaagcactggtaaaaacttggactcagttcagaaattacccaaggtgaacaaaaccaagtcagagaagccggctggagctgatttagccaagctgagaaaggtgcctgatgtgttgccagtgttgccagacctcccgttacccgcgatacaggccaattaccgtccactgccttccctcgagctgatatcctccttccagccaaagcgaaaagcgttctcttcaccccaggaagaagaagaagctggatttactgggcgcagaatgaattccaagatgcaggtgtattctggttccaagtgtgcctatctccctaaaatgatgaccttgcaccagcaatgcatccgagtacttaaaaacaacatcgattcaatctttgaagtgggaggagtcccatactctgttcttgaacccgttttggagaggtgtacacctgatcagctgtatcgcatagaggaatacaatcatgtattaattgaagaaacagatcaattatggaaagttcattgtcaccgagactttaaggaagaaagacccgaagagtatgagtcgtggcgagagatgtacctgcggcttcaggacgcccgagagcagcggctacgagtactaacaaagaatatccagttcgcacatgccaataagcccaaaggccgacaagcaaagatggcctttgtcaactctgtggccaagccacctcgtgacgtccggaggaggcaggaaaagtttggaacgggaggagcagctgtccctgagaaaatcaagatcaagccagccccgtaccccatgggaagcagccatgcttccgccagtagcatcagctttaaccccagccctgaggagccggcctatgatggcccaagcaccagcagtgcccacttggcaccagtggtcagcagcactgtttcctatgatcctaggaaacccactgtgaagaaaattgccccaatgatggccaagacaattaaagctttcaagaacagattctcccgacgataaactgaggacttgccttggaaatggaatctggggaggcaggaatacaaggacagtgggggttggggaatggaattctacaggagactggagtcttgctttgtggatccttttggtctccgagtctgcagtctgcaggtgctgcccctgggaacctgcgtgccacagccccgcctccctgcctggagcacactttagaattctgaagatgtgaagcctctgtctcactgaggattttaaaggtcaattatacttttgttgttcattagcatctttgtaaactataagacgtagttttaattaataaatattgcccccagatgttaaa

SEQ ID NO: 29360 - DNA, 3165 bp, Homo Sapiens
gggggacagtagaagcctggaggaggagcttgagtccagccactgtctgggtactgccagccatcgggcccaggtctctggggttgtcttaccgcagtgagtaccacgcggtactacagagaccggctgcccgtgtgcccggcaggtggagccgcccgcatcagcggcctcggggaatggaagcggagaacgcgggcagctattcccttcagcaagctcaagctttttatacgtttccatttcaacaactgatggctgaagctcctaatatggcagttgtgaatgaacagcaaatgccagaagaagttccagccccagctcctgctcaggaaccagtgcaagaggctccaaaaggaagaaaaagaaaacccagaacaacagaaccaaaacaaccagtggaacccaaaaaacctgttgagtcaaaaaaatctggcaagtctgcaaaatcaaaagaaaaacaagaaaaaattacagacacatttaaagtaaaaagaaaagtagaccgttttaatggtgtttcagaagctgaacttctgaccaagactctccccgatattttgaccttcaatctggacattgtcattattggcataaacccgggactaatggctgcttacaaagggcatcattaccctggacctggaaaccatttttggaagtgtttgtttatgtcagggctcagtgaggtccagctgaaccatatggatgatcacactctaccagggaagtatggtattggatttaccaacatggtggaaaggaccacgcccggcagcaaagatctctccagtaaagaatttcgtgaaggaggacgtattctagtacagaaattacagaaatatcagccacgaatagcagtgtttaatggaaaatgtatttatgaaatttttagtaaagaagtttttggagtaaaggttaagaacttggaatttgggcttcagccccataagattccagacacagaaactctctgctatggtatgccatcatccagtgcaagatgtgctcagtttcctcgagcccaagacaaagttcattactacataaaactgaaggacttaagagatcagttgaaaggcattgaacgaaatatggacgttcaagaggtgcaatatacatttgacctacagcttgcccaagaggatgcaaagaagatggctgttaaggaagaaaaatatgatccaggttatgaggcagcatatggtggtgcttacggagaaaatccatgcagcagtgaaccttgtggcttctcttcaaatgggctaattgagagcgtggagttaagaggagaatcagctttcagtggcattcctaatgggcagtggatgacccagtcatttacagaccaaattccttcctttagtaatcactgtggaacacaagaacaggaagaagaaagccatgcttaagaatggtgcttctcagctctgcttaaatgctgcagttttaatgcagttgtcaacaagtagaacctcagtttgctaactgaagtgttttattagtattttactctagtggtgtaattgtaatgtagaacagttgtgtggtagtgtgaaccgtatgaacctaagtagtttggaagaaaaagtagggtttttgtatactagcttttgtatttgaattaattatcattccagctttttatatactatatttcatttatgaagaaattgattttcttttgggagtcacttttaatctgtaattttaaaatacaagtctgaatatttatagttgattcttaactgtgcataaacctagatataccattatcccttttatacctaagaagggcatgctaataattaccactgtcaaagaggcaaaggtgttgatttttgtatatgaagttaagcctcagtggagtctcatttgttagtttttagtggtaactaagggtaaactcagggttccctgagctatatgcacactcagacctctttgctttaccagtggtgtttgtgagttgctcagtagtaaaaactggccttacctgacagagccctggctttgacctgctcagccctgtgtgttaatcctctagtagccaattaactactctggggtggcaggttccagagaatgcagtagaccttttgccactcatctgtgttttacttgagacatgtaaatatgatagggaaggaactgaatttctccattcatatttataaccattctagttttatcttccttggctttaagagtgtgccatggaaagtgataagaaatgaacttctaggctaagcaaaaagatgctggagatatttgatactctcatttaaactggtgctttatgtacatgagatgtactaaaataagtaatatagaatttttcttgctaggtaaatccagtaagccaataattttaaagattctttatctgcatcattgctgtttgttactataaattaaatgaacctcatggaaaggttgaggtgtatacctttgtgattttctaatgagttttccatggtgctacaaataatccagactaccaggtctggtagatattaaagctgggtactaagaaatgttatttgcatcctctcagttactcctgaatattctgatttcatacgtacccagggagcatgctgttttgtcaatcaatataaaatatttatgaggtctcccccacccccaggaggttatatgattgctcttctctttataataagagaaacaaattcttattgtgaatcttaacatgctttttagctgtggctatgatggattttattttttcctaggtcaagctgtgtaaaagtcatttatgttatttaaatgatgtactgtactgctgtttacatggacgttttgtgcgggtgctttgaagtgccttgcatcagggattaggagcaattaaattattttttcacgggactgtgtaaagcatgtaactaggtattgctttggtatataactattgtagctttacaagagattgttttatttgaatggggaaaataccctttaaattatgacggacatccactagagatgggtttgaggattttccaagcgtgtaataatgatgtttttcctaacatgacagatgagtagtaaatgttgatatatcctataaaaaaaaaaaaaaaaaaaaaaaaaaaaaaaaaaaaaaaaaaaaaaaaaaaaaaaaaaaaaaaaaaaaaaaaaaaaaaa

SEQ ID NO: 29361 - DNA, 4015 bp, Homo Sapiens
gcagcgctgcgtcctgctgcgcacgtgggaagccctggccccggccacccccgcgatgccgcgcgctccccgctgccgagccgtgcgctccctgctgcgcagccactaccgcgaggtgctgccgctggccacgttcgtgcggcgcctggggccccagggctggcggctggtgcagcgcggggacccggcggctttccgcgcgctggtggcccagtgcctggtgtgcgtgccctgggacgcacggccgccccccgccgccccctccttccgccaggtgtcctgcctgaaggagctggtggcccgagtgctgcagaggctgtgcgagcgcggcgcgaagaacgtgctggccttcggcttcgcgctgctggacggggcccgcgggggcccccccgaggccttcaccaccagcgtgcgcagctacctgcccaacacggtgaccgacgcactgcgggggagcggggcgtgggggctgctgctgcgccgcgtgggcgacgacgtgctggttcacctgctggcacgctgcgcgctctttgtgctggtggctcccagctgcgcctaccaggtgtgcgggccgccgctgtaccagctcggcgctgccactcaggcccggcccccgccacacgctagtggaccccgaaggcgtctgggatgcgaacgggcctggaaccatagcgtcagggaggccggggtccccctgggcctgccagccccgggtgcgaggaggcgcgggggcagtgccagccgaagtctgccgttgcccaagaggcccaggcgtggcgctgcccctgagccggagcggacgcccgttgggcaggggtcctgggcccacccgggcaggacgcgtggaccgagtgaccgtggtttctgtgtggtgtcacctgccagacccgccgaagaagccacctctttggagggtgcgctctctggcacgcgccactcccacccatccgtgggccgccagcaccacgcgggccccccatccacatcgcggccaccacgtccctgggacacgccttgtcccccggtgtacgccgagaccaagcacttcctctactcctcaggcgacaaggagcagctgcggccctccttcctactcagctctctgaggcccagcctgactggcgctcggaggctcgtggagaccatctttctgggttccaggccctggatgccagggactccccgcaggttgccccgcctgccccagcgctactggcaaatgcggcccctgtttctggagctgcttgggaaccacgcgcagtgcccctacggggtgctcctcaagacgcactgcccgctgcgagctgcggtcaccccagcagccggtgtctgtgcccgggagaagccccagggctctgtggcggcccccgaggaggaggacacagacccccgtcgcctggtgcagctgctccgccagcacagcagcccctggcaggtgtacggcttcgtgcgggcctgcctgcgccggctggtgcccccaggcctctggggctccaggcacaacgaacgccgcttcctcaggaacaccaagaagttcatctccctggggaagcatgccaagctctcgctgcaggagctgacgtggaagatgagcgtgcgggactgcgcttggctgcgcaggagcccaggggttggctgtgttccggccgcagagcaccgtctgcgtgaggagatcctggccaagttcctgcactggctgatgagtgtgtacgtcgtcgagctgctcaggtctttcttttatgtcacggagaccacgtttcaaaagaacaggctctttttctaccggaagagtgtctggagcaagttgcaaagcattggaatcagacagcacttgaagagggtgcagctgcgggagctgtcggaagcagaggtcaggcagcatcgggaagccaggcccgccctgctgacgtccagactccgcttcatccccaagcctgacgggctgcggccgattgtgaacatggactacgtcgtgggagccagaacgttccgcagagaaaagagggccgagcgtctcacctcgagggtgaaggcactgttcagcgtgctcaactacgagcgggcgcggcgccccggcctcctgggcgcctctgtgctgggcctggacgatatccacagggcctggcgcaccttcgtgctgcgtgtgcgggcccaggacccgccgcctgagctgtactttgtcaaggtggatgtgacgggcgcgtacgacaccatcccccaggacaggctcacggaggtcatcgccagcatcatcaaaccccagaacacgtactgcgtgcgtcggtatgccgtggtccagaaggccgcccatgggcacgtccgcaaggccttcaagagccacgtctctaccttgacagacctccagccgtacatgcgacagttcgtggctcacctgcaggagaccagcccgctgagggatgccgtcgtcatcgagcagagctcctccctgaatgaggccagcagtggcctcttcgacgtcttcctacgcttcatgtgccaccacgccgtgcgcatcaggggcaagtcctacgtccagtgccaggggatcccgcagggctccatcctctccacgctgctctgcagcctgtgctacggcgacatggagaacaagctgtttgcggggattcggcgggacgggctgctcctgcgtttggtggatgatttcttgttggtgacacctcacctcacccacgcgaaaaccttcctcaggaccctggtccgaggtgtccctgagtatggctgcgtggtgaacttgcggaagacagtggtgaacttccctgtagaagacgaggccctgggtggcacggcttttgttcagatgccggcccacggcctattcccctggtgcggcctgctgctggatacccggaccctggaggtgcagagcgactactccagctatgcccggacctccatcagagccagtctcaccttcaaccgcggcttcaaggctgggaggaacatgcgtcgcaaactctttggggtcttgcggctgaagtgtcacagcctgtttctggatttgcaggtgaacagcctccagacggtgtgcaccaacatctacaagatcctcctgctgcaggcgtacaggtttcacgcatgtgtgctgcagctcccatttcatcagcaagtttggaagaaccccacatttttcctgcgcgtcatctctgacacggcctccctctgctactccatcctgaaagccaagaacgcagggatgtcgctgggggccaagggcgccgccggccctctgccctccgaggccgtgcagtggctgtgccaccaagcattcctgctcaagctgactcgacaccgtgtcacctacgtgccactcctggggtcactcaggacagcccagacgcagctgagtcggaagctcccggggacgacgctgactgccctggaggccgcagccaacccggcactgccctcagacttcaagaccatcctggactgatggccacccgcccacagccaggccgagagcagacaccagcagccctgtcacgccgggctctacgtcccagggagggaggggcggcccacacccaggcccgcaccgctgggagtctgaggcctgagtgagtgtttggccgaggcctgcatgtccggctgaaggctgagtgtccggctgaggcctgagcgagtgtccagccaagggctgagtgtccagcacacctgccgtcttcacttccccacaggctggcgctcggctccaccccagggccagcttttcctcaccaggagcccggcttccactccccacataggaatagtccatccccagattcgccattgttcacccctcgccctgccctcctttgccttccacccccaccatccaggtggagaccctgagaaggaccctgggagctctgggaatttggagtgaccaaaggtgtgccctgtacacaggcgaggaccctgcacctggatgggggtccctgtgggtcaaattggggggaggtgctgtgggagtaaaatactgaatatatgagtttttcagttttgaaaaaaa

SEQ ID NO: 29362 - DNA, 2895 bp, Homo Sapiens
cgccaggacacactgttcgggcgcggctttccccgtccgcggagcggtcttgacactcgcggcggcagcatctacgctcgcagagccgccgatgcgtgtccagtgacccggacagcaaggcccgcgcgcggcgggggcggcggcagacgcctggtcaccgtgaccccgattttggatttaccgcttgggggctggggggatcctggatttaactggcgactgttttgggggacgccggacgccatgttgtggaaaataaccgataatgtcaagtacgaagaggactgcgaggatcgccacgacgggagcagcaatgggaatccgcgggtcccccacctctcctccgccgggcagcacctctacagccccgcgccacccctctcccacactggagtcgccgaatatcagccgccaccctactttccccctccctaccagcagctggcctactcccagtcggccgacccctactcgcatctgggggaagcgtacgccgccgccatcaaccccctgcaccagccggcgcccacaggcagccagcagcaggcctggcccggccgccagagccaggagggagcggggctgccctcgcaccacgggcgcccggccggcctactgccccacctctccgggctggaggcgggcgcggtgagcgcccgcagggatgcctaccgccgctccgacctgctgctgccccacgcacacgccctggatgccgcgggcctggccgagaacctggggctccacgacatgcctcaccagatggacgaggtgcagaatgtcgacgaccagcacctgttgctgcacgatcagacagtcattcgcaaaggtcccatttccatgaccaagaaccctctgaacctcccctgtcagaaggagctggtgggggccgtaatgaaccccactgaggtcttctgctcagtccctggaagattgtcgctcctcagctctacgtctaaatacaaagtgacagtggctgaagtacagaggcgactgtccccacctgaatgcttaaatgcctcgttactgggaggtgttctcagaagagccaaatcgaaaaatggaggccggtccttgcgggagaagttggacaagattgggttgaatcttccggccgggaggcggaaagccgctcatgtgactctcctgacatccttagtagaaggtgaagctgttcatttggctagggactttgcctatgtctgtgaagccgaatttcctagtaaaccagtggcagaatatttaaccagacctcatcttggaggacgaaatgagatggcagctaggaagaacatgctattggcggcccagcaactgtgtaaagaattcacagaacttctcagccaagaccggacaccccatgggaccagcaggctcgccccagtcttggagacgaacatacagaactgcttgtctcatttcagcctgattacccacgggtttggcagccaggccatctgtgccgcggtgtctgccctgcagaactacatcaaagaagccctgattgtcatagacaaatcctacatgaaccctggagaccagagtccagctgattctaacaaaaccctggagaaaatggagaaacacaggaaataaaattggaacgaagaaaggttaggagagtagggaaggaacaggactgcaaaaatccttctccaccgcacagactgggaacccctcctggcctgggggaagagtttgttacctaccttactatttaaagagccttcactggttctgcatcacccgcccctggacttcttagttgtttctctagcgctgagctatctcctaactttggacctattatcagaaggtgacaagtactggctctttattcattaagctttttttttttgaaccccattctttccttctctgaaagtggtgctataagttttagaatcttttaaatacattccctgggccaacagacccacacacttagccattgaaatgtcaaattgatgtgccctagatcaacagatcaacaataccttttttttcagtgttaaggtaatggttggtttttgtgtccgctaaatatttaccttgaaaaaaagaaaagtgtgtatctagcttcttcagagatcaagtcctctggtaggaggcaaaggttctatctgcttagcaactagttaataagtggtatctgacacactctaaaccccgtgttcaaacgggggccttctggttttaggaaacttgtagaaacgaagcctgctgattgatttttttctcctttttttttttttttttttttaactttgaaagttaactcttcaaatgggagactctttgaaatgacatgttcctttaaggtactgaagctttatttgcatatttatttcagatgtttcgagtaaacttgaaaagggtaggcacgaagcaatttgttgctgcttgtcacccccaagtccccgtggaggttctgtattttaagaaacagtgcgttgagtgtacagattttatttatgcgtaatttaatggggtctgtaaatactggtgcacttcttacgacttttttgagacatgggatccaattttaatattaacttttaatggtgatggggtaatctataacacatcataaggttttattcatatatatacagggtattaagaattaagaggatgctgggctctgttcttggcttggaagattctatttaattgaaactctctgttcagaaagcaataactttgtctcgttcctgttgggctgaaccctaaggtgagtgtgcagtacagtgtgtgtgggtgaaatggagatttggaattgaactctctgcctgtaaatgttccccaaataattgttgtgtgtatgatacgtgtataataaaagtattcttgttagaatctgaaaaaaaaaaaaaaaaaaaaaaaaaaaaaaaa

SEQ ID NO: 29363 - DNA, 1741 bp, Homo Sapiens
agcggagcgcggaggccgctgggacgcggttcagctcattccctgaggccggcccgcgtcccgtcaggcgccgcgcggggttagcgcggggtcagcggaggtcagcgggggtcagcagcagcggctccgagggcgcggcggacgcaggatgtacacgctgctgtcgggcttgtacaagtacatgtttcagaaggacgagtactgcatcctgatcctgggcctggacaatgctgggaagacgaccttcctggagcagtcgaaaacccgatttaacaagaactacaaggggatgagtctatccaaaatcaccaccaccgtgggcctaaacatcggcactgtggatgtgggaaaggctcggctcatgttctgggacttaggagggcaggaagagctgcagtctttgtgggacaagtattatgcggagtgtcacggcgtcatctacgtcattgactccaccgacgaggagaggctggctgagtccaagcaggcgtttgagaaggtggtgaccagcgaggcgctgtgcggtgtccccgtcttggtgctggccaacaagcaggatgtggagacgtgcctctcaatccctgacatcaagacggccttcagcgactgcaccagcaagatcggcaggcgagattgcctgacccaggcctgctcggccctcacaggcaaaggggtgcgcgagggcatcgagtggatggtgaagtgtgtcgtgcggaatgtgcaccggccgccgcggcagagggacatcacgtaggcgcagccgcgctgccgtcgggacggctggtcccctggtgctggaggagtggcctcctgttggctcccatgctgctgatctggggggtgggtttgctttgctttggggttcttctatttactttgttttctcgaagacaaactttcctctatgtctggaaaagcgtaggcatccggaggctttggaggggagtctggcagcccggctggcccaggccctgcagcggcagcctttccacagggcgcagcggcggcctttcgaggccctttctggggggtctgagggagacctggttgggaattggggctccagtgctcaggctggcttgggctgcatgaggacagccctgtgggaccctcgggagaccccgtggctgtctccgccccatcgaggaggaggcccgtcagccatggctgccatctggcttctgccctgtgaccccgtgaccccgtgaccccggaagtggtctggggctgatcttgccttgaggaagacccaggccatgttcccaaaggccagcgggggccctggattgtgatgcagcctcgggacagggctgaggcctgcgggggaagacctataccccacgcctgggcctggcttcacctcaccctaatcccccgggagggagctgactgatgcaaaaagctgagggggcctgctgggagtggctgtttttatgccccagccccgcaagttggggagtgtttgtgggggtccagagccctcccccagccaggagagaacctcccggaggggttctctgtggggccctgtgtcccctgctcgggagtaaggctggtcctggggtcctccctgcacggaccccactgggcctgccgagtgctgtgttcttcctcagtctggctgtgggcaggagcggcctgcccagtgtcacccagggtgagtgcaaaataaagacggcgagtgtggctctgtccatcccttccctcctggagggtggaggctcctggctgttggacacgg

SEQ ID NO: 29364 - DNA, 5010 bp, Homo Sapiens
ggcggctcgggacggaggacgcgctagtgtgagtgcgggcttctagaactacaccgaccctcgtgtcctcccttcatcctgcggggctggctggagcggccgctccggtgctgtccagcagccatagggagccgcacggggagcgggaaagcggtcgcggccccaggcggggcggccgggatggagcggggccgcgagcctgtggggaaggggctgtggcggcgcctcgagcggctgcaggttcttctgtgtggcagttcagaatgatggatcaagctagatcagcattctctaacttgtttggtggagaaccattgtcatatacccggttcagcctggctcggcaagtagatggcgataacagtcatgtggagatgaaacttgctgtagatgaagaagaaaatgctgacaataacacaaaggccaatgtcacaaaaccaaaaaggtgtagtggaagtatctgctatgggactattgctgtgatcgtctttttcttgattggatttatgattggctacttgggctattgtaaaggggtagaaccaaaaactgagtgtgagagactggcaggaaccgagtctccagtgagggaggagccaggagaggacttccctgcagcacgtcgcttatattgggatgacctgaagagaaagttgtcggagaaactggacagcacagacttcaccagcaccatcaagctgctgaatgaaaattcatatgtccctcgtgaggctggatctcaaaaagatgaaaatcttgcgttgtatgttgaaaatcaatttcgtgaatttaaactcagcaaagtctggcgtgatcaacattttgttaagattcaggtcaaagacagcgctcaaaactcggtgatcatagttgataagaacggtagacttgtttacctggtggagaatcctgggggttatgtggcgtatagtaaggctgcaacagttactggtaaactggtccatgctaattttggtactaaaaaagattttgaggatttatacactcctgtgaatggatctatagtgattgtcagagcagggaaaatcacctttgcagaaaaggttgcaaatgctgaaagcttaaatgcaattggtgtgttgatatacatggaccagactaaatttcccattgttaacgcagaactttcattctttggacatgctcatctggggacaggtgacccttacacacctggattcccttccttcaatcacactcagtttccaccatctcggtcatcaggattgcctaatatacctgtccagacaatctccagagctgctgcagaaaagctgtttgggaatatggaaggagactgtccctctgactggaaaacagactctacatgtaggatggtaacctcagaaagcaagaatgtgaagctcactgtgagcaatgtgctgaaagagataaaaattcttaacatctttggagttattaaaggctttgtagaaccagatcactatgttgtagttggggcccagagagatgcatggggccctggagctgcaaaatccggtgtaggcacagctctcctattgaaacttgcccagatgttctcagatatggtcttaaaagatgggtttcagcccagcagaagcattatctttgccagttggagtgctggagactttggatcggttggtgccactgaatggctagagggatacctttcgtccctgcatttaaaggctttcacttatattaatctggataaagcggttcttggtaccagcaacttcaaggtttctgccagcccactgttgtatacgcttattgagaaaacaatgcaaaatgtgaagcatccggttactgggcaatttctatatcaggacagcaactgggccagcaaagttgagaaactcactttagacaatgctgctttccctttccttgcatattctggaatcccagcagtttctttctgtttttgcgaggacacagattatccttatttgggtaccaccatggacacctataaggaactgattgagaggattcctgagttgaacaaagtggcacgagcagctgcagaggtcgctggtcagttcgtgattaaactaacccatgatgttgaattgaacctggactatgagaggtacaacagccaactgctttcatttgtgagggatctgaaccaatacagagcagacataaaggaaatgggcctgagtttacagtggctgtattctgctcgtggagacttcttccgtgctacttccagactaacaacagatttcgggaatgctgagaaaacagacagatttgtcatgaagaaactcaatgatcgtgtcatgagagtggagtatcacttcctctctccctacgtatctccaaaagagtctcctttccgacatgtcttctggggctccggctctcacacgctgccagctttactggagaacttgaaactgcgtaaacaaaataacggtgcttttaatgaaacgctgttcagaaaccagttggctctagctacttggactattcagggagctgcaaatgccctctctggtgacgtttgggacattgacaatgagttttaaatgtgatacccatagcttccatgagaacagcagggtagtctggtttctagacttgtgctgatcgtgctaaattttcagtagggctacaaaacctgatgttaaaattccatcccatcatcttggtactactagatgtctttaggcagcagcttttaatacagggtagataacctgtacttcaagttaaagtgaataaccacttaaaaaatgtccatgatggaatattcccctatctctagaattttaagtgctttgtaatgggaactgcctctttcctgttgttgttaatgaaaatgtcagaaaccagttatgtgaatgatctctctgaatcctaagggctggtctctgctgaaggttgtaagtggttcgcttactttgagtgatcctccaacttcatttgatgctaaataggagataccaggttgaaagacctctccaaatgagatctaagcctttccataaggaatgtagcaggtttcctcattcctgaaagaaacagttaactttcagaagagatgggcttgttttcttgccaatgaggtctgaaatggaggtccttctgctggataaaatgaggttcaactgttgattgcaggaataaggccttaatatgttaacctcagtgtcatttatgaaaagaggggaccagaagccaaagacttagtatattttcttttcctctgtcccttcccccataagcctccatttagttctttgttatttttgtttcttccaaagcacattgaaagagaaccagtttcaggtgtttagttgcagactcagtttgtcagactttaaagaataatatgctgccaaattttggccaaagtgttaatcttaggggagagctttctgtccttttggcactgagatatttattgtttatttatcagtgacagagttcactataaatggtgtttttttaatagaatataattatcggaagcagtgccttccataattatgacagttatactgtcggttttttttaaataaaagcagcatctgctaataaaacccaacagatactggaagttttgcatttatggtcaacacttaagggttttagaaaacagccgtcagccaaatgtaattgaataaagttgaagctaagatttagagatgaattaaatttaattaggggttgctaagaagcgagcactgaccagataagaatgctggttttcctaaatgcagtgaattgtgaccaagttataaatcaatgtcacttaaaggctgtggtagtactcctgcaaaattttatagctcagtttatccaaggtgtaactctaattcccatttgcaaaatttccagtacctttgtcacaatcctaacacattatcgggagcagtgtcttccataatgtataaagaacaaggtagtttttacctaccacagtgtctgtatcggagacagtgatctccatatgttacactaagggtgtaagtaattatcgggaacagtgtttcccataattttcttcatgcaatgacatcttcaaagcttgaagatcgttagtatctaacatgtatcccaactcctataattccctatcttttagttttagttgcagaaacattttgtggtcattaagcattgggtgggtaaattcaaccactgtaaaatgaaattactacaaaatttgaaatttagcttgggtttttgttacctttatggtttctccaggtcctctacttaatgagatagcagcatacatttataatgtttgctattgacaagtcattttaatttatcacattatttgcatgttacctcctataaacttagtgcggacaagttttaatccagaattgaccttttgacttaaagcagagggactttgtatagaaggtttgggggctgtggggaaggagagtcccctgaaggtctgacacgtctgcctacccattcgtggtgatcaattaaatgtaggtatgaataagttcgaagctccgtgagtgaaccatcatataaacgtgtagtacagctgtttgtcatagggcagttggaaacggcctcctagggaaaagttcatagggtctcttcaggttcttagtgtcacttacctagatttacagcctcacttgaatgtgtcactactcacagtctctttaatcttcagttttatctttaatctcctcttttatcttggactgacatttagcgtagctaagtgaaaaggtcatagctgagattcctggttcgggtgttacgcacacgtacttaaatgaaagcatgtggcatgttcatcgtataacacaatatgaatacagggcatgcattttgcagcagtgagtctcttcagaaaacccttttctacagttagggttgagttacttcctatcaagccagtacgtgctaacaggctcaatattcctgaatgaaatatcagactagtgacaagctcctggtcttgagatgtcttctcgttaaggagtagggccttttggaggtaaaggtata

SEQ ID NO: 29365 - DNA, 4119 bp, Homo Sapiens
ctggagagcctgctgcccgcccgcccgtaaaatggtcccctcggctggacagctcgccctgttcgctctgggtattgtgttggctgcgtgccaggccttggagaacagcacgtccccgctgagtgcagacccgcccgtggctgcagcagtggtgtcccattttaatgactgcccagattcccacactcagttctgcttccatggaacctgcaggtttttggtgcaggaggacaagccagcatgtgtctgccattctgggtacgttggtgcacgctgtgagcatgcggacctcctggccgtggtggctgccagccagaagaagcaggccatcaccgccttggtggtggtctccatcgtggccctggctgtccttatcatcacatgtgtgctgatacactgctgccaggtccgaaaacactgtgagtggtgccgggccctcatctgccggcacgagaagcccagcgccctcctgaagggaagaaccgcttgctgccactcagaaacagtggtctgaagagcccagaggaggagtttggccaggtggactgtggcagatcaataaagaaaggcttcttcaggacagcactgccagagatgcctgggtgtgccacagaccttcctacttggcctgtaatcacctgtgcagccttttgtgggccttcaaaactctgtcaagaactccgtctgcttggggttattcagtgtgacctagagaagaaatcagcggaccacgatttcaagacttgttaaaaaagaactgcaaagagacggactcctgttcacctaggtgaggtgtgtgcagcagttggtgtctgagtccacatgtgtgcagttgtcttctgccagccatggattccaggctatatatttctttttaatgggccacctccccacaacagaattctgcccaacacaggagatttctatagttattgttttctgtcatttgcctactggggaagaaagtgaaggaggggaaactgtttaatatcacatgaagaccctagctttaagagaagctgtatcctctaaccacgagactctcaaccagcccaacatcttccatggacacatgacattgaagaccatcccaagctatcgccacccttggagatgatgtcttatttattagatggataatggttttatttttaatctcttaagtcaatgtaaaaagtataaaaccccttcagacttctacattaatgatgtatgtgttgctgactgaaaagctatactgattagaaatgtctggcctcttcaagacagctaaggcttgggaaaagtcttccagggtgcggagatggaaccagaggctgggttactggtaggaataaaggtaggggttcagaaatggtgccattgaagccacaaagccggtaaatgcctcaatacgttctgggagaaaacttagcaaatccatcagcagggatctgtcccctctgttggggagagaggaagagtgtgtgtgtctacacaggataaacccaatacatattgtactgctcagtgattaaatgggttcacttcctcgtgagccctcggtaagtatgtttagaaatagaacattagccacgagccataggcatttcaggccaaatccatgaaagggggaccagtcatttattttccattttgttgcttggttggtttgttgctttatttttaaaaggagaagtttaactttgctatttattttcgagcactaggaaaactattccagtaatttttttttcctcatttccattcaggatgccggctttattaacaaaaactctaacaagtcacctccactatgtgggtcttcctttcccctcaagagaaggagcaattgttcccctgacatctgggtccatctgacccatggggcctgcctgtgagaaacagtgggtcccttcaaatacatagtggatagctcatccctaggaattttcattaaaatttggaaacagagtaatgaagaaataatatataaactccttatgtgaggaaatgctactaatatctgaaaagtgaaagatttctatgtattaactcttaagtgcacctagcttattacatcgtgaaaggtacatttaaaatatgttaaattggcttgaaattttcagagaattttgtcttcccctaattcttcttccttggtctggaagaacaatttctatgaattttctctttattttttttttataattcagacaattctatgacccgtgtcttcatttttggcactcttatttaacaatgccacacctgaagcacttggatctgttcagagctgaccccctagcaacgtagttgacacagctccaggtttttaaattactaaaataagttcaagtttacatcccttgggccagatatgtgggttgaggcttgactgtagcatcctgcttagagaccaatcaatggacactggtttttagacctctatcaatcagtagttagcatccaagagactttgcagaggcgtaggaatgaggctggacagatggcggaacgagaggttccctgcgaagacttgagatttagtgtctgtgaatgttctagttcctaggtccagcaagtcacacctgccagtgccctcatccttatgcctgtaacacacatgcagtgagaggcctcacatatacgcctccctagaagtgccttccaagtcagtcctttggaaaccagcaggtctgaaaaagaggctgcatcaatgcaagcctggttggaccattgtccatgcctcaggatagaacagcctggcttatttggggatttttcttctagaaatcaaatgactgataagcattggctccctctgccatttaatggcaatggtagtctttggttagctgcaaaaatactccatttcaagttaaaaatgcatcttctaatccatctctgcaagctccctgtgtttccttgccctttagaaaatgaattgttcactacaattagagaatcatttaacatcctgacctggtaagctgccacacacctggcagtggggagcatcgctgtttccaatggctcaggagacaatgaaaagcccccatttaaaaaaataacaaacattttttaaaaggcctccaatactcttatggagcctggatttttcccactgctctacaggctgtgactttttttaagcatcctgacaggaaatgttttcttctacatggaaagatagacagcagccaaccctgatctggaagacagggccccggctggacacacgtggaaccaagccagggatgggctggccattgtgtccccgcaggagagatgggcagaatggccctagagttcttttccctgagaaaggagaaaaagatgggattgccactcacccacccacactggtaagggaggagaatttgtgcttctggagcttctcaagggattgtgttttgcaggtacagaaaactgcctgttatcttcaagccaggttttcgagggcacatgggtcaccagttgctttttcagtcaatttggccgggatggactaatgaggctctaacactgctcaggagacccctgccctctagttggttctgggctttgatctcttccaacctgcccagtcacagaaggaggaatgactcaaatgcccaaaaccaagaacacattgcagaagtaagacaaacatgtatatttttaaatgttctaacataagacctgttctctctagccattgatttaccaggctttctgaaagatctagtggttcacacagagagagagagagtactgaaaaagcaactcctcttcttagtcttaataatttactaaaatggtcaacttttcattatctttattataataaacctgatgcttttttttagaactccttactctgatgtctgtatatgttgcactgaaaaggttaatatttaatgttttaatttattttgtgtggtaagttaattttgatttctgtaatgtgttaatgtgattagcagttattttccttaatatctgaattatacttaaagagtagtgagcaatataagacgcaattgtgtttttcagtaatgtgcattgttattgagttgtactgtaccttatttggaaggatgaaggaatgaacctttttttcctaaaaaaaaaaaaaaaaaaaaaaaaaaaaaaaaa

SEQ ID NO: 29366 - DNA, 4208 bp, Homo Sapiens
tctttaagatttgtagctactaagaaagaaaggagctttttttccttgggccttcaaactgaaagaaccgcatgagcctgacggcgcatggtcttaacatcaggctgtgcaggaagaagctatctgcagatggatgccagcacacacaaggaagcagagctctggcaacattgagtcaaagcaaggacacaacatcagagggacggcagagaatccttgtgtgtagtctttggtggcagtttgaaaattgcaaggagggactttaagactacttctgatttgcaaagatggtctgtgctccgagcaggctaaagtgactggacgagacgcactgttggagaaataaaaatgacttcccattatgtgattgccatctttgccctgatgagcttctgtttagccactgcaggtccagagcctggtgcactgtgtgaactgtcacctgtcagtgcctcccatcctgtccaggccttgatggagagcttcactgttttgtcaggctgtgccagcagaggcacaactgggctgccacaggaggtgcatgtcctgaatctcgcactgcgccaggggcctggccagctacagagagaggtcacacttcacctgaatcccatctcctcagtccacatccaccacaagtctgttgtgttcctgctcaactccccacaccccctggtgtggcatctgaagacagagagacttgccactggggtctccagactgtttttggtgtctgagggttctgtggtccagttttcatcagcaaacttctccttgacagcagaaacagaagaaaggaacttcccccatggaaatgaacatctgttaaattgggcccgaaaagagtatggagcagttacttcattcaccgaactcaagatagcaagaaacatttatattaaagtgggggaagatcaagtgttccctccaaagtgcaacatagggaagaattttctctcactcaattaccttgctgagtaccttcaacccaaagcagcagaagggtgtgtgatgtccagccagccccagaatgaggaagtacacatcatcgagctaatcacccccaactctaacccctacagtgctttccaggtggatataacaattgatataagaccttctcaagaggatcttgaagtggtcaaaaatctcatcctgatcttgaagtgcaaaaagtctgtcaactgggtgatcaaatcttttgatgttaagggaagcctgaaaattattgctcctaacagtattggctttggaaaagagagtgaaagatctatgacaatgaccaaatcaataagagatgacattccttcaacccaagggaatctggtgaagtgggctttggacaatggctatagtccaataacttcatacacaatggctcctgtggcaatagtatttcatcttcggcttgaaaataatgaggagatgggagatgaggaagtccacactattcctcctgagctacggatcctgctggaccctggtgccctgcctgccctgcagaacccgcccatccggggaggggaaggccaaaatggaggccttccgtttcctttcccagatatttccaggagagtctggaatgaagagggagaagatgggctccctcggccaaaggaccctgtcattcccagcatacaactgtttcctggtctcagagagccagaagaggtgcaagggagcgtggatattgccctgtctgtcaaatgtgacaatgagaagatgatcgtggctgtagaaaaagattcttttcaggccagtggctactcggggatggacgtcaccctgttggatcctacctgcaaggccaagatgaatggcacacactttgttttggagtctcctctgaatggctgcggtactcggccccggtggtcagcccttgatggtgtggtctactataactccattgtgatacaggttccagcccttggggacagtagtggttggccagatggttatgaagatctggagtcaggtgataatggatttccgggagatatggatgaaggagatgcttccctgttcacccgacctgaaatcgtggtgtttaattgcagccttcagcaggtgaggaaccccagcagcttccaggaacagccccacggaaacatcaccttcaacatggagctatacaacactgacctctttttggtgccctcccagggcgtcttctctgtgccagagaatggacacgtttatgttgaggtatctgttactaaggctgaacaagaactgggatttgccatccaaacgtgctttatctctccatattcgaaccctgataggatgtctcattacaccattattgagaatatttgtcctaaagatgaatctgtgaaattctacagtcccaagagagtgcacttccctatcccgcaagctgacatggataagaagcgattcagctttgtcttcaagcctgtcttcaacacctcactgctctttctacagtgtgagctgacgctgtgtacgaagatggagaagcacccccagaagttgcctaagtgtgtgcctcctgacgaagcctgcacctcgctggacgcctcgataatctgggccatgatgcagaataagaagacgttcaccaagccccttgctgtgatccaccatgaagcagaatctaaagaaaaaggtccaagcatgaaggaaccaaatccaatttctccaccaattttccatggtctggacaccctaaccgtgatgggcattgcgtttgcagcctttgtgatcggagcactcctgacgggggccttgtggtacatctattctcacacaggggagacagcaggaaggcagcaagtccccacctccccgccagcctcggaaaacagcagtgctgcccacagcatcggcagcacgcagagcacgccttgctccagcagcagcacggcctagcccaacccaggcccaacccggcccaacccagcccagcccagctcagctcagctactccaagggcaggaccaatggctgagcctcgtgtccagactcagagggctggattttggttcccttgtaaagacagagtgaatttcagtataaagatcacccgttgtattcaccccacacccagggctagtataaacatgaccctgggcttctgtaccacactagaattcatgtgagaaagctaaaatggtggtcttctccaccagcccctcacaggcttgggggttttctatgtgaaacacatgccagtttttaaaatgctgctttgtccaggtgagaacatccataatttggggccctgagttttacccagactcaaggagttggtaaagggttaatagccagatagtagaaccagtgaggagatgcggccaaagattctttatatctgaaccaagatgtaaaacaagaaatgctttgaggctttctaagcgatcctcctgtctaatttgcacctttgtctggatgcactcttctgaccttgctgccacaacctgtggggtctgatgtgtcccaagatgggtgctgccctcagggactgcaccctgacaagtgttaaggcaacattccttgcttgtgccctgggccaaaaccaatgctgatgaccttatcagcttcctgtttcttcccatactgcatacaccactgcaaaatgtcttaatgcaaattttgtatttcttacaggcctacagaaattgaaaatgaccaaaatcaggaaccacagatttgtgcccattcctaatattttgttctgcaaattaatgtataatttgaggtgaaattcagttataaagtcaaggacgaatttgcacagtgatatatttctatgtgtatgcaagtacaagtatataatatgtcacctggcacattcattttctcagttgaagaagagaaaatttgaaaatgtccttatgcttttagagttgcaacttaagtatatttggtagggtgagtgtttccactcaaaatatgtcaacttaaaaaaaaataggccctttcataaaaaccaaactgtagcaagatgcaaatgcatggcaaatctgtcggtctccagttggttatctgaatagtgtcaccaattccaccaagacagtgctgagattggaaagggcactcatttggattgccttacttctcttgccttaaatatatcccatatatttaatatgtcaaaaagggcttgaggtgaatttcattaaatggaataatatgatgccactttgcagctaaaataagctcagtgatacctccttgtt

SEQ ID NO: 29367 - DNA, 2616 bp, Homo Sapiens
agaggagcctgagaagaggcagaggaaggcgaaacatggctgctctaggagtccagagtatcaactggcagacggccttcaaccgacaagcgcatcacacagacaagttctccagccaggagctcatcttgcggagaggccaaaacttccaggtcttaatgatcatgaacaaaggccttggctctaacgaaagactggagttcattgtctccacagggccttacccctcagagtcggccatgacgaaggctgtgtttccactctccaatggcagtagtggtggctggagtgcggtgcttcaggccagcaatggcaatactctgactatcagcatctccagtcctgccagcgcacccataggacggtacacaatggccctccagatcttctcccagggcggcatctcctctgtgaaacttgggacgttcatactgctttttaacccctggctgaatgtggatagcgtctttatgggtaaccacgctgagagagaagagtatgttcaggaagatgccggcatcatctttgtgggaagcacaaaccgaattggcatgattggctggaactttggacagtttgaagaagacattctcagcatctgcctctcaatcttggataggagtctgaatttccgccgtgacgctgctactgatgtggccagcagaaatgaccccaaatacgttggccgggtgctgagtgccatgatcaatagcaatgatgacaatggtgtgcttgctgggaattggagcggcacttacaccggtggccgggacccaaggagctggaacggcagcgtggagatcctcaaaaattggaaaaaatctggcttcagcccagtccgatatggccagtgctgggtctttgctgggaccctcaacacagcgctgcggtctttggggattccttcccgggtgatcaccaacttcaactcagctcatgacacagaccgaaatctcagtgtggatgtgtactacgaccccatgggaaaccccctggacaagggtagtgatagcgtatggaatttccatgtctggaatgaaggctggtttgtgaggtctgacctgggcccctcgtacggtggatggcaggtgttggatgctaccccgcaggaaagaagccaaggggtgttccagtgcggccccgcttcggtcattggtgttcgagagggtgatgtgcagctgaacttcgacatgccctttatcttcgcggaggttaatgccgaccgcatcacctggctgtacgacaacaccactggcaaacagtggaagaattccgtgaacagtcacaccattggcaggtacatcagcaccaaggcggtgggcagcaatgctcgcatggacgtcacggacaagtacaagtacccagaaggctctgaccaggaaagacaagtgttccaaaaggctttggggaaacttaaacccaacacgccatttgccgcgacgtcttcaatgggtttggaaacagaggaacaggagcccagcatcatcgggaagctgaaggtcgctggcatgctggcagtaggcaaagaagtcaacctggtcctactgctcaaaaacctgagcagggatacgaagacagtgacagtgaacatgacagcctggaccatcatctacaacggcacgcttgtacatgaagtgtggaaggactctgccacaatgtccctggaccctgaggaagaggcagaacatcccataaagatctcgtacgctcagtatgagaagtacctgaagtcagacaacatgatccggatcacagcggtgtgcaaggtcccagatgagtctgaggtggtggtggagcgggacatcatcctggacaaccccaccttgaccctggaggtgctgaacgaggctcgtgtgcggaagcctgtgaacgtgcagatgctcttctccaatccactggatgagccggtgagggactgcgtgctgatggtggagggaagcggcctgctgttgggtaacctgaagatcgacgtgccgaccctagggcccaaggagcggtcccgggtccgttttgatatcctgccctcccggagtggcaccaagcaactgctcgccgacttctcctgcaacaagttccctgcaatcaaggccatgttgtccatcgatgtagccgaatgaagggcgctggtggcctcccgtacaaacttggacaacacggagcagggagagctcaccatggaatgaaccccccgcccatgctgtccggcctgggaaaccctctccatctcccaaggctgccagacatggactccgggctccagcacatccccctctcctctcccccaggttggggctgggtccaccctgtcctatgacttgatcacttttgcacattccctggccgcttctccccagagctgcctgctctgtgagccccacagccctgctcattcctcacgcccttcaatgctgcaggatggactggcccctgacccagggactctccaaacgggatacaggagagaagctggtctagactgtttgctgatccccaacctgcacggggcattcctgcttctctctcaggccaccacagagggcaggggatggttagtcacctgccccagcactcacaccctaactcaaaataaatgttaaataagtgcgatcacacaaa

SEQ ID NO: 29368 - DNA, 1207 bp, Homo Sapiens
attgtgtcagaggaagcaaccatgcaggtgctaaccaagcgttaccccaagaactgcctgctgaccgtcatggaccggtatgcagccgaggtgcacaacatggagcaggtggtgatgatccccagccttctgcgggacgtgcagctgagtgggcctgggggccaggcccaggctgaggcccctgatctctacacctacttcaccatgctcaaggccatctgtgtggatgtggaccatgggctgctgccgcgggaggagtggcaggccaaggtggcaggcagcgaagagaatggaaccgcagagacagaggaagtcgaggacgagagtgcctcaggagagctggacctggaagcccagttccacctgcacttctccagcctccatcacatcctcatgcacctcaccgagaaagcccaggaggtgacaaggaaataccaggaaatgacgggacaagtttggtagaccttggacactagggaagatcccttcacatgatagaagacagactctttgatgaggtcggcggagcagttcactagccaatgatgagagcagaaaggcctagacctgcagccagaagtgaaggcggctcagttctccgggatgcttctctacctcctgagcaccaattcctggattccagtcactggctcacctttagaatgtctgttgctattcactgctcccctcgctcctcttaacagcttggggaggtgaccagtggttcaggagggactagacaattacctgtccagtgtggtatggtaggaagagtgtaggtgttggcacgtgaccaaaattcacatccctcctcatggcagtcattcagtatgtgtacttgtacaagttatttaacccattggagcctaaattccctcatctataaaatggggataatattatctacctcacaagcttatgaaaactaaacatgatgaatcaaaagcacttggcatgtgagggctattaaaatagcctgattttttttttctccccctctccccaatgtatttgctctggcccttgctttttaccctccagagctaagaggtagcagagtctcttgggatgagtgattcaccctcttacttggcgaccactgatgagatcaacaacaggtgaactataaacctattatttattgcagaactaataaaaaatccaaagccttgtaaaaaaaaaaaaaaaaaaaaaaaaaaaaaaaaaa

SEQ ID NO: 29369 - DNA, 7171 bp, Homo Sapiens
cgggcatgctcagtgggccgggccggcaggtttgcgtggccgctgagttgccggcgccggctgagccagcggacgccgcgttccttggcggccgccggttcccgggaagttacgtggcgaagccggcttccgaggagacgccgggaggccacgggtgctgctgacgggcgggcgaccgggcgaggccgacgtggccgggctgcgaaagctgcgggaggccgagtgggtggccgcgctcggagggaggtgccggtcgggcgcgccccgtggagaagacccgggcggggcgggcgcttcccggacttttgtccgagttgaattccctccccctgggccgggcccttccggccgcccccgcccgtgccccgctcgctctcgggagatgtttatttgggctgtggcgtgaggagcgggcgggccagcgccgcggagtttcgggtccgaggagcctcgcgcggcgctggagagagacaagatgtccgccagagctgcggccgccaagagcacagcaatggaggaaacagctatatgggaacaacatacagtgacgcttcacagggctcctggatttggatttggaattgcaatatctggtggacgagataatcctcattttcagagtggggaaacgtcaatagtgatttcagatgtgctgaaaggaggaccagctgaaggacagctacaggaaaatgaccgagttgcaatggttaacggagtttcaatggataatgttgaacatgcttttgctgttcagcaactaaggaaaagtgggaaaaatgcaaaaattacaattagaaggaagaagaaagttcaaataccagtaagtcgtcctgatcctgaaccagtatctgataatgaagaagatagttatgatgaggaaatacatgatccaagaagtggccggagtggtgtggttaacagaaggagtgagaagatttggccgagggatagaagtgcaagtagagagaggagcttgtccccgcggtcagacaggcggtcagtggcttccagccagcctgctaaacctactaaagtcacactggtgaaatcccggaaaaatgaagaatatggtcttcgattggcaagccatatatttgttaaggaaatttcacaagatagtttggcagcaagagatggcaatattcaagaaggtgatgttgtattgaagataaatggtactgtgacagaaaatatgtcattgacagatgcaaagacattgatagaaaggtctaaaggcaaattaaaaatggtagttcaaagagatgaacgggctacgctattgaatgtccctgatctttctgacagcatccactctgctaatgcctctgagagagacgacatttcagaaattcagtcactggcatcagatcattctggtcgatcacacgataggcctccccgccgcagccggtcacgatctcctgaccagcggtcagagccttctgatcattccaggcactcgccgcagcagccaagcaatggcagtctccggagtagagatgaagagagaatttctaaacctggggctgtctcaactcctgtaaagcatgctgatgatcacacacctaaaacagtggaagaagttacagttgaaagaaatgagaaacaaacaccttctcttccagaaccaaagcctgtgtatgcccaagttggcaaccagatgtggatttacctgtcagtccatctgatggtgtcctacctaattcaactcatgaagatgggatttcttcggcccagcatgaaattggtaaaattcagaaaaggagatagtgtgggtttgcggctggctggtggaaatgatgttggaatatttgtagctggcgttctagaagatagccctgcagccaaggaaggcttagaggaaggtgatcaaattctcagggtaaacaacgtagattttacaaatatcataagagaagaagccgtccttttcctgcttgacctccctaaaggagaagaagtgaccatattggctcagaagaagaaggatgtttatcgtcgcattgtagaatcagatgtaggagattctttctatattagaacccattttgaatatgaaaaggaatctccctatggacttagttttaacaaaggagaggtgttccgtgttgtggataccttgtacaatggaaaactgggctcttggcttgctattcgaattggtaaaaatcataaggaggtagaacgaggcatcatccctaataagaacagagctgagcagctagccagtgtacagtatacacttccaaaaacagcaggcggagaccgtgctgacttctggagattcagaggtcttcgcagctccaagagaaatcttcgaaaaagcagagaggatttgtccgctcagcctgttcaaacaaagtttccagcttatgaaagagtggttcttcgagaagctggatttctgaggcctgtaaccatttttggaccaatagctgatgttgccagagaaaagctggcaagagaagaaccagatatttatcaaattgcaaagagtgaaccacgagacgctggaactgaccaacgtagctctggcattattcgcctgcatacaataaagcaaatcatagatcaagacaaacatgctttattagatgtaacaccaaatgcagttgatcgtcttaactatgcccagtggtatccaattgttgtatttcttaaccctgattctaagcaaggagtaaaaacaatgagaatgaggttatgtccagaatctcggaaaagtgccaggaagttatacgagcgatctcataaacttcgtaaaaataatcaccatctttttacaactacaattaacttaaattcaatgaatgatggttggtatggtgcgctgaaagaagcaattcaacaacagcaaaaccagctggtatgggtttccgagggaaaggcggatggtgctacaagtgatgaccttgatttgcatgatgatcgtctgtcctacctgtcagctccaggtagtgaatactcaatgtatagcacggacagtagacacacttctgactatgaagacacagacacagaaggcggggcctacactgatcaagaactagatgaaactcttaatgatgaggttgggactccaccggagtctgccattacacggtcctctgagcctgtaagagaggactcctctggaatgcatcatgaaaaccaaacatatcctccttactcaccacaagcgcagccacaaccaattcatagaatagactcccctggatttaagccagcctctcaacagaaagcagaagcttcatctccagtcccttacctttcgcctgaaacaaacccagcatcatcaacctctgctgttaatcataatgtaaatttaactaatgtcagactggaggagcccaccccagctccttccacctcttactcaccacaagctgattctttaagaacaccaagtactgaggcagctcacataatgctaagagatcaagaaccatcattgtcgtcgcatgtagatccaacaaaggtgtatagaaaggatccatatcccgaggaaatgatgaggcagaaccatgttttgaaacagccagccgttagtcacccagggcacaggccagacaaagagcctaatctgacctatgaaccccaactcccatacgtagagaaacaagccagcagagacctcgagcagcccacatacagatacgagtcctcaagctatacggaccagttttctcgaaactatgaacatcgtctgcgatacgaagatcgcgtccccatgtatgaagaacagtggtcatattatgatgacaaacagccctacccatctcggccaccttttgataatcagcactctcaagaccttgactccagacagcatcccgaagagtcctcagaacgagggtactttccacgttttgaagagccagcccctctgtcttacgacagcagaccacgttacgaacaggcacctagagcatccgccctgcggcacgaagagcagccagctcctgggtatgacacacatggtagactcagaccggaagcccagccccacccttcagcagggcccaagcctgcagagtccaagcagtattttgagcaatattcacgcagttacgagcaagtaccaccccaaggatttacctctagagcaggtcattttgagcctctccatggtgctgcagctgtccctccgctgataccttcatctcagcataagccagaagctctgccttcaaacaccaaaccactgcctccacccccaactcaaaccgaagaagaggaagatccagcaatgaagccacagtctgtactcaccagagttaagatgtttgaaaacaaaagatctgcatccttagagaccaagaaggatgtaaatgacactggcagttttaagcctccagaagtagcatctaaaccttcaggtgctcccatcattggtcccaaacccacttctcagaatcaattcagtgaacatgacaaaactctgtacaggatcccagaacctcaaaaacctcaactgaagccacctgaagatattgttcggtccaatcattatgaccctgaagaagatgaagaatattatcgaaaacagctgtcatactttgaccgaagaagttttgagaataagcctcctgcacacattgccgccagccatctctccgagcctgcaaagccagctcattctcagaatcaatcaaatttttctagttattcttcaaagggaaagcctcctgaagctgatggtgtggatagatcatttggcgagaaacgctatgaacccatccaggccactccccctcctcctccattgccctcgcagtatgcccagccatctcagcctgtcaccagcgcgtctctccacatacattctaagggagcacatggtgaaggtaattcagtgtcattggattttcagaattccttagtgtccaaaccagacccacctccatctcagaataagccagcaactttcagaccaccaaaccgagaagatactgctcaggcagctttctatccccagaaaagttttccagataaagccccagttaatggaactgaacagactcagaaaacagtcactccagcatacaatcgattcacaccaaaaccatatacaagttctgcccgaccatttgaacgcaagtttgaaagtcctaaattcaatcacaatcttctgccaagtgaaactgcacataaacctgacttgtcttcaaaaactcccacttctccaaaaactcttgtgaaatcgcacagtttggcacagcctcctgagtttgacagtggagttgaaactttctctatccatgcagagaagcctaaatatcaaataaataatatcagcacagtgcctaaagctattcctgtgagtccttcagctgtggaagaggatgaagatgaagatggtcatactgtggtggccacagcccgaggcatatttaacagcaatgggggcgtgctgagttccatagaaactggtgttagtataattatccctcaaggagccattcccgaaggagttgagcaggaaatctatttcaaggtctgccgggacaacagcatccttccacctttagataaagagaaaggtgaaacactgctgagtcctttggtgatgtgtggtccccatggcctcaagttcctgaagcctgtggagctgcgcttaccacactgtgatcctaaaacctggcaaaacaagtgtcttcccggagatccaaattatctcgttggagcaaactgtgtttctgtccttattgaccacttttaactcttgaaatataggaacttaaataatgtgaaactggattaaacttaatctaaatggaaccactctatcaagtattataccttttttagagttgatactacagtttgttagtatgaggcatttgtttgaactgataaagatgagtgagcatgcccctgaaccatggtcggaaaacatgctacacactgcatgtttgtgattgacgggactgttggtattggctagaggttcaaagatattttgctttgtgatttttgtaatttttttatcgtcactgcttaacttcacatattgatttccgttaaaataccagccagtaaatgggggtgcatttgaggtctgttctttccaaagtacactgtttcaaactttactatggccctggcctagcatacgtacacattttattttattatgcatgaagtaatatgcacacattttttaaatgcacctggaatatataaccagtgttgtggatttaacagaaatgtacagcaaggagatttacaactgggggagggtgaagtgaagacaatgacttactgtacatgaaaacacatttttcttagggaaggatacaaaagcatgtgagactggttccatggcctcttcagatctctaacttcaccatattaccacagacatactaaccagcagaaatgccttaccctcatgttcttaattcttagctcattctccttgtgttactaagtttttatggcttttgtgcattatctagatactgtatcatgacaaagactgagtacgttgtgcatttggtggtttcagaaatgtgttatcacccagaagaaaatagtggtgtgatttggggatatttttttcttttcttttcttttctttttttttttttttgacaaggggcagtggtggttttctgttctttctggctatgcatttgaaaattttgatgttttaaggatgcttgtacataatgcgtgcataccacttttgttcttggtttgtaaattaacttttataaactttaccttttttatacataaacaagaccacgtttctaaaggctacctttgtattctctcctgtacctcttgagccttgaactttgacctctgcagcaataaagcagcgtttctatgacacatgcaaggtcattttttttaagaaaaaggatgcacagagttgttacatttttaagtgctgcatttaaaagatacagttactcagaattctctagtttgattaaattcttgcaaagtatccctactgtaatttgtgatacaatgctgtgccctaaagtgtatttttttactaatagacaatttattatggcacatcagcacgatttctgtttagataatacaccactacattctgttaatcattaggtgtgactgaatttcttttgccgttattaaaaatctcaaatttctaaatctccaaaataaaactttttaaaataaaaaaaaa

SEQ ID NO: 29370 - DNA, 2579 bp, Homo Sapiens
ctctctcctccctctttcttcgggcagcctccccaccaccccacttcagcctcccccactcttgccgcctccatatcatcaagctctggtggcgcctggggggcttttcggatcggcaggatgtacccccagggaaggcacccgaccccgctccagtccggccagcccttcaagttctcgatcttggagatctgcgaccgcatcaaagaagaattccagtttcttcaggctcaataccacagcctcaagctagaatgtgagaagctggccagcgagaagacggaaatgcagcgacattatgtcatgtattatgagatgtcgtacgggctcaacattgaaatgcataagcaggcggagattgtgaagcgtctgagcggtatctgcgctcagattatccccttcctgacccaggagcatcagcagcaggtgctccaggccgtagaacgcgccaagcaggtcaccgtgggggagctgaacagcctcatcgggcagcagctccagccgctgtcccaccacgcaccccctgtgcccctcaccccccgcccagccgggctggtgggcggcagtgctacggggctgcttgctctgtctggagccctggctgcccaggctcagctggcggcggctgtcaaggaggaccgtgcgggcgtggaggccgaggggtccagagtggagagagccccgagcaggagtgcatctccctcgccccctgagagtctcgtggaggaggagcgaccgagtggccctggtggtggcgggaagcagagagcagatgagaaggagccatcaggaccttatgaaagcgacgaagacaagagtgattacaatctggtggtggacgaggaccaaccctcagagccccccagcccggctaccaccccctgcggaaaggtacccatctgcattcctgcccgtcgggacctggtggacagtccagcctccttggcctctagccttggctcaccgctgcctagagccaaggagctcatcctgaatgaccttcccgccagcactcctgcctccaaatcctgtgactcctccccgccccaggacgcttccacccccgggcccagctcggccagtcacctctgccagcttgctgccaagccagcaccttccacggacagcgtcgccctgaggagccccctgactctgtccagtcccttcaccacgtccttcagcctgggctcccacagcactctcaacggagacctctccgtgcccagctcctacgtcagcctccacctgtccccccaggtcagcagctctgtggtgtacggacgctcccccgtgatggcatttgagtctcatccccatctccgagggtcatccgtctcttcctccctacccagcatccctgggggaaagccggcctactccttccacgtgtctgcggacgggcagatgcagccggttcccttcccctcggatgcactggtaggcgcgggcatcccgcggcacgcccggcagctgcacacgctggcccatggcgaggtggtctgcgcggtcaccatcagcggctccacacagcatgtgtacacgggcggcaagggctgtgtgaaggtgtgggacgtgggccagcctggggccaagacgcccgtggcccagctcgactgcctgaaccgagacaactacattcgttcctgcaagttgctgccggatggccggagtctgatcgtgggcggtgaggccagcaccttgtccatttgggacctggcggcgcccaccccccgtatcaaggccgagctgacttcctcagccccagcctgctacgccctggccgtcagccccgacgccaaggtttgcttctcctgctgcagcgatggcaacattgtggtctgggacctgcagaatcagactatggtcaggcagttccagggccacacggacggcgccagctgcattgatatttccgattacggcactcggctctggacagggggcctggacaacacggtgcgctgctgggacctgcgggagggccgccagctgcagcagcatgacttcagctcccagattttctccctgggccactgccctaaccaggactggctggcggtcggaatggagagtagcaacgtggagatcctgcacgtccgcaagccggagaaataccagctgcacctccacgagagctgcgtgctgtccctgaagtttgcctcctgcggacggtggtttgtgagcaccgggaaggacaacctgctcaacgcctggaggacgccgtacggggccagcattttccagtccaaggagtcgtcctcagtcctgagttgtgacatctccagaaataacaaatacatcgtgacaggctcgggggacaagaaggccaccgtgtatgaggtggtctactgagacatgaccccccttcctgtacccgaagtccagactcccaggggaatcagcagccaggacagacatcctagcagccgcctcccagccctgcctaggaaccgtacatcccatctgctctctggccaacggcttcacaccttcccctgctgcatgtgggggccgatgggcaggggacctcggtggaaataaaatgtatctatcacatccgcaaaaaaaaaaaaaaaaaa

SEQ ID NO: 29371 - DNA, 2867 bp, Homo Sapiens
acagactgccaaatggaacagacaagcaggttgtcttgtgttaaagaaaatgagatataagtcagttactcccggaggcaatgctgctgttcagctcttctgtttttgtggccagggtcttcatgaacactaataggggtaccaggccctcttcctcgttagaagaaatcaggataacaaaggcatattgggcacccctacaaaaggaatctgtatctgtatcaagatgatctgaagaacagcttctacctttaggaatgtctagtgttccaaaatgactagcatcttccattttgccattatcttcatgttaatacttcagatcagaatacaattatctgaagaaagtgaatttttagttgataggtcaaaaaacggtctcatccacgttcctaaagacctatcccagaaaacaacaatcttaaatatatcgcaaaattatatatctgagctttggacttctgacatcttatcactgtcaaaactgaggattttgataatttctcataatagaatccagtatcttgatatcagtgttttcaaattcaaccaggaattggaatacttggatttgtcccacaacaagttggtgaagatttcttgccaccctactgtgaacctcaagcacttggacctgtcatttaatgcatttgatgccctgcctatatgcaaagagtttggcaatatgtctcaactaaaatttctggggttgagcaccacacacttagaaaaatctagtgtgctgccaattgctcatttgaatatcagcaaggtcttgctggtcttaggagagacttatggggaaaaagaagaccctgagggccttcaagactttaacactgagagtctgcacattgtgttccccacaaacaaagaattccattttattttggatgtgtcagtcaagactgtagcaaatctggaactatctaatatcaaatgtgtgctagaagataacaaatgttcttacttcctaagtattctggcgaaacttcaaacaaatccaaagttatcaaatcttaccttaaacaacattgaaacaacttggaattctttcattaggatcctccagctggtttggcatacaactgtatggtatttctcaatttcaaacgtgaagctacagggtcagctggacttcagagattttgattattctggcacttccttgaaggccttgtctatacaccaagttgtcagcgatgtgttcggttttccgcaaagttatatctatgaaatcttttcgaatatgaacatcaaaaatttcacagtgtctggtacacgcatggtccacatgctttgcccatccaaaattagcccgttcctgcatttggatttttccaataatctcttaacagacacggtttttgaaaattgtgggcaccttactgagttggagacacttattttacaaatgaatcaattaaaagaactttcaaaaatagctgaaatgactacacagatgaagtctctgcaacaattggatattagccagaattctgtaagctatgatgaaaagaaaggagactgttcttggactaaaagtttattaagtttaaatatgtcttcaaatatacttactgacactattttcagatgtttacctcccaggatcaaggtacttgatcttcacagcaataaaataaagagcattcctaaacaagtcgtaaaactggaagctttgcaagaactcaatgttgctttcaattctttaactgaccttcctggatgtggcagctttagcagcctttctgtattgatcattgatcacaattcagtttcccacccatcggctgatttcttccagagctgccagaagatgaggtcaataaaagcaggggacaatccattccaatgtacctgtgagctaggagaatttgtcaaaaatatagaccaagtatcaagtgaagtgttagagggctggcctgattcttataagtgtgactacccggaaagttatagaggaaccctactaaaggactttcacatgtctgaattatcctgcaacataactctgctgatcgtcaccatcgttgccaccatgctggtgttggctgtgactgtgacctccctctgcagctacttggatctgccctggtatctcaggatggtgtgccagtggacccagacccggcgcagggccaggaacatacccttagaagaactccaaagaaatctccagtttcatgcatttatttcatatagtgggcacgattctttctgggtgaagaatgaattattgccaaacctagagaaagaaggtatgcagatttgccttcatgagagaaactttgttcctggcaagagcattgtggaaaatatcatcacctgcattgagaagagttacaagtccatctttgttttgtctcccaactttgtccagagtgaatggtgccattatgaactctactttgcccatcacaatctctttcatgaaggatctaatagcttaatcctgatcttgctggaacccattccgcagtactccattcctagcagttatcacaagctcaaaagtctcatggccaggaggacttatttggaatggcccaaggaaaagagcaaacgtggccttttttgggctaacttaagggcagccattaatattaagctgacagagcaagcaaagaaatagattacacatcaagtgaaaaatattcctcctgttgatattgctgcttttggaagttccaacaatgactttattttgcatcagcatagatgtaaacacaattgtgagtgtatgatgtaggtaaaaatatataccttcgggtcgcagttcaccatttatatgtggtattaaaaattaatgaaatgatataactttgatttaaacagttctgacacataaaaaaaaaaaaaaaaaa

SEQ ID NO: 29372 - DNA, 6982 bp, Homo Sapiens
gtggctgaggccggcagcagcgggcggcagctgcggcgcaaccggctccggagctgcctggcgcggccgggcgggcggcgccgctcaggctcgggctccggctgggcccggcgcggcctcggggctgcccatggggcgcggggggccgggccggtgacgccggacgcccatggacgcctctgaggagccgctgccgccggtgatctacaccatggagaacaagcccatcgtcacctgtgctggagatcagaatttatttacctctgtttatccaacgctctctcagcagcttccaagagaaccaatggaatggagaaggtcctatggccgggctccgaagatgattcacctagagtctaactttgttcaattcaaagaggagctgctgcccaaagaaggaaacaaagctctgctcacgtttcccttcctccatatttactggacagagtgctgtgataccgaagtgtataaagctacagtaaaagatgacctcaccaagtggcagaatgttctgaaggctcatagctctgtggactggttaatagtgatagttgaaaatgatgccaagaaaaaaaacaaaaccaacatccttccccgaacctctattgtggacaaaataagaaatgatttttgtaataaacagagtgacaggtgtgttgtgctctccgaccccttgaaggactcttctcgaactcaggaatcctggaatgccttcctgaccaaactcaggacattgcttcttatgtcttttaccaaaaacctaggcaagtttgaggatgacatgagaaccttgagggagaagaggactgagccaggctggagcttttgtgaatatttcatggttcaggaggagcttgcctttgttttcgagatgctgcagcagttcgaggacgccctggtgcagtacgacgaactggacgccctcttctctcagtatgtggtcaacttcggggccggggatggtgccaactggctgacttttttctgccagccagtgaagagctggaacggattgatcctccgaaaacccatagatatggagaagcgggaatcgatccagaggcgagaagccaccctgttagatctgcgcagttacctgttctctcgccagtgcaccttgctgctcttcctgcagaggccgtgggaggtggcccagcgcgccctagagctgctgcacaactgcgtgcaggaactgaagctcttagaagtctctgtcccacctggtgctctggactgctgggtgtttctgagctgtctggaggtgttgcagaggatagaaggctgctgtgaccgggcacagatcgactcaaacattgcccacactgtggggctatggagctatgccacagaaaagttaaagtccttgggctatctatgtggacttgtgtcagagaaaggacctaactcagaagatctcaacaggacagttgaccttttggcaggtttgggagctgagcgaccagaaacagccaacacagctcagagtccttataagaaactgaaagaagcattatcgtcagtggaagcttttgaaaaacactacttagatttgtcccatgccaccattgaaatgtatacaagcattgggaggattcgatctgctaagtttgttggaaaagatctggcagagttttacatgaggaaaaaggctccacaaaaggcagaaatctatcttcaaggagcactgaaaaactacctggctgagggctgggcactccccatcacacacacaaggaagcagctggccgaatgtcaaaagcaccttggacaaattgaaaactacctgcagaccagcagcctcttagccagtgaccaccacctcactgaagaggagcgcaagcacttctgccaggagatacttgactttgccagccagccgtcagacagcccaggtcataagatagtgctacccatgcattcctttgcacaactgcgagatctccattttgatccctccaatgccgtggtccacgtgggcggcgttttgtgcgttgagataaccatgtacagccagatgcctgtgcctgttcacgtggagcagattgtggtcaatgtccacttcagcattgagaaaaacagctaccggaagactgcggagtggcttaccaagcacaagacgtccaatgggatcattaactttccacccgagaccgcacctttccctgtatcccaaaacagtttgcccgcgctggagttgtatgaaatgtttgagagaagcccatctgataactccttgaacacgactgggattatctgcagaaacgtccacatgctcctgagaaggcaggagagcagctcctctctagagatgccctcaggggtggctctggaggagggtgcccacgtgctgaggtgcagccacgtgaccctggaaccaggggccaaccagataacattcaggactcaggccaaggaacctggaacgtatacactcaggcagctgtgcgcctcggtgggctccgtgtggttcgtcctccctcacatctaccccattgtgcagtacgacgtgtactcacaggagccccagctgcacgtggagccgctggctgatagccttctggcaggcattcctcagagagtcaagttcactgtcactaccggccattatacgataaagaatggagacagcctgcagcttagcaatgccgaagccatgctcatcctgtgccaggcggagagcagggctgtggtctactccaacacgagagaacagtcttctgaggccgcgctccggattcagtcctccgacaaggtcacgagcatcagtctgcctgttgcgcctgcgtaccacgtgatcgaatttgaactggaagttctctctttaccttcagccccagcactcggaggggagagtgacatgctggggatggcagagccccacaggaagcataaggacaaacagagaactggccgctgcatggttaccacagaccacaaagtgtcgattgactgcccgtggtccatctactccacagtcatcgcactgaccttcagcgtacccttcaggaccacacacagcctcctgtcctcaggaacacggaaatatgttcaagtttgtgtccagaatttgtcagaacttgactttcagctgtcagatagttatcttgtagataccggtgatagtaccgacctgcaactagtaccactgaacacgcagtcccagcagcccatctacagcaagcagtcggtgttcttcgtctgggaactcaagtggacagaagagcctcccccttctctgcattgccggttctctgttggattttccccagcttctgaggaacagctgtctatctccttaaagccgtatacttatgaatttaaagtggaaaatttttttacattatacaacgtgaaggctgagatctttcccccttcgggaatggagtattgcagaacaggctccctctgctccctggaggttttgatcacgaggctctcagacctcttggaggtggataaagatgaagcactgactgaatctgatgagcatttttcgacaaagcttatgtatgaagttgtcgacaacagtagcaactgggcagtgtgtgggaaaagctgcggtgtcatctccatgccagtggctgctcgggccactcacagggtccacatggaagtgatgccgctcttcgccgggtatctccccctgcccgacgtcaggctgttcaagtacctcccccatcattctgcacactcctcccaactggacgctgacagctggatagaaaacgacagcctgtcagtagacaagcacggggacgaccagccggacagcagcagcctcaagagcaggggcagcgtgcattcggcctgcagcagcgagcacaaaggcctacccatgccccggctgcaggcactgccggccggccaggtcttcaactccagctcgggcacacaagtcctggtcatccccagccaagatgaccacgtcctggaagtcagtgtaacatgacaacgccagggtgaacacacgccacttcccagctaggagtgcactttatgggactgtgactggactcttccgttctggctccagccagaccttcagtggtcctgcctggccgtggggacatcagagagtgtcatcacgcagctggccagctgagttctgttgttgttttcatgccgcctgtgatctcagattcctgcttttctcaccccgtccccatgctggtgtccgacgccgcttactcagagccctggcctccctccccctacctcacacgctgctcatgaaagtttccacccacgctgtctccacggaacagcctccgtctgctggctcttcgtggaaggccatttgtctttcaggtagacactcagcagccctcacggtcttagtgacgtgtgtgcctttctggtcacacagctgcccagtttcctgatcggggtggatttgtgtcccctaaggggtaaaacagccgtttaccgcagatcctctcattgtgcttttctagaataacacccttctaggggaggcgggtgggggagggagggatcataaccccttctgtgccttgggatgccggagctgggggacctggaggcccatcagccggagccacgtgaaaggtactgaagaaagctgagacccggctgtgaggagcgcctcagcggtgaggtggtttagggataaatgtttctggaaccctgtggtcccccataatgttgatagaatatcatatgcactgggagttaaatatatttaatttaatgatcattatatatgtgggggttaatatgttgtttttctgtccctttaaagtctttacatgtaattgtagctgtataatcgttatttttcttttgcatcttaagtcttagaaattaagatattccatcgtgaggatgagagaggtcctcagtgtgtttttggtctggttgtagggaaggactcaagtcctggaatgtcctccactggtctactgagttgcagtcacactgttccaatggattatttgctttcggttgtaaatttaattgtacatatggttgatttattatttttaaaaatacagactaactgatgtaatgtttatgtataagttgcaccaaaaatcaaggacaaaaataagtgtgtttgtttttacaggtgtgaaagtcacagcttgtaaataagtgttgtatgtattaaaccttttccagttctccaaagcgatgtatttttgtacacttgaaatagagtactcttaatttactgggcaaatgtgcttggaattgaacttgacaagattagctcaagcagatagagtcgggtccagcagtgggtggccctcgtgtgaatccccgtggatgtgcaagttgtggagagaaggagcaccgggttcctgcccagcactgtgcttgcgggaggcggtggggcatgggaggaaggaggcacagaccggggaaatatgacagccgtcatttccagtattctctgtgttgtcttttagctcattcaataaataaaggtggtgtgatttttttttcctcctgtctttttcatttgtagaaactggagacgtgtaaagaagataaataattgtgtaattaaactttccagaaatttatcttcctcatgtgcagtttaacaaacttggtcaaactagttagcaaattagaacttcagaatctaatgatagtttagggtttctaaaataaggttttttattgtaaaaattgacgattgccctgcatttctaccaagtcctgtgaataaagagatgggagatttgattccgtcagaagagactgtaatccgtgtcgtcagcctgggagccttccccagtgtaatgtagctttctctcttaccttctggaagagggaatgtttcatttattactgtttgattttcttgtatctggttctactcccaggatgaaattatccaactacatatatatttagaggaagaaagtgaaggggaaatttaaaatgtttacggcgcttaattgcctggaaatgaaatgaaatcaaatttatcagtttttttccccctaattacccaaaagatcttttgcaaactatgttacatgaatgcttctgcctctttaagacaaagaagaatgtcacccaaaattgtcatttttttcttaatgttcatcataaaagtcctaaaagagtaactgtaattggatgtttattgtttttatctaaagtaaggtgtatgtgtttgagacaagctggttttgttgataaagagatgttaaataattgtgaagccagatatgcaatgtgtatctgaaaagcaaggaatttgcagccgttttacaaatatctgtggaacatgtaaatactgtcaaatggaaaataaaataagttataatttttgtgaatttcatgggatgtcctatgattggaaaaattataactcttctgattctaatgtggaaattgttgtatttaatctgaaaatgactttacctacaacagttccattgtcagcacagcctaggagggtcagatcctgtattaattactcttagtggagatgccagatatcccatacagaattagcagagaaaatacacacaggcttctattcaaattttctttagtgcttaaaattaagttttaaaatgaaatcagacactgcaggtttgtatataaaatgaaaagctatactactttttataaaagggcaaactgggctgatgtaaatgttttactttcaactgtgttctttaaaataaatcctacctggtttttaaattttatttttcatgaaaatgctcctttctctacatttattcatcctatatacatcaggctgtaagaccccccccagtcatcattaatacaatgtgttgggattctgtgactggaaaaggtgacaagttggtgactttgacactgcaggtattccattttcatggtttactatgaaaagtcatttttcatattatgtaatatattgttagattaaaaccattgtattaagactttaaaatgtaagcattgtaattctgaaaatacacattttaagaagaaaaaaaaaaaaaaa

SEQ ID NO: 29373 - DNA, 4626 bp, Homo Sapiens; identical to SEQ ID NO: 28987

SEQ ID NO: 29374 - DNA, 5515 bp, Homo Sapiens
tgggggtctcagaatggagccctcagccctgaggaaagctggctcggagcaggaggagggctttgaggggctgcccagaagggtcactgacctggggatggtctccaatctccggcgcagcaacagcagcctcttcaagagctggaggctacagtgccccttcggcaacaatgacaagcaagaaagcctcagttcgtggattcctgaaaacatcaagaagaaagaatgcgtgtattttgtggaaagttccaaactgtctgatgctgggaaggtggtgtgtcagtgtggctacacgcatgagcagcacttggaggaggctaccaagccccacaccttccagggcacacagtgggacccaaagaaacatgtccaggagatgccaaccgatgcctttggcgacatcgtcttcacgggcctgagccagaaggtgaaaaagtacgtccgagtctcccaggacacgccctccagcgtgatctaccacctcatgacccagcactgggggctggacgtccccaatctcttgatctcggtgaccgggggggccaagaacttcaacatgaagccgcggctgaagagcattttccgcagaggcctggtcaaggtggctcagaccacaggggcctggatcatcacaggggggtcccacaccggcgtcatgaagcaggtaggcgaggcggtgcgggacttcagcctgagcagcagctacaaggaaggcgagctcatcaccatcggagtcgccacctggggcactgtccaccgccgcgagggcctgatccatcccacgggcagcttccccgccgagtacatactggatgaggatggccaagggaacctgacctgcctagacagcaaccactctcacttcatcctcgtggacgacgggacccacggccagtacggggtggagattcctctgaggaccaggctggagaagttcatatcggagcagaccaaggaaagaggaggtgtggccatcaagatccccatcgtgtgcgtggtgctggagggcggcccgggcacgttgcacaccatcgacaacgccaccaccaacggcaccccctgtgtggttgtggagggctcgggccgcgtggccgacgtcattgcccaggtggccaacctgcctgtctcggacatcactatctccctgatccagcagaaactgagcgtgttcttccaggagatgtttgagaccttcacggaaagcaggattgtcgagtggaccaaaaagatccaagatatcgtccggaggcggcagctgctgactgtcttccgggaaggcaaggatggtcagcaggacgtggatgtggccatcttgcaggccttgctgaaagcctcacggagccaagaccactttggccacgagaactgggaccaccagctgaaactggcagtggcatggaatcgcgtggacattgcccgcagtgagatcttcatggatgagtggcagtggaagccttcagatctgcaccccacgatgacagctgcactcatctccaacaagcctgagtttgtgaagctcttcctggagaacggggtgcagctgaaggagtttgtcacctgggacaccttgctctacctgtacgagaacctggacccctcctgcctgttccacagcaagctgcagaaggtgctggtggaggatcccgagcgcccggcttgcgcgcccgcggcgccccgcctgcagatgcaccacgtggcccaggtgctgcgggagctgctgggggacttcacgcagccgctttatccccggccccggcacaacgaccggctgcggctcctgctgcccgttccccacgtcaagctcaacgtgcagggagtgagcctccggtccctctacaagcgttcctcaggccatgtgaccttcaccatggaccccatccgtgaccttctcatttgggccattgtccagaaccgtcgggagctggcaggaatcatctgggctcagagccaggactgcatcgcagcggccttggcctgcagcaagatcctgaaggaactgtccaaggaggaggaggacacggacagctcggaggagatgctggcgctggcggaggagtatgagcacagagccatcggggtcttcaccgagtgctaccggaaggacgaagagagagcccagaaactgctcacccgcgtgtccgaggcctgggggaagaccacctgcctgcagctcgccctggaggccaaggacatgaagtttgtgtctcacgggggcatccaggccttcctgaccaaggtgtggtggggccagctctccgtggacaatgggctgtggcgtgtgaccctgtgcatgctggccttcccgctgctcctcaccggcctcatctccttcagggagaagaggctgcaggatgtgggcacccccgcggcccgcgcccgtgccttcttcaccgcacccgtggtggtcttccacctgaacatcctctcctacttcgccttcctctgcctgttcgcctacgtgctcatggtggacttccagcctgtgccctcctggtgcgagtgtgccatctacctctggctcttctccttggtgtgcgaggagatgcggcagctcttctatgaccctgacgagtgcgggctgatgaagaaggcagccttgtacttcagtgacttctggaataagctggacgtcggcgcaatcttgctcttcgtggcagggctgacctgcaggctcatcccggcgacgctgtaccccgggcgcgtcatcctctctctggacttcatcctgttctgcctccggctcatgcacatttttaccatcagtaagacgctggggcccaagatcatcattgtgaagcggatgatgaaggacgtcttcttcttcctcttcctgctggctgtgtgggtggtgtccttcggggtggccaagcaggccatcctcatccacaacgagcgccgggtggactggctgttccgaggggccgtctaccactcctacctcaccatcttcgggcagatcccgggctacatcgacggtgtgaacttcaacccggagcactgcagccccaatggcaccgacccctacaagcctaagtgccccgagagcgacgcgacgcagcagaggccggccttccctgagtggctgacggtcctcctactctgcctctacctgctcttcaccaacatcctgctgctcaacctcctcatcgccatgttcaactacaccttccagcaggtgcaggagcacacggaccagatttggaagttccagcgccatgacctgatcgaggagtaccacggccgccccgccgcgccgccccccttcatcctcctcagccacctgcagctcttcatcaagagggtggtcctgaagactccggccaagaggcacaagcagctcaagaacaagctggagaagaacgaggaggcggccctgctatcctgggagatctacctgaaggagaactacctccagaaccgacagttccagcaaaagcagcggcccgagcagaagatcgaggacatcagcaataaggttgacgccatggtggacctgctggacctggacccactgaagaggtcgggctccatggagcagaggttggcctccctggaggagcaggtggcccagacagcccgagccctgcactggatcgtgaggacgctgcgggccagcggcttcagctcggaggcggacgtccccactctggcctcccagaaggccgcggaggagccggatgctgagccgggaggcaggaagaagacggaggagccgggcgacagctaccacgtgaatgcccggcacctcctctaccccaactgccctgtcacgcgcttccccgtgcccaacgagaaggtgccctgggagacggagttcctgatctatgacccacccttttacacggcagagaggaaggacgcggccgccatggaccccatgggagacaccctggagccactgtccacgatccagtacaacgtggtggatggcctgagggaccgccggagcttccacgggccgtacacagtgcaggccgggttgcccctgaaccccatgggccgcacaggactgcgtgggcgcgggagcctcagctgcttcggacccaaccacacgctgtaccccatggtcacgcggtggaggcggaacgaggatggagccatctgcaggaagagcataaagaagatgctggaagtgctggtggtgaagctccctctctccgagcactgggccctgcctgggggctcccgggagccaggggagatgctacctcggaagctgaagcggatcctccggcaggagcactggccgtcttttgaaaacttgctgaagtgcggcatggaggtgtacaaaggctacatggatgacccgaggaacacggacaatgcctggatcgagacggtggccgtcagcgtccacttccaggaccagaatgacgtggagctgaacaggctgaactctaacctgcacgcctgcgactcgggggcctccatccgatggcaggtggtggacaggcgcatcccactctatgcgaaccacaagaccctcctccagaaggcagccgctgagttcggggctcactactgactgtgccctcaggctgggcggctccagtccatagacgttccccccagaaaccagggcttctctctcctgagcctggccaggactcaggctgttcctgggccctgcacatgatggggtttggtggacccagtgcccctcacggctgccgcaagtctgctgcagatgacctcatgaactggaaggggtcaaggtgacccgggaggagagctcaagacagggcacaggctactcagagctgaggggcccctgggacccttggccatcaggcgaggggctgggcctgtgcagctgggcccttggccagagtccactcccttcctggctgtgtcaccccgagcagctcatccaccatggaggtcattggcctgaggcaagttccccggagagtcgggatcccctgtggccccctcaggcctatgtctgtgaggaaggggccctgccactctccccaagagggcctccatgtttcgaggtgcctcaacatggagccttgcctggcctgggctaggggcactgtctgaactcctgactgtcaggataaactccgtgggggtacaggagcccagacaaagcccaggcctgtcaagagacgcagagggcccctgccagggttggccccagggaccctgggacgaggctgcagaagctctccctccctactccctgggagccacgtgctggccatgtggccagggacggcatgagcaggaggcggggacgtgggggccttctggtttggtgtcaacagctcacaggagcgtgaaccatgagggccctcaggaggggaacgtggtaaaacccaagacattaaatctgccatctcaggcctggctggctcttctgtgctttccacaaataaagttcctgacacgtccagggccaggggctgtgtgacggctgcctgaagttctcctcgatcccccggtgagcttcctgcagcctgtggatgtcctgcagcccctcagccctacccccaagtttctcctctga

SEQ ID NO: 29375 - DNA, 82027 bp, Homo Sapiens
agcagtcgtgcattcccagcctcgcctcgggtgtagggattgcatagaaaagcaaaactacacagtcttgactgtgtagttttgtttttaggattagaggctcaccgattcatgtcggagatggtcagaaaaaccaactctccataggacgtcgtttcagaagcaaccttgggcttagtcccaccctttttaggcactcttgagaaatcaagtgcctagaaagatgacaactcaagcaccgacgtttacgcagccgttacaaagcgttgtggtactggagggtagtaccgcaacctttgaggctcacattagtggttttccagttcctgaggtgagctggtttagggatggccaggtgatttccacttccactctgcccggcgtgcagatctcctttagcgatggccgcgctaaactgacgatccccgccgtgactaaagccaacagtggacgatattccctgaaagccaccaatggatctggacaagcgactagtactgctgagcttctcgtgaaagctgagacagcaccacccaacttcgttcaacgactgcagagcatgaccgtgagacaaggaagccaagtgagactccaagtgagagtgactggaatccctacacctgtggtgaagttctaccgggatggagccgaaatccagagctcccttgatttccaaatttcacaagaaggcgacctctacagcttactgattgcagaagcataccctgaggactcagggacctattcagtaaatgccaccaatagcgttggaagagctacttcgactgctgaattactggttcaaggtgaagaagaagtacctgctaaaaagacaaagacaattgtttcgactgctcagatctcagaatcaagacaaacccgaattgaaaagaagattgaagcccactttgatgccagatcaattgcaacagttgagatggtcatagatggtgccgctgggcaacagctgccacataaaacacctcccaggattcctccgaagccaaagtcaagatccccaacaccaccgtctattgctgccaaagcacagctggctcggcagcagtccccatcgcccataagacactccccttccccggtcagacacgtgcgggcaccgaccccatctccggtcaggtccgtgtctccagcagcaagaatctccacatcccccatcaggtctgttaggtctccattgctcatgcgtaagactcaggcatccaccgtggccacaggtcctgaagtgcctcccccttggaagcaagagggctacgtggcctcctcatctgaggctgagatgagagagacaacgctgacaacctctactcagatcaggacagaagagagatgggaagggagatacggtgtccaggagcaagtgaccatcagtggtgctgcgggtgctgccgccagtgtgtcggccagtgctagctacgcagcagaggctgttgccactggtgctaaagaggtgaaacaagatgctgacaaaagtgcagctgttgcgactgttgttgctgccgttgatatggccagagtgagagaaccagtgatcagcgctgtagagcagactgctcagaggacaaccacgactgctgtgcacatccaacctgctcaagaacaggtaagaaaggaagcggagaagactgctgtaactaaggtagtagtggccgccgataaagccaaggaacaagaattaaaatcaagaaccaaagaagtaattaccacaaagcaagagcagatgcacgtaactcatgagcagataagaaaagaaactgaaaaaacatttgtaccaaaggtagtaatttccgcagctaaagccaaagaacaagaaactagaatttctgaagaaattactaagaaacagaaacaagtaactcaagaagcaataatgaaggaaactaggaaaacagttgtacctaaagtcatagttgccacacccaaagtcaaagaacaagatttagtatcaagaggtagagaaggcattactaccaaaagagaacaagtgcaaataactcaggagaagatgagaaaggaagccgagaaaactgccttgtctacaatagcagttgctactgctaaagccaaagaacaagaaacaatactgagaactagagaaactatggctactagacaagaacaaatccaagttacccatggaaaggtggacgttggaaaaaaggctgaagctgtagcaacagttgttgctgcagtagaccaggcccgagtcagagagcccagagagcctgggcatcttgaagaatcctatgctcagcagaccactttggagtacggatataaggaacgcatttccgccgcaaaggtagctgagcctccccaacgtccagcctcagaaccccacgttgtccctaaagcagtcaagcctagagtaatccaggctccttctgagactcatatcaaaactactgatcaaaagggaatgcacatatcatcacagatcaagaaaactacagatctaacaacggaaagattagtccatgtggataaacgcccccgcacagctagccctcactttactgtttcaaaaatttctgttcctaagacagaacatggatatgaggcatcaatagccggtagtgctattgccacattacaaaaagagttgtcagccacatcttctgctcagaagatcaccaaatcggtgaaggctcctactgtgaagcccagtgagactagagtaagggcagagcccacacccttgccacagttccccttcgctgacacaccagatacttacaagagtgaagctggcgttgaggtgaaaaaggaagtaggggtgagcatcactggcaccaccgtccgtgaagagcgctttgaagtactgcacggacgcgaagccaaggtaacagaaacagcaagagtaccagcacctgttgaaattcctgttactccaccaactttggtctcgggcttaaaaaatgtgactgtcatagaaggtgaatctgtcaccttggagtgccacatctctggatacccatccccgacagtgacatggtacagggaagactaccaaatcgaaagttccattgacttccagataaccttccagagtggaattgctcgtcttatgattcgcgaagcatttgcggaagacagcgggcgatttacttgcagtgctgtaaatgaggctggaaccgtcagcacatcctgctatctggctgtgcaggtgtcagaagaatttgaaaaggaaaccacagccgtgactgagaaatttactacagaagagaaacgctttgttgagtcaagagatgtggttatgactgatactagcctcacagaggaacaagcagggcctggagaacctgccgcgccttactttattacaaaaccagtggtccagaaactggtggaaggtgggagcgtggtgtttggatgccaagttggcggcaacccaaagccccatgtatactggaaaaaatctggtgttcctctaaccactggatacagatacaaagtgagttacaacaaacaaaccggtgaatgcaagctggtgatttctatgacttttgctgatgatgctggagaatacactattgttgttcgcaataagcatggagaaacttctgcatctgcttccttgcttgaagaagctgattatgagttactgatgaagtcccagcaagaaatgctttatcagacacaagtgactgcatttgttcaagaacctaaagttggagaaacagcacctggatttgtatactctgagtatgaaaaagagtatgaaaaagaacaagccttaattaggaagaaaatggccaaagatactgtagtggtcagaacttatgtagaagatcaggaattccatatttcttcctttgaagagagacttattaaagaaattgaatatagaataataaagactacattagaagaacttcttgaagaagatggagaagaaaagatggcagttgacatttctgaatctgaagctgttgaatcaggatttgatttaagaatcaagaattatagaattcttgaggggatgggtgtcacttttcattgcaagatgtctggatatccattaccaaagattgcttggtacaaagatggcaagcgcatcaaacatggagaaagataccaaatggactttctacaagatggcagagctagtctgcgtatacctgttgttcttccagaagatgaaggaatctacactgcatttgccagcaatattaaaggaaatgcaatttgctcagggaaattgtatgtggagcctgctgcaccacttggagctccgacttacattcccacactagagccagtgagcagaatcagatctctctctccacgttcagtgagcaggtctcctatacgcatgtctcctgcacggatgtcacctgcaaggatgtctcctgcacggatgtcccctgcaagaatgtcccctggacgtaggctggaggagacagatgagtcacaacttgagagactatataaaccagtctttgtgttaaaacctgtttctttcaaatgtttagaagggcaaactgccagatttgacttaaaggttgttggtagacctatgccagagacgttctggtttcatgatggccagcaaattgtcaatgactatacccataaagtagtcattaaagaagatggtactcaatcactaattattgtccctgccacacccagtgattctggggaatggactgtggttgcccaaaacagggcaggcagatcttcaatttcagtgattttaactgtggaagctgtggaacatcaggtaaaaccgatgtttgtagaaaaactgaaaaatgtcaatataaaggaaggttcccgacttgaaatgaaagtcagagctacgggtaaccccaaccctgacattgtatggttgaaaaacagtgacatcattgtgcctcataaatatcccaaaatcagaattgaaggaaccaagggagaagctgcccttaaaatcgattccactgtcagccaagattctgcctggtatactgcgactgctattaataaagctggcagagacactacaagatgcaaagtaaatgttgaagttgagtttgcagagcctgagccagagagaaagttaatcatcccacgggggacatatagagcaaaggagattgcagccccagaactggagcccctccatttgcgatatggccaagagcaatgggaagaaggtgatctctatgacaaagagaaacaacagaaaccatttttcaagaaaaaactcacttccttaagacttaagcgctttgggcctgcccactttgaatgcaggctaacacccattggtgacccaacgatggtggtggagtggctccatgatggaaagccacttgaagcagccaacaggctccgtatgatcaatgaatttgggtactgcagccttgattatggcgttgcatattctagagacagtggtatcattacttgcagagccactaacaaatatggaacagatcacacatctgctacccttattgttaaagatgagaaaagtcttgtggaagaatcccaattgcctgaggggaggaaaggcttacagagaattgaagaattagagagaatggctcatgaaggtgcacttacaggtgtaacaacagatcagaaagaaaagcaaaagccagacattgtcttgtacccagagccagttagagtacttgaaggggagactgcaaggttccgctgcagggtaacaggctaccctcagcccaaagtcaactggtacctcaatggacagctcatccgcaaaagcaaaaggttcagagttcgctatgatggtatccattacctggacatcgtggactgcaaatcatatgacacaggtgaagtgaaggtcaccgcggaaaatcctgaaggtgtgatagagcataaagtgaagcttgagattcaacagagggaagattttaggtctgtccttaggagagctcctgaaccaaggcctgagtttcacgtacatgaaccaggaaagcttcagtttgaagtacaaaaagtggatagacctgttgacaccactgaaaccaaagaagttgtgaagttgaaaagggctgaaagaattacccatgaaaaagtgcctgaagagtcggaagagctgcgcagtaaattcaagcgcagaacagaagagggctattatgaagccattaccgctgtggagctcaagtctcgaaagaaggatgaatcctatgaggaactcctcaggaagacaaaagatgaacttctccactggaccaaagagttaactgaagaggaaaagaaagctcttgccgaagaaggcaaaatcacgattccaacttttaaacctgacaagattgaactaagtcctagtatggaggctccaaaaatcttcgaaagaatccagagccaaacagtgggccaaggatctgatgcacacttccgggtcagagtcgtggggaaaccagaccccgaatgtgaatggtacaaaaatggtgtcaaaattgaacggtctgaccggatctactggtactggcccgaagacaatgtttgtgaattggtcataagagatgtgactgctgaggactctgccagcatcatggtaaaagccatcaacatagctggagaaacctccagtcacgcattcttacttgtccaagccaagcaattgatcactttcacacaggaattacaagatgttgttgctaaggaaaaagacactatggcaacctttgaatgtgaaacttcagaaccatttgtcaaagtgaaatggtataaagatggtatggaggttcatgagggagataaatacaggatgcactctgacagaaaggttcacttcctctccatactgaccattgatacgtctgatgctgaagattacagctgtgtacttgtggaagatgaaaatgtcaaaacgactgctaaacttattgttgaaggtgcagttgttgagtttgtgaaagaacttcaggacatagaagttccagaatcatattcaggagaattagagtgcattgtatccccagaaaatatagaaggaaaatggtatcataatgatgtggagcttaaatccaatggcaaatatacaattacatctcgtcgtggacgtcagaacctcacggtcaaggatgtaaccaaggaggaccagggagaatacagctttgtcatcgacgggaaaaagacaacctgtaaattaaagatgaaaccccgccccattgctatcctacaaggacttagtgaccaaaaagtctgtgagggtgacattgttcagcttgaagttaaagtctccttggaaagtgtggaaggcgtctggatgaaagacggccaagaagtgcagcccagtgacagggttcacattgtgatagacaaacaatctcatatgctgctcattgaagacatgactaaggaagatgctggaaattactctttcaccattccagcccttggcctctccaccagtgggcgtgtctctgtctatagtgtggacgtgataacacctctaaaagatgttaatgtgattgaaggcaccaaggctgtgcttgaatgtaaggtgtcagtccctgatgtgacttctgttaagtggtacttaaatgatgaacaaatcaagcctgatgaccgtgtacaggccattgtgaaaggtactaaacagcgactagtcattaaccgaactcatgcttcagacgaaggaccttacaagctgatagttggcagagttgaaaccaactgtaatctctctgtagaaaaaattaaaattatcagaggtcttcgtgaccttacctgtacagaaactcaaaatgtggtgtttgaggttgagctgtcccactctggaattgatgtcctgtggaattttaaggacaaggaaatcaagcccagttctaaatataaaattgaagcacatggaaaaatatataaattgacagttctaaatatgatgaaagatgatgaaggaaaatacacattttacgcgggagaaaatatcacatctggaaaacttactgtggcaggtggggccatctccaagccactcacagatcagaccgtagctgaatcccaggaagctgtgtttgaatgtgaagttgccaacccagattccaaaggcgaatggttgagggatggcaaacacctaccactgactaacaacatcagaagtgagtctgatggccacaaaaggagacttatcattgctgccaccaaattagatgacattggagaatatacctacaaggtggccacctccaaaacatctgccaaactcaaagttgaagctgtcaaaattaagaagactctgaagaacctcacagtgacagaaacacaggatgctgttttcactgtcgagcttacacaccctaatgtcaaaggtgtccagtggatcaaaaatggagttgtgctggaatccaatgaaaagtatgctatctctgtcaaaggaacaatttactctctgaggattaaaaactgtgccatcgtggatgagtctgtttatggcttcaggcttggaaggcttggagccagtgccagactgcacgtggagactgtcaagatcattaaaaagccaaaggatgtgacagccttggaaaatgccactgttgcctttgaagttagtgtttcccatgacactgttccagtaaaatggttccataagagtgtggaaattaagccaagtgacaaacacagactggtctcagaaaggaaagtccacaagctgatgctgcagaacatctccccctcagatgctggggaatacacagctgtggtcgggcaattggaatgcaaagcaaaactgtttgtggagacattacatattacaaaaaccatgaaaaatatcgaggtgcctgagaccaaaactgcctcttttgagtgtgaggtgtcccacttcaatgtcccttccatgtggctgaagaatggtgtggaaattgagatgagtgaaaagttcaagatagttgtgcagggaaaactccatcagctgatcatcatgaacaccagcacagaggactcggcagaatacacatttgtctgtggcaatgaccaagtcagtgccaccctgacagtcaccccaatcatgattacttccatgctgaaagacatcaacgctgaagaaaaagacactattacttttgaggtgacagtgaactatgaaggcatctcttacaaatggttaaagaatggtgtggaaatcaaatcaactgacaagtgccagatgagaaccaaaaagctcacacactcactgaacatcaggaatgttcactttggggatgctgctgactacacctttgtggctggaaaagcaacatcaacagccacactttatgtggaagctcgtcatatagaatttaggaaacacattaaggacattaaggtactggagaagaagcgagccatgtttgaatgtgaagtttctgaacctgacatcactgtacagtggatgaaagatgaccaggaactgcagatcacagacagaataaagattcagaaggagaaatatgtccaccgccttctgatcccatccacccggatgtctgatgctgggaagtacacagtggtggcaggaggcaacgtgtcaactgcaaaactctttgtagaaggcagagatgttcgcatccgaagtattaaaaaggaggttcaggtcattgagaaacagcgtgctgttgttgaatttgaggtcaatgaagacgatgttgatgcccactggtataaagatggcattgaaatcaatttccaagttcaagaacgacacaaatatgtagtggaaagaagaatccaccgaatgtttatctctgagaccagacagagcgatgcaggagaatacacctttgtggcaggaaggaacaggagttctgtcactctctatgtcaatgctcctgaaccgccccaagttctgcaggagctccagcctgtcactgtgcagtctggcaagcctgcccgcttctgtgccgtgatatccggaagaccacagcccaaaatttcctggtacaaggaagagcagctgctttccactggcttcaagtgcaaatttcttcatgatgggcaagagtacacgcttttgctaattgaagccttcccagaggatgcggcagtctatacctgtgaagccaagaatgactatggtgttgccacaacatcagcttcactctcagtggaagttccagaagttgtgtctcctgatcaggaaatgcctgtttatccacctgccatcatcaccccgcttcaggacactgtcacttctgaagggcagccagcccgttttcaatgccgggtttctggaacagatctaaaagtgtcgtggtacagcaaagacaagaaaatcaagccatctcggttctttagaatgactcaatttgaagacacttatcaactggaaattgccgaagcttatccagaagatgaaggaacttacacgtttgttgctagtaatgctgtaggccaagtatcaagcacagccaacctgagtctggaagctcctgaatcaattttgcatgagaggattgaacaagagattgagatggaaatgaaagagttttctagttcttttctgtctgccgaggaagaaggacttcatagcgccgaacttcaattatctaaaataaatgaaacacttgaacttttgtctgaatctccagtttactcaactaaatttgattccgaaaaggaaggcactggcccaattttcatcaaagaagtgtcaaatgctgatataagcatgggggatgtggctacactgtctgtaactgtcattggcatccccaaacctaaaattcagtggttctttaatggagtgctattaaccccttctgctgactacaaatttgtttttgacggtgatgatcatagcctgatcattctgttcaccaaattggaggatgagggagagtatacatgtatggccagtaatgactatggaaagacaatatgtagtgcctatctaaaaattaattccaaaggagagggtcacaaagacactgaaacagaatcagcagtggcaaaatctctggaaaagctgggaggtccttgtcctcctcacttccttaaggagttaaaaccaattcgctgtgctcaagggcttcctgccatctttgagtacacagtggttggagagcctgcccctactgttacatggttcaaagaaaacaagcagctttgcaccagtgtttattacactatcattcataaccctaatggctctggaactttcattgtcaatgaccctcagagggaagacagtggcctctatatctgtaaagcagagaatatgttgggtgagtccacctgtgcagcagagctgcttgtgcttctggaagacacagacatgactgataccccctgcaaagcaaagtccacaccagaggctcctgaggattttccacagacacccttaaagggtcccgcagttgaagcacttgactcagagcaggaaattgcaacgtttgtaaaagacaccattttgaaagctgctttaattacagaagaaaaccagcaactatcttatgagcatattgctaaagccaatgaattgagcagtcagcttcctttgggagctcaggaattgcaatccattttggagcaagacaagctcactcctgaaagcaccagggaatttctttgcatcaatggcagtattcactttcagcctctcaaggaaccatctcccaacctacagctgcagattgtacagtcccagaaaaccttctccaaagaaggtattctaatgcctgaagagcctgagacacaggcagttctatcagataccgagaaaatcttcccaagtgccatgtccatagaacaaattaattcattaacagttgagcctctgaaaactttattagctgaacctgaagggaattatccacagtcttcaatagaacctccaatgcattcttatctaacctctgtggctgaggaagtactttcaccaaaagaaaagacagtatctgacaccaacagagagcaaagagtgactcttcaaaagcaagaggcacaaagtgcgctcatcttgagtcagagcttagctgagggacacgtggagagtctccagagtcctgatgtcatgatctctcaggtaaactatgagcccctagtcccttcagaacactcatgcacagaaggaggtaaaattttgatagaaagtgcaaatccactggaaaatgcagggcaagattctgcggtcagaattgaggaaggcaagtccttaagatttccactagcacttgaagaaaagcaggtactgctcaaagaagagcattctgacaacgtggtgatgcccccagaccaaatcattgagtctaaaagagagcccgtggcaataaagaaagtgcaggaggtacagggaagggaccttctttctaaggaaagcttgctttctggtattccagaagagcagagattaaacctgaaaattcaaatctgccgggctttgcaagcagccgtggccagcgagcagccaggtcttttctctgagtggctaagaaatattgaaaaggtggaggtcgaggctgtaaacatcacccaagagcccagacacatcatgtgcatgtaccttgttacttcggcaaagtctgtaacagaagaagtaaccatcattattgaagatgttgatcctcaaatggctaacctgaaaatggaacttagggatgctttgtgtgctattatatatgaggaaatagacatcctaacagctgagggtcctagaattcagcaaggagccaaaacaagtttgcaagaagaaatggattctttttcaggttcacagaaggttgaacccattactgaaccagaagttgaatctaaatatctgatctcaactgaagaggtcagttattttaacgtgcaaagtagggttaaatatttggatgccacacctgtcactaaaggggttgcttcagctgttgtctctgacgaaaaacaagatgagagtctgaaaccatcagaggaaaaagaggagtcttcctctgaaagtggtactgaggaggttgctacagtaaagatacaggaagctgagggtggcttaatcaaagaggatggccccatgatacatacacctttagtggacactgtttctgaggaaggtgatattgtacacctcacaacatccataacaaatgctaaagaggtgaattggtattttgagaataaactggtgccttcagatgaaaagttcaagtgtttacaagatcaaaatacatatacgctagtcatcgacaaagtaaataccgaagaccatcaaggagagtatgtctgtgaggccttgaatgacagcggaaaaacagcaacttcagccaaactcactgtagtaaaaagagctgccccagtgatcaagaggaaaatcgaacccctggaagtagcactgggccacctagccaaattcacctgtgagatccaaagtgctcccaatgtccggttccagtggtttaaagctggccgagaaatttatgagagtgacaagtgttctattcgatcttcaaagtatatctccagccttgaaatcctgagaacccaggtggttgactgcggcgagtatacatgcaaagcttccaatgagtatggcagtgtcagctgtacagccacactaactgtgacagtgcctggaggtgaaaagaaagttcgcaaattacttccggaacgtaaacctgaaccaaaggaagaagttgttctgaaaagcgttctaagaaaaagacctgaagaagaagaacctaaagtagaacctaaaaaactagaaaaagttaaaaaacctgcagtaccagaaccaccacctccaaaacctgttgaagaggttgaagtacctactgttacaaaaagggaaaggaagattcctgaaccaacaaaagtgcctgaaatcaagccagcaatacctctccctgcacctgaaccgaaaccaaagcccgaagcagaagtgaaaacaatcaaaccacctcctgtggaacctgaaccaacccccatcgctgccccagtaacagtgccagtggttggaaagaaagcagaagccaaagcacctaaggaagaggctgccaagccaaaaggtcctatcaaaggtgtacccaaaaagactccttcaccaatagaagccgaaaggagaaagttaaggccaggaagtggtggagagaaacctcctgatgaagccccgttcacctaccagctaaaggctgtgccactgaagtttgtgaaagaaatcaaagacatcatcttgacagaatcagagttcgttggctcttcagcaatctttgaatgtttggtctccccttccactgcaattacaacctggatgaaagacggtagcaatatccgtgagagtcccaagcacaggtttattgcagatggtaaagacagaaagctgcacatcattgatgttcaactttccgatgctggtgaatacacctgtgttttacgtttgggaaacaaagaaaagacctccacggctaaacttgttgtagaagaacttcctgtgcgttttgtaaaaacactggaagaggaagtcacagtggtcaaaggacagccattgtacttgagctgcgagttaaacaaagagcgtgacgtggtctggaggaaggatggcaagattgtggtggagaaacctggccgaattgtgccaggcgtcattggcttgatgcgggctctgaccatcaacgatgcagatgacacagatgctggaacatacacagttactgtggaaaacgccaacaacctggagtgttcatcttgcgtaaaagtagtagaagtcattagagattggctggtgaaacctatacgagaccagcatgtgaaacccaaggggacagctatttttgcctgtgatatagcaaaagatactccaaacattaagtggttcaaaggatatgatgaaatccctgcggaaccaaatgataagactgaaatactgagagatggaaatcatctgtacctcaaaattaagaatgctatgccagaagatattgctgagtatgcagtggaaattgaaggaaaaagataccctgcaaagctgacacttggagagcgtgaagttgaactgcttaaaccaatagaggacgttaccatttatgagaaagaaagtgcaagctttgatgcagaaatctcagaggcagacattcctggacaatggaaactgaaaggagaacttctaaggccctcacctacttgtgaaatcaaagcagaaggtggaaaacgcttcttaactttgcacaaagtcaaactggaccaagctggtgaagtcctctaccaggcccttaatgcaattacaactgccattttgacagtaaaagaaatcgaacttgactttgctgtgcccctgaaggatgtcactgttccagaaaggcgacaggctcgattcgaatgtgtcctcacccgagaggcaaatgttatatggtccaaaggacctgatataattaagtcatctgacaaatttgatatcatcgctgatggaaagaaacatattcttgttattaatgattctcaatttgatgatgaaggggtctatactgctgaggtggagggcaagaagacctcagctcggttgtttgtcacaggtataagactgaaattcatgtcacctcttgaagatcaaacagtaaaagaaggtgaaacagcaacttttgtttgtgaactttctcatgaaaaaatgcatgtagtctggttcaaaaatgatgccaaactccatacaagcagaacagtactcatctcttctgagggcaagactcacaaattggaaatgaaagaagtgacattggatgatatatctcagataaaagctcaagtcaaggagctgagctccacagcacagctgaaggtcttagaggccgatccctacttcactgtgaaattacatgacaaaactgcagtggagaaggatgagattactttgaagtgtgaagtgagcaaagatgtaccagtgaaatggttcaaagatggtgaagagattgtcccttcacccaaatattctatcaaggcagatggcctgcgccgcatcttaaaaatcaaaaaggcggaccttaaagataaaggcgaatatgtgtgtgactgtggcacagacaagaccaaggcaaatgttactgttgaggctcgactaataaaagtggaaaagcctctgtacggagtagaggtgtttgttggtgaaacagcccactttgaaattgaactttctgaacctgatgttcacggccagtggaagctgaaaggacagcctttgacagcttcccctgactgtgaaatcattgaggatggaaagaagcatattctgatccttcataactgtcagctgggtatgacaggagaggtttccttccaggctgctaatgccaaatctgcagccaatctgaaagtgaaagaattgcctcttatcttcatcacacctctcagtgatgttaaagtcttcgagaaagatgaggctaagtttgagtgtgaagtatccagggagcccaaaacattccgttggctaaaaggaacccaggaaatcacaggtgatgacagatttgagcttataaaggatggcactaagcattcaatggtgatcaagtcagctgcttttgaagatgaagcaaaatacatgtttgaagctgaagataagcacacaagtggcaaactgatcattgaaggaatccggctcaaattcctcacccctctcaaagatgtaactgccaaagagaaggaaagtgctgtatttactgtggagttatctcatgataacatccgagttaaatggttcaagaatgaccagcgcctacacaccaccaggtcggtctcaatgcaagacgaagggaaaactcattcgatcacattcaaagacctgtctattgatgacacctcccaaattagagtagaagctatggggatgagttcagaagctaaactcactgtgcttgagggagacccatattttacaggaaaacttcaagattatactggtgtagagaaagatgaagttattctacagtgtgaaattagcaaagcagatgcaccagtgaaatggtttaaggatgggaaggaaataaagccatccaaaaatgctgttattaaggcagatggcaagaaacgcatgctaatcctaaagaaagccttgaaatcagatattggacagtacacctgtgactgtgggacagataagacctcaggaaaacttgacattgaggatcgggaaattaaactggtgcgacccctgcacagtgtggaggtgatggagactgagacagcacgctttgaaaccgaaatctctgaagatgatatccacgccaactggaaactcaagggagaggccctactccaaacacctgattgtgaaattaaggaagaaggcaaaatacactcccttgttttgcacaactgtcgcctggaccagacgggtggggtggatttccaagctgccaatgttaaatctagtgcccacctccgagttaagccacgagtaattggtcttctgaggcctttaaaggatgtcaccgtgactgcaggggaaacagccaccttcgactgcgagctctcctacgaagatatcccagtggaatggtatctcaaagggaagaaactagagcccagcgataaggtggtcccacgttcagaaggaaaagttcatacacttactctgagggatgtaaagttagaagatgctggggaagtccaactaacagcaaaagatttcaaaactcacgccaacctctttgtgaaagaacccccagttgaattcactaagcctcttgaggaccagacggtcgaagagggagccactgcagtgctggagtgtgaagtctccagagaaaatgctaaggtgaaatggttcaaaaatgggacagaaatcctcaaaagcaagaagtatgaaattgttgctgatggcagggtcagaaaacttgttatacatgactgtaccccagaggatattaaaacatacacttgtgatgctaaggattttaagacttcctgtaacctgaatgtcgtgcctcctcatgtggaattcttaagaccactcaccgaccttcaagttagagaaaaagaaatggctcgatttgagtgtgaactttcccgagaaaatgctaaggttaagtggtttaaagatggtgctgaaattaaaaagggcaaaaaatatgacatcatatccaagggagcagtgcgcattcttgtcatcaacaaatgtctactggatgatgaagctgaatattcctgtgaagtaaggacagcgagaacttctggcatgctgacagttctggaagaagaagctgtctttaccaaaaatcttgccaacattgaagttagtgaaacagacactataaaactggtttgtgaagtctccaaacctggcgcagaagtgatttggtataaaggggatgaggagatcattgaaacaggaagatatgaaatactgactgaaggacggaagagaatcctggtcattcagaacgctcaccttgaggatgctggcaactacaactgtcgactcccaagctctcgaaccgatggcaaagtcaaagtacatgaactggctgctgaatttatctcaaagcctcaaaaccttgaaatacttgaaggagaaaaggctgaatttgtctgctctatatcaaaagaaagctttccagtccagtggaagagggatgataagacacttgaatctggagataaatatgacgttattgctgatggtaaaaagagggtcctagttgtgaaagatgccacattacaagatatgggcacttacgttgtcatggtaggggccgccagagcagcagctcacttgacagtcattgaaaaactcaggatcgtagttcctcttaaggacacccgggtgaaggaacaacaggaagttgtcttcaactgtgaagtcaatactgaaggtgccaaagccaaatggttcagaaatgaagaagctatatttgatagttcaaaatacatcattctccaaaaagacctagtctacaccctcagaattagagatgcacacttagatgaccaagccaactataatgtgtctttgaccaatcacagaggtgaaaatgttaaaagtgcagccaatctaatagtagaagaggaagaccttaggattgttgagcctcttaaagatattgaaacaatggagaagaaatctgtcacattctggtgcaaggtgaatcgtctcaatgtaacactgaagtggaccaaaaatggtgaagaagtgccttttgacaaccgtgtctcatacagagttgataagtacaagcacatgttaaccattaaagactgtggcttcccagatgaaggtgaatacattgtcactgctggacaagataaatctgttgctgagcttctcatcatagaagccccgacagaatttgtggaacacttggaagatcagacagtcactgagttcgatgacgctgtcttctcctgccagctctccagagagaaagccaatgtaaaatggtacagaaatgggagagaaatcaaagaaggcaaaaaatacaaatttgaaaaagatggaagtatacacagactcattataaaagattgcaggctggatgatgagtgtgaatatgcttgcggggtagaagacaggaagtctcgtgctagactttttgtggaagaaattcctgttgagatcatcaggcctccacaagatattcttgaagcccctggtgctgatgttgtctttttagcagaactcaataaagataaggtggaagtccaatggctaagaaataacatggttgttgtccagggtgataaacaccagatgatgagtgaaggaaagatacatcgactacagatttgtgatattaagccccgtgaccagggtgaatacagatttattgccaaagacaaagaagccagagctaagcttgaactggcagctgcaccaaaaatcaagacagctgaccaagaccttgtggttgatgttggcaagcctctgacaatggtggtgccatatgatgcctaccccaaagcagaagctgaatggtttaaagaaaatgaacctttatctacaaaaaccattgatactacggctgaacaaacttctttcagaattttagaagccaagaaaggagacaaagggaggtataaaattgtgcttcagaacaaacatggaaaagcagaaggattcatcaatttaaaagttattgatgttcctgggccagtacgtaacttagaagtgacagaaacatttgatggtgaagtgagccttgcttgggaagaacctttaactgatggtggaagcaaaatcataggttacgttgttgaaagacgtgacattaagagaaagacctgggttctggccacagaccgtgcagagagttgtgagtttactgtcactggtctacagaaaggaggagttgagtacctattccgtgtgagtgcaagaaacagagttggcactggtgagccagtagaaactgacaatcctgtagaagcaaggagtaaatatgatgttccaggccctcctttgaatgtaaccatcactgatgtgaatcgatttggtgtctcactgacatgggaaccaccagagtatgatggaggtgctgagatcacaaactacgtcattgaattaagagacaagacttctatcaggtgggatactgccatgactgtgagagctgaagacctgtctgcaactgttactgatgtggtagaaggacaggagtacagtttccgagtgagagcccaaaatcgaattggagttggaaaaccaagtgcagccacacccttcgtcaaagttgctgatccaattgagagaccaagtcctcctgtaaacctaacttcctcagatcagactcagtcatcagttcagctcaaatgggaacctcctctgaaagatggaggaagcccaatattaggctatataattgagcgatgcgaagaaggaaaagataattggattcgttgcaatatgaaacttgtccctgaactgacttacaaggttaccggattggaaaaaggaaataaatatttatatagagtatctgcagaaaataaagctggtgtttcagatccatctgaaattcttggtcctctcaccgctgacgatgcatttgttgaaccaacaatggatttaagtgcatttaaagatggtctggaagttattgtcccaaatcctatcacgatcctggttccaagtacaggctatccaaggccaactgcaacctggtgttttggagataaagtactagaaacaggggaccgggtgaaaatgaagaccttgtctgcctatgccgaacttgtcatttctccaagtgaacgttcagacaagggcatttatacactgaaattagaaaaccgtgtgaaaacaatttctggggaaattgatgtcaatgtaattgctcgcccaagtgcacccaaagaattgaaatttggtgatataaccaaggactcagtacatttgacttgggaaccacctgatgatgatggaggaagtccgttaactggatacgttgttgaaaaacgagaagtcagccggaaaacatggactaaagttatggactttgtgactgatctagaattcacagttcctgatcttgttcaaggaaaagagtacttatttaaagtttgtgctcgtaacaaatgtggccctggagaacctgcatatgttgatgaacctgtaaatatgtcaactcctgcaacggtacctgacccaccagagaatgttaaatggagagatcgaacagccaatagcatcttcttaacatgggatccacctaaaaatgatggtggttcacgcatcaaaggatatatagttgaaagatgtccacgtggttctgataaatgggttgcctgtggagaacctgttgcagaaacaaaaatggaagtgacaggtcttgaggaaggcaaatggtatgcctaccgcgtgaaggccttaaacaggcagggtgctagcaaaccaagcagacccacagaggaaatccaggctgtggacacacaagaggccccagaaatcttcctcgatgtgaagctccttgctggtctcactgtaaaagctgggaccaagattgaacttcctgccaccgtaaccggaaaacctgaacctaaaataacttggacaaaggctgatatgattctgaagcaggacaaaagaattaccattgaaaatgtccctaagaaatccacagtgactattgttgatagtaagagaagtgacactggcacatatatcattgaggctgtgaatgtgtgtggccgggccactgctgtggtggaagtgaacgtcttagataaacccggaccaccagctgcctttgacatcacagatgtaaccaatgagtcatgtcttctaacatggaacccaccacgcgatgatggtggatctaagatcacaaactatgttgtggagagacgagcaactgatagtgaagtgtggcacaagctctcatccaccgtcaaggatacaaacttcaaggccaccaaattaatccccaataaagagtacatcttcagagttgctgcagaaaacatgtatggtgttggtgaaccagttcaggcctctccaataacagccaaatatcagtttgatccacctggtcctccaactcgcctagaaccttctgatatcactaaagacgcagtgactctcacatggtgtgagccagatgatgatggtggcagcccaatcacaggatactgggttgaaagactggatcctgatacagataaatgggttagatgcaataagatgccagtaaaggacacaacatacagagtgaaaggtctcactaataagaaaaaatacagattccgtgtgttggctgaaaatcttgctggacctggaaaaccaagcaaatcaactgaaccaatcttaataaaggatcccatagatcctccatggccccctggaaaaccaactgtaaaagatgtaggcaaaacatcagtaaggttgaattggacaaaaccagaacatgatggaggtgcaaagattgagtcttatgtcattgaaatgctgaagactggaacagatgagtgggtcagagtggcggaaggggttcccaccactcagcacttgctcccagggctcatggaaggacaggaatactcattccgagttagagctgtgaataaggctggggaaagtgaacccagtgaacccagtgaccctgtgctttgccgggagaagctatatcctccatcaccaccacgctggcttgaagttattaatatcacaaaaaatacagcagacctaaaatggacagttcctgagaaagatggagggtcccccatcaccaactacattgtggaaaagagagacgtcaggcgaaaaggctggcaaacagtggataccactgtcaaggacaccaagtgcacagtcaccccactgactgagggctctttatatgtgttccgagttgctgcagaaaatgctataggacaaagcgactacaccgaaattgaggactctgtgctggccaaagacacctttaccactcctggaccaccctacgccctggcagtggttgatgtgacaaaacgacatgttgacctaaagtgggagccacctaaaaatgatggtggaagaccaatacagagatatgtcattgagaagaaagaaaggttaggtacccgttgggtgaaagctggaaagactgcaggacctgactgtaacttcagagtaactgatgtcatcgaaggaacagaggtccagtttcaggttcgggctgaaaatgaagctggagttggccacccaagtgaacccacagaaatcctatccattgaagatccaacaagtcctccctcaccaccccttgacctacatgtgactgatgctgggagaaaacacattgccattgcttggaagcctccagagaaaaatggtggaagtcctatcataggataccatgttgaaatgtgtccagtaggcactgagaaatggatgagagttaattctcgcccaataaaggacttgaaattcaaggttgaagaaggtgttgttcctgacaaagaatatgtcctgagagtgagagcagtcaatgctattggtgtcagcgagccatctgaaatctctgaaaatgtggttgccaaagacccagactgcaagccaacaattgacctggagactcatgacattattgttattgaaggtgaaaagttaagcattcctgttcccttcagagctgtcccagttccaactgttagttggcataaagatggcaaagaagttaaagcaagtgatagattaacaatgaagaatgatcacatctctgcacaccttgaagttcccaagagtgtccgtgcagatgccggaatttataccattacactggagaataagctcggctcagcaacagcctcaatcaatgtcaaagtcataggcctacctggaccatgcaaagatattaaagcaagtgacattaccaagagttcttgtaagttaacttgggaacctccagaatttgatggtggaaccccaattcttcattatgtcctggagcgcagagaagctgggaggagaacatatataccagtcatgtctggtgagaacaaactgtcatggactgtgaaggatctcataccaaatggtgaatacttcttccgtgttaaagcagtcaacaaggttggtggaggagaatatattgaactgaaaaatccagtcattgctcaagatccaaagcaaccccctgatccacctgtagatgtagaggttcataatcctacagcggaggcaatgactattacatggaagccacctttgtatgatggagggagcaagataatgggctacatcatagagaagattgctaagggtgaagaaaggtggaagagatgcaatgaacacctggtaccaatcctgacctatacagcaaaaggacttgaagaggggaaagagtaccaattccgtgtgcgagcagagaacgccgcgggtattagtgaaccttctcgggctactcctccaaccaaagctgtagatcccattgatgcccccaaagtcattctgagaacaagcctagaagtgaaacgaggtgatgaaatagcacttgatgcaagtatttctggatcaccttacccaactattacatggataaaggatgaaaatgttattgtaccagaggaaattaagaagcgtgcagcacccttggttaggagaaggaagggtgaagttcaagaagaagaaccatttgtcctgcctctgacacagcgtttgagtattgacaacagcaaaaagggagaatctcagctacgcgtccgagattctctccgacctgaccatggtctgtatatgatcaaagttgaaaatgaccacggtattgcaaaagctccttgtactgtcagtgtgttagatacaccgggaccaccaatcaactttgtatttgaagatatcagaaagacctcagtcctttgtaaatgggaaccaccccttgatgatggtggcagtgaaatcataaactacactttggaaaagaaagacaagacaaaacccgactcagaatggattgttgtcacttcaacacttagacattgcaaatattcagtaacaaaactgattgaaggaaaagagtacctcttccgtgtaagagctgaaaacagatttgggccaggtccaccatgtgtttcaaagccacttgtggctaaagatccatttggaccacctgatgcaccagataagcccattgtggaagatgttaccagcaacagtatgctagtgaaatggaatgaaccaaaagataatggaagccccattttgggttactggcttgaaaaacgtgaagttaacagtacacattggtctcgtgtcaacaaaagccttctgaatgccttgaaagccaatgtagatggcttattagaaggactcacctatgtcttcagagtatgtgctgaaaatgcagctggacctggaaagttcagtccaccttcagatcccaaaacagcacatgatccaatctctcctcctgggccacctatcccaagagtcactgacacaagctctacaactattgaactagaatgggaacccccagctttcaatggtggtggggaaattgttggctattttgttgataagcagttggttggcacaaatgaatggtcacgctgcacagagaagatgatcaaggtccgtcagtacaccgtcaaagaaatccgagagggtgctgattacaaacttcgggtgagtgctgtcaatgccgcaggggaaggaccgcctggagaaacacaacctgttactgtggctgaaccacaagagcctccagctgtggaactggatgtttctgtcaagggtggaatacaaataatggctgggaagactcttagaattccagctgtggtgactggtcgccctgtacctacaaaagtatggaccaaagaagaaggggagctggataaagaccgtgttgtaatagacaacgttggaaccaaatctgaactaattatcaaggatgcactgcgaaaagaccatggcagatatgtgattacagctacaaatagctgtggttccaaatttgcagcagccagggtagaagtttttgatgtccctggtccagttcttgacttaaaacctgttgtaacaaacagaaaaatgtgtctacttaactggtctgatccagaagatgatggaggaagtgaaataacaggctttatcattgaaagaaaagatgccaagatgcatacttggagacaaccaatagagactgagagatctaaatgtgacatcacaggtctgcttgagggacaagaatataagttccgtgttattgccaagaacaagtttggctgtggccctcctgttgaaataggaccaattcttgcagttgatccactaggtcctccaacatctccagagaggctcacatacactgaaaggacaaagtccactatcacacttgactggaaagagccccgcagtaatggtggcagtcccatccaaggatatatcattgaaaaacggcgtcatgacaaacctgactttgaaagagttaacaagcgactctgcccaaccacatcttttctggttgaaaatcttgatgaacaccaaatgtatgagttccgtgtcaaagctgtcaatgaaattggtgaaagtgaaccatccctacctcttaatgtagtcatacaagatgatgaagtgcctccaactattaagttgcgtctgagtgttcgaggagacactatcaaagttaaggcaggagagcctgtccacatccctgcagatgtgacaggccttccaatgcctaagattgaatggtccaaaaatgaaactgtaattgaaaaacccactgatgcacttcagataaccaaggaagaggtatcccgaagtgaggcaaaaactgagcttagcattcccaaagcggtccgggaggacaaaggcacttacacagttactgcttccaatcgccttggctcagtgttccgaaatgttcacgttgaagtatatgaccgcccatccccaccaagaaatcttgctgttactgacattaaagctgaatcttgctacttgacatgggatgcccctcttgataatggtggcagtgaaatcacccattatgttattgacaaacgtgatgcaagtaggaagaaagcagaatgggaggaagtcaccaacactgctgtagagaaaagatatgggatctggaaacttatccccaatggtcagtatgagttccgagtcagggcagtgaataaatatggaatcagtgatgagtgcaaatcagataaagtagtcattcaagatccttatcgccttcctggacctccaggaaaaccaaaagttttggcacgcaccaaaggatcaatgctagtgagctggactcctcctttggacaatggtggctctccaattactggctactggctggagaaaagagaagagggaagtccttattggtcacgtgttagccgagcaccaataaccaaagtgggattgaaaggcgtggaatttaatgttcctcgtttgcttgaaggcgttaaataccagttcagagccatggcaataaatgctgcaggaattggtcctcccagtgaaccatcagatccagaggttgcaggagatcccatatttccaccggggccaccttcttgcccagaagttaaagataaaacgaagtcaagcatctcactaggatggaaacctccagccaaagatggtggcagcccaatcaaaggatacattgtagaaatgcaagaagaaggtactactgactggaaaagagtaaatgaaccagacaaacttataactacctgtgaatgtgtggtgcctaatctgaaagagctcaggaagtacagattcagagtgaaagctgtcaatgaagctggtgaatctgaaccaagtgatacaactggggagatccctgccactgatattcaagaggaaccagaagttttcattgacattggagcacaggactgtctggtttgtaaagctggctcacagattaggattcctgctgtcatcaagggacgcccaacaccaaaatcatcttgggaatttgatggaaaggcaaagaaagcaatgaaggatggagttcatgacatacccgaagatgcacagctggagactgctgaaaactcctcagtaattattattccggagtgtaaacgatctcatacaggcaaatacagcatcacagccaagaataaagcaggacaaaagactgcaaattgcagagttaaagtcatggatgtaccaggcccacccaaagatctgaaagtcagtgatatcacaaggggtagttgcagactttcatggaagatgccagacgacgatggaggagacaggatcaaaggctatgttattgagaagaggactattgatggaaaagcctggaccaaagtcaatccagactgtggaagcaccacatttgtagtgcctgatctcctctctgaacagcaatatttcttccgtgtgcgagcagaaaaccgttttggtattggcccacctgtggaaaccattcagaggaccactgccagagatccgatatatcctcctgatcctcctattaaactcaagattggcctcatcacaaagaacacagtgcatctgtcatggaaacccccgaagaatgatgggggctcccctgttacccactatattgttgagtgccttgcatgggaccctactgggacaaagaaagaagcctggaggcagtgcaataagcgtgatgtggaagaactgcaatttactgttgaagacctagtagaaggtggggaatatgaattccgagtcaaagctgtcaatgctgcaggagtcagcaagccttcagccactgttgggccctgtgactgtcaaagaccagacatgccaccatcaattgatctaaaagaattcatggaggttgaagaaggaaccaatgttaacattgtggccaaaattaaaggtgtgccattcccgacactaacctggtttaaagctcctccaaagaagcctgataacaaagaacctgttctctatgacacccatgtcaacaaactggtggtagatgatacttgcactttagttattccgcagtctcgcaggagtgacactggcttatataccatcacagctgtaaataatctgggaacagcatcaaaggagatgagactgaatgtcctgggtcgtcctggccctccagtgggacccataaaatttgaatctgtttcagcagatcaaatgacactatcttggtttccacctaaagatgatggtgggtctaagattacaaactatgtaattgagaaaagagaagctaacaggaagacatgggtccatgtctccagtgaacctaaggagtgcacgtacacgattcccaaattgctagaaggccatgaatatgtattccgaatcatggcccagaataaatatggcattggagaacctcttgacagtgaacctgaaacagcaagaaacctcttctctgtccctggagcaccagataaaccaacagttagcagcgtgactcgtaactccatgactgtcaactgggaagagccagaatatgatggaggctctcctgtgacagggtactggctggaaatgaaagacaccacttcaaagagatggaagagagttaaccgagatcctatcaaagccatgactttgggtgtttcttataaagtgactggtcttattgaaggttccgactatcaattccgggtatatgcaatcaatgctgctggcgtgggtccagcaagtctgccatcagacccagcgactgctagagatccaattgcccctcctggtcctccatttcccaaagtgacagattggactaaatcatctgcagatctggagtggtctcccccactaaaagatggtggatccaaagtaactggatacatcgttgaatataaagaagaaggaaaagaagaatgggaaaagggtaaagataaagaagtgagaggaacaaagctcgttgtgacaggattaaaggaaggagcattctacaaatttagagttagtgcagtcaacattgctggcattggagaacctggagaggtcacagatgtcattgaaatgaaggacagacttgtttcacctgaccttcagctagatgccagtgtcagagatagaattgttgtccatgctggaggggtgatccgaatcattgcctatgtgtctggaaagcctcctccaaccgtcacctggaacatgaatgaaagaaccttacctcaagaagccaccattgagaccacagccattagctcatccatggtcatcaagaactgccagaggagccatcaaggcgtctattctcttcttgccaaaaatgaagccggagaaagaaagaagacaattattgttgatgtattagatgttccaggtcccgttggaacaccattcctagctcacaacctaaccaatgagtcctgcaaactgacatggttttctccagaagatgatggaggctctccaatcaccaattatgtcattgaaaagcgtgaatctgaccgcagagcatggaccccagtgacatatacagttacccgacaaaatgctactgtccagggtctcattcaaggaaaagcctactttttccgaattgcggctgaaaatagtattggcatgggtccatttgttgagacatcagaggcacttgttatcagagagccaataactgtaccagagcgtcctgaagacctggaagtcaaagaagttactaaaaatactgtaactttgacttggaatcctcctaagtatgatggtgggtcagaaattattaactatgtcctagaaagtcggctcattgggactgagaagttccacaaagttacaaatgacaacttgcttagcagaaaatacactgttaaaggcttaaaagaaggtgatacctatgagtaccgtgtcagtgctgtcaacattgttggacaaggcaaaccatcattttgcaccaaaccaattacttgcaaggatgagctggcacccccaacgcttcacctcgacttcagagataagctcacgattcgagttggtgaagcttttgccctcactggccgttactcaggcaaaccaaagcctaaggtttcctggttcaaagatgaagctgatgtgctggaagatgatcgcactcatataaagactacaccagcaacacttgctttagagaagatcaaggccaaacgttcagattccggcaaatactgtgtggttgtggagaacagtacaggctctaggaaaggtttctgtcaagttaatgttgttgaccgtcctggaccaccagtaggaccagttagttttgatgaggtgaccaaagattacatggttatctcttggaagcctcctttagatgatggaggcagtaaaatcaccaattatattattgagaagaaggaagtgggtaaagacgtctggatgccagtgacatctgcaagtgctaaaacaacatgcaaagtttctaaactacttgaaggaaaagattatattttccggatacatgctgaaaatctgtatggaataagtgatcctctggtgtctgattcaatgaaagccaaagatcgtttcagggttcctgatgcacctgatcagccaattgttacagaagttaccaaagactctgcattagtaacctggaataagccacatgatggaggaaaacccatcacaaactacatcctggaaaagagagaaactatgtctaaacgatgggctagagttaccaaagatcctattcatccatacactaaatttagggttcctgatcttctagaaggatgtcagtatgaattccgggtttctgcagaaaatgaaattggtattggagatccaagcccaccatccaaaccagtctttgctaaagatccaattgctaaaccaagtccacctgttaatcctgaagcaatagatacaacatgcaattcagtcgatctaacttggcagccaccacgtcatgatggtgggagcaagattctgggttatattgttgagtaccagaaagttggagatgaagagtggagaagagccaatcacacccctgagtcatgtcctgaaactaaatataaagtcaccggtcttcgggacggtcaaacctataagtttagagtgttagcagtcaatgcagctggtgaatcagatccagctcatgttccggagccagtcctagtaaaagacaggcttgaaccccctgagttgattcttgatgccaacatggcaagagaacaacacattaaagttggtgatactctaagacttagtgccatcatcaaaggagtgccattcccaaaagtaacttggaaaaaagaagacagagatgctccaactaaagcaagaattgatgtgactccagttggtagcaagcttgaaattcgtaatgctgcccatgaagatggtggaatttattctttaacagtggagaatccagctggttcaaaaactgtctcagtaaaagtacttgtattagataaacctgggccacctagagatctggaagtcagtgaaattaggaaagattcatgttaccttacttggaaagaaccactggatgatggtggttctgttattaccaattatgtggttgagaggagagatgttgccagcgcccagtggtcacctctctcagctacatcaaagaaaaagagtcacttcgctaagcatctgaatgaaggcaaccagtacctcttccgagtagctgcggagaaccagtatggacgtggtccttttgttgaaacaccaaaaccaatcaaggctttggatcctctccatcccccagggccacccaaggacctgcaccatgtagatgttgacaagactgaagtctccctagtctggaataagccggatcgtgatggtggttctccaatcactggatatttggtagaatatcaagaagaaggcacccaggactggattaaatttaagactgtgacaaacttagagtgtgtggttactggactacaacaaggaaagacctatagattccgtgtaaaagctgaaaacattgtgggtcttggtctccctgacacaactatcccgatagaatgtcaagaaaaactagtgcctccatccgtggagctagatgtgaaattaattgaaggtcttgtggtaaaggctggaaccacagtcagattccctgctattataagaggtgtgcctgttcctactgcaaagtggacaaccgatgggagtgagattaaaaccgatgagcactacacagttgaaacagacaacttctcatcagtacttaccattaagaactgcttaaggagagacactggggaatatcaaatcacagtttccaatgcagccggtagcaaaacagtagccgtacatcttactgttcttgatgttcctgggccaccaacaggtcctattaatattctggatgttactcctgaacacatgactatctcatggcagccacctaaggatgatggaggaagccctgtgataaattatattgttgagaaacaagatacaaggaaagacacgtggggtgttgtctcttccggaagcagtaagacaaagctgaaaatcccacatctgcagaagggctgtgaatatgttttccgagttagagcagagaataagataggtgttggtcctccccttgactccacacctactgttgctaagcataaatttagtcctccgtctcctcctggtaaaccagtggttactgacattactgaaaatgcagcaacagtgtcttggaccctgccaaaatctgatggtggcagtccaataactggctactatatggaacgtcgagaagtaactggcaaatgggtgagggtcaacaaaacacctatcgctgacctgaagttcagagtgactggactctatgaaggaaatacatatgagtttagagtttttgctgaaaatcttgcaggactaagcaaaccatccccaagttctgatccaataaaagcttgccggcccatcaaaccacctggaccacctattaatcctaaactgaaagacaagagcagagaaacagctgatttggtgtggacaaagcctctcagtgatggtggtagccccattctaggatatgtagtggaatgtcagaaacctggcacggcacaatggaacaggattaataaagatgaactcattaggcaatgtgcctttagggtacctggactaattgaaggaaatgagtacagattccgtataaaggcagctaatattgtaggagagggtgagccaagagaactagcagaatctgtgattgcaaaagatatccttcatcctccagaagtagaacttgatgttacttgtcgtgatgttattaccgtgagagtaggccaaactatccgcattctagctcgagtcaaaggcagacctgaaccagacataacttggactaaggaaggcaaagtattggtccgagaaaagagggtggaccttattcaggatctacctcgtgttgagttacaaattaaagaagctgttagagctgatcatggcaagtatatcatctcagctaagaacagcagtggacatgcccaaggttcagccatcgttaacgtccttgacagacctgggccttgccagaatttgaaggttaccaatgtaaccaaagagaactgtacaatttcttgggaaaacccactagataatggtggctcagaaataacaaacttcatagtagaatatcgcaaaccaaaccagaaaggctggtcaattgttgcatcagatgtcactaaacgattaatcaaggccaaccttttagccaacaatgaatactatttccgagtttgtgcagagaataaagtaggtgttgggccaaccatcgaaacaaaaactcccattctggctattaaccctattgacagaccaggtgagcctgaaaaccttcacattgcagataaaggaaagacatttgtctatctaaagtggcggaggcctgactatgatggtggcagtccaaatctgtcatatcatgttgagagaaggcttaagggctccgatgactgggaaagagtgcataaaggaagcattaaagaaactcactacatggttgacagatgtgttgaaaaccagatttatgagttcagagtgcaaacaaagaatgaaggtggggaaagtgactgggtgaagacagaggaagttgttgtgaaagaagacttacaaaaaccagtacttgatctgaaattaagtggggtcctaactgtcaaagcaggggacaccattaggcttgaggcaggggttagaggcaaaccattcccagaagttgcatggaccaaggacaaagacgctacagacttaacaagatcaccaagggtcaagattgatacccgtgctgattcatctaaattttctcttactaaagcaaagcgaagtgatgggggtaaatatgtagttacggcaactaacacggctggcagttttgtggcctatgccactgtcaatgttttagataagcctggtcctgtgagaaatctgaaaattgttgatgtgtccagtgataggtgtactgtttgctgggatccaccagaagatgatggtggctgtgaaatccaaaattatattctagaaaaatgtgagacaaagcgaatggtttggtctacctattctgctactgtcttgacacctggtactacagtaacacgtctcatagaaggaaatgaatatattttcagagtccgtgcagaaaataaaataggcacagggcctccaacagaaagtaaaccagtcatagccaaaaccaagtatgataaacctggtcgccctgatcccccagaagtcactaaagtaagcaaagaagagatgactgtggtttggaatccacctgaatatgatggtggaaagtctataactggatactttttggagaaaaaggaaaagcattcaacacgatgggtccctgtcaacaagagtgcaatccctgagagacgtatgaaagtacagaatctcctcccagaccatgaatatcagttccgtgtcaaggcagaaaatgaaattggaattggagaaccaagcttgccttcaagaccggtggtggcaaaagaccccatagagccacctggtccaccaaccaatttcagagtggttgatacaaccaaacattccataactcttgggtggggaaaaccagtctatgatggtggtgcaccgatcattggatatgttgtggaaatgagaccaaaaatagcagatgcgtctcctgatgaaggctggaaacggtgtaatgctgcagcacagcttgtacgcaaggaattcactgttaccagcttggatgaaaaccaggaatatgagttcagggtgtgtgcccaaaaccaagttggtattgggcgccctgcagagctaaaggaagctatcaaacctaaagaaatactagaacctccggagattgatttggatgccagcatgaggaaactggtcatagtgagagcaggatgccctattcgtctctttgctatagtgagaggacgaccagcccctaaagtcacttggcgaaaagttggcattgataatgtggtcagaaaaggacaagttgatctggttgacactatggccttccttgtcatccccaattctacccgtgatgactcaggaaaatattccttaacacttgtgaacccagcaggagaaaaggctgtattcgtaaatgtcagagtattagacactcctgggcctgtgtctgatttaaaagtttcagatgtcactaaaacatcatgccatgtgtcctgggcccctcctgaaaacgacggtgggagccaagtgacacattatatcgtggagaaacgtgaggcagacagaaagacatggtcgaccgttaccccagaagttaagaaaacaagcttccatgtaaccaatcttgtccctgggaatgagtattacttcagagtaactgctgtcaacgaatatggccctggcgtcccaacagatgtcccaaaaccagtgcttgcatcagatcctctaagtgagccggatcccccaaggaaattagaagtgactgaaatgaccaagaacagtgccaccttagcctggttacctcccctacgtgatggaggtgctaaaatcgatggctacatcactagttacagagaagaagagcagcctgcagatcgctggacagagtactcagtggtaaaagatctgagccttgttgtcactggcctaaaggaaggaaagaaatacaaatttagagtagcggccagaaatgctgttggagtcagtttgccaagagaagctgaaggagtgtatgaagccaaagaacaactgttgccaccaaagatccttatgccagagcaaataactatcaaagctgggaaaaaactccgaattgaagcccatgtgtatggaaagcctcatcccacctgtaaatggaaaaaaggagaagatgaagttgtcacatccagccacctggcagtgcataaagcagacagctcttcaattctgatcataaaagatgtgactaggaaagacagtggttactacagcctcacagcagagaacagttctgggacagacactcagaaaatcaaagttgtagtcatggatgcccccggcccccctcagcctccatttgacatttctgatatagacgctgatgcttgctccctgtcatggcacatccctctggaggacggaggcagtaacatcaccaattatatagtggagaagtgtgatgtaagccgaggtgactgggtcacggctctagcttcagtcacaaaaacttcctgcagggttggaaagctgatcccaggccaggagtacatcttccgggtccgtgctgaaaaccgatttggcatttcagagcctctcacatctccaaagatggttgcgcagttcccatttggtgttcctagtgaaccaaagaatgcacgagtcaccaaagtcaacaaggactgtatttttgttgcttgggacagaccagatagtgatggagggagccccattattggttatctgattgaacgcaaggaaagaaacagtttgctgtgggtgaaagccaatgatactcttgtccggtcaactgaatatccttgtgctggccttgtagaaggtcttgagtattcattcagaatctatgccctaaacaaagctggatccagcccacccagcaaacccacagaatatgtaactgcaagaatgccagttgatcctcctgggaaacctgaggttattgatgtcaccaagagtactgtatctctgatctgggctcgtccaaagcatgatggaggcagtaaaattattggctatttcgtagaagcttgcaaacttcctggtgataaatgggtacggtgcaatactgcacctcaccagattccccaggaagagtacacagctactggcctagaagagaaagctcagtatcaatttagagctattgccaggaccgcggtaaacattagcccaccttctgaaccttctgatccagtgactatcctcgcagaaaatgtccctcccaggatagacctgagtgtggctatgaaatctttgcttactgtgaaagctggaactaatgtctgcttggatgctactgtttttggtaaaccgatgccaacagtttcttggaaaaaagatggcacactgctaaaaccagcagaaggcataaagatggccatgcagcggaatctgtgcaccttggagctattcagcgtgaaccggaaggactcaggagactataccattactgctgaaaattcaagtggttctaaatcagccaccattaagcttaaagtgttagataaaccgggtcctccagcatctgttaaaatcaacaaaatgtattcagatcgtgctatgctttcttgggaaccgcctcttgaagatggaggctcagaaatcaccaactatattgttgacaaacgtgaaacaagcaggcccaactgggctcaagtctctgcaactgtgcctatcaccagctgcagcgtggagaaacttatagagggccatgagtatcagttccgtatttgtgctgaaaataaatatggagtaggcgatccagtcttcactgaaccagcaattgccaaaaacccatatgacccaccaggacgctgtgatcctcctgttattagcaacataaccaaagatcacatgacagtcagctggaagccaccagcagatgatgggggctcacccatcactggctatttgcttgaaaagcgggaaacccaggctgttaactggactaaggtcaacagaaaacctattatagaaagaacattaaaagcaacaggtcttcaagaaggtaccgaatatgagttccgtgttacagctataaataaagctggaccaggcaaacccagtgacgcatccaaggccgcttatgctcgggaccctcagtatcctcctgcgccaccggctttccctaaagtatatgatacaactcgcagctctgtgagtctatcttggggcaagccagcctatgacggcggcagccctatcattggttatctcgttgaagtaaaacgggctgactccgataactgggtgaggtgcaacttaccacagaatctacagaaaacccgctttgaggttactggcctgatggaagacacacaatatcaattccgtgtgtatgccgttaataagattggatacagtgaccccagtgatgtgccagataaacactatcccaaggacatcttaattccacctgagggagaacttgatgcggacttaaggaagacactcatattacgtgctggagttactatgagactatatgtaccagtaaaaggacgcccacctccaaagattacttggtctaaaccaaatgtcaatctaagagacaggattggactggacataaagtcaactgactttgacactttcttgcgctgtgaaaatgtgaacaaatatgatgcaggaaaatatatcttaaccctggagaacagctgtggtaaaaaggaatataccattgttgtgaaagtgcttgatactcctgggccacctgtcaatgtgactgttaaggaaatatccaaagactctgcttatgttacctgggagcctcccattattgatggcggaagccccatcataaactatgtggtacaaaaacgtgatgcagagaggaaatcctggtctacagtgacaactgagtgctccaaaacaagcttcagagtagctaatttggaggagggaaaatcctacttcttccgagtgtttgctgaaaatgagtatggcattggtgatcccggtgaaactcgtgatgctgtcaaagcttcccaaactcctggaccagttgtggacctgaaagtgaggtctgtatctaagtcatcctgtagcattggctggaaaaagcctcacagtgatggtggaagtcggattattggatatgtagttgatttcctgactgaagaaaataagtggcaacgagttatgaaatccttaagcctacagtactctgcaaaagatttgactgaagggaaggaatataccttcagagtgagtgctgagaatgaaaatggagaaggaaccccaagcgaaatcactgttgtggcaagggatgatgttgtggctcctgatcttgacttaaagggtctacctgatttgtgctacttggctaaagaaaacagcaacttccggcttaagatccccataaaaggcaagccagctccatcagtctcctggaagaaaggggaagatcctctagcaactgacactagagtcagtgttgagtcatctgcggttaacacaactcttatagtgtacgattgccaaaaatctgatgctggaaaatacacaatcacacttaagaatgttgctggcaccaaggaaggaactatctccataaaggttgttggcaagcctggcatccccactggaccaatcaaatttgatgaagtcacagcagaagccatgaccttaaagtgggctcctccaaaggatgatggaggttctgaaatcaccaactatatcctagagaagagggattctgtgaacaacaagtgggtgacgtgcgcctcagctgtccagaaaaccacctttagagtaaccagacttcatgagggcatggaatataccttcagggtcagtgccgaaaataaatatggtgtaggggaaggcctgaaatcggagccaattgttgcgagacatccatttgatgtgcctgatgctcccccacctcccaatattgtggatgtcagacacgattcagtatctctaacttggactgaccccaagaaaactggtggttctccaattacagggtatcatctcgagttcaaggaaagaaacagccttttgtggaagagagctaacaagactccgataaggatgagagactttaaagtgacaggattaactgaaggtcttgaatatgaattccgagttatggcaatcaatttagcaggtgtgggcaagccaagcctaccatcagagcctgttgtggcactggacccaattgatcctcctggaaaacctgaggttattaacataacaaggaattcagtgactctcatttggactgaacctaaatatgacggtggtcataagttaactggatatatagtggagaagcgagatctaccttcgaagtcttggatgaaagccaaccatgttaatgtcccagaatgtgcctttactgtaactgaccttgttgagggtggaaaatatgaattcagaattagagcaaagaatacagcaggtgctatcagtgctccatcagaaagtacagaaaccattatttgcaaggatgaatacgaggcaccaacaattgtccttgatcccacaataaaagatgggctaacaattaaagcaggggataccattgttttgaatgccattagcattcttggcaaaccccttccaaaatcaagttggtccaaggcaggaaaagacattagaccatcagatatcactcagataacttcaaccccaacatcttccatgcttactatcaagtatgccactagaaaagatgcgggtgaatataccatcactgctaccaatccttttggcacgaaggtggaacatgtgaaggtaacagtccttgatgtacctggtcccccaggtcctgttgaaatcagtaatgtttctgctgaaaaagcaacacttacatggacacctcccttggaagatggcggctcaccaattaagtcctatatacttgaaaagagagaaaccagccgacttttgtggacagtggtttctgaagatattcagtcttgcaggcatgtggcaaccaaacttatccaaggaaatgagtacatcttccgggtctcagctgtaaaccactatggcaaaggagaacctgtacagtctgaacctgtcaaaatggtagacagatttggtccccctggccctcctgaaaaaccagaggtatcaaatgtcactaagaacactgccactgtcagctggaaaaggccagtggatgatggtggcagcgaaattacaggatatcatgtagaaaggagagaaaagaaaagcctgcgatgggtgagagcaataaaaacaccagtttccgatctcaggtgcaaagtaacaggactgcaagaaggaagcacctacgaattccgtgtcagtgcagaaaacagagcaggaattggtccacccagtgaggcttcagattctgttctgatgaaagatgcagcatatcctccaggaccaccttcaaatccgcatgtcactgatactaccaagaaatctgcttctttggcatggggcaagcctcattatgatggtggacttgaaatcactggctatgtcgtggagcatcaaaaagtaggagacgaggcctggataaaagataccacaggaaccgccctcagaatcactcagttcgttgttcctgatcttcagactaaagaaaaatacaacttcagaatcagtgccatcaacgatgcaggtgttggggagccagcggtgattccagatgttgaaatcgtagaacgggagatggctcctgattttgaactagatgccgagcttcgaagaacacttgttgttagagcaggactcagtattaggatatttgtgccaattaaaggtcgtcctgctcctgaagtgacatggaccaaagataacatcaacctgaaaaaccgagccaacattgaaaatacggaatcatttactcttctgattatcccagaatgtaacagatatgataccggtaaatttgtcatgaccattgaaaacccggctgggaagaaaagtggctttgtgaacgtcagagtcttggacacgccaggcccagtcctcaacctgcggcctacagacatcacaaaggacagtgtcaccctgcactgggacctccctctgatagatggaggctcacgtataacaaactacattgtagagaaacgtgaagcaacacggaaatcttattccacagccaccactaagtgccataaatgcacatataaagttaccggcttgtctgaagggtgtgaatatttcttcagagtgatggcagagaatgaatatggaattggtgagccaacagaaactacagagcccgtaaaagcctctgaagcaccatctccaccagacagccttaacatcatggacataactaagagcaccgtcagcctggcatggcctaagcccaaacacgatggtggcagcaagatcactggctatgtgattgaagcccaaagaaaaggctctgaccagtggacccacatcacaaccgtgaaagggttagaatgtgttgtgaggaatctaactgaaggagaggaatataccttccaagtgatggcagtgaacagcgcggggagaagtgcccctagagaaagcagacccgtcattgtcaaggagcagacaatgcttccagagctggatctccgtggcatctatcagaaactggtcattgccaaagctggtgacaacatcaaagttgaaattccagtgctcggtcgaccgaagcccacagtgacatggaaaaaaggagaccaaattcttaaacagacacagagagttaattttgaaaccacagcgacttcaaccattttaaatatcaatgagtgtgtcagaagtgatagtgggccctatccattaacagcaaggaacattgtaggagaggttggtgatgtcatcaccattcaagtccatgatatcccagggccacctactggaccaatcaaatttgatgaagtttcatctgattttgtaaccttctcttgggacccacctgagaacgatggtggtgtaccaataagcaactatgtagtggaaatgcggcagactgacagtactacctgggttgagttagcaaccaccgttatacgtactacctataaagccacccgccttactactggattagagtatcagttccgtgtaaaagctcagaatagatatggagttggaccaggcatcacatcagcatgcatagttgccaactatccatttaaggttcctggacctcctggtacccctcaggtaactgcagttaccaaggattcaatgacaattagctggcatgagccactttctgatggtggaagccccattttaggatatcatgttgaaagaaaagaacgaaatggtattctctggcagactgtgagcaaagctttagtaccaggcaacattttcaaatcaagtggacttacagatggtattgcttatgagttccgggtgattgcagaaaacatggcaggcaaaagtaagccaagcaagccatcagaacctatgttggctctggatcccattgacccacctggaaaaccagtacctctaaatattacaagacacacagtaacacttaaatgggctaagcctgaatatactgggggctttaaaattaccagttatatcgttgaaaagagagaccttcctaatggacggtggctgaaggccaacttcagcaacattttggagaatgaatttacagtcagtggcctaacagaagatgctgcatatgaattccgtgtgatcgccaaaaatgctgcaggtgccatcagtccaccatctgagccatctgatgctatcacttgcagggatgatgttgaggcaccaaagataaaggtggatgttaaatttaaggacacggttatattaaaagcaggtgaagcattcagactggaagctgatgtttcaggccgcccacctccaacaatggaatggagcaaagatggaaaagagctggaaggcacagcaaagttagaaataaaaattgcagatttctctactaatctggtaaacaaagattcaacaagaagggatagtggtgcctatacccttacagcgactaatcctggtggctttgctaaacacattttcaatgtcaaagttcttgacagaccaggcccacctgaaggacctttggctgtaactgaagtgacatcagaaaagtgtgtactatcatggttccctccactggatgatggaggtgccaaaattgatcattacatagtacagaaacgtgaaaccagcagattggcatggacaaatgtagcctcagaagtccaagtaacaaagctaaaggtcactaaactcttgaaaggcaatgaatacatattccgtgtcatggctgtaaataaatatggagtgggagagccactggaatcagagcctgtgcttgcagtgaatccttatggaccccctgatccgcccaaaaaccctgaagtgacaactattactaaagattcgatggttgtctgctggggacatcctgattctgatggtggaagtgaaatcatcaattatattgtggaacggcgtgataaagctggccaacgctggattaaatgcaacaaaaaaactcttactgatttaagatataaagtgtctggactgacagaaggacatgaatatgagttcaggattatggctgaaaatgctgctggaattagtgcaccaagtcctaccagtccattttacaaggcttgtgacactgtgtttaaacctggaccaccaggtaacccacgtgttctggatacaagcagatcatccatttcaatcgcttggaataaacctatctatgatggtggttcagaaatcactgggtatatggttgagattgccctgccagaggaagatgaatggcagattgtcactccaccagcaggactcaaggcaacttcgtatactatcactggcctcacagagaatcaggaatataagatccgcatctatgccatgaattccgaaggacttggggaacctgcccttgttcctggaactccaaaggctgaagacagaatgctgcctccagaaattgaactggatgctgacctgcgcaaagttgttactataagggcctgctgcaccctgagactttttgttcccatcaaaggaaggcctgcacctgaggtgaagtgggcccgggaccatggagaatctttagataaagctagcatcgaatccacaagctcttacaccctgcttattgttggaaatgtaaacagatttgacagtggcaaatatatactaactgtagaaaatagttcaggcagcaagtctgcatttgtcaatgttagagttctcgatacaccaggccccccacaggatctgaaggtaaaagaggtcactaagacatctgtcacactcacatgggacccacctctccttgatggaggttcaaaaatcaagaactatattgttgaaaagcgggaatcaacaagaaaagcatattcaactgttgcaacaaactgccacaagacttcctggaaggtagaccagcttcaagaaggctgtagctactatttcagggttctcgcagaaaatgaatatggcattgggctgcctgctgaaaccgcagaatctgtgaaagcatcagaacgacctcttcctccaggaaaaataactttgatggatgtcacaagaaatagtgtgtcactctcttgggagaaaccagagcatgatggaggcagccgaattctaggctacattgtggagatgcagaccaaaggcagtgacaaatgggccacgtgtgccacagtcaaggtcactgaagccactatcactggattaattcagggtgaagaatactctttccgtgtttcagctcagaatgaaaagggcatcagtgatcctagacaactgagtgtgccagtgatcgccaaagatcttgtcattccaccagccttcaaactcctgttcaatactttcactgtactggcaggtgaagacctaaaagttgatgttccattcattggccgccctaccccagctgtaacctggcataaagataatgtaccactgaagcagacaactagagtaaatgcagagagcacagaaaataattcactactgacaataaaggacgcctgccgagaagatgttggccattatgtggttaaactgactaactcagctggtgaagctattgaaacccttaatgttatcgttcttgacaaaccagggcctccaactggaccagttaaaatggatgaagtgacagctgatagtattactctttcctggggcccacccaagtatgatggtggaagttctatcaataattacattgttgagaaacgggacacttccacaaccacctggcaaattgtatcagctacagttgcaaggacaacaataaaggcttgcagactgaagactggatgtgaatatcagtttagaattgcagctgaaaacagatatgggaagagtacctacctcaattcagagcctactgtagcccaatatccattcaaagttcctggtcctcctggcactccagttgtcacactgtcctccagggacagcatggaagtacaatggaatgagccaatcagtgatggaggaagtagagtcattggctatcatctagaacgcaaggaaagaaatagcatcctctgggttaagttgaataaaacacctattcctcaaaccaagtttaagacaactggccttgaagaaggtgttgaatatgaatttagagtctctgcagagaacatcgtgggcattggcaagccgagtaaagtatcagaatgttatgtggctcgtgacccatgtgatccaccaggacggccagaggcaatcattgtcacaaggaattctgtgactcttcagtggaagaaacccacctatgacggtggaagcaagatcactggttatattgttgagaagaaagaattacctgagggccgttggatgaaagccagttttacaaatattattgacactcattttgaagtaactggcctagttgaagatcacagatatgagttccgggttatagcccgaaatgccgcaggagtgtttagtgagccttcagaaagcacaggagcaataacagctagagatgaggtagatccaccacgaataagtatggatccaaaatacaaagacacaatcgtggttcatgctggtgaatcattcaaggttgatgcagatatttatggcaaaccaataccaaccattcagtggataaaaggtgatcaggagctttcaaacacagctcgattagaaataaagagcaccgactttgccaccagtctcagtgtaaaagatgcagtacgtgtcgacagtggaaattacatactgaaggccaaaaatgttgcaggagaaagatcagttactgtgaatgtcaaggttcttgacagaccagggccacctgaaggacctgttgttatctcaggagttacagcagaaaaatgcacactagcttggaaacccccacttcaggatggtgggagtgacatcataaattatattgtggaaaggagagaaaccagccgcttagtttggactgtggttgatgccaatgtgcagactctcagctgcaaggttactaagcttcttgaaggcaatgaatatactttccgtataatggcagtaaacaaatatggtgttggtgaacctcttgaatctgagccagtagttgccaagaatccatttgtagtaccagatgcaccaaaagctccagaagtcacaacagtgaccaaggactcaatgattgttgtatgggaaagaccagcatctgatggtggtagtgaaattcttggatatgttcttgagaaacgggataaagaaggcattagatggacaagatgccataagcgtctgattggagagttgcgcctgagagtaactggactcatagaaaatcacgattatgagttcagagtttctgctgagaatgctgctggacttagtgaaccaagccctccttctgcttaccaaaaggcttgtgatcctatttataaaccaggacccccaaacaaccccaaagtcatagacataaccagatcttcagtattcctttcttggagcaaaccaatatatgatggtggctgtgaaattcaaggatacattgttgaaaaatgtgatgtgagtgttggtgaatggacaatgtgcactccaccaacaggaattaataaaacaaacatagaagtagagaagctgttggaaaagcatgaatacaacttccgtatctgtgctattaataaagctggagttggagaacatgctgacgtccctggacctattatagttgaagaaaaattagaagcaccagacattgatcttgacctagaactaaggaaaatcataaatataagggcaggtggctccttaaggttatttgttcctataaaaggtcgtcctacaccagaagttaaatggggaaaggtggatggtgaaatccgagatgcagctataattgatgtcactagcagtttcacctctcttgttcttgacaatgtcaaccgatatgatagtggaaaatatacgcttacattagaaaacagcagtggaacaaagtctgcctttgttactgtgagagttctggacacgccaagtccacctgttaacctgaaagtcacagaaatcaccaaagactcagtatcaattacatgggaacctcctttgttggatgggggatccaaaataaaaaattacattgttgagaaacgtgaagccacaagaaaatcatatgctgctgttgtaactaactgccataagaattcttggaaaatcgatcagctccaagaaggttgcagttattactttagagtcacagctgagaatgagtatggtattggccttcctgcccagactgctgatccaattaaggttgcagaagtgccacaacctcctggaaaaataactgtggatgatgtcaccagaaacagtgtctctctgagttggacaaaacctgaacatgatggtggcagtaaaatcattcagtatattgtggaaatgcaagctaaacacagtgagaaatggtcagagtgtgctcgagtaaagtctcttcaggcagtaattaccaacctaactcaaggggaagaatatctttttagagttgttgctgtaaatgaaaaggggagaagtgatcctcggtcccttgcagttccaatagttgccaaagatctggtaattgagccagatgtaaaacctgcattcagtagttacagtgtacaggttggccaagatttgaaaatagaagtgccaatttctggacgtcctaagccaaccattacctggactaaagatggtctcccactgaagcagaccacaagaatcaatgttaccgattcactggatctcaccacactcagtattaaagaaactcataaggatgatggtggacaatatggaatcacagttgccaatgttgttggtcagaagacagcatccatcgaaattgtaactctagataaacctgatcctccaaaaggacctgttaaatttgatgacgtcagtgctgaaagtattacattatcttggaaccctccattatatacagggggctgccaaatcaccaactacattgttcagaaaagagatacaaccaccacagtatgggatgttgtttctgctactgttgctagaactacactcaaagtgaccaaactgaaaactggtacagaataccaatttagaatatttgccgaaaacagatatggacaaagctttgccttagagtctgatccaattgtagctcaatatccctacaaagaaccaggccctccaggtacaccatttgccacagccatttccaaagactccatggtcatacagtggcatgaaccagtcaacaatggtggaagccccgtcataggttaccacctggagagaaaagaaagaaacagtattttgtggacaaaggtcaacaaaactattattcatgacacccaattcaaagcacagaatcttgaagaaggcattgaatatgaattcagagtgtatgctgaaaatattgttggtgtaggcaaagcaagcaagaattctgaatgctatgtagccagagatccctgtgacccaccaggaaccccagaaccaataatggttaaaagaaatgaaatcactttacagtggaccaaacctgtgtatgatggtggaagtatgattacaggctacattgtagagaaacgtgatttgcctgatggtcgttggatgaaagctagctttacaaatgtcattgaaactcaatttactgtgtcaggtcttactgaagatcaaagatatgaattcagagtcattgcaaagaatgcagctggtgcaataagtaaaccctctgacagtactggaccaataactgccaaggatgaggttgaactcccaagaatttcaatggatccaaaattcagagacacaattgtggtaaatgctggagaaacattcagacttgaggctgatgtccatggaaagcccctacctaccattgagtggttaagaggagataaggaaattgaagaatctgctagatgtgaaataaagaacacagatttcaaggctttacttattgtaaaagatgcaattagaattgatggtgggcagtatattttaagagcttccaatgttgcaggttctaagtcattcccagtaaatgtaaaagtattagatagaccaggacctccagaagggccagtccaggttactggagtcacttctgaaaaatgctctttaacatggtctccaccacttcaagatggtggcagtgacatttctcactatgttgttgaaaagcgagaaaccagtcgacttgcctggactgttgttgcttcagaagttgtgaccaattctctgaaagttaccaaactcttagaaggtaatgaatatgttttccgtataatggctgtcaacaaatatggtgttggagagcctttggaatctgcaccagtactaatgaaaaatccatttgtgcttcctggaccaccaaaaagcttggaagtcacaaatattgccaaagactccatgaccgtctgttggaaccgtccagatagtgatggtggaagtgagattattggttacattgtagagaaaagagacagaagtggcattcgatggataaaatgtaataaacgccgcattacagatttgcgtctaagagtgacaggattaacagaagatcatgagtatgaattcagggtctctgcagaaaatgctgctggagttggggaaccaagtccagctacagtttattataaagcctgtgatcctgtgttcaaacctggcccacctaccaatgcacacattgtagacaccactaaaaattcaatcacacttgcctggggtaaacccatctatgatggcggcagtgagatcttgggatatgtagtagaaatctgtaaagcagatgaagaagaatggcaaatagttactccacagactggcctgagagtcactcgatttgaaatttcaaaactcactgaacaccaagagtataaaatacgagtctgtgccctcaacaaagttggtttaggtgaggctacatcagttcctggtactgtgaaaccagaagataaacttgaagcacctgaacttgaccttgactccgaattaagaaaaggaattgttgtaagagctggtggatctgccagaattcacattccattcaaaggtcgtccaacgcctgagatcacttggtctcgagaggaaggtgaattcacagataaggtccaaattgaaaagggagtaaactatacccaactatcaatagataactgtgatagaaatgatgctggaaaatacattcttaagttggaaaacagcagtggatcaaagtctgcttttgtaactgtgaaagttcttgacactccaggaccaccacagaatttggcagtcaaagaagtgagaaaagattctgccttcctggtatgggagccacccatcattgatggaggggcaaaggtcaagaactatgtgattgacaaacgtgagtcaaccagaaaagcgtatgctaatgtgagtagtaaatgcagcaaaacaagttttaaagtggaaaaccttacagaaggagccatttattacttcagagtcatggctgaaaatgaatttggagttggtgttccagtggaaactgttgatgccgtgaaagctgctgaacctccttccccaccaggaaaggttacactcactgatgtgtcccagaccagtgcatcacttatgtgggagaaacctgaacatgatggcggtagcagagtcctggggtacgttgttgaaatgcagcccaaaggaactgaaaaatggagcattgtggctgaatccaaagtctgtaatgcagttgttactggtttgagttctggacaagaatatcagttccgtgtcaaggcttataatgagaaaggaaaaagcgatccaagagtgttgggtgttcctgtcatagccaaggacttgactatacagcctagtttaaagttaccatttaacacatatagtatccaagctggagaagatcttaaaatagaaattccagttataggccgaccaagacctaacatttcttgggtcaaagatggtgagcctcttaaacagacaacaagagtaaacgttgaagaaacagctacctcaactgttttgcacattaaagaaggtaacaaagatgactttggaaaatacaccgtaacggcaacaaatagtgcaggcacagcaacagaaaatctcagtgttatcgttttagaaaagcctggacctccagttggcccagttcggtttgatgaagttagtgcagactttgtagtcatatcttgggaacctccagcctatactggtggctgccaaataagcaactacattgtagagaagcgagatacaaccaccaccacttggcacatggtatcagcaacagttgcaagaacaacaattaaaataaccaaactgaaaacaggcacggagtaccagtttagaatttttgctgaaaacaggtatggaaaaagtgccccactggattctaaggcagttattgtacaatatccatttaaagaacctggaccacctggaactccttttgtgacatcaatctcaaaagatcagatgcttgtgcaatggcatgagccagtgaatgatggaggcaccaaaattattggctaccatcttgaacagaaagaaaagaacagtattttatgggtcaagttaaataagacccccattcaggacaccaaattcaaaacaactgggcttgatgagggccttgagtatgagttcaaagtttctgctgaaaatattgttggcattggcaagcctagcaaagtgtcagaatgctttgttgctcgtgatccatgtgacccacctggtcgccctgaagccattgttattacaagaaacaatgtcacactgaaatggaagaaacctgcctatgatggtggtagcaaaataacaggttatattgtagaaaagaaagatctacctgatggccgctggatgaaagccagctttaccaacgtattagaaactgaatttacagtgagtggacttgtagaagaccaaagatatgaatttagagtaattgcaagaaatgcagctggaaactttagtgaaccatctgatagtagtggtgccattactgcaagagatgaaattgatgcaccaaatgcctctctggatccaaaatataaagatgtcatcgttgttcatgcaggagagacttttgttcttgaagccgacatccgtggcaaacctatacctgatgttgtttggtcaaaagatggaaaagaacttgaagaaacagctgctagaatggaaattaaatctactattcagaaaacaactcttgttgtcaaagactgtatacggactgatggaggacaatatattctgaaactcagcaatgttggtggtacaaagtctatacccatcactgtaaaggtacttgacaggccagggcctcctgaagggcctctgaaagttactggagttactgcggaaaaatgttacctggcatggaacccacctttgcaagatggtggtgctaatatttcacattacatcattgaaaagagggagacaagccgactctcttggacccaggtttcaactgaggtacaggcccttaactacaaagttactaaacttcttcctggtaatgagtacattttccgtgtcatggctgtgaataaatatggaattggagagcccttggaatctgggcctgttacggcctgtaatccttataagccaccaggtcctccctcaacacctgaagtctcagcaatcaccaaagattctatggtagtaacatgggcacgcccagtagacgacggaggtaccgaaattgagggctacattcttgaaaaacgagataaggaaggcgttagatggaccaagtgcaacaagaaaacattaacggatctgcggctcagggtaactggtcttaccgaaggccattcctatgaattcagagttgctgctgaaaatgcagctggtgtgggagaacctagtgagccatctgttttctaccgtgcgtgtgatgccttgtatccaccaggtcccccaagcaatccaaaagtgacggacacttccagatcttctgtctccctggcatggagtaagccaatttatgatggtggcgcacctgttaaaggctatgttgtagaggtcaaagaagctgctgcggatgaatggacaacctgcactccaccaacaggattacaaggaaagcagttcacagtgaccaagcttaaagaaaacactgaatataacttccgtatttgtgccatcaattctgaaggtgtaggtgaacctgcaactctacctggctcagtggttgctcaggagaggatagagccaccagaaatagaactcgatgctgatctcagaaaggtggtcgttctgcgtgcaagtgctactttacgcttatttgtcactatcaaaggtcgaccagaacccgaagttaaatgggaaaaggcagaaggcattctcactgacagggctcagatagaggtgaccagctcatttacaatgttggtgattgataatgttaccagatttgacagtggtcggtataatctgacattagaaaataatagtggctccaaaacagcttttgttaacgtcagagttcttgactcaccaagtgcccctgtgaatttgaccataagagaagtgaagaaagactcagtgacgttgtcctgggaaccaccacttattgatggtggagctaagattacaaactacattgtcgaaaaacgagaaactacaagaaaagcctatgctaccattacaaataattgcactaaaactactttcagaattgaaaatctacaagaaggatgttcttactacttccgagtcttggcttccaatgaatatgggattggtttgccagctgaaacaacagaacccgttaaagtgtctgaaccacccctcccacctggaagagtaactcttgttgatgtgacccgtaatacagctacaattaagtgggagaaaccagaaagtgatggtggcagcaaaattactggttatgtggttgaaatgcagactaaagggagtgaaaagtggagcacctgcacacaagttaagactctagaagcaactatatctggcttaactgcaggagaagagtatgtcttcagggtagctgcagttaacgaaaagggaagaagtgatccaagacaacttggagtgccagtaattgcaagggatattgaaataaagccttcagttgagcttcctttccatactttcaatgtaaaggctagagaacaacttaagattgatgtgccattcaaaggaagacctcaagctactgtgaactggagaaaagatggtcagactcttaaagagacaactagagtcaatgtttcttcttcaaagactgtaacatcactatctattaaggaagcttcaaaggaagatgttggaacttatgaattatgtgtttcaaacagtgctggatccataacagttcctattactataattgtccttgacagaccaggacctccaggtcctatacgtattgatgaggttagttgtgacagcataaccatttcttggaatcctccagaatatgatggtggctgccaaattagcaattacattgttgaaaagaaagaaaccacctctacaacatggcacatagtttcacaagcagttgcaagaacatccattaaaatagttcgcctgacaacaggaagtgagtatcagttccgtgtttgtgcagaaaaccgctatggaaagagctcctacagtgaatcttcagctgttgttgcagagtatccattcagtcccccaggtcctcctggtactcctaaagttgtgcatgccacaaaatctaccatgcttgtaacctggcaagtgccagttaatgatggaggaagtcgagtaattggctatcatcttgagtataaagaaagaagcagcattctttggtcaaaagcaaataaaatcctcattgctgatactcaaatgaaagtctccggccttgatgaaggactgatgtatgagtatcgtgtatatgctgaaaatattgctggaattggtaaatgcagtaaatcttgtgaaccagtccctgcaagagatccttgtgaccctcctggacaacctgaagtcacaaatatcacaagaaaatcagtgtcacttaaatggtctaaaccacattatgatggtggagctaagatcacaggatacattgttgaacgcagagaactaccagatggccggtggctgaagtgcaattatactaatatacaagaaacatactttgaagtaactgaacttactgaagatcagcgttatgaattccgggtttttgcaaggaatgctgctgactcagttagtgagccatctgaatccactgggcctattatagttaaagatgatgttgagcctccaagagttatgatggatgtcaagttccgagacgttattgttgtcaaagctggagaggtccttaagataaatgcagacattgcagggcgacctctgccagtaatttcctgggccaaggatggtatagaaattgaagaaagagcaagaacagaaatcatctcaacagacaatcatactttgttaacagttaaagactgtataagacgagacactgggcaatatgtactaacactgaagaatgttgccggcactcggtctgtggccgttaattgcaaagtacttgataagcctggtccaccagcaggaccacttgaaataaatggcctcactgctgagaaatgctctctttcctggggacgtccccaagaagatggtggtgcagatatcgactattacatcgtagaaaaacgtgaaacaagccaccttgcatggacaatatgtgaaggagagttacagatgacatcctgtaaagtaaccaagttactcaaaggcaatgaatatatatttagagtaactggtgttaataaatatggtgttggtgagcccctagagagtgtagctataaaggcactagatccatttacagttccaagtccacccacgtctttggaaattacttctgtgaccaaagaatctatgacactttgctggtcaagacccgagagtgatggaggtagtgaaatatctggatatataattgaaaggcgagagaaaaatagcctaagatgggtgcgtgtaaacaaaaaaccagtttatgatctaagagtgaaatcaacaggacttcgggaaggatgtgaatatgaatatcgtgtttatgcagaaaatgctgctggcctaagtcttccaagtgaaacctctcccttaattagggcagaagatccagtgttcctaccatctcctccatccaaacccaaaattgtggactcaggcaagacaactataactattgcctgggttaagccgctgtttgatggtggggccccgataactggatatactgtagaatacaaaaaatctgatgacactgactggaaaacttccattcagagcttacgagggacagaatatacaataagcggactaacaacaggagctgaatatgttttcagagtaaaatctgtcaataaggttggtgctagtgaccccagtgatagctctgaccctcagatagcaaaggaaagagaagaagaacctttatttgatattgacagtgaaatgaggaagaccttgattgtcaaggctggtgcctcatttaccatgactgtgcctttccgaggaagaccagtacccaatgtcttgtggagtaagccagacactgacctccgtactagagcttatgttgataccacagactcccgtacatcactgaccattgaaaatgccaacagaaatgactctggaaagtacacattaacaattcagaatgttttgagtgctgcttcactgaccttagttgtcaaagttttagataccccaggtcctccaaccaacattactgtgcaagatgtaaccaaagagtctgcagtgttatcctgggatgttcctgaaaacgatggtggagcaccagtgaagaattaccacatagaaaaacgtgaggccagcaagaaagcatgggtctctgtgaccaacaactgtaaccgcctctcctacaaagttaccaatttacaagaaggagctatctattacttcagagtctctggagaaaatgagtttggtgttggtataccagctgaaacaaaggaaggagtaaaaataacagaaaaaccaagcccacctgaaaaacttggagtaacaagtatatccaaagacagtgtttccctgacctggctgaagcctgaacatgatggcggaagcagaattgtacactatgtcgttgaagcactagaaaaaggacagaaaaactgggttaaatgtgcagtggcaaagtcaacccatcacgttgtttccggtctgagagagaattctgaatactttttccgagtgtttgctgaaaatcaagctggcctgagtgacccgagagagcttctgcttcctgttcttattaaggagcaactagaaccacctgaaattgatatgaagaatttcccaagtcacactgtatatgttagagctggttcaaaccttaaagttgacattccaatctctggaaaaccacttcccaaagtgaccttatcaagagatggtgtcccccttaaggcaaccatgagatttaataccgaaattactgctgagaacctgaccatcaatctcaaagaaagtgttacagctgacgctgggagatatgaaatcactgctgccaactccagtggtacaaccaaagctttcattaacattgttgtgctagacaggcctggtcctccaactggccctgttgttattagtgatataactgaagaaagtgtgactctcaaatgggagccacctaagtatgacggtggaagtcaagttaccaactacattctactcaaaagagaaacaagtactgcagtgtggactgaagtgtctgcaacagttgcaagaaccatgatgaaagtcatgaaactgaccacaggagaagaataccaattccgcatcaaggcagaaaaccgctttggcatcagtgatcatatagattcagcttgtgtgactgtcaaactaccatacacaacacctggaccaccatctacaccatgggtcactaatgttactcgagaaagcatcactgtgggctggcatgaaccagtgtcaaatggaggcagtgcagtcgtaggctatcacctggaaatgaaagacagaaacagtattttatggcaaaaagccaacaaactggtcatccgcacaactcacttcaaagtcacaacaatcagtgctggacttatttatgaattcagggtgtatgcagaaaatgctgctggagttggaaaacctagccatccttctgaaccagtcttggcaattgatgcttgtgaacccccaagaaatgttcgtatcactgatatttcaaagaactctgtcagcctttcatggcaacaaccagctttcgatggaggtagcaagattacaggctacattgttgagagacgtgaccttccagatggcagatggaccaaggccagcttcaccaatgttactgaaactcaattcatcatctctggcttgactcagaattcccagtatgaattccgtgtctttgctaggaatgctgttggttccattagcaatccatctgaggttgtagggcccattacttgcatcgattcttatggtggtcctgtaattgatttgcctctagaatatacagaagttgtcaaatacagagcaggtacatctgtgaagctcagagctggcatttctggcaaacctgcgcctactattgagtggtataaagatgataaagaattacaaaccaatgcactggtgtgtgttgaaaataccacggacctcgcatctatactcatcaaagatgccgatcgccttaatagtggatgctatgaattaaaactaaggaatgccatgggctcagcctcagccaccatcagagtacagatccttgacaaaccaggcccacctggtggaccaattgaatttaagactgtaactgctgagaagatcacccttctctggcggcctccagctgatgatggtggtgcaaaaatcactcactacattgtggaaaagcgtgagacaagccgcgttgtgtggtctatggtgtctgaacatttggaagagtgcatcattacaaccaccaaaattatcaaaggaaatgaatacatcttccgggtccgagccgtgaacaaatatggaattggcgagccactggaatctgattccgttgtagccaagaacgcatttgttacacctgggccaccaggcataccagaagtgacaaagattaccaagaattcgatgactgttgtatggagcaggccaattgcagatggcggtagtgatataagtggctatttccttgaaaaacgagacaagaagagcctaggatggtttaaagtactaaaagagactatccgtgacaccagacaaaaagtaacaggactcacagaaaacagtgactatcaatacagagtttgtgctgtaaacgctgctggacagggtccattttctgaaccatctgaattctacaaagctgctgatcctattgatcctccaggtccacctgctaagataagaatcgcagattcaaccaagtcatccatcacccttggctggagtaagcctgtctatgatgggggcagtgctgttactgggtatgttgtcgagataagacaaggagaggaagaggaatggactactgtctctaccaaaggagaggtcagaactacagaatatgtggtatccaacctgaaacctggagtcaattactacttccgggtatctgctgtaaactgtgctggacaaggagaacctatagaaatgaatgaacctgtacaagctaaagatatacttgaggcaccagagattgacctggatgtggctctcagaacttctgttattgccaaagctggtgaagatgtacaagtgttgattccctttaaaggcagacctccacctactgtcacatggagaaaagatgagaagaatcttggcagtgatgccagatacagcattgaaaacactgattcatcctcattactcaccattcctcaagttactcgcaatgatacaggaaaatatattctcacaatagaaaatggagttggtgaacctaagtcttcaactgtgagtgttaaagtgcttgacacaccagctgcctgccagaaactacaggttaaacatgtttctcgaggcacagtcactttgctctgggatcctcctctcattgatggaggatctccaataattaattatgtcattgaaaagagagatgccaccaagagaacatggtctgtcgtgtcacacaaatgttctagcacatccttcaagctaatagatttgtcggagaagactccattcttcttcagagttcttgcagaaaatgaaattggaattggggaaccctgtgaaactacagagccagtgaaggctgctgaagtaccagctcctatacgtgatctctcaatgaaagactcaacaaagacatctgtcatcctcagctggaccaaacctgactttgatggtggtagcgtcatcacagaatatgttgtagaaaggaaaggtaaaggtgaacagacgtggtcccacgctggcataagtaagacatgtgaaattgaggttagccaacttaaggagcagtcagtcctggagttcagagtgtttgccaaaaatgagaaaggactgagtgatcctgtcactattgggccaattacagtgaaagaacttattattacacctgaagttgacctgtcagatatccctggggcacaagtcactgtgagaattgggcacaatgtgcaccttgaattaccttataagggaaaacccaaaccatccatcagttggctgaaagatggcttgccactgaaagaaagtgaatttgttcgcttcagtaaaactgaaaacaaaattactttgagtattaagaatgccaagaaggagcatggaggaaaatacactgttattcttgataatgcagtgtgtagaattgcagtccccattacagtcatcacccttggcccaccatcaaagcccaaaggacccattcgatttgatgaaatcaaggctgatagtgtcatcctgtcatgggatgtacctgaagataatggaggaggagaaattacttgttacagcatcgagaagcgggaaacttcacaaactaactggaggatggtgtgttcaagtgttgccagaacgactttcaaagttcctaatctagtcaaagatgctgagtaccagtttagagtgagagcagaaaacagatacggagtcagccaaccacttgtctcaagcattattgtggcaaaacaccagttcaggattcctggtcccccaggaaagccagttatatacaatgtgacttctgatggcatgtcactaacttgggatgctccagtttatgatggtggttcagaagttactggattccatgttgaaaagaaagaaagaaatagcatcctctggcaaaaagttaatacatcaccaatctctggaagagaatatagagccactggactggtagaaggtctggattaccaattccgtgtatatgctgaaaattctgctggcctaagctcacctagtgacccaagcaaatttaccttagctgtttctccagtagacccacctggcactcctgactacattgatgtcacccgggaaaccatcacacttaaatggaacccaccattgcgtgatggaggcagtaagattgtgggctatagcattgagaaacggcaaggaaatgaacgctgggtgagatgcaactttactgacgtcagtgaatgtcagtacacagttacaggactcagtcctggggatcgctatgagttcagaataattgcaagaaatgctgttggaactataagcccgccctcacagtcttctggcattattatgacaagagatgaaaatgttccaccaatagtagagtttggccctgaatactttgatggtctcattattaagtccggagagagccttagaattaaagctttggtacaaggaagaccagtgcctcgagtaacttggttcaaagatggagtggaaatcgaaaagaggatgaatatggaaataaccgacgtacttggatccaccagcctatttgttagagatgctactcgggaccatcgtggtgtatacacagtggaagccaaaaatgcatctggttctgcaaaagcagaaattaaagtgaaagtacaagatacaccaggaaaagtagttgggccaataagattcaccaatattactggggagaagatgactctgtggtgggatgccccactcaatgacggttgtgctcccataacccactacatcattgaaaaacgggaaaccagcagacttgcctgggcactaattgaggataaatgtgaagcccaaagttacactgccattaaactaataaacggcaatgaataccaattccgtgtttctgcagttaacaagtttggtgttggcaggccacttgattctgatccagtggttgctcaaatacaatatactgttcctgatgcccctggcattccagaacctagcaacataacaggcaacagcattaccctgacatgggcaaggccagaatcagatggtggcagtgaaattcaacagtatatccttgaaagaagagaaaagaaaagcacaagatgggtaaaagtgatcagcaaacgaccaatctctgaaacaagattcaaagtcactggtctgacagaaggcaatgagtatgaattccatgtcatggctgaaaatgctgcaggagttggacctgcaagtggcatctcaagactcattaaatgtagagagcccgtcaacccaccaggtcctcccacagtggtcaaagtaacagacacatcaaagacaactgtgagcttagaatggtccaaaccagtgtttgatggtggcatggaaataattgggtatattattgaaatgtgtaaggccgacttaggagactggcacaaggtgaatgcagaggcatgtgtgaaaacaagatatacagtcactgatctacaagcaggtgaagaatacaaattccgagttagtgctatcaatggtgctggaaaaggcgacagctgtgaagtgactggcacaattaaagcagttgaccggttaacagctcctgagttagacatagatgcaaacttcaaacagactcatgttgttagagctggggccagtattcgcctcttcattgcctaccaaggtagacctactcctacagctgtgtggagcaaaccagactctaaccttagccttcgggctgatatccatacaacagattccttcagcaccctcactgtggaaaactgcaacagaaatgatgcagggaaatatacccttactgtggaaaacaacagtggtagtaagtcaatcacattcaccgtgaaagtgctagacactccaggcccacctggcccaattaccttcaaagatgtgacccggggatctgctacattgatgtgggatgcccctcttcttgacggtggtgcccgaatccatcattatgtggtagagaaacgagaggcaagtcgccgtagttggcaggttatcagtgaaaaatgcactcgtcagatcttcaaggtcaatgacctggccgaaggtgttccgtactatttccgtgtttctgcagtaaatgagtatggtgttggtgagccctatgaaatgccagaaccaattgtagccacagaacagcctgctccacctaggagacttgatgttgttgatactagcaaatcctccgcagtcttagcttggcttaaacctgaccacgatggaggcagccggatcactggctacctgcttgaaatgagacaaaagggatctgacttctgggttgaagctggtcacaccaaacagctaactttcacagtagagcgtcttgttgagaaaactgaatatgaattccgtgtgaaggccaagaatgatgctggctatagtgaacccagagaagccttctcttctgtcatcattaaggagcctcaaatcgagcccactgctgacctcactggaattaccaatcagcttataacttgcaaagcaggaagcccatttaccattgacgtaccaatcagtggtcgtcctgcccccaaagtaacatggaaactggaagaaatgagacttaaagagacagatcgagtgagcattacaacaacaaaagacagaaccacactgactgtaaaggacagcatgagaggtgactctggaagatacttcttgaccctggaaaatacagctggtgttaaaacatttagcgtcacagttgtggtcattggaaggccaggtccagtaaccggccccattgaggtctcatctgtctcagctgaatcgtgtgtcctgtcatggggagaacctaaagatggaggaggcactgaaattactaattacatagttgaaaagcgtgaatcgggtacaacagcttggcagcttgtcaattccagtgtcaagcgcactcaaattaaagtcactcatctcacaaaatacatggaatattctttccgtgtcagttcagagaacagatttggtgtcagcaaacctctagaatcagcaccaataattgctgaacatccatttgtcccaccaagcgctcctaccagacctgaggtctaccatgtgtctgccaatgccatgtctattcgttgggaagaaccctaccacgatggtggcagtaaaatcattggctactgggttgagaagaaagaacgtaatacaattctttgggtgaaagaaaacaaagtgccatgcttagagtgcaactacaaagtaactggtttagtagaaggactggaatatcagttcagaacttatgcactcaatgctgcaggtgttagcaaggccagcgaagcttcaagacctataatggctcaaaatccagttgatgcaccaggcagaccagaggtgacagatgtcacaagatcaacagtatcactgatttggtctgccccagcgtatgatggaggcagcaaggttgtgggctacatcatagagcgtaagccagtcagtgaggtaggagatggtcgctggctgaagtgcaactacaccattgtatctgacaatttcttcaccgtgactgctctcagtgaaggagacacttatgagttccgtgtgttagccaagaatgcagcaggcgtaattagcaaagggtctgaatctacaggccctgtcacttgccgagatgaatacgctccacccaaagccgaactggatgcccgattacacggtgatctggttaccatcagagcaggttctgatcttgttctggatgctgcagttggtggcaaacctgaacccaaaattatctggaccaaaggagacaaggagctagatctctgtgaaaaagtctctttgcagtatactggcaaacgagcaactgctgtgatcaagttctgtgacagaagtgacagtggaaaatacactttaacagtgaaaaatgccagcgggaccaaggccgtgtctgtcatggtcaaagtgcttgattcccctggcccatgtggaaagctcaccgtcagcagagtaacacaggagaagtgcactttagcctggagccttccgcaggaagacggaggagcagaaatcactcactacatcgtggaaagacgcgagactagcaggctcaactgggtgattgttgaaggcgaatgcccaaccctatcctatgtcgttaccaggctcatcaagaacaatgagtacatattccgagtgagggcagtaaacaaatatggccctggtgtgcctgttgaatcagagccaattgtagccagaaactcattcactattccatcaccacccggcatacctgaagaagttgggactggcaaagagcatatcatcattcagtggacaaaacctgaatctgatggtggcaatgaaatcagcaactacctagtagacaaacgtgagaagaagagcctgcgctggacacgtgtcaacaaagactatgtggtgtatgataccaggctgaaggtgaccagcctgatggagggttgtgattaccagttccgggtgaccgcagtgaatgcagctggtaacagtgagcccagcgaagcttccaacttcatctcatgcagagaaccatcatatacccctggaccaccttctgctccaagagttgtggataccaccaaacacagcattagtttggcatggaccaaacccatgtacgatggtggtactgacattgtaggatatgttctggaaatgcaagagaaggacactgatcagtggtaccgagtgcataccaatgccacaataagaaatactgaattcactgtgccagaccttaaaatgggccagaaatattccttcagagttgctgccgtgaacgtgaagggtatgagcgaatacagcgaatcaattgctgaaattgagcccgtggaaagaatagaaataccagatcttgagcttgcagatgatctaaagaagactgtgaccatcagggctggggcctccttgcgcttgatggtgtctgtatctggaagaccacctcctgtcataacgtggagcaagcagggcattgaccttgcaagccgggcaattattgacaccactgagagctactcattgctaatagtggacaaagttaatcggtacgatgctggaaaatacacaattgaagctgaaaaccaatctggcaagaaatcagcaacagtccttgttaaagtctatgatactcctggtccctgtccttcagtgaaagttaaggaagtatcaagagattctgtgactataacttgggaaattcccacgattgatggtggagctccagtcaacaattacatcgttgagaagcgtgaagctgctatgagagcattcaaaacagtaactaccaaatgcagcaagacactttacagaatttctggacttgtagaaggaaccatgtactatttcagagtgctgccagaaaatatttatggcattggagaaccttgtgaaacatctgatgcagtactggtctcagaagtgcctttggtgcctgcaaagctagaagtggtcgatgtcaccaaatccactgttacccttgcctgggaaaaaccactctacgatggtggtagccgactcactggatatgttctcgaggcctgcaaagctggcacagagagatggatgaaggttgtcaccttaaaacccacagtcctagagcacactgttacttccttaaatgaaggtgaacaatacttatttagaataagggcacaaaatgagaaaggtgtgtcagaaccaagagagactgtcacagccgtgactgtacaagacctcagagtgttgccaacaatcgatctttctacaatgcctcagaagaccatccatgtcccagctggcagaccagtagagctggtgatacctattgctggccgtccacctcctgctgcttcctggttctttgctggttctaaactgagagaatcagagcgtgtcacagttgaaactcacactaaagtagctaaattaaccatccgtgaaaccactatcagagatactggagaatacacacttgaattgaagaatgttaccggaactacttcagaaaccattaaagttatcattcttgacaagcctggtccaccaacaggacctattaagattgatgaaattgatgctacatcaattaccatttcctgggaaccacctgaattggacggtggtgctccactgagtggttatgtggtagaacaacgtgacgctcatcgtccaggatggctgcccgtttctgaatcagtgactaggtccacgtttaagtttaccagactcaccgaaggaaatgagtatgtgttccgtgtggctgcaacaaaccgcttcgggattggctcttacttgcagtctgaggtcatagagtgtcgcagcagcatccgtattcctggacccccagaaacattacagatatttgatgtttcccgtgatggcatgacacttacttggtacccaccagaggatgacggtggctcccaagtgactggatatattgtggagcgcaaagaagtgagagcagatcgatgggtccgtgtaaataaagtacctgtgacaatgacacggtaccgctccactggccttactgaaggcttagaatatgaacaccgtgtcacagccattaatgcaagagggtctgggaaaccaagtcgtccttccaaacccatcgttgccatggatccaattgctcctccaggaaagccacaaaacccaagagttactgatacaacaaggacatcagtctccctggcctggagtgttccagaagatgaaggaggatctaaagtcacaggctacttgattgaaatgcaaaaagtagatcaacatgaatggaccaagtgtaacaccactccaaccaagattcgagagtatactctaacacacctacctcagggtgcagaatacaggttccgcgtcctagcttgtaatgctggtggacctggtgagcctgctgaggtaccaggaacagtcaaagtcactgaaatgcttgaatatcctgattatgaacttgatgaaagataccaagaaggtatctttgtaaggcaaggtggcgtcatcagacttaccataccaatcaaaggaaaaccattcccaatatgtaaatggaccaaggaaggccaggatattagtaagcgtgccatgattgcaacatctgaaacacacactgagcttgtgatcaaagaagcagacaggggtgattctggcacttatgacctggttctggaaaataaatgtggcaagaaggctgtctacatcaaggtcagggtgataggaagtcccaacagtccagaagggccactggaatatgatgacatccaagtccgctctgtgagggtcagctggagacctcctgctgatgatggtggtgctgacatcttaggctacatcctcgagagacgagaagtgcctaaagccgcctggtataccattgattccagagtccgaggtacatctctggtggtaaaaggcctcaaagagaatgtagaataccatttccgtgtttcagcagaaaaccagtttggcataagcaaacccttgaaatctgaggaaccagtcacaccaaaaacaccattgaatcctccagaacctccaagcaatcctccagaagtactcgatgtaaccaagagttctgttagcttgtcctggtcccggcccaaagatgatggtggttctagagtcacaggctactacatcgaacgcaaagagacatccactgacaagtgggtcagacacaacaagactcagatcaccaccacaatgtacactgtcacagggcttgttcccgatgctgagtatcagttccgcatcatcgcacagaatgatgttggcctgagtgagaccagccctgcttctgaaccagttgtttgcaaagatccatttgataaaccaagccaaccaggagaacttgagattctttcaatatccaaagatagtgtcactctacagtgggagaaacctgaatgtgatggtggtaaagaaattcttggatactgggttgaatatagacagtctggagacagtgcctggaagaagagcaataaggaacgtattaaggacaagcaattcacaataggaggtttgctggaagctactgagtatgaattcagggtttttgctgagaatgagactgggctgagcagacctcgcagaactgctatgtctataaagactaaactcacatctggagaggccccaggaatacgcaaagaaatgaaggatgttaccacaaaattgggtgaagctgctcaactctcatgccagattgttggaaggcctcttcctgacattaaatggtacagatttggtaaagagctcatacaaagccggaaatacaaaatgtcttcagatggacgcacacacactcttacagtaatgacagaggaacaggaagatgaaggtgtttatacctgcatagccaccaatgaggttggagaagtagaaaccagtagtaagcttctcctgcaagcaacaccgcagttccatcctggttacccactgaaagagaaatattatggagctgtgggttccacacttcggcttcatgttatgtacattggtcgtccagtacctgccatgacttggttccatggtcagaaacttttgcaaaactcagaaaacattactattgaaaacactgagcactatactcatcttgtcatgaagaatgtccaacgtaagactcatgctgggaaatacaaagtccagctcagcaatgtttttggaacagttgatgccatccttgatgtggaaatacaagataaaccagacaaacctacaggaccaattgtgatcgaagctctattgaagaactccgcagtgatcagctggaaaccacccgcagatgacggaggctcctggatcaccaactatgtggtggaaaaatgtgaggccaaggagggggctgaatggcaattggtgtcttcagccatctcagtgacaacctgtagaattgtgaacctcacagaaaatgctggctattacttccgggtttcagctcagaacactttcggcatcagtgaccctctagaagtgtcctcagttgtgatcattaagagtccatttgaaaagccaggtgctcctggcaaaccaactattactgctgtcacaaaagattcttgtgttgtggcctggaagccacctgccagtgatggaggtgcaaagattagaaattactaccttgagaagcgtgagaagaagcagaataaatggatttctgtgacaacagaagaaattcgagaaactgtcttttcagtgaaaaaccttattgaaggtcttgaatacgagtttcgtgtgaaatgtgaaaatctaggtggggaaagtgaatggagtgaaatatcagaacccatcactcccaaatctgatgtcccaattcaggcaccacactttaaagaggaactgagaaatctaaatgtcagatatcagagcaatgctaccttggtctgcaaagtgactggtcatccaaaacctatcgtcaaatggtacagacaaggcaaagaaatcattgcagatggattaaaatataggattcaagaatttaagggtggctaccaccagctcatcattgcaagtgtcacagatgatgatgccacagtttaccaagtcagagctaccaaccaagggggatctgtgtctggcactgcctccttggaagtggaagttccagctaagatacacttacctaaaactcttgaaggcatgggagcagttcatgctctccgaggtgaagtggtcagcatcaagattcctttcagtggcaaaccagatcctgtgatcacctggcagaaaggacaagatctcattgacaataatggccactaccaagttattgtcacaagatccttcacatcacttgttttccccaatggggtagagagaaaagatgctggtttctatgtggtctgtgctaaaaacagatttggaattgatcagaagacagttgaactggatgtggctgatgttcctgacccacccagaggagtcaaagttagtgatgtctcacgagattctgtcaacttaacatggactgagccagcctctgatggtggcagcaaaatcaccaactacattgttgaaaaatgtgcaactactgcagaaagatggctccgtgtaggacaggcccgagaaacacgttataccgtgatcaacttatttggaaaaacaagttaccagttccgggtaatagctgaaaataaatttggtctgagcaagccttcagagccttcagaaccaaccataaccaaagaagataagaccagagctatgaactatgatgaagaggtagatgaaaccagggaagtctccatgactaaagcatctcactcttcaaccaaggaactctatgagaaatatatgattgctgaagatcttgggcgtggtgagtttggaattgtccatcgttgtgttgaaacatcctcaaagaagacatacatggccaaatttgttaaagtcaaagggactgatcaggttttggtaaagaaggaaatttccattctgaatattgctaggcatagaaacatcttacacctccatgaatcatttgaaagcatggaagaattagttatgatctttgagtttatatcaggacttgacatatttgagcgcattaacacaagtgcttttgaacttaatgaaagagaaattgtaagttatgttcaccaggtctgtgaagcacttcagtttttacacagtcataatattggacactttgacattagaccagaaaatatcatttaccaaaccagaagaagctctaccattaaaatcatagaatttggtcaagcccgtcagctgaaaccaggggacaacttcaggcttctattcactgccccagaatactatgcacctgaagtccaccagcatgatgttgtcagcacagccacagacatgtggtcacttggaacactggtatatgtgctattgagtggtatcaacccattcctggctgaaactaaccaacagatcattgagaatatcatgaatgctgaatatactttcgatgaggaagcattcaaagagattagcattgaagccatggattttgttgaccggttgttagtgaaagagaggaaatctcgcatgacagcatcggaggctctccagcacccatggttgaagcagaagatagaaagagtcagtactaaagttatcagaacattaaaacaccggcgttattaccacaccctgatcaagaaagacctcaacatggttgtgtcagcagcccggatctcctgtggtggtgcaattcgatctcagaagggagtgagtgttgctaaagttaaagtggcatccattgaaattggcccagtttctgggcagataatgcatgcagttggtgaagaaggaggacatgtcaaatatgtatgcaaaattgaaaattatgatcagtctacccaagtgacttggtactttggcgtccgacagctggagaacagtgagaaatacgaaatcacctacgaagatggagtggccatcctctatgtcaaagacattaccaaattagatgatggtacctacagatgcaaagtagtcaatgactatggtgaagacagttcttatgcagagctatttgttaaaggtgtgagagaagtctatgactattactgccgtagaaccatgaagaaaattaagcgcagaacagacacaatgagactcctggaaaggccaccagaatttaccctgcctctctataataagacagcttatgtaggtgaaaatgtccggtttggagtaactataactgtccacccagagcctcatgtaacatggtataaatcaggtcagaaaatcaaaccaggtgacaatgacaagaagtacacatttgagtcagacaagggtctttaccaattaacaatcaacagtgtcactacagatgatgacgctgaatatactgttgtggcaaggaacaaatatggtgaagacagctgtaaagcaaagctgacagtaaccctacacccacctccaacagatagtaccttaagacccatgttcaaaaggttactggcaaatgcagaatgccaagaaggccaaagtgtctgctttgagatcagagtgtctggcatccccccaccaacattaaaatgggagaaagatggtcagccactgtccctcgggcctaacattgaaattatccatgaaggcttggattattatgctctgcacatcagggacactttgcctgaagacacgggttattatagagtcacagccactaacacagctgggtccaccagctgccaggctcacctacaagtggaacgcctgaggtacaagaaacaggaattcaagagtaaggaggagcatgagcgacacgtacaaaaacaaattgacaaaaccctcagaatggctgaaattctttctggaactgaaagtgtaccactgacacaggtagctaaagaggctctgagagaagctgctgtcctttataaaccggctgtaagcaccaagactgtaaaaggggaattcagacttgagatagaagaaaagaaggaggagagaaaactccggatgccttatgatgtaccagagccacgcaagtataagcagactaccatagaagaagaccaacgcatcaagcagttcgtgcccatgtctgacatgaagtggtataaaaagatacgtgatcagtatgaaatgcctgggaaacttgacagagttgtacagaaacgacccaagcgcatccgcctttcaagatgggaacagttctatgtgatgcctcttccacgcattacagatcaatacagacctaaatggcgtattcctaaactgtcccaagatgatcttgagatagtgagaccagcccgccggcgtacaccttctcctgattatgacttttactaccgacctagaagacgttctcttggggacatctctgatgaagaattactcctccccattgatgactacttagcaatgaaaagaacagaggaagagaggctgcgtcttgaagaagagcttgagttaggtttttcagcttcacccccaagtcgaagccctccacactttgagctttctagcctacgttactcttcaccacaagctcatgtcaaggtggaggaaacaagaaaagacttcaggtattcaacctatcacatcccaacgaaggctgaagctagtacaagttatgcagaactgagggaacggcatgcccaggctgcgtacagacagccaaagcaacggcaaagaatcatggctgagagggaggatgaagagttgcttcgcccagttacgaccacccagcatctctcagaatacaaaagcgaacttgacttcatgtcaaaggaggaaaagtctagaaagaaatcaaggcgacaaagagaagtgacagaaataacagaaattgaggaagaatacgaaatctcaaaacatgctcaaagagaatcatcctcatctgcgtctagactactgagacgacggcgctccctgtctccaacttatattgagttaatgaggccagtgtctgagctgatccggtcacgtccacaaccggctgaggaatacgaagatgacacagaaagaaggtcacctactccagagagaactcgcccacgatcccccagccctgtgtctagtgagagatcactctcgagatttgagaggtctgcaagatttgatatcttttccaggtatgagtccatgaaagctgctttaaaaactcagaagacatcagaaaggaagtatgaagttttgagtcagcagcctttcacactggaccatgcccctcgaatcacactgagaatgcgctcgcacagggtaccatgtggccaaaatacacgttttattttaaatgttcagtctaagccaactgccgaggttaaatggtaccacaatggtgtggaactccaagaaagcagtaagattcattacaccaacacgagtggagtcctcaccctggaaattctggactgtcatactgatgacagtggaacctaccgtgctgtgtgcaccaactacaagggcgaagcttctgactatgcaacgttggacgtgacaggaggggattataccacctatgcttcccaacgcagagatgaagaggtccccagatctgttttccctgagctgacaagaacagaggcgtatgctgtttcatcatttaagaaaacatctgagatggaagcttcgtcttctgtcagggaagtgaaatcacagatgacggagacaagggaaagtctctcctcatatgaacactctgcatctgcagaaatgaaaagtgctgcattagaagaaaagtcactggaagaaaaatccacaaccagaaagatcaagacgactttggcagcaagaattctaacaaagccacggtccatgaccgtctacgagggcgagtctgcaaggttttcttgtgacaccgatggtgagccggtaccaactgtgacctggctgcgtaaaggacaagtgctaagtacttctgcccgccaccaagtgaccaccacaaagtacaaatcaacctttgagatctcttcagtccaggcttccgatgagggcaattacagcgtggtggtagaaaacagtgaagggaaacaagaagcagagttcactctgactattcaaaaggccagggtaactgaaaaggctgtgacatcaccaccaagagtcaaatccccagagcctcgggtgaaatccccagaagcagttaagtctccaaaacgagtgaaatctccagaaccttctcacccgaaagccgtatcacccacagagacaaaaccaacaccaacagagaaagttcagcacctcccagtctctgccccaccaaagattactcagttcctgaaagcagaagcttctaaagagattgcaaaactgacctgtgtggttgaaagcagtgtattaagggcaaaagaggtcacctggtataaagatggcaagaaactgaaggaaaatgggcatttccagtttcattattcagcagatggtacctatgagctcaaaatcaataacctcactgaatctgatcaaggagaatatgtttgtgagatttctggtgaaggtggaacgtctaaaaccaacttacaatttatggggcaagcctttaagagtatccatgagaaggtatcaaaaatatcagaaactaagaaatcagatcagaaaaccactgagtcaacagtaaccagaaaaactgaaccaaaagctcctgaaccaatttcctcaaaaccagtaattgttactgggttgcaggatacaactgtttcttcagacagtgttgctaaatttgcagttaaggctactggagaaccccggccaactgccatctggacaaaagatggaaaggccattacacaaggaggtaaatataaactctctgaagacaagggagggttcttcttagaaattcataagactgatacttctgacagtggactttatacttgtacagtaaaaaattcagctggatctgtgtcctctagctgcaaattaacaataaaagctataaaagatactgaggcacagaaagtctctacacaaaagacttctgaaattacacctcagaagaaagctgttgtccaagaggaaatttcccaaaaagccctaaggtctgaagaaattaagatgtcagaggcaaaatctcaagaaaagttagccctcaaagaggaagcttcaaaggttctgatttctgaagaagtcaagaaatcagcagcaacctccctggaaaaatccattgtccatgaggaaatcactaaaacatcacaggcatcagaagaagtcagaactcatgctgagattaaagcattttctactcagatgagcataaacgaaggtcaaagactggttttaaaagccaacattgctggtgccactgatgtgaaatgggtactgaatggcgtagagcttaccaactctgaggagtaccgatatggtgtctcaggcagcgatcagaccctaaccatcaagcaagccagtcacagagatgaaggaatcctcacctgcataagcaaaaccaaggaaggaatcgtcaagtgtcagtatgatttgacactgagcaaagaactctcagatgctccagccttcatctcacagcctagatctcaaaatattaatgaaggacaaaatgttctctttacttgtgaaatcagtggcgagccatcccctgaaatcgaatggtttaaaaacaacctgccaatttctatttcttcaaatgtcagcataagccgctccagaaatgtatactcccttgaaatccgaaatgcatcagtcagcgacagtggaaagtacacaattaaggccaaaaatttccgtggccagtgttcagctacagcttccttaatggtccttcctctagttgaagaaccttccagagaggtagtattgagaacaagtggtgacacaagcttgcaaggaagcttctcgtctcagtcagtccaaatgtctgcctccaagcaggaggcctccttcagcagtttcagcagcagcagtgctagcagcatgactgagatgaaatttgcaagcatgtctgcccaaagcatgtcctccatgcaagagtcctttgtagaaatgagttccagcagctttatgggaatatctaatatgacacaactggaaagctcaactagtaaaatgcttaaagcaggcataagaggaattccgcctaaaattgaagctcttccatctgatatcagcattgatgaaggcaaagttctaacagtagcctgtgctttcacgggtgagcctaccccagaagtaacatggtcctgtggtggaagaaaaatccacagtcaagaacaggggaggttccacattgaaaacacagatgacctgacaaccctgatcatcatggacgtacagaaacaagatggtggactttataccctgagtttagggaatgaatttggatctgactctgccactgtgaatatacatattcgatccatttaagagggcctgtgcccttatactctacactcattcttaacttttcgcaaacgtttcacacggactaatctttctgaactgtaaatatttaaagaaaaaaaagtagttttgtatcaacctaaatgagtcaaagttcaaaaatattcatttcaatcttttcataattgttgacctaagaatataatacatttgctagtgacatgtacatactgtatatagccggattaacggttataaagttttgtaccatttattttatgacattttacaatgtaagttttgaaactaactgttggtaggagaaagtttcttatggaacgaataccctgctcaacatttaatcaatctttgtgcctcaacatactgttgatgtctaagtatgcctcagtgggttgagaaaatccccattgaagatgtcctgtccacctaaaagagaatgatgctgtgcatatcacttgatatgtgcaccaatacctactgaatcagaaatgtaaggcattggtgatgtttgcatttaccctcctgtaagcaacactttaacgtcttacattttctctgatgatgtcacacaaaattatcatgacaaatattaccagagcaaagtgtaacggccaacactttgttcgctcattttacgctgtctctgacataaggagtgcctgaatagcttggaaaagtaacatctcctggccatcccttcatttaaccaagctattcaagtattcctatgccagagcagtgccaactcttggaggtcccagagtgcagccaatgcctttgtgtggtagttctaaattttaattgcacctgaaaaacctgggcacctaagcaatgagccacagcaaaaagtaaagaacaacaacaaaataaagctgttgttaaattttaaacaatattactaattgcccaaaatgtcaatttgatgtagttcttttcatgcaagtataaattcaattgttagttataattgttggacctccttgagatagtaacaacaaaataaagcaagctatctgcacctcaaaa

SEQ ID NO: 29376 - DNA, 6429 bp, Homo Sapiens
cttgaggattcagtctggtcctgaagggtttggggggagactgcgaccagaagatgtttccatgtcctaattaatgggtgatggtggttgttagtctgactgttgccacggtgatgaagggagacatccaagtgctggtttcagtactgaggcgaatacagggaatttcaacaggctccaggtcttactatgcagcctgaagtgggaccatcccttaaacccactccatcctgtggccacgatgggggccaggacacctttgccttctttctgggtttctttctttgccgagacagggattttgttcccaggaggcactccctggcccatgggatctcagcattcaaagcagcacaggaaacctgggcccctgaaacggggccaccgaagagatcggagaacaaccaggaggaagtactggaaggaaggaagggagatcgctcgtgtcttagatgatgagggcagaaacctgaggcagcagaagcttgatcggcagcgggccctgctggagcagaagcagaagaagaagcgccaggagcccctgatggtgcaggccaatgcagatgggcggccccggagccggcgggcccggcagtcagaggaacaagcccccctggtggagtcctacctcagcagcagtggcagcaccagctaccaagttcaagaggccgactcactcgccagtgtgcagctgggagccacgcgcccaacagcaccagcttcagccaagagaaccaaggcggcagctacagcagggggccagggtggcgccgctaggaaggagaagaagggaaagcacaaaggcaccagcgggccagcagcactggcagaagacaagtctgaggcccaaggcccagtgcagattctgactgtgggccagtcagaccacgcccaggacgcaggggagacggcagctggtgggggcgaacggcccagcgggcaggatctccgtgccacgatgcagaggaagggcatctccagcagcatgagctttgacgaggatgaggaggatgaggaggagaatagctccagctcctcccagctaaatagtaacacccgccccagctctgctactagcaggaagtccgtcagggaggcagcctcagcccctagcccaacagctccagagcaaccagtggacgttgaggtccaggatcttgaggagtttgcactgaggccggccccccagggtatcaccatcaaatgccgcatcactcgggacaagaaagggatggaccggggcatgtaccccacctactttctgcacctggaccgtgaggatgggaagaaggtgttcctcctggcgggaaggaagagaaagaagagtaaaacttccaattacctcatctctgtggacccaacagacttgtctcgaggaggggacagctatatcgggaaactgcggtccaacttgatgggcaccaagttcactgtttatgacaatggagtcaaccctcagaaggcctcatcctccactttggaaagtggaaccttacgtcaggagctggcagctgtgtgctacgagacaaacgtcttaggcttcaaggggcctcggaagatgagcgtgattgtcccaggcatgaacatggttcatgagagagtctctatccgcccccgcaacgagcatgagacactgctagcacgctggcagaataagaacacggagagtatcatcgagctgcaaaacaagacacctgtctggaatgatgacacacagtcctatgtactcaacttccatgggcgcgtcacacaggcctccgtgaagaacttccagatcatccatggcaatgacccggactacatcgtgatgcagtttggccgggtagcagaggatgtgttcaccatggattacaactacccgctgtgtgcactgcaggcctttgccattgccctgtccagcttcgacagcaagctggcgtgcgagtagaggcctcttcgtgccctttggggttgcccagcctggagcggagcttgcctgcctgcctgtggagacagccctgcctatcctctgtatataggccttccgccagatgaagctttggccctcagtgggctccctggcccagccagccaggaactggctcctttgcctctgctactgaggcaggggagtagtggagagcgggtgggtgggtgtgaagggatgagaataattctttccatgccacgagatcaacacacactcccacccttggggtagtagtgtgttgtagtcgtacttaccaagctgagcaacctcttcagctgggaaggccgcaagaggcatagagggagaggaagcacactgcagggctgctgtggcccagtcgtccgctcagccaaggagtcagatggcaatgggtactccagcaggtaggggcacagtgaatgtgtgtatgtatgaaggccacatcaactttatgtagcaaagggcttggtggccaagcctggcccttaaacaactgcagaaagcccttcaacttcagaaggcctcactcaagcctgagagaagttgggagggtggtggggacaggtaagtggcaggaccctgtcaggattgcaggtgcctggcttgctgtggctatgggaatcagctggtggctaggtttctagcgcatttgatttctccaggtttgctgtgtctcacagaggcagtaggaacccagctctcagggctgtcttggtggatgggccctgcaagacacaggctcagcatgcagaagtgcatgaacagggtccctggatcagggttgttctgggagtcctgtcagcttccccaggagctctctgctgagcagcccagcacaacccccaggaaacacaaatggggtccaggtcaccagcctgactgcacacagctaggcatgcctgggaatcctgctgccagagaaccattcccaagccatggcatgctccttgaagaatctctcctctctctctctctctggaaagacccaactttctcactgctgtcagccaagtcatggttggtaaccatgtaggttcttgggagggaatgggacagggtgaataaagcagggaatattttagaaccacaagagatcagcagtggcaggacccttaggaatctagtacaaccttgttgctttaggtgagtcacactcagaaaatggggcttgccctgggtcacctagctggttaatggcagcattcagaacttcaagttctcttgatttctttgttcccactgtcccccaagaaactagtatctctggcctcctggggcccattctgcatgccctccccacttcccccgattcagagacttagaagcatcagagttgataaattagattgaaaccattccagtaggaaatcaggcagttccctgttgaaagttgtctggctttttgcacgtgagtatgatccaggattggcctgtgtctggcccctccgcgagggctactcagcagtaagcaggccttagtacggctgctgcacacttctcggtctaggtgggagagagtgcataaaggttctggggctgggcctgagcctaactccctccactaccgctatttctccttggatggcaccatccaccctgcaggcttgggaactgtaagctcaagcttttgctcatttgtcatttaccctggtggaggcttcttgcccagatagagatctgaaattggtgggaagcaagcaggggtcgtaccttgctttagagtagatgtttggaaaagctaagtagaaattttttaaaatagaagttgtattttaaacgtgttaggctttataggtgaaggacttgttttgacttaagtagaagtaatatgctctcatttctttgtaatctagattttcctatgttgaatgcttaaagcaaggcatacctgtcctagcaggatctgcccacacctcggccgtacatctctgtgagagaccccctccaacgattagcttttgcaacatggtccagtttctagagggcactagaactttgtgccagcgctggcgagataccatggtgccatcctcctttctatagttccagtttagcccttccctgcctttaaggagaagagatcttcatggtgacatttgagatgatggaaactagatcgtctctaatgttaggtcaagctatttctctggatctatgattttaagatagaacaggctggttctgagttctggtgagacggagaccccggtggcagtggaaaaatcagaagcacaaaggaaaactcttggcctctgctttctcctgtagcacaaagagggagttggctggatcttttggtggagtcaggaaagacaggctgagctttctagcctaagtgtggagaaggatagcctcagccacaaaactctgtcaggcattgaatgacaagcatcagtagctgagtgcactcctggtgatcctggttttccttgaccactggccctggggccatgggtgcatggactcgtaaagctgctagggcccctagaaaccacctgggttcagcctctcccacaataagagttcttgcccttcataccctctacctggatggatggtctttgggcagggaattaatgacagaatgagcagtccctaatggtattgggcagttgggagtgagtttaggcagcttctctgtaaccgcttctggggccacaccccaaaactctacaccctctgccccagaacaattctgcagagtggtgaagttcacttccccaactcttctccaagtctagctttcctttccttctggctccaaggtgctctgtgtccgtctgtgtatgtgtgtgtctgtgcgtctgtgtgtttatttggggaaaagggcaatcagcaatcaactgaggtttcttaattgtgattatattcctgagaatgaatgagtaggaaaggaataaggatgttgttatgatcgcctgtggattttgtccattcatctcatgctctctgaacagaaggtatacctgggaagataccagctttttctctcagggttctgagtcagaggacaccatccaagaatgttgttagcttttcagttcccgctctgcattgcctgaaaaaactggtatgttgcacgtatgcttttggttgaaattgaacatactctagtgaatgtgccttaaaaatcaagacactagttcagaggaagcacataatgtccagatctatggcgaacacaggtgttggaagccaggactgtgataatcagaagctataagagaactttcggagcctgcctccttcagtgacaagtagggcacaaaattctagaagcagaaggtttttttttttttttttttctccattctgaaaatagcaggacatttacctcttaaataaacttagcatttagaggtaattctaaatttaacaagtgacagggttggtttcaaagaaaaaggtccatgctttgcttacaatggagtctgcagtgaggggagatgctgggatagccatttccatggctctgttatgcaagcacaaatttcatctcctagatggacttcctggttttctcttactgcagtaacactggccttcccttctctaattccttaccccagctgcggcatccctgtgttaactcaggatgccaagtggccctcagattacacttctccagatagctgaatgagtctgctttcactgtgactgggacctgaatgacctgcagtcagggcccagagttgggactctatactaccctgggctctggtctgtaggtttgtagtagccaccggtaataagccaagggctaggctcttgtttgagtttatggccacctggaattttcagtcatctcatgatacaggcgggaggggcagaacagatagattacgacaggtttggtttttaaattttccaaccaagtggaaaggcaagttggtcttatagaaagcactactgcacttagtagctatgtgattttgagcaaaccacataatctctctaggtccattttcctaaccacaagataaagatgttacattgtcaaagcttgccgtaggatttggggtgaatgaaaattattccttgctttcatcactacctttatagctctcatcactacctttatagctcatcactgtgcctttttttctttcctaagaaagacatcacatccctctcctctcctcctctgtgctcctgtccctccctccccctagcaaggtccaggcaaagctggagatgaggctgagatccagagtttcctagaacgcaacttaggatggctaggaaagggaagcctgactgctcggtcaggagggtgcagtatctcttgctgggaacacagccagtttccacaatgcctagactgtgtatgtctatttgcacaagattgtcttttcctattttggagtggtcagacattttatttttgttcaagattatctggcgttttagacaaatttgcaaaactgtgcttttattgactttttgaataaactttggtattctgaaaaaaaaaaaaaaaa

SEQ ID NO: 29377 - DNA, 4013 bp, Homo Sapiens
gatgcggctgtggtggcggcggcggcggccgagcgcgggtggcggctgtggcggcggaggggggcgcgggccggcgatggcgcggcggccctgagggcgcggggcgggcggcggccggagggcgggtggcgcgggaggaagcggcggcggtggctccatggcccgggcgcgctgagggacccggcgctcgcctcagcccggcggcggcggcggccgaacaatgaagctcctgaagccgacctgggtcaaccacaatggcaagccgattttttcagttgatattcaccctgacgggaccaagttcgcaactggaggacaagggcaggattctgggaaggttgtgatctggaatatgtctccagtcctccaggaggatgacgagaaggatgaaaatattcccaagatgctttgccagatggacaatcacttagcatgtgtgaactgtgtgcggtggtcaaacagtgggatgtatttagcttctgggggagatgacaaactgattatggtgtggaagcgggctacgtacatcggccccagcaccgtgttcggctccagtggtaagcttgccaatgtggagcagtggcggtgtgtctctatcctccggaatcattcaggcgatgtgatggatgtagcatggtctccccacgatgcctggctagcctcatgcagcgtggataacactgtcgtcatctggaatgctgtaaagttcccagaaattctagctactctgagaggtcattctggcttggtcaaagggttgacatgggaccctgttggtaaatacatagcttctcaagctgatgaccgcagcctaaaggtgtggaggacgctggactggcagttggagaccagcatcaccaagccttttgatgagtgtggaggaacgacccatgtgttgcggctcagctggtcacctgatgggcattacctggtgtctgcccatgccatgaacaactcaggccccactgcccagatcatcgaacgggagggatggaagaccaacatggactttgttgggcaccggaaagctgtgactgtcgtgaaattcaacccaaaaatcttcaaaaagaagcagaagaatgggagttctgcgaagcctagctgcccgtactgctgctgtgctgttggcagcaaggaccgctcgctttctgtctggctcacatgtctgaaacggccgctggtggtcatccatgaactgtttgacaaatccatcatggatatttcctggactctgaatgggctgggcatcttggtatgctctatggacggctctgtggcattcctcgacttctcccaggatgagcttggcgatcccctgagcgaggaggagaagagccgcattcaccagtccacctatggcaagagcctagccatcatgaccgaggcccagctctccacagccgtcattgagaaccctgagatgctcaagtaccagcgaaggcagcagcagcagcagctggaccagaagagtgctgcgaccagggagatgggctcagccacctcagtcgcaggcgttgtcaacggggagagtcttgaagatatcaggaagaatcttttgaagaaacaagttgagactcggacagcagatggccggagaagaatcacgcctctctgcatagcacagctggacactggggacttctccacggcattctttaacagcatccccctctcgggctccctggcgggcaccatgctctcttctcatagcagtccacagctactgccactggactccagtacccctaactccttcggcgcctcgaagccttgcacagagcctgtggtggctgccagtgccagacctgcaggcgattctgtcaataaagacagtatgaatgctacctctactcctgctgcattgtcaccttctgtgttaacgaccccgtccaagatcgaacccatgaaagcgtttgactcccggttcacagagcggtccaaagccacaccaggtgctcctgccctgaccagcatgactccgacagctgtggaaaggttaaaagagcagaaccttgtgaaagagctgaggccccgagacctcctggagagcagcagtgacagcgatgagaaagtccctttggctaaggcttcctcactgtccaagcgaaaacttgagcttgaggtagagacagtagagaagaagaagaaagggcggcctcggaaggactctcgtctcatgcctgtgtctctgtctgtccagtctccagctgccctaaccgcagagaaggaggccatgtgtctgtctgcaccagcacttgcactgaagctgccaattccaagcccccagagagcattcaccctccaggtcagctccgatccttccatgtacattgaggtggagaatgaagtgacagtggtggggggcgtgaagctgagccgcctgaagtgcaaccgggaagggaaggagtgggagacggtactcaccagccggatcctcactgctgcgggcagctgtgacgtggtgtgtgtcgcctgtgaaaaaaggatgctgtcagtgttctccacctgtggtcgccgtctcctctctcccatcctcctgccatccccgatctctactttgcattgcacaggctcctacgtcatggcgctcaccgctgcagccacactctctgtctgggatgttcacagacaggtggttgtggtgaaagaagagtctctacactccatcctggcaggaagtgatatgacggtatcacagatcttgctgacgcagcatggaatcccagtaatgaacctgtccgatgggaaggcgtactgctttaatccgtcactttccacatggaacctggtttctgacaagcaggactcactggctcagtgtgcagactttaggagcagcctgccatcccaggacgccatgctgtgctcaggaccgttagccataatccagggccgcacctccaactcgggaaggcaggctgcccggctcttctccgtgcctcatgtggtgcagcaagagaccaccctggcctacctagagaaccaggtggcagcagcactcaccctgcagtccagccacgagtaccgccattggctcctcgtctacgcacggtacctcgtaaacgaagggtttgaataccgacttcgagaaatatgcaaggacttactgggtccggttcactactccactggaagccagtgggagtcaacagtagtgggtctgcggaagagggagctgctgaaggagctgctaccagtcatcgggcagaacctccgattccagcgcctcttcaccgagtgtcaggaacagctcgacatcctgagggacaagtagcctgccccagcctgccctggctgcagcaagggcagggccacactctcgccgctgatgacatgcaggaccgcctctcacctgaccaggctgtagggggaggagacactggcaggagatgtgctgtcctgcaccagcgccagcccagctccctgggcagatgtgccctgtgtcctgggtctgacattgcctcaggagggggaagctcatccctccctccaagcccccgatgcggagctagggctggagctctgcccaggtgccctggggccagcaaggcagtcccaggcctgccgtctccagcacggccccaaggtggacactagcccctgctgctgcaggcaccatgctgcttcagcagtgacgattgagccatttgtgagagagaatccggaagcgttaggtattacagcagactgacctaagacctatgtaaaaggaaagctgttccaacacacggactatttttgtactagaatttgctaacttgtaatattgaatttcctttggccgataatcaggatttccctataagtcacttggacattggtcacttgtaggaaatttaaactctaattatgacagctacactgaaaaataattgtactgaaattaacttgtctatcttcatttggttttaatttttaaatgtttgtaaaaagagactgttttgggggaatggggcaaaggggtgggcgatttcttttgtaagtgtaaaataaatgaacacgcattgaatacc

SEQ ID NO: 29378 - DNA, 2919 bp, Homo Sapiens
agcagtccccggtgtcggggcaggaggcacgcgcgcggctgaggcgaggtcgctcggcgcagctgttgcggggccatggcggggaccgcgctcaagaggctgatggccgagtacaaacaattaacactgaatcctccggaaggaattgtagcaggccccatgaatgaagagaacttttttgaatgggaggcattgatcatgggcccagaagacacctgctttgagtttggtgtttttcctgccatcctgagtttcccacttgattacccgttaagtcccccaaagatgagatttacctgtgagatgtttcatcccaacatctaccctgatgggagagtctgcatttccatcctccacgcgccaggcgatgaccccatgggctacgagagcagcgcggagcggtggagtcctgtgcagagtgtggagaagatcctgctgtcggtggtgagcatgctggcagagcccaatgacgaaagtggagctaacgtggatgcgtccaaaatgtggcgcgatgaccgggagcagttctataagattgccaagcagatcgtccagaagtctctgggactgtgagacctggcctcgcacaggcgcgcacacaccgccaagcagctcagcattctcccccggcacacttagtgacagtgatgctctgtgctggtaccaaacaaggcagacttgcaagaaccatggcatcttttttttttttcaaacctttcctacttcaaacaggcttctcttctgaaatgatgacttaatgtcgaatattgacagcttactgcagttttacagtattcctcacaaagggcttcaggtagattatcagagctgtcagcactacctctccccgctgaaaccagcagttcatggcttcctgtggattccctccctccctggagtgttgagggggttgtacctgccagacttccaggggacgatggaatacccagaacgctccttctgaagaaatggggccctgtagctgcagcacaggggaagggcccggcaccctttctgggtccttcctggttccctgtgggccccatgaggagtccattacttcctttcttccttcatattttacaggcagatgcttttcttataatctaattacatcttttcatttgttatatattacaaaccatcacacttagaaatacttccaggaaatgcttttttgaagtgtgaattaataagaaatggggtaaatagaaaagaaatttattgctgattggccaggtgcggtggttcgtgcctgtaatcccagctctttgggaggccaaggcaggtagatcacaaggtcaggaaattgagaccatcctggctaatacagtgaaaccccatgtctgctaaaattacaaaaaattagctgggcgtggtggtgcacgcctgtagtctcagctactcaggaggctgaggcaggagaatcgcttgaacccgggaggcagaggtagcagtgagctgaagtcccgccactgcactccagcctgggcaacagagcgagactcagtctcaaaaagaaaaaagaaatttattgctgatcacaaggacagacagttttttcccgaccatactcatcaaagatttacgtttgtatattagtaactagtgcattactagagcaggtgcaggtgaggtctttaaagtttcaatgaaagtttcttctggatctacagaaaaaatttttttttttcaatctaaaaactggaaattctagggtttttgtacattttggatgcactgggaatttattagcacaaaatcattctttgcaactcaaaattcagaagggactctaccatatcttagctcagagcacagaggagtgccttatccccacacttgactgggctgtggaggtgggcatgtgggcccctgggcccaggctggggacagagcccttgttttgtgacttaggattttgatgtggttcccatgttctctaacagggccagctgagcagcacaggccaggaggccacagtgtaagcaataacagatctgccacatgcagaagcaaatatcaggcctgtcgcacacgggcggcatttaaataggaatttctatttttgaaataagggatggtctatgaggcatacagtagatttgatgtgatccttttctccctcccttccataatggatcgtggtctgtgtgactgaacccacacagagtgtcatgggtgacagtttctggttgaagtagctccacgcctggcttctgtggacagcagattcttttccttctcacaaggggctcatttaaaatttggaggctgggtgctgtggctcacgcctgcaatcccagcactttgggagactgaggcgggcggatcatgaggtcaggagatcgcgaccatcctggctaacagtgaaaccctgtctccactaaaaatacaaaaaattagccgggcgtggtggcgggcgcctgtagtcccagctactctgaagactgaggcaggagaatggcgtgaacccaggaggcggagcttgcagtgagctgagatcacgccactgcactccagcctgggcaacagagtgagactctgtctcaaaaaaaaaaaaaaaaaaaatggaacgcagggcaagaactcgtatttggaaggagatgggggaaaggagcggtattatacctatgttgtatttgcaggcaaatgagatggagccctctctgtaaagaagagtcatttgtgcaagtagacggggtctgtgggtgcaggccctggaggggcacacaattgcctggaggcttctgtgagatcgggagagggaggagaggcagtctcttgacaaaataaagtatttttattcatttgtatttattaaatgaaaaaacaatcccatggtgtccctgttgtgtggtggaacctaatgactgttgaaataaagttctgtgttttccctgccctgcaaaaaaaaaa

SEQ ID NO: 29379 - DNA, 2907 bp, Homo Sapiens
gctccaggaagtgcgggggctccagccgcccggccggccgcgatgcattctggggaaggagcagcaccaaatccaagatggcggccagcaggaggctgatgaaggagcttgaagaaatccgcaaatgtgggatgaaaaacttccgtaacatccaggttgatgaagctaatttattgacttggcaagggcttattgttcctgacaaccctccatatgataagggagccttcagaatcgaaatcaactttccagcagagtacccattcaaaccaccgaagatcacatttaaaacaaagatctatcacccaaacatcgacgaaaaggggcaggtctgtctgccagtaattagtgccgaaaactggaagccagcaaccaaaaccgaccaagtaatccagtccctcatagcactggtgaatgacccccagcctgagcacccgcttcgggctgacctagctgaagaatactctaaggaccgtaaaaaattctgtaagaatgctgaagagtttacaaagaaatatggggaaaagcgacctgtggactaaaatctgccacgattggttccagcaagtgtgagcagagaccccgtgcagtgcattcagacaccccgcaaagcaggactctgtggaaattgacacgtgccaccgcctggcgttcgcttgtggcagttactaactttctacagttttcttaatcaaaagtggtctaggtaacctgtaaagaaaggattaaaaatttaagatgttctagttctgctctctttgttttaaaaatcactgcttcaatctacttcaaaagaatggtgtttcttttcttgtccaattttatccaaaatcttcaagttacatttaacccataaggtttaaaaaaaaggaaaaaaaacggttgtggttccctttcttccctacccttgccactcccactttctggcaccgagtttatttttcacttacttacttccccagaccccgggctcgcctccacaaaggagaagagactgccctggcggtcctggtggcttttcttagcatgtgtggcactgttgcccagtgtgggagttggtttaaattctcctgactccagtttataacatccttttaaaaaatttaaaaacaaacagccacacccctcctccagtccttctcctcagttcttgtgtgaaactccagctgatgttaccacagtaacatcagttaattgggcaagccctgatgtcagtgtgtgtaactgacctctggcctggcctgcacagagaagccctataatcacaggtctgtggtggccccgaaatggggggcctgctagtcaggaggatgctgtgcacactgtgtgtgatgaatctcgccagaaaggctcctgaggtcccaggttggcacttctccctgcagccattgtagaagatctgctggtccttgcaggcaaagctacagccagaatgtccgtttgaaactcctagctcatctgtcaccgagcttcatccgaatgtgccacggagcttgctctccacttcctccgtgcagtggccctgccacagccctccctcggcacactttgaccctttgtaggattggaattagcaggactcggctatttaaagcaccagtctggggtcgcctgggcccctgctgaccccctcctccagagcagccagcccagcccgggaacaagacggacttcctctcccttcggactcacagcctttgcagagtcaagctccacttgaagctcactcagtaatatcctttcaatgtgttttatattgttttgactgcctttttttgtagaaataaaaattgaccttagaatttatcgtcagataaacttgtaaagatttgaatattaatgtcttttcaaggcaaatgggattgtccccgcactagtagagaatccatgtcgctctgacaccccaaggaagccgacgatccaaatgccgtgtgtcaccaaccccgcttctgccactggcggcttcccttcttggctcttgggggggactagatcctgtggagaagatgacttaaactttgctttttgttttaattttaattctataacttgagatctttccggggcctacaggcgtgtaagacagcttggtctggtctgtgcagaagtggggagtgatgggcaggttcggcagcctaacattgttcaggcgcatggcccctgcggtgtgtacacgaactcggcttcttttgtcctaggtacgccaagggcaggtttctggagactcccttgtgcccgggatggcaagggcaccgggctggcgtttccacatctgtcttcattagcagaaaagtgatgatggattttatttcactcacactccagtttgtaataaaatgccaaattctgtcagctatccaaacaagccaccatttgttcttgttgcttctctggatccagaaatgttgccattcttggaaactgtcccattgcttcgtatttctgccaacgtagctctgcctgcctgtcaacccctcactgcactctgctcatcacgggaggatacctgtgtgccggcagcccctcagggactctcagccctggcactggcaccccagggttggccccgtcagcagaggcttggctttcgagccagtgggtgtctctcctttgggcctgggcggcttgctcctgccagccatgccttcagggtaggctctgagcaagctggcgaacagccctggctgctccaaaaccaaaaagctgggtcctctggaggaggggcgagctgtggagcagccacccactgctgccccaagctcactcaggaattcacacccgcctggtttcttgaagtgtgctgggtccttccctctgctccctactccccaccacggcagagaataggctttctaagatgctgcgatcccgttctgctgcccgtaataaaaatgctctcagacactg

SEQ ID NO: 29380 - DNA, 2568 bp, Homo Sapiens
cgcgcgcgcagtcgcgcgcgggtcgtgccgtaccaccgtcgcgggcaggctcggccacgagcgccagagccccgcgcctcccctcgcggcctgtcccaagtccctgccccgcaacagagcgtcacttccgccatccccggcagcggttggggcggggcgcacgggggagggggccaggtcggagggaagcccgcccgtgcccgagcccgcgcccgagcagggactacatttcccgaggggcctcggcggcggctgcggcgacgggcgcggcaacgtcccccggaagtggagcccgggacttccactcgtgcgtgaggcgagaggagccggagacgagaccagaggccgaactcgggttctgacaagatggccgggctgccccgcaggatcatcaaggaaacccagcgtttgctggcagaaccagttcctggcatcaaagccgaaccagatgagagcaacgcccgttattttcatgtggtcattgctggccctcaggattccccctttgagggagggacttttaaacttgaactattccttccagaagaatacccaatggcagcccctaaagtacgtttcatgaccaaaatttatcatcctaatgtagacaagttgggaagaatatgtttagatattttgaaagataagtggtccccagcactgcagatccgcacagttctgctatcgatccaggccttgttaagtgctcccaatccagatgatccattagcaaatgatgtagcggagcagtggaagaccaacgaagcccaagccatagaaacagctagagcatggactaggctatatgccatgaataatatttaaattgatacgatcatcaagtgtgcatcacttctcctgttctgccaagacttcctcctctttgtttgcatttaatggacacagtcttagaaacattacagaataaaaaagcccagacatcttcagtcctttggtgattaaatgcacattagcaaatctatgtcttgtcctgattcactgtcataaagcatgagcagaggctagaagtatcatctggattgttgtgaaacgtttaaaagcagtggcccctccctgcttttattcatttcccccatcctggtttaagtataaagcactgtgaatgaaggtagttgtcaggttagctgcaggggtgtgggtgtttttattttattttattttattttatttttgaggggggaggtagtttaattttatgggctcctttcccccttttttggtgatctaattgcattggttaaaagcagctaaccaggtctttagaatatgctctagccaagtctaactttatttagacgctgtagatggacaagcttgattgttggaaccaaaatgggaacattaaacaaacatcacagccctcactaataacattgctgtcaagtgtagattccccccttcaaaaaaagcttgtgaccattttgtatggcttgtctggaaacttctgtaaatcttatgttttagtaaaatattttttgttattctactttgcctttgtacagtttattttactgtgtttatttcattttcccaatttgacaatcgtattttaaaattgaaactgatggaacattctttcttggtcttcaccatctgacaaattgaatggcaagaggtggattttgccagtttcttttcactgatgcagatttgtgttaagatagtactgaatggagtatttataaactggccctgagcatgcataaagcatcagtatctgacctttttttaaccttctaggaatttgaaataaatgtgtttgtgttgtctgattagatgatcattggtgtcttgccacaatgtttaaaaattactgtacaggaaagtcacagcaaagatagcagttgtgactgacatgtaggactttcacagttgtgccacatttttgcctaaaatttgggttatgacatttttcttggttcttatctgaaaatttcatctgtaacctttcatgtgtgttaagaaacactgatctgatcatttgggatttgctgaggcatttgtgagtcttccttataaacctgatgagcagatctcaactatctagcttgtgtgtcatcagaaaggtttatccctttgagagtatcaagtcctcagttaatgattcttgctttcatccctccagtatttgctgtgggagctcgttttattctttaatttggaattcagtaatttttcttctttattgacgaattcctcccctcacaaaactgttctttcccacctctctccatatctaattcctgattcttgttatttttaagtcataaatgtagccagtcataaatacataaatgttaaccttcgggttgcaaccttgtctcttgcagtttaaggtaatggatattgtagcccatttgaattttcttcactcttattctcgtaattctggagtttcttcagattgtggtgtattttattgtgctcctatgtaagatgaagaattaactattaaaattacattttcaacatacaaaagcttttgatgactggtaactggtatccttccaaataaatgcattgcttggtaaaaaaaaaaaaaaaaaa

SEQ ID NO: 29381 - DNA, 3696 bp, Homo Sapiens
atagcacgccgcgcgcggggcggatgtccgggccggctgggccggggccgcggaggagatggcggaaggtggaggctgccgtgagcgaccggatgcggagactcagaagtccgagcttggacccttaatgaggaccacactccaacgcggggcgcagtggtatcttattgacagccggtggttcaagcagtggaagaagtatgtgggctttgacagctgggacatgtacaatgtgggtgaacataacctatttcctggcccaatagacaactctgggctattttcagatcctgagagtcagaccttgaaagaacacttaattgatgaattggactatgtattggtccctaccgaggcgtggaataaactactaaactggtacggctgtgtagaaggccagcaacccatcgtcagaaaagttgtggagcatggcctgtttgtcaagcactgcaaagtcgaggtgtatttgctggaactgaagctctgtgagaacagtgaccccaccaatgtgctgagttgccatttcagcaaggcagacaccattgcaaccatcgagaaagagatgcggaagctattcaacatccctgcggagcgtgaaacacggctctggaacaaatacatgagcaacacctacgagcagttgagcaagctagacaacactgtccaggatgctgggctataccagggtcaggtgctagtaattgagcctcaaaatgaagatggcacatggcccaggcagaccttgcagtcaaaatcaagcactgcgcctagcagaaattttactacctctccaaaatcatcagcaagtccctattcctcagtgtctgcctctctcattgcaaatggtgatagcactagcacctgtgggatgcacagttccggtgtcagcaggggtggatctggcttttctgcttcgtataattgtcaggagccaccatcctctcatatacaacctgggctctgtggacttggaaacctgggaaacacctgcttcatgaactccgctttgcagtgtttgagcaacactgcaccactgactgactactttctcaaagatgagtatgaagccgaaatcaacagagacaaccctctggggatgaaaggggaaattgcagaagcctatgctgaactcattaagcagatgtggtctggaagggacgcccatgtggcacctcgcatgttcaaaactcaagtaggacgttttgctcctcaattttctggctaccagcaacaagattctcaggagctgctggcctttcttctagatggattgcatgaagatctgaaccgggtaaagaaaaagccctacttggagctgaaggatgccaatgggcggccagatgcggtggtggcaaaggaagcctgggagaatcacaggttgaggaatgattctgtgattgtggatactttccatggcctcttcaaatctactttggtttgcccagaatgtgctaaggtttctgtgacctttgacccattttgctatctaacgctgccactgcccttgaagaaagatcgagttatggaggttttcctggttcctgctgaccctcactgcagacctactcagtaccgtgtgactgtgccgctgatgggggctgtgtccgacctgtgcgaggctctctccaggctgtctggcattgctgcagaaaatatggtggtcgcagatgtgtataatcaccgattccacaaaattttccaaatggatgaaggtttaaaccacatcatgcctcgggatgacattttcgtgtacgaggtctgcagcacttccgtggatggctcggaatgtgtcacgcttccagtctacttcagggagaggaagtccaggccatcaagcacttcctccgcatcagcgctatatgggcagccactattgctttctgtccccaagcacaagttaacccttgagtctttgtaccaggctgtttgtgatcgtatcagccgctatgtgaaacagcctttacctgatgagtttggcagctcacccttggagccaggggcctgcaatggctccaggaacagctgtgaaggagaagatgaggaagaaatggagcatcaggaagaaggcaaagagcagctttcagaaacagaaggcagtggggaagatgagccaggaaatgaccccagtgagaccacccaaaagaagatcaaaggccagccctgcccaaaaaggctttttaccttcagtcttgtgaactcctatggaacagctgacataaattcacttgcagctgatggaaaactacttaaactcaactctcgatctacactggccatggattgggacagtgaaactcggagactttactatgatgagcaagaatctgaggcctacgagaagcatgtgagcatgttgcagcctcagaagaagaagaagaccacagtggccctgagagactgcatcgagctcttcaccaccatggagacccttggggagcatgacccctggtactgtcccaactgtaagaagcatcaacaggccacaaaaaagtttgacctatggtccttgcccaagatcctggtggtccacctcaaacgtttctcctacaacagatactggagggataagctcgacacagtcgtagaattcccaatcagagggctgaacatgtccgagtttgtctgtaacctgtcagcaaggccttatgtgtacgacctcattgccgtgtccaatcattatggagccatgggggttggccactacactgcatatgcgaagaacaaactgaatggtaaatggtattactttgatgatagcaacgtgtccctggcctctgaggatcagatagtgactaaagcagcttatgtgctattttaccaacgtcgagatgatgaattttataagacaccttcacttagcagttctggttcctctgatggagggacacgaccaagcagctctcagcagggctttggggatgatgaggcttgcagcatggacaccaactaatgctgactccacgatcctgccaccctgtagcgccagtgtaatcccccaggagaacatctttgacactctgcagactgctagtgttctgtctaaaaaccagacaaggaaatacccttcttttatgagcagaaggaaacaaaaaaaaaaaagaagaccgtttacctagaagaagctatgtcaagaggctgaattatttttatttttaaacaggtggtgagaaatttctgtgaaacctgtgaagctgaaaagggggtgggatgggggtactcaatggagtatgtctgatggatcccgaagaatggagaggaacacaggcgctgagtatggagcagcctggagacccaccccacctgcagggctgccctgagcgcctggatttctggttctgatgccaatactagtcaccccaagtagtctgctcacagtaacccaaacctcaagtaaactcccctttccctcgctatgtgcactgatatgggtttataattttctgaaagttacccactgaagcccatttctccgttgagtcatcttgtaatttccagctttctccccgctaaggaagatatctagtgttggggatcctggcccctcaacctcctgtggaacccagcagttctgttatatcccctgctaccctagatgaattaagacggttaaatactgtgtggaacttttattagataacacactttttattagataacgcttaaaggaagtcagtacataaaaaaaaaaaaaaaaaa

SEQ ID NO: 29382 - DNA, 1723 bp, Homo Sapiens
tcgcggaggcttggggcagccgggtagctcggaggtcgtggcgctgggggctagcaccagcgctctgtcgggaggcgcagcggttaggtggaccggtcagcggactcaccggccagggcgctcggtgctggaatttgatattcattgatccgggttttatccctcttcttttttcttaaacatttttttttaaaactgtattgtttctcgttttaatttatttttgcttgccattccccacttgaatcgggccgacggcttggggagattgctctacttccccaaatcactgtggattttggaaaccagcagaaagaggaaagaggtagcaagagctccagagagaagtcgaggaagagagagacggggtcagagagagcgcgcgggcgtgcgagcagcgaaagcgacaggggcaaagtgagtgacctgcttttgggggtgaccgccggagcgcggcgtgagccctcccccttgggatcccgcagctgaccagtcgcgctgacggacagacagacagacaccgcccccagccccagctaccacctcctccccggccggcggcggacagtggacgcggcggcgagccgcgggcaggggccggagcccgcgcccggaggcggggtggagggggtcggggctcgcggcgtcgcactgaaacttttcgtccaacttctgggctgttctcgcttcggaggagccgtggtccgcgcgggggaagccgagccgagcggagccgcgagaagtgctagctcgggccgggaggagccgcagccggaggagggggaggaggaagaagagaaggaagaggagagggggccgcagtggcgactcggcgctcggaagccgggctcatggacgggtgaggcggcggtgtgcgcagacagtgctccagccgcgcgcgctccccaggccctggcccgggcctcgggccggggaggaagagtagctcgccgaggcgccgaggagagcgggccgccccacagcccgagccggagagggagcgcgagccgcgccggccccggtcgggcctccgaaaccatgaactttctgctgtcttgggtgcattggagccttgccttgctgctctacctccaccatgccaagtggtcccaggctgcacccatggcagaaggaggagggcagaatcatcacgaagtggtgaagttcatggatgtctatcagcgcagctactgccatccaatcgagaccctggtggacatcttccaggagtaccctgatgagatcgagtacatcttcaagccatcctgtgtgcccctgatgcgatgcgggggctgctgcaatgacgagggcctggagtgtgtgcccactgaggagtccaacatcaccatgcagattatgcggatcaaacctcaccaaggccagcacataggagagatgagcttcctacagcacaacaaatgtgaatgcagaccaaagaaagatagagcaagacaagaaaaaaaatcagttcgaggaaagggaaaggggcaaaaacgaaagcgcaagaaatcccggtataagtcctggagcgttccctgtgggccttgctcagagcggagaaagcatttgtttgtacaagatccgcagacgtgtaaatgttcctgcaaaaacacagactcgcgttgcaaggcgaggcagcttgagttaaacgaacgtacttgcagatgtgacaagccgaggcggtgagccgggcaggaggaaggagcctccctcagggtttcgg

SEQ ID NO: 29383 - DNA, 1172 bp, Homo Sapiens
gcgatgcgggcgcccccggcgggcggccccggcgggcaccatgagccctctgctccgccgcctgctgctcgccgcactcctgcagctggcccccgcccaggcccctgtctcccagcctgatgcccctggccaccagaggaaagtggtgtcatggatagatgtgtatactcgcgctacctgccagccccgggaggtggtggtgcccttgactgtggagctcatgggcaccgtggccaaacagctggtgcccagctgcgtgactgtgcagcgctgtggtggctgctgccctgacgatggcctggagtgtgtgcccactgggcagcaccaagtccggatgcagatcctcatgatccggtacccgagcagtcagctgggggagatgtccctggaagaacacagccagtgtgaatgcagacctaaaaaaaaggacagtgctgtgaagccagacagggctgccactccccaccaccgtccccagccccgttctgttccgggctgggactctgcccccggagcaccctccccagctgacatcacccatcccactccagccccaggcccctctgcccacgctgcacccagcaccaccagcgccctgacccccggacctgccgctgccgctgccgacgccgcagcttcctccgttgccaagggcggggcttagagctcaacccagacacctgcaggtgccggaagctgcgaaggtgacacatggcttttcagactcagcagggtgacttgcctcagaggctatatcccagtgggggaacaaagaggagcctggtaaaaaacagccaagcccccaagacctcagcccaggcagaagctgctctaggacctgggcctctcagagggctcttctgccatcccttgtctccctgaggccatcatcaaacaggacagagttggaagaggagactgggaggcagcaagaggggtcacataccagctcaggggagaatggagtactgtctcagtttctaaccactctgtgcaagtaagcatcttacaactggctcttcctcccctcactaagaagacccaaacctctgcataatgggatttgggctttggtacaagaactgtgacccccaaccctgataaaagagatggaaggaaaaaaaaaaaaaaaaaaaaaaaaaaaaaaaaaaaaaaaaaaaaaaaaaaaaaaa

SEQ ID NO: 29384 - DNA, 1662 bp, Homo Sapiens; identical to SEQ ID NO: 22248

SEQ ID NO: 29385 - DNA, 4605 bp, Homo Sapiens
tagaagacagcaggggaactcgagaagttggttgttttcagcagattaaaacaatacagatttatcagcaagactgttgaacgcataactgcccaagatgcctgtccctccccctccagcacccccgccgcccccgacgtttgcactggccaatacagagaagcctaccttgaataagacagagcaggctgggagaaatgctctcctttctgatatcagcaaagggaagaaactaaagaagacggtcaccaatgacagaagtgcaccaatactggacaaacctaaaggagctggtgctggaggcggtggtggtggctttggtggaggcggcggatttggcggaggaggtggtggcggaggcggtggaagttttggagggggcggacctccaggtctgggaggattgttccaggctggaatgccgaagctgagatccacggccaacagggataatgattctggaggaagccgaccaccattgttgccaccgggaggaagatccacatctgcgaaacccttttcacccccaagtggcccagggaggtttcctgtgccttctccaggccacagaagtggtcccccagagcctcagaggaaccgaatgccgcccccaaggcccgacgtgggctcaaagcctgatagcattcctcctccagtacctagtactccaagacccattcaatcaagtccgcacaaccgggggtccccaccagtgcccggaggccccaggcagcccagccccgggcccactcctccccctttccctggaaaccgcggcactgctttgggaggaggctcaatacgtcagtcccccttgagctcctcctcgcccttctccaaccggcctcccctgccgcctacccccagcagggccttggatgacaaaccccctccaccacctcctccagtgggcaacaggccctccatccacagggaagcggttccccctcctcctcctcagaacaacaagcctccagtgccttccactccgcggccttcggcctcctcacaggccccacctccgccgccacctcccagcaggcccgggccgcctcctctgcctccaagttccagcggcaatgacgaaaccccaagactcccacagcggaatctgtccctcagttcgtccacgcccccgttaccttcgccaggacgttcaggtcctcttcctcccccgcccagtgagagacccccacctccagtgagggacccgccaggccgatcaggccccctcccaccacctcctccagtaagcagaaacggcagcacatctcgggccctgcctgctacccctcagttgccatccaggagtggagtagacagtcccaggagtggacccaggcctccccttcctcctgataggcccagtgctggggcacctcccccacctccaccatcaacatctattagaaatggcttccaagactctccatgtgaagatgagtgggaaagcagattctacttccatccgatttccgatttgccacctccagagccatatgtacaaacgaccaaaagttatcccagcaaactggcaagaaacgaaagccggagtggatccaaccgaagagaaaggggtgctccaccactccctcccatcccgaggtgatctttgcctgctcttctctacccaagctcaagagctgcttctgttgctatctaagaactgcataccctcctccctgcttcttcccttgtgcctcatgtatgggcaggaggaaaggtgggagggggagtgggaatatgcgtgtgtgggtgggaatcggtaagaaatgcacctagcttttcatattgtgtttattctccaggctattgcttgcttcagctgcagcctgcctgtgctggctgctggggtcgataggcttttgtcgtaataggcagagatgacttgcatcccagctttccaccaaccaaattcaaacattcactgcttatttgttacagactgtaattattaaagtccctgagagctgttttctcccgttcctttttcgcatgcttggcctcctctctgtttctatgaaccacagaccacctaagcaagctgctgagtaagggctcactggaaacttgcagtcacaggatgtccaatctttggcagtccgagcttggctctaggacagagctgtccaatagaaatataatgtgagccccatatacaatttttacatttctaatatattttaaacaagtgaagttaatatgcatccaaaatatttcaacctgtaatcaacataaaattttaatgagatattttatattattttttggtactgaatcttcaaaatccagagtgtattttacacttaccgcacatctccattcagactagtcacatttttaagtgctcagtagccacatgtggctggtggctactggattagacagcacgagtctggaagatggaagctagtgcagaaacctcttgtttaaaaaacaaaaaaggcaagatgggcttgagcgattcaagaggcaactaaaaataaaattaggacccagcaccttgtttgacacacagtttgaccttcgattttcctcccttaacttccctcttcccttaatatctgtatacaagtgttgcttcaaagtaccaaggtcagaaattgattcagtacggtttactaaagtcatgtggaataaagccattggaaacaaatggaaagcctgtcgggacttctgggctcagaaccagctggctcacgcactccacttgtcagctggacttctgccttgtgaaatggaagcagcctttgttcctttctggctgagcaagctcctgaggctgggagagactaggaaggcttggtaggaggggaaaaaagtcaggaaaagatatcaaatcagaaacatggaagaagaagggaaccgatttgagttggtgggcaaaactctaaaaatctaaatctgatgcttatgtaagggttgagcgaattagggagattgctagtggaaattggagggaatttgttttgcatcatttgtctaggatctatgcaaatatagctccactaaaggaccatagggaagagccagccttgccttttcttatatgattttgtttacaaaattttactgggacttttaaatctagctatagagttgggaaaaaatatttccacttagatattttacatggttttgtttaaaattaccattacttgttttttaaaaacacatgaccacatatgtatatgtatatctacctaaacattgtatcatggtttcagtatgttattcatgtattactgggagatgctaccaagaaaccaacccaaagaaaattctgaaaaatacatttctatttatagaataaatgtttcatttatataaaagcaaaagaacttagagttctaataaatgggatgtctaataaattatgaagttactgatttgaatatattatatttttataacttccttgccaaagtcctgatttagtacattagagaacctgtgtttcctctctcctctaccattcatctctcttccatacagtcatttgggctttttactcaaagagaatcaagaaataataaggtataacaagcttggcaaagtgttggctttttaaaaaaaaatttttttaatctctagcagtttggtaatttagcagcatcatttatttgggattcttttatctgatttcaacagtgaaaaacatccctatgataaagcctaatgacccatttcacaaaagatggaatttgcccttcctagaaaatatgacggagaaaagtctgactcagagaaagtgagtctgaattttataaggggtagtaagaattggacaattcctttgcatatctgaacttggcaggtaccgttctaaatctgaaacagggtgatagctcaaagttgccattcatccagaatagattgttttagaatgtagtgtttaagtgactgtttcattaatacacctacaccctttctttgaaagtttgcaacctaattgcatctaaaactatgaataagttctgtggtaaaatcttaaactatggaaaattacaaaaatgaatttttcttccctgaaatcagagcttacatgtgtgtttttttataacattttcagataaatgtattcaacatgtaatacagtattttaacattcacctcttattttatattgaaatgtattacagtattaaaactcagtgttcagtatttatttcactatgcattttatttagtaaaagccaggagaaatgtttaatccaatggtgccttactttgtgatttaaaagaaatcaacttttttttatgtctaagtagtagattatttgcatatttgtaaaaactgttaggtctttatattttaaagtgtaataccagttttgttattttagtagcagaaatgggatgattgttaaagttccccaaaaatgttggcatgaaattaatttttccctccttatagtcaaggaccgtagaggaagaaaaacttttttttcataccatgcactatgtaaacagacacattttgctatctgtgtcatcaggatagtgtaagtggtagggtagagactaccctagacatctgcatctttgtaagttagccagacaataaagaaaagcagaatgaaaaaaaaaaaaaaaaaaaaaaaa

SEQ ID NO: 29386 - DNA, 3000 bp, Homo Sapiens
gtccgtccggttcttgctatattgccccaggctggtctcgaactcctgggctcaagccgttctcccgcctcccactgcccgcctgtcactgccgtctgttccctgagctgtgctttacgctgggaaagacatagaagaactattaagaagatagaattgttttgctgcgcagtacagcaacagtggatgttcaagattaagattagagtcaagttgtgtgattaagacaggagctgtgactgatgagaattaaaggccatggatgaagatgggcttgaattacaacaagagccaaactcattttttgatgcaacaggagctgatggtacacacatggatggtgatcaaattgttgtggaagtacaagaaactgtttttgtttcagatgttgtggattcagacataactgtgcataactttgttcctgatgacccagattcagttgtaatccaagatgttattgaggacgttgttatagaagatgttcagtgcccagatatcatggaagaagcagatgtgtctgaaacggtcatcattcctgagcaagtgctggactcagatgtaactgaagaagtttctttagcacattgcacagtcccagatgatgttttagcttctgacattacttcagcctcaatgtctatgccagaacacgtcttgacgggtgattctatacatgtgtctgacgttggacatgttggacatgttggacatgttgaacatgtggttcatgatagtgtagtggaagcagaaattgtcactgatcctctgactaccgacgtagtttcagaagaagtattggtagcagactgtgcctctgaagcagtcatagatgccaatgggatccctgtggaccagcaggatgatgacaaaggcaactgtgaggactaccttatgatttccttggatgatgctggcaaaatagaacacgatggttcttctggaatgaccatggacacagagtcggaaattgatccttgtaaagtggatggcacttgccctgaggtcatcaaggtgtacatttttaaagctgaccctggagaagatgacttaggtggaactgtagacattgtggagagtgagcctgagaatgatcatggagttgaactgcttgatcagaacagcagtattcgtgttcccagggaaaagatggtttatatgactgtcaatgactctcagccagaagatgaagatttaaatgttgctgaaatcgctgacgaagtttatatggaagtgatcgtaggagaggaggatgctgcagcagcacgggcagccgccgccgtgcacgagcagcaaatggatgacaatgaaatcaaaaccttcatgccgattgcatgggcagcagcttatggtaataattctgatggaattgaaaaccggaatggcactgcaagtgccctcttgcacatagatgagtctgctggcctcggcagactggctaaacaaaaaccaaagaaaaggagaagacctgattccaggcagtaccaaacagcaataattattggccctgatggacatcctttgactgtctatccttgcatgatttgtgggaagaagtttaagtcgagaggttttttgaaaaggcacatgaaaaaccatcccgaacaccttgccaagaagaaataccgctgtactgactgtgattacactaccaacaagaagataagtttacacaaccacctggagagccacaagctgaccagcaaggcagagaaggccattgaatgcgatgagtgtgggaagcatttctctcatgcaggggctttgtttactcacaaaatggtgcataaggaaaaaggagccaacaaaatgcacaagtgtaaattctgtgaatacgagacagctgaacaagggttattgaatcgccacctcttggcagtccacagcaagaactttcctcatatttgtgtggagtgtggtaagggttttcgtcacccgtcagagctcaaaaagcacatgagaatccatactggggagaagccgtaccaatgccagtactgcgaatataggtctgcagactcttctaacttgaaaacgcatgtcaaaactaagcatagtaaagagatgccattcaagtgtgacatttgtcttctgactttctcggataccaaagaggtgcagcaacatgctcttatccaccaagaaagcaaaacacaccagtgtttgcattgcgaccacaagagttcgaactcaagtgatttgaaacgacacataatttcagttcacacgaaagactacccccataagtgtgacatgtgtgataaaggctttcacaggccttcagaactcaagaaacacgtggctgcccacaagggcaaaaaaatgcaccagtgtagacattgtgactttaagattgcagatccatttgttctaagtcgccatattctctcagttcacacaaaggatcttccatttaggtgcaagagatgtagaaagggatttaggcaacagagtgagcttaaaaagcatatgaagacacacagtggcaggaaagtgtatcagtgtgagtactgtgagtatagcactacagatgcctcaggctttaaacggcacgttatttccattcacacgaaagactatcctcaccggtgtgagtactgcaagaaaggcttccgaagaccttcagaaaagaaccagcacataatgcgacatcataaagaagttggcctgccctaacaatacttctacagaacgtttgtagagatattggccttgaagcagaaaattcattttaaagccaatcagtctcattcacatacaatactgtatattgatttatgctgtgtacaaatagaattattacttctagttgacttttttttaaatatacattttgctcagtagtgtgttctgaattctattcagtttgtttaataaatagggaaaactggcaacatgctagttacttttaataaagtaatccctgattctataccgaagttttatatcttagaattttatatttatttaaatatttaccttgcttaccttgatggtact

SEQ ID NO: 29387 - DNA, 3205 bp, Homo Sapiens
agcgggagtctttcgttctgggaggcccaggcggcttcgcgttctgagaataaacagaacctctgttgctctgcgacttgcaggcactgggagattcgtagctaagacgccagggcatcccggaagctgggaaatgggactgttgacattcagggatgtggccgtagaattctctttggaggagtgggaacacctggaaccagctcagaagaatttgtatcagaatgtgatgttagaaaactacagaaacctggtctctctgggtcttgttgtctctaagccggacctgatcacctttttggaacaaaggaaagagccttggaatgtgaagagtgaggagacagtagccatccagccagatgtgttttcgcattataacaaggacctgttgacagagcactgcacagaagcttcattccaaaaagtgatatcgaggagacatgggagctgtgatcttgagaatttacatttaagaaaaaggtggaaaagggaggagtgtgaagggcacaatggatgttatgatgaaaagacttttaaatatgatcaatttgatgaatcctctgttgaaagtttgtttcaccagcaaatactttcttcttgtgccaaaagctataactttgatcaatataggaaggtctttactcattcatcattgcttaatcaacaagaggaaatagatatttggggaaaacatcacatatatgataaaacttcagtgttatttaggcaggtctctactctaaatagttaccgaaatgtttttattggagagaaaaattatcattgcaataattctgaaaaaaccttgaaccaaagctcaagccctaaaaatcatcaggaaaattattttctagaaaaacaatacaaatgtaaagaatttgaggaagtctttcttcagagtatgcatgggcaagagaaacaagaacagtcttacaaatgtaataaatgtgtagaagtttgtacccagtcattaaaacatattcaacatcagaccatccatatcagagaaaactcatatagctataacaaatatgataaagatcttagtcagtcatcaaatcttagaaagcagataatccataatgaagagaaaccatacaaatgtgaaaaatgtggggatagcttaaaccatagtttgcaccttactcaacatcagatcattcctaccgaagagaaaccctataaatggaaagaatgtggcaaggtctttaaccttaactgtagtttataccttactaaacagcagcaaattgatactggagaaaacctttacaaatgtaaagcatgtagcaaatcttttactcgttcctccaatcttattgtgcatcagagaattcacactggagagaaaccatacaaatgtaaagaatgtggcaaagcctttcgctgtagttcataccttactaaacataagcgaattcatactggagagaaaccttataaatgtaaagaatgtggaaaagcttttaaccgtagttcatgccttactcaacatcagacaactcatacaggagaaaaactttacaaatgtaaagtatgtagcaaatcttatgctcgttcttcaaatcttattatgcatcagagagttcatactggagagaagccttataaatgtaaagaatgtggcaaagtctttagccgtagttcttgccttactcaacatcggaaaattcatactggagaaaatctttacaaatgcaaagtatgtgctaaaccttttacttgtttctcaaatcttattgtgcatgagagaattcatactggagagaaaccctataaatgtaaagaatgtggcaaagcctttccttatagttcacaccttattcgacatcatcgaattcatactggagaaaaaccatacaaatgtaaagcatgtagcaaatcttttagtgactcctcaggtcttactgtgcatcggcgaactcatactggagagaaaccctatacatgtaaagaatgtggcaaagcctttagttatagttcagatgttattcagcatcggagaattcatactggccagagaccctacaaatgtgaagaatgtggcaaagccttcaactataggtcatacctcactacacatcagagaagtcatactggagagagaccctacaaatgtgaagaatgtggcaaagccttcaactctaggtcatacctcactacacatcggagaagacatactggagagagaccctacaaatgtgatgaatgtggtaaagccttcagctataggtcatacctcactacacatcggagaagtcatagtggagagagaccctacaaatgtgaagaatgtggcaaagcctttaactctaggtcatacctcattgcacatcagagaagtcatactagagaaaaactttaaaaatgtaaaacatggagcagattttttacttgttacccatgtcttattgtgcatcagataatttatatgggagtgaaaccctacaaatgttaagaatgtggcataacctttaactattttcaagccttacacaatagcagagaatataaactgaaaaaatccatacaaatattaaaaatgtggcaaattattttaaactgtgctcaacccttactcaagataatccatactagagaaacactatagatgtaaaaatgtgaaaagttttattcaaaatatcaaacttatgagtcacctaggggttcatagaaaaaggaagtttgcagatgcaataaatgtgaggaagtatttaataaaaaatgaagtctaaatgtgtcagagaatttatgtgagaaaggactaaagcacagacactttcagcctttatactaaataagagtattttttgtacagaataatctaaaggcaaaataattagataatttatttgcttatatgttttaaagtagcaagaacattgatgttttgacaggtatatttcatagatacttcatttgtatttacagtatttgaggtttttggaaagcaaatattatttatataattcagctttcaaatctgttgctgcttttccttaatccgtggtgttcatgtgaaaatatgtgttctgtttttttttctgcatcagaacaatgtgaggtcattctacgttaatatcattaatatcagcatttttcatggaagtttaatgccaaatgtaaaacacatgaaaatttttaaaaatatgctctttgtgtttgaataaagtagtaatgcacgtaaacaaaaaaaaaaaaaaaa

SEQ ID NO: 29388 - DNA, 3178 bp, Homo Sapiens
ccacgcgtccgggctctctgctgaagggtcaagtggaatctggaatccagcccatgtttccccatcatcaagccatgtgaagctgcagactccaagcaacagagagacaagatttagaatactggctctggtatgaaagctggattcaggtactgttcctgcctcttgacctcaccaagcctcagcttcctcgcctgttaaatggatacaattgtcgtcattatcatctgttgagaactccctaaaatgccagctgagcataggcacagaagtttaggtgtttggaccaaggtcacacaactgatacaacagtagcttcttcacagacttggcacttctccagaaggaggaggacaaaatgacgaagtctaaggaggcagtgacattcaaggacgtggctgtggtcttctctgaggaggagctgcaactgctggaccttgcccagaggaagctgtaccgagatgtgatgctggagaacttcaggaatgtggtctcagtggggcatcagtccacaccagatggcctaccacagttagagagagaagaaaagctgtggatgatgaagatggcaacccagagagataactcctcaggagccaagaatctaaaagagatggagactcttcaagaagtaggattaaggtacctgcctcatgaagagcttttctgctcccagatctggcaacagattacaagagagttaatcaagtatcaagattctgtggtaaatattcaaagaacaggctgccagttggaaaaacgagatgatttgcactataaagatgagggattcagtaatcagagttcccatcttcaagttcacagagtccacactggtgaaaaaccctacaaaggagaacattgtgtgaaaagtttcagctggagctctcatcttcaaattaaccaaagggctcacgcaggagagaagccctacaaatgtgaaaaatgtgataatgccttccgtcggttttcaagtcttcaagcccatcagagagtccacagtagagcaaaatcatacacaaatgatgcaagttacaggagttttagtcagaggtcacatcttccccatcatcagagagttcccactggagagaatccatacaaatatgaagagtgtgggaggaatgttgggaaaagctcacattgtcaagctcctctgatagttcatacgggagagaaaccctataaatgtgaggagtgtggggtgggcttcagtcagagatcatatcttcaagttcatctgaaagttcacactggaaagaaaccatataagtgtgaagagtgtgggaagagcttcagttggcgttcacgactgcaggctcatgagcgaatccacactggcgagaaaccatacaaatgcaatgcatgtggcaagagctttagttacagctcacaccttaatattcattgtagaatccacacaggagagaaaccctataagtgtgaggagtgtgggaaaggtttcagtgtgggttcacaccttcaggcccatcagataagccacactggagagaagccatacaaatgtgaggagtgtgggaaaggcttctgccgggcctcaaatctgctggaccatcaaagaggccatactggagagaaaccgtatcagtgtgatgcatgtggtaagggcttcagtcgtagctcagattttaacattcattttagagtccatacaggggaaaaaccctataaatgtgaggagtgtggcaagggcttcagccaggcctcaaatcttctggcccatcaaagaggccacactggagagaaaccctacaaatgtggtacatgtgggaagggcttcagtcggagctcagatcttaatgtacactgtagaatccacacaggagagaaaccctataaatgcgagaggtgtggtaaggccttcagtcagttctccagccttcaggtgcatcagagagttcacactggagagaaaccatatcagtgtgcagagtgtgggaagggcttcagtgtaggttcacagcttcaagcccatcagaggtgccacactggagagaaaccctatcaatgtgaggagtgtgggaagggcttctgtcgggcctccaattttctggcacatcgtggagtccacacaggagaaaaaccataccgatgtgatgtgtgtggtaagcgcttcagacagagatcctaccttcaagcccaccagagggtccacacaggagagagaccatacaaatgtgaggaatgtgggaaagtcttcagctggagctcataccttcaagcccatcaaagagttcacaccggagaaaaaccatacaaatgtgaggagtgtgggaagggcttcagttggagctcaagtcttatcattcatcagcgagtccatgctgatgatgagggtgacaaggactttccttcatcagaggattcacacaggaaaactcgataaaatatgttttactatctcagatgggtgctgaaatattttaataatcagagctatcatagacaaaacatttgttttatagagtcagtagttcagccaagtgattgggagaccacacagcagagaagcctcacaagagtggagacatatggactgcattcagaacattgaccattagctgatacatgcagacaagaggatcaggaaggatgagtctgatctggagtaaatcagaagtactaagatagaaatgctgaattctgttccactagaatataagatccaagagggcagggactttgttgactgccaaatctactctgccttttcagtgcctaatacgttgtaatttttcagtagtatttgaaattactgtcatatttgaaattcagtaatatttgacatttttatttatctctagaagtttctctaaaattgtactcagaagaattctgcaaggcttggaggatatataagttagtcatatggcctgattttcccatttttgcagatctcgtggacaagtgtttatcaaactgaaggttgcagcttgttagtgggttcagaaatcagtttctggctagcaactagaagttttgtatgttaacagtactttattgaggtgtaatctgcatgcagtaacatgcacaagtctcaagttcatggctttctgaattttgacaaatgtaatcatcaccaagatcaatgtatacaatatgtctattaaaccaaaaagttttcttgtgcccatttccagtcaaaaaaaaaaaaaaa

SEQ ID NO: 29389 - DNA, 2682 bp, Homo Sapiens
gccgaggattcggggtagtgtagtcctggcgccccgctggaggagctccccagctggtggctggagcgaccccttgttctttggtggcgctgatctaccttctgagatatcatccttcttcagggagataaggaaaaaaagccacagggtcccggagagccaggggaatgcttcaaaagttctgctgcctgagagtaacgtcacagtaatggaacgggaagattctggaatctgtgtccccacctagacaacgattatactggcaggatctatcaggtgtacctattttggaactctggagtctagttgaaggcctccagttcccagggggaaggaagcatggaggtgtgtcctccatttggaagtagtgctaagaaaattaaaagaataaaactgggcaggggcatgagaataggatgcaaagatgaatttttggactgagtggccaagaagctccatggtgagcactcacagtctaaggctggaagtttaatgaactgttttctacatttcacaggcacacatggcattcagggatgtggctgtggatttcacccaggatgagtggaggctgctgagccctgctcaaaggactctgtacagagaggtgatgctggagaactacagcaacctggtctcactgggaatttcattttctaaaccagaactcatcacccagctggagcaagggaaagagacctggagagaggaaaaaaaatgttcaccggcaacctgtccagatccagagccagagctctacctcgatcctttctgccctccgggtttctccagtcagaaattccccatgcagcatgtgctgtgtaatcatcccccctggatcttcacatgcttgtgtgcagaaggtaacatccagcctggggatccgggcccaggggaccaggagaagcagcaacaagcctctgaggggagaccctggagtgatcaagcagaaggtcctgagggagaaggtgccatgcctttgtttggaagaaccaagaaaaggactctgggagcgttctccaggccaccccagaggcagccagtcagctctcggaacggcctcagaggggtggagttagaagccagcccagctcagacagggaaccctgaggaaacagacaaattgttgaagaggatagaagtcttaggatttggaacagtcaactgtggagagtgtggactgagcttcagcaagatgacaaacctgctcagtcaccagcggatacactcaggggagaagccctacgtgtgtggggtatgtgagaagggcttcagcctaaagaagagcctcgccagacaccagaaggcacactcgggggagaagccaattgtgtgcagggagtgtggacgaggctttaaccggaagtcaacgctaatcatacacgaacggacacactccggtgagaaaccttacatgtgcagtgagtgtgggcgaggcttcagccagaagtcaaacctcatcatacaccagaggacacactcaggggaaaagccttacgtgtgccgggaatgtggcaaaggcttcagccagaagtcagctgtcgtgagacaccagaggacacacttggaggagaagaccatcgtgtgcagtgactgtggcctgggcttcagcgacaggtcaaacctcatctcccaccagaggacgcactctggggagaagccctacgcctgcaaggagtgtgggcgatgcttcaggcagaggaccacccttgtcaaccaccagaggacacactcaaaggagaagccctatgtgtgcggggtgtgtgggcacagcttcagccagaattcaaccctcatctctcacaggcggacacacactggggagaagccgtatgtttgtggggtgtgtgggcgaggctttagtctcaagtcacacctcaacagacaccagaacatacactcaggagagaagcccattgtgtgcaaggactgtggccggggcttcagccagcaatccaacctcatcagacaccagaggacgcactcaggcgagaagcccatggtgtgtggggagtgcgggcgaggcttcagccagaagtcaaaccttgttgcacaccagaggacgcactcaggggagaggccgtatgtgtgccgagagtgcgggcgaggctttagccaccaggccggtctcatcaggcacaagcggaagcactcgagggagaagccctacatgtgcaggcagtgtggactgggctttggcaataagtcagctctaattacacacaagcgggctcactcggaagagaagccttgtgtgtgcagagagtgtggccaaggctttctccaaaagtcacacctcaccttacatcaaatgacacatacgggggagaagccatatgtgtgcaagacgtgtgggcggggcttcagcctcaagtctcacctcagcagacacaggaagaccacgtctgtccaccacagactgccagtgcagcccgaccctgagccgtgtgcagggcaaccttcggattccttatactctctctgaaggcaaagatggggacaaggactaagagtcagaatgttgacactttgatgaaatggagtagagaaatgcattctgtaagtggtcaaaggacatttgactgtttactttctccacactaagtcttctccatgttttgtggccttcggttgtaataaacttggcttctttatacatctgtaaaaaaaaaaaaaaaaaaa

SEQ ID NO: 29390 - DNA, 2553 bp, Homo Sapiens
ctaaaggccttgcacaacatcagagagttcatactggagagaaccttacacatttcacgagtatggaaagacctttgctcaaaattcagcccttgtaatgcataaggcaattcatactggaaagaaaccttacacatgtaatgaatgtggcaaggtttttagtagaaaagcacaccttgcatgtcatcatagacttcatactgtctaaggtttctaatcaacaatcaaaccttgcacaacatcagagagtttatactggagagaaaccttacaagtgtaatgagtggggcaaagccttaagtgggaagtcgtcacttttttatcatcaagcaatccatggtgtagggaaactttgcaaatgtaatgattgtcacaaagtcttcagtaatgctacaaccattgcaaatcactggagaatccataatgaagacagatcttacaagtgtaataaatgtggtaaaattttcagacatcgatcatatcttgcagtttatcagcgaactcatactggagagaaaccttacaaatatcatgactgtggcaaggtcttcagtcaagcttcatcctatgcaaaacataggagaattcatacaggagagaaacctcacaagtgtgatgattgtggcaaagtcttgacttcacgttcacacctcattagacatcagagaatccatactggacagaaatcttacaaatgtcttaagtgtggcaaggtcttcagtctgtgggcactccatgcagaacatcagaaaattcatttttgagataactgttccaaatacagtgactatagaagatcataaagctttaattgacattagagccaaataggcattgacttgagattgagttgacttaaccttgagtttaagaattaatttacattaaagtgtttatgttaagaagattgggccaggtgggattacaggcgcgagcaccgcgcccggcccctaagttaatatttcaaacaatcgaaggtaaaacaacatattgtgttgggccacctgtactgaacgctgaatcgtttttcctcttaagttgaaaatggttttaatgcaaagcgcctttttttgagcaggtagagtcacgcatccggcaggcggggcgagctcccctctgtctggggcagggtgggggagaggggcagggacctcggtaaaggggtggagtggcgcgctggttgccgcgggcactggcaattagaagggattattaaactaagcaaggtcctgggttgtttgagtggataatggaaactgaaaggtgacgtgcaaaactgcctattactcccaggagtggaggataatttcatatttcatggaaataaactcagggcccggagcggtggctcacacctgtaatcccagcactttgagaggccaaggagggaggatcgcttaagcccaggaattcgaaatcagcctaggcaacatagtaagacctcatctctactaaaaataaaaaaaaacagccaggtgtgttagtccacacctgtggtcccagctgcctcagcttcccgagtagctgggattacaggtatgaaccactatgcccggctaactttgttttttttttttagaaattaaaccttttttcagcttaatgacccaggggtgtatttttgaaggacttgggagctctctttgaaaggcaaacaacaagggaaacagtacctttatctcagtaggaaattaaataattcaaacatcaaataacttcaatttaaggctatggactttgagataattctgagccttgagaggaatgtggtcaggcaacctgagtccagtggaatgcaggtgcaacttctaagagttttcctgtaagtaattaagaagactaagtagccccagagataagacctcctcggatcattgtcccttcttatgtagtgataaagtaaccttccttgaagtgtatctatccgtaatcaatcaagttgctgcagcctatgcactggcccagaataaaaaacgtggtgattctgctaaagcttctctgtctttccctgtgtgtgaaatcttaacgtctctacttgggaacgctgatcccattcatttagagttgatgtttccacgtggctatttccaagctttgccttcaaataaattctgtacttaatcatatattctaaattttattatttactgctgacatcagtttctgtcggattgtaggagcctcaccagagagggcccctgtcgccatgttgtaaaactcacacttgccaaaagttgtgggttagggtttctccccctccctcaggatgacgctagttagctgacacagatggtcacctccattaccaagtagagtcaggatgaactatgtgtgactgttcaactatgtgtcctcttccctgaggactgattagtgtttatcttgaaaacatgtccttaatgggttgtatagaacactgaagcatctgatttcaaactcttagctcttttcctctatttcccatcacattctggtctaaggcttatttattaataaaatgatttttatttctttaaacaaaaaaaactttagagcacactggggtaccggatc

SEQ ID NO: 29391 - DNA, 2673 bp, Homo Sapiens
ctccgagcaggacactgctacttaacaaggtggtttgagccaagtatgtgtcttgcgggtctttgcgaaagtgaaccagttattaggggcgcctaacgacctggggggtcaactaaggggactgtggcacgtttcaggcaggattcctccttcattcaaactgcatcacccaggagtctgcaaattccccaaagtaggaggaaaaatgaccacattcaaggaggcagtgaccttcaaggatgtggctgtggtcttcactgaggaggagctggggctgctggaccctgcccagaggaagctgtaccgagatgtgatgctggagaacttcaggaacctgctctcagtggggcatcaaccgttccaccaagatacttgccacttcctaagggaagaaaagttttggatgatggggacagcaacccaaagagaagggaattcaggaggcaagatccaaactgagttggagtctgttccagaagcaggagcacatgaagagtggtcctgccagcaaatctgggaacaaattgcaaaagacttaaccaggtctcaggactctatcataaataactctcagttctttgaaaatggtgatgtcccctcccaggttgaagcaggactacccacaattcatacaggacagaaaccttcccagggtgggaagtgtaaacagtccatcagtgatgttcccatctttgatcttcctcagcagttatactcagaagagaagtcttatacatgtgatgagtgtggaaaaagcatctgttacatctcagctcttcatgttcatcagagagtccacgtgggagagaaactctttatgtgtgatgtgtgtggcaaggaatttagtcaaagctcacatctgcaaactcatcagagagtccacactggagagaaaccattcaaatgtgagcaatgtgggaaaggtttcagtcgtagatcagcacttaatgttcatcgtaaattacacacaggagagaaaccttacatttgtgaggcatgtgggaaggccttcattcatgattcccagcttaaggaacataagagaatccatactggggagaaaccattcaaatgtgatatatgtggtaagaccttctattttaggtcaagacttaagagccattccatggttcacacaggagaaaaaccatttaggtgtgatacatgtgataagagctttcatcagagatcagcacttaataggcattgcatggtccacacaggagagaaaccgtacagatgtgagcagtgtggaaaaggctttattggtaggctagatttttataagcatcaggtggtccacacaggagaaaaaccatataattgtaaagaatgtgggaagagcttcagatggtcctcatgccttttgaaccatcagcgagtccacagtggagaaaaaagcttcaaatgtgaagaatgtggaaagggattttatacaaattcacaactgtcttcccatcagagatcccacagtggtgaaaagccatataaatgtgaggagtgtgggaagggctatgttactaagtttaatcttgacttgcaccagagggtccacacgggagagagaccttataattgtaaggaatgtgggaagaactttagccgggcctcaagtattttgaatcataagagactccactgccagaaaaaaccattcaaatgtgaggactgtggaaagaggcttgtacacaggacataccgtaaagaccagccgagagactatagtggggaaaacccatccaaatgtgaggattgtgggagacgctacaagaggcgcttgaatctggatatacttttatcattatttctaaatgacacataattgttcatatttatggggtacaacgtgctattttaatgtgtgcatacaatttatagtgatccaatcagtgtaattggtgtatctgttacctcaaacatttaccatttctttgtgttggaaaattcaaaatccatttgagaggagttggtagacagcaagggaagggtccctggagacccccagccaaacgggtcagtgtctcatccccacataacacaaaaagcagcctggggaagacaatcaagctacaggcactgataagggaactagcacaggggattgtgcctggagacatgcccatggctgcacagatagaagaacctccagcccattcaggtaaaaactcgcacaaacctccggctcactcagttaagggaacaagaccagacacagaaatgcctttgtcctttgtataatcagcaggctccgaggaaaaagtttcttcttttgtgggcatgaacacagtgggcttcagtaggttcaggttggcactttcttttgtggaaaaggaaaagcccagcctctgtaaatcatcacttcagctcctgattggtcccaggccaagctgaatagcccttaggaataatcacttcaactcctgattggtcccgggccaagctgaatagcccttatgaatcatcacttcggttcctgattggtcccgggccaaggtcccagaccaagctgaatcacgctttctccaagacagcccgcaggctaagtgcattccttccccttcccagtccataaaaaccccggaccccagcctcatactgggcaacttatttggatccccatctccactgtggagagcttttttctttcacttattaaacttttactccaatttc

SEQ ID NO: 29392 - DNA, 2264 bp, Homo Sapiens
ccgccctggaggccggagccactgggcctgcgcgcctcggcagcgagcagccgctttgctcgcgtgcaggaggctgttcgctacctcacacccccggctggcgctgtggcctcgcttagctctaccgtttagcacccggcgacatgcacccggtcggtttccgccaggatgcgggagagttggggcaagctacctgcgacagcttgaacttttcctagggattccgctccacccgccggttagagcgtattgctcattaaatccgagacctgtgtgcttgctactgaaataaaagaagtattttttgccccagagtccttttaggacgttatgacttttctcctttgcaagactgcaaaaaactgacaagaagacaaaactcttcccactcccagggaccgcgttgtcttgagtttggctagtaaaggctagcaagtgaggctttgtctctgcatcccgttccccctaacatcctcagagaaccttcgtttctagaatctttctagtattcagagacttctccagggtcatgatcccaaaggcttaacccgtttacaaggagagagttgtctcctgacgcccaaaatggcagctaaaatggagataactttaagctccaacactgaagcttcctccaagcaagagagacacataatagccaaactagaagagaaacggggccctcctctgcaaaaaaactgcccagatcctgagctctgccgccagagcttcagacgcttttgttatcaagaggtgtctggaccccaagaggcgctctcccagctccgacagctctgccgtcagtggttgcaacccgagctgcacaccaaggagcagattttggagcttctggtgatggagcagttcctgaccatcctgcccccggagatccaggctcgggtcaggcatcgatgtccaatgagcagcaaggagattgtgaccctcgtggaagattttcacagagcatccaagaaaccaaagcagtgggtggccgtttgtatgcaggggcaaaaggtgctcttggagaaaactggatctcagcttggagaacaggaactgccagactttcaaccgcagactcctaggagagatctcagggagagctctccagcagagccttcccaggcaggagcttatgaccggctgagcccccatcattgggagaaatccccactcctccaagaaccaacccccaaattggctgggacagaggcccccagaatgagaagtgacaacaaggaaaatccacaacaggaaggggctaaaggagcaaagccatgtgcagtgtcagctggcagatccaaagggaatggtctgcagaatcctgaaccaagaggggcaaatatgagtgaacctcggttgtcacggaggcaggtcagctccccaaatgctcaaaagccatttgctcactaccagagacattgcagggtggaatacatcagcagccccctaaaaagccacccactgagagagctaaagaaaagcaaaggaggtaaacggagtctgagcaaccgtttgcaacatcttggtcaccagcccacccgctcagcaaagaaaccctacaaatgtgatgactgtgggaaaagcttcacgtggaattcagagctgaagagacacaagagagtccacacaggagagagaccctacacgtgcggagagtgtggaaactgctttgggcggcagtcaaccctgaagctgcaccagaggatccacactggagagaagccataccagtgtggccagtgtgggaaaagctttcgccagagctcaaaccttcaccagcatcaccgacttcaccatggggactaaaaggagcactccatgctttagattcacacggaaggtgtttgtgtttctcctcccccttgcttgcatgtaaatcacaaaaactgtgtgacttacaaggaaagcacgaggcccttgaggaatgatgatgcacattctgctgtgaggaggcccagaaaaggccaaccagggcccaaccgtgcatgatgacagggtgcagagaaggcaggtctgggcactggggcaaagagaacttaagtctctgcagagagcaaggagtaactactgagagagaatcaggacaatcctgcaggtggcccgcttactgttaaatcgtccctctgttgctttatcctctaaaatatgttaagggataaattctatatatatagttatgcatttgctgtcataccagacaattttttatcatgagcacacttctttaataaagatgagtgatctaccagaaaaaaaaaaaa

SEQ ID NO: 29393 - DNA, 4053 bp, Homo Sapiens
  misc_feature (3727)..(3727): n is a, c, g, or t
  misc_feature (3745)..(3745): n is a, c, g, or t
  misc_feature (3782)..(3782): n is a, c, g, or t
aagccaagaaatggctacagccgtggaaccagaggaccaggatctttgggaagaagagggaattctgatggtgaaactggaagatgatttcacctgtcggccagagtctgtcttacagagggatgacccggtgctggaaacctcccaccagaacttccgacgcttccgctaccaggaggcagcaagccctagagaagctctcatcagactccgagaactttgtcaccagtggctgagaccagagaggcggacaaaggagcagatcctagagctgcttgtgctggaacaatttcttaccgtcctacctggagaactacagagctgggtgcggggccaacggccagaaagtggcgaggaggcagtgacgctggtggagggtttgcagaaacaacccaggagaccaaggcggtgggtgactgtccatgttcacggccaggaagtcctgtcagaggagacggtgcatttaggagcggagcctgagtcacctaatgagctgcaggatcctgtgcaaagctcgacccccgagcagtctcctgaggaaaccacacagagcccagatctgggggcaccggcagagcagcgtccacaccaggaagaggagctccagaccctgcaggagagcgaggtcccagtgcccgaggacccagaccttcctgcagagaggagctctggagactcagagatggttgctcttcttactgctctgtcacagggactggtaacgttcaaggatgtggccgtatgcttttcccaggaccagtggagtgatctggacccaacacagaaagagttctatggagaatatgtcttggaagaagactgtggaattgttgtctctctgtcatttccaatccccagacctgatgagatctcccaggttagagaggaagagccttgggtcccagatatccaagagcctcaggagactcaagagccagaaatcctgagttttacctacacaggagataggagtaaagatgaggaagagtgtctggagcaggaagatctgagtttggaggatatacacaggcctgttttgggagaaccagaaattcaccagactccagattgggaaatagtctttgaggacaatccaggtagacttaatgaaagaagatttggtactaatatttctcaagtgaatagttttgtgaaccttcgggaaactacacccgtccaccccctgttagggaggcatcatgactgttctgtgtgtggaaagagcttcacttgtaactcccaccttgttagacacctgaggactcacacaggagagaaaccctataaatgtatggaatgtggaaaaagttacacacgaagctcacatcttgccaggcaccaaaaggttcacaagatgaacgcgccttacaaatatcccctaaaccggaagaatttggaagagacctcccctgtgacacaggctgagagaactccatcagtggagaaaccctatagatgtgatgattgcggaaagcacttccgctggacttcagaccttgtcagacatcagaggacacatactggagaaaaacccttcttttgtactatttgtggcaaaagcttcagccagaaatctgtgttaacaacacaccaaagaatccacctgggaggcaaaccctacttgtgtggagagtgtggtgaggacttcagtgaacacaggcggtacctggcgcaccggaagacgcacgctgctgaggaactctacctctgcagcgagtgcgggcgctgcttcacccacagcgcagcgttcgccaagcacttgagaggacacgcctcagtgaggccctgccgatgcaacgaatgtgggaagagcttcagtcgcagggaccacctcgtcaggcatcagagaacacacactggggagaaaccattcacgtgccctacctgtggaaaaagcttcagcagaggatatcacttaattaggcatcagaggacccactcagaaaagacctcctagcgaggtccccatgtgaggagatctgctttcagccctcacctaagggaggtgaggaagaggaaaagccctcttgtcagcctgggaagaccttttcgagggagtctccctgacctgctcagatctgacattacctcttcctgcaactaaacacgagcctgggcagaacctctcagccttcctctacgccttgaggggatgtttcatccaaagtacaacctgaattgaggcttctccttcactggagtgcacctgcctctacctcatgggtataaagtaggagaactaagagacttaagaggtcgtggttcctatatcgtccaaaaaataggctgttacatatcctaaagactgctcaacagcttcaagttgaaagtggccaaggacagccccttaggtttgggaagggacgagcctgaaggattctgtctttactggggtcaaatcttaaagcacacagttctggactcaagacaggaggtttgcgtcctgatggctttgccacacattcacaggataactgcatagatccctcgctgtctgattcacttcttaccatgcactttcctttgatgctgaggagaaatggaagtgggcgaaaaatctcaaggctgcttcatgtggaccttgtcaagctgctccctcccccagcatcaaattgttatcaggtgccaaacactgctagaaaggagggcctagtcagaagcctctttccatacgagttttggttttgtttttaatatttttttctattaaaatactcatgcatttaaccttcccgttattcaaccagtctcttggttgcatccctagcacttctactacaagtgagatggtagtgtttgagtgcttattgagtaaagcataattcggtcataatgaaatcgttcacattccctcatatgcacaagcccaccaaccccttcacaccccccttcacaggggtcgtatgagtaaggggatttggaaactgtcaacttacaaaggcactataacaattacagaatcatgattgccatgggccactttatttacatgaagacaactggagaacgactaagaccaaattatggaaaataagaaaaagctgttgctggcaagaccatcaagactgttctgacaccctgtccccatcatccctgactgagtactctgacatcacggaaagtgttgaacctgggaccctgaggaattcaccaggagtaaatggctttcatgtatttgtgttgtttgctttttcttacgtgattttatgttcatagagctagaaagtagcatctcatgatggcccaacaatctctgttgccagttaaaggttccttggagatgaggctgaataattatgaacctcaccttctctgattgtgggagtggcaagaactggggagacgtcctccataagtggagcacagggtatggggttaaagcatgacagggagagtcttctgtgcctggtttcttctcctctatctcataatgcattatgggcccgaggaataggggagggttaataagactccaaccctaatggcccaacagggaaattctcattttggtcgatgatattctgatggactggtttggtcttaataccagtcaaccgttgtccttctggaaatatacatatatgaaataaataaaggtaacacttgcagccaagttccctggtttctgggacttcccatcttacccattccttttccagggcttccagtgtcctgatacttctggagggtggttcatactccaaattagattctggggagttacagnagtaattttttccttggnagggaaagggaagggttgggggatggatttaggcagnagttccggtggaaacattatttgcactctgagataagatccaagcctggagtttgcagaagatactgtcctaataagcaggcatttctaaaccaagtatctaagcctaagcacagcttgtcctgggtgaaatgtctgccacaaaagatagtttctcctagctcagacttaaccatttataaaggttggtaaaatactggcagtgacaacaaattgactttttaattttcttatttgcattattccaataaatgaaaatctgtcagagttcg

SEQ ID NO: 29394 - DNA, 2663 bp, Homo Sapiens
ggcggtttccatggtgacggcaaacaaggcccacactggacagggcagctgctgggttgctactctcgcctccgccatgattccgcccgcagactctttgctcaagtacgacaccccagtgctggtgagccggaacacggagaaacggagccccaaggctcggctactgaaagtcagcccccagcagcctggaccttcaggttcagccccacagccacccaagaccaagctcccctcaactccctgtgtcccagatcctacaaagcaggcagaagaaatcttgaatgccatactacccccaagggagtgggtggaagacacgcagctatggatccagcaggtgtccagcacccctagcaccaggatggacgtggtgcacctccaggagcagttagacttaaagctgcagcagcggcaggccagggaaacaggcatctgccctgtccgcagggaactctactcacagtgttttgatgagttgatccgggaggtcaccatcaactgtgcggagagggggctgctgctgctgcgagtccgggacgagatccgcatgaccatcgctgcctaccagaccctgtacgagagcagcgtggcgtttggcatgaggaaggcactgcaggctgagcaggggaagtcagacatggagaggaaaatcgcagaattggagacggaaaagagagacctggagaggcaagtgaacgagcagaaggcaaaatgtgaagccactgagaagcgggagagcgagaggcggcaggtggaggagaagaagcacaatgaggagattcagttcctgaagcgaacaaatcagcagctgaaggcccaactggaaggcattattgcaccaaagaagtgataatttccacatgattaatttccaacaagacacttgggagttatttactgtgttcctctggcagccaataaaatcatcataagccctttgtaataaaaagctagtttcctgagtgaacaagccataacctcccctaaacaccacctaggtatttgttagaagtcacactattactccaatgtcatcagacacctaaggtctgccagccaggctcctggctgggcaatggaagatggtgtggccctgttagtctccgtgtgtggcttactagccagccttgggaactgccaactcaaattctaagaaagccactgctttctcatcatcactctataccaatacttatttctggccaaatgaatctgcttctctgcccctcaaacttttagttcacaattcatcttctaccttaacttgggcttcttgggcctctggccttccttacttaatgtcttcttttccctactctaatgcatttctaactcactttggagctttggttttctaatgtattatccccacttgccagtcaactggaccccttcctcctcggtttcagactgcctacattaggaaacaatggcagtcaaacccatggctttggagaaagtaaatgtttgccagaaaggaatactagtcacagtggcctttgtgagttgtctgcaactcagctcttcccccagcacagatctgttccccttatcctgcagaaaatcaagccctgactctgcactccccgaagtagtgatgttaattaacaactgaagaggtaactaaatctcacatgcaggtctaatgactaataattggagtacggctgctagacaactgcattttagtatttctcttccattctcctggttttgtagacccagaagattgaatgagtgacataaatctttagttcggggcaagccagggtgggctagggtggtaagctggaggacttcatccttcagttaggctgcacaagtaacattacctaaaaggcactaacatgctcaggttccccagaaagaggcgtaagaagggcctctccttagcagagcttccacctgccatccgtcttgggttcagtgagcttcaaggctcacaatggaagcactgtcatttccccagaaaagctgtgttccctatgctgaacacaccatacacattctcatctggaatctaaggagcagcttttaccctgatccagtatcctgaggaattttaagcctccactcaaatgacctgcctgtgttgtcatttccatgggaaagaactctttccacgagatctgctagttccaggcctctaagacaggaacgtatgtgccataagtgggtctacttcacagactcaatgaggcagaaattattgtagttttctcctatttcttctgcacccaactttctccttgtatttcaaaggccaggccatgtacactaacgtccttgaaatttgcagttctgtatgcttctattccaaatcattcattaccaataaaaacgaaataccaccctttccattttatagacctcatcccctatttctgtcagacagttatatgacagggtgactgtggaacctcttagttcatccaaagtctacctgaagtgctagactttcagactcttatcactgaaatccttaaggttgaggaggctttatttccctagcactggtgaagggcttcaactgtcaaacctcagaacaaatgcattagggccttagaaatgtcaatggggcaggaagaaaacacaatttctaactgcctgtttttgtataatttaataaaaaccttttaaacattaaaaaaaaaaaaaaa

SEQ ID NO: 29395 - DNA, 2561 bp, Homo Sapiens
tacccagcctgtcgctaaactttccgggcgccagcccggctctgagtcgcgcttctcagcggagtgacccagggacggaggacccaggctggctggggactgtctgctcttctcggcgggatccgtggagagtcctttccctggaatccgagccctaaccgtctctccccagccctatccggcgaggagcggagcgctgccagcggaggcagcgccttcccgaagcagtttatctttggacggttttctttaaaggaaaaagcaaccaacaggttgccagccccggcgccacacacgagacgccggagggagaagccccggcccggattcctctgcctgtgtgcgtccctcgcgggctgctggaggcgaggggagggagggggcgatggctcggcctgacccatccgcgccgccctcgctgttgctgctgctcctggcgcagctggtgggccgggcggccgccgcgtccaaggccccggtgtgccaggaaatcacggtgcccatgtgccgcggcatcggctacaacctgacgcacatgcccaaccagttcaaccacgacacgcaggacgaggcgggcctggaggtgcaccagttctggccgctggtggagatccaatgctcgccggacctgcgcttcttcctatgctctatgtacacgcccatctgtctgcccgactaccacaagccgctgccgccctgccgctcggtgtgcgagcgcgccaaggccggctgctcgccgctgatgcgccagtacggcttcgcctggcccgagcgcatgagctgcgaccgcctcccggtgctgggccgcgacgccgaggtcctctgcatggattacaaccgcagcgaggccaccacggcgccccccaggcctttcccagccaagcccacccttccaggcccgccaggggcgccggcctcggggggcgaatgccccgctgggggcccgttcgtgtgcaagtgtcgcgagcccttcgtgcccattctgaaggagtcacacccgctctacaacaaggtgcggacgggccaggtgcccaactgcgcggtaccctgctaccagccgtccttcagtgccgacgagcgcacgttcgccaccttctggataggcctgtggtcggtgctgtgcttcatctccacgtccaccacagtggccaccttcctcatcgacatggaacgcttccgctatcctgagcgccccatcatcttcctgtcagcctgctacctgtgcgtgtcgctgggcttcctggtgcgtctggtcgtgggccatgccagcgtggcctgcagccgcgagcacaaccacatccactacgagaccacgggccctgcactgtgcaccatcgtcttcctcctggtctacttcttcggcatggccagctccatctggtgggtcatcctgtcgctcacctggttcctggccgccggcatgaagtggggcaacgaggccatcgcgggctacgcgcagtacttccacctggctgcgtggctcatccccagcgtcaagtccatcacggcactggcgctgagctccgtggacggggacccagtggccggcatctgctacgtgggcaaccagaacctgaactcgctgcgcggcttcgtgctgggcccgctggtgctctacctgctggtgggcacgctcttcctgctggcgggcttcgtgtcgctcttccgcatccgcagcgtcatcaagcagggcggcaccaagacggacaagctggagaagctcatgatccgcatcggcatcttcacgctgctctacacggtccccgccagcattgtggtggcctgctacctgtacgagcagcactaccgcgagagctgggaggcggcgctcacctgcgcctgcccgggccacgacaccggccagccgcgcgccaagcccgagtactgggtgctcatgctcaagtacttcatgtgcctggtggtgggcatcacgtcgggcgtctggatctggtcgggcaagacggtggagtcgtggcggcgtttcaccagccgctgctgctgccgcccgcggcgcggccacaagagcgggggcgccatggccgcaggggactaccccgaggcgagcgccgcgctcacaggcaggaccgggccgccgggccccgccgccacctaccacaagcaggtgtccctgtcgcacgtgtaggaggctgccgccgagggactcggccggagagctgaggggaggggggcgttttgtttggtagttttgccaaggtcacttccgtttaccttcatggtgctgttgccccctcccgcggcgacttggagagagggaagaggggcgttttcgaggaagaacctgtcccaggtcttctccaaggggcccagctcacgtgtattctattttgcgtttcttactgccttctttatgggaaccctctttttaatttatatgtatttttcttaatttgtaactttgttgcattttggcaacaatttacctttgctttgggggctttacaatcctaaggttggcgttgtaatgaagttccacttggttcaggtttctttgaactgtgtggtctcaattgggaaaatatatttcctatacgtgtgtcttt

SEQ ID NO: 29396 - DNA, 2967 bp, Homo Sapiens
tagctccgcgcgggggcttcctcggctccttgctgttgccgccgccgcagctgctgccgcggttggtggggttgggtgagaggaggagctgtcgcggaccctgtagagtcggtctctgttgctctttttgcctgaggagtcttccatcctacgtcgagctctgactcccgtgctgtcgagagggagtccccggggacacctcggcacgcagcggagatgcctctttttgccaccaatcccttcgatcaggatgttgagaaagcaaccagcgagatgaatactgctgaggactggggcctcattttggatatctgtgataaagttggtcagtctcgcactggacctaaggattgtcttcggtctattatgagaagagtgaaccacaaagatcctcacgttgctatgcaggctttgactcttctaggagcatgtgtatcaaactgtggcaaaatttttcatttagaagtatgttcaagagattttgctagtgaagtaagcaacgtattaaataagggtcatcctaaagtatgtgaaaaattaaaggctcttatggttgaatggacagatgaatttaagaatgatccacagcttagtctaatatcagcaatgattaagaaccttaaggaacaaggagttacgttcccagctattggctctcaggctgcagaacaagcaaaagcaagcccagctcttgtagccaaggatcctggtactgtggctaacaaaaaagaagaagaagatttagcaaaagccattgagttgtctctcaaggaacaaaggcagcagtcaaccaccctttccactttgtatccaagcacatccagtctcttaactaaccaccaacatgaaggccgaaaagttcgtgctatatatgactttgaagctgctgaagacaatgaacttacttttaaagctggagaaattattacagttcttgatgacagtgatcctaactggtggaaaggtgaaacccatcaaggcatagggttatttccttctaattttgtgactgcagatctcactgctgaaccagaaatgattaaaacagagaagaagacggtacaatttagtgatgatgttcaggtagagacaatagaaccagagccggaaccagcctttattgatgaagataaaatggaccagttgctacagatgctgcaaagtacagaccccagtgatgatcagccagacctaccagagctgcttcatcttgaagcaatgtgtcaccagatgggacctctcattgatgaaaagctggaagatattgatagaaaacattcagaactctcagaacttaatgtgaaagtgatggaggccctttccttatataccaagttaatgaacgaagatccgatgtattccatgtatgcaaagttacagaatcagccatattatatgcagtcatctggtgtttctggttctcaggtgtatgcagggcctcctccaagtggtgcctacctggttgcagggaacgcgcagatgagccacctccagagctacagtcttcccccggagcagctgtcttctctcagccaggcagtggtcccaccatccgcaaacccagcccttcctagtcagcagactcaggccgcttacccaaatacaatggtcagttccgttcaaggaaacacatatcccagccaggcgccagtatatagtcctcctcctgccgctactgctgctgctgcaactgccgatgtcactctgtaccagaatgcaggacctaatatgccccaggtgccaaactataacttaacatcatcaactctgcctcagcccggaggcagccaacagccacctcagccacagcaaccatattctcagaaggctctgctataggacccggtgttcctcttggtggcagatacctgctaaatgccactgacaatgttatgagattcattactatcttaagatgtgtttatcctcagcttataggaatctctccaggtcaacaggttcaaatattcaagaaggtagaactctcctcaatttacactgactttttagaggttcttccccccccgcccctgcagaggaatgaaactacttacaacatttaattcctttcataatatgaaagaattgatacaaggctatttgtctcgtaaacctggtctgcagaaagtcaaacttacaaaaactgttgtgacaaatgttatgtacatatattgatatgtaactgcattagtggccattttgaatcacagtggtgatcgtgtgaatatatttaacactgtgttaaattaatttacgttgctattttattttaatcataaacaactaccatgtttcttaatgttttgtgtaaatttaaggtaattatactatccttttaaacttcaagaaaacaaagttgttagcgtatttacatgaaggcgcattatgttgtcgtgtgtttcagtttcacattaaactgaaccttttactaattgtgagctaaagagatatatatatatatgtgtgtgtatatatatatatctacatgtctttctgtagcctctgcatactactggctgtcatcacaccagcgtacagtagctaaatttttggtgcaattatagcaaatgataatgttcccttttgaacttttacattttggcatgacatttcagagtattgtgggaccatgagacaaaattaagtacgatcacattctttatttctcattttaaagaaatgatgttggtttaccttttcctagttgaagatagtaattaggtttctaagctgtatactgtgtttattggtggcagtgacaccaaagatagaggcaatggatagaaatttttaaactggaaagaaaacctgaattacactacattttcgaagtctcttgtaattatttgggatatcaacaaaatttgattcgtctgtctaatcccttgctagtattttaaatatgtctttaacacattgtatcctttaattcttcattaaaatggaaataagtagatgtttcaaagt

SEQ ID NO: 29397 - DNA, 5062 bp, Homo Sapiens; identical to SEQ ID NO: 22725

SEQ ID NO: 29398 - DNA, 3925 bp, Homo Sapiens
agcggggctgcgcgaagtcatcgctgttccagacagcgatgactcgagagcggtgggggtggcggcgcgatcggccgggctgtaaccgtcgtctgtccgggagcggctggagcggcagcggcggccgggcacggcgcgaggtgacgccacagggcagcggcggcagcggaggcagcggcggcagcaggagacgcagcggcggccgcagcagcagcagcaagacggactcgtggagacgcgccgccgccgccgccgccgggccgggccgggtgtcgcgcgccgaggctgggggggagtcgtcgccgccgccgccaccgctaccgccgccgccgccgccgccgaggtgactgaggagagaggcgcctcctcgctcccgccaccgccggacttcaatgcccagtccccagctcgccagcgtttttcgttggaatatacgttgcacatttatggcgattctgagtgtgagggcagacttctgccaggctcagcacagcattttcgctgacaagtgagcttggaggttctatgtgccataattaacattgccttgaagactcctggacaccgagactggcctcagaaatagttggcttttttttttttttaattgcaagcatatttcttttaatgactccagtaaaattaagcatcaagtaaacaagtggaaagtgacctacacttttaacttgtctcactagtgcctaaatgtagtaaaggctgcttaagttttgtatgtagttggattttttggagtccgaatatttccatctgcagaaattgaggcccaaattgaatttggattcaagtggattctaaatactttgcttatcttgaagagagaagcttcataaggaataaacaagttgaatagagaaaacactgattgataataggcattttagtggtctttttaatgttttctgctgtgaaacatttcaagatttattgatttttttttttcactttccccatcacactcacacgcacgctcacactttttatttgccataatgaaccgtccagcccctgtggagatctcctatgagaacatgcgttttctgataactcacaaccctaccaatgctactctcaacaagttcacagaggaacttaagaagtatggagtgacgactttggttcgagtttgtgatgctacatatgataaagctccagttgaaaaagaaggaatccacgttctagattggccatttgatgatggagctccaccccctaatcagatagtagatgattggttaaacctgttaaaaaccaaatttcgtgaagagccaggttgctgtgttgcagtgcattgtgttgcaggattgggaagggcacctgtgctggttgcacttgctttgattgaatgtggaatgaagtacgaagatgcagttcagtttataagacaaaaaagaaggggagcgttcaattccaaacagctgctttatttggagaaataccgacctaagatgcgattacgcttcagagataccaatgggcattgctgtgttcagtagaaggaaatgtaaacgaaggctgacttgattgtgccatttagagggaactcttggtacctggaaatgtgaatctggaatattacctgtgtcatcaaagtagtgatggattcagtactcctcaaccactctcctaatgattggaacaaaagcaaacaaaaaagaaatctctctataaaatgaataaaatgtttaagaaaagagaaagagaaaaggaattaattcagtgaaggatgattttgctcctagttttggagtttgaatttctgccaggattgaattattttgaaatctcctgtctttttaaactttttcaaaataggtctctaaggaaaaccagcagaacattaggcctgtgcaaaaccatctgtttggggagcacactcttccattatgcttggcacatagatctccctgtggtgggattttttttttccctttttttgtgggggagggttggtggtatatttttcccctcttttttccttcctctcctacatctcccttttcccccgatccaagttgtagatggaatagaagcccttgttgctgtagatgtgcgtgcagtctggcagccttaagcccacctgggcacttttagataaaaaaaaaaaaaaacaaaaaacaacaccaaaaaaacagcagtgatatatatattccaggtggtttttagtctttactgatgaaagggtgttcatgttagtttcttcaaaaccctatctaatactaggcaaagtagccaagagccttttgttttgtttttattttgataaattagtggagaaatggcattttaagaggagtctcttctcaacttacctgagagtcgaattcttctcttccctaaccaatgaagctaagtggttatcccagaaacttgtcttctaaaagggaggactccaggccatcaataaagatgtccaggcagtgagcgtactttttacaccctgtagaattgtgggctgtagcgttactctgattttctgtctagtatcagagaatgctggtagcttaaaatttttattttaggacttgtactctgaattttcaggaaccgtcaaaggagcagcagcaaattcacatattttcgacttgagaaatgcttgtggtatgtgttttccaaactgccccctatatgtaaagttcagtttaaccactgattgccttgttattactaggttttttgagattaaaaaaaaaaaatccctggtttaaaaccaacaatgatgcctagtgagtatgtgtccacaggccataacagggtagaagagagacatcgtgcaacccaatgagtagtgaagggactgtgttgcttgtgaagcggtgtagtagcatttttgcagattcttggctgggtttagtgtactgatctagaaaagctgtttttctgctcctttgtggaaggcagttatgatcaggctgcatggacaaagcaggtagaggggcaccatcaggggctcttgcactattttcacctctaaatattacgtactcagtagtgccctgcttctagggctctgaatacgggcttaaagtcatcttgtcctgctggaatttgctgtgcagagccataagcctcccattttgttagcgtcagctaggccaataggaacagaccgggaccttgtctcacactgatgatacctcacatgttgaccggctatgtgaactgcctatttcctatgctggagttttgatttttaactaaacgcaaatctgtagattctctcctctcccatcccagaaaacaaaacaaaataatgcttttcgaaattgtttctaggactttaaaacataatggtatatccaaaattctttatttcagaatgcaacaatagattccattaatatagactcaagatcaaaacagcatacctgctaagctaagatagatggtgttgattccactgggttttgatcaatacaataacaaacctttttcctttgacatactctgaattttgttgtttggggggagggggtgtgtgtgtgtgtgtgtgtgtgtgtgtgtattgtgtgtgtgtgtgtgtgcacgcgcagtgtccatcagtatcagtgcctgcctgagttaggaaaattacattcctggttctgtattgaggagaaggatgtataaagcaacatgaaacattagccctccttttattttaaagactaatgttaattgttcttaaaactggattttttttccttaaagcaatttttttcttttcgatttaatgaagtattgctagctgaagccagtttgacatagagagatgtcagattgatttgaaaggtgtgcagcctgatttaaaaccaaaccctgaacccttttaaagaacaataaaacatattttacacgctcaaaaaaaaaaaaaaaaaaaaaaaaaaaaaaaaaaaaaaaaaaaaaaaaaaaaaaaaaaaaaaaaaaa

SEQ ID NO: 29399 - DNA, 15789 bp, Homo Sapiens; identical to SEQ ID NO: 22702

SEQ ID NO: 29400 - DNA, 2166 bp, Homo Sapiens
agtacagctccggccgccgcgccgcctggctttcgtattcgttgttctcggcgggctgtggggcctccgcgccgcggccgttagtcatgtcggattctggaagttacggtcagtctgggggtgagcagcaaagttattctacctatggaaatccaggcagccaaggctatggacaagcatcacaaagctattctggctatgggcaaacgactgattcctcttatggacagaactacagcggttactccagttatggacaaagttattcacagtcctatggtggttatgagaatcaaaagcagagctcatatagccagcaaccatataataaccagggacagcagcaaaacatggaatcatcaggaagccaaggtggaagagcaccttcctatgaccagccagactatggtcaacaagattcatatgaccagcagtcaggctatgatcaacatcaaggctcatatgatgagcagtcaaattatgatcagcagcatgattcctatagtcaaaaccagcagtcctatcattcacaaagggaaaactacagccaccacacacaagatgaccgtcgtgatgtgagtaggtatggagaagataatagaggatatggcgggtcacagggaggaggtagagggcgtgggggatatgacaaggatggaagaggtcctatgacaggatcaagtggtggtgaccgcggtggcttcaaaaattttggtggtcacagggattatggacccagaacagatgctgattcagaatctgataattcagataacaacacaatctttgtgcaaggacttggggagggtgtgtctacagatcaagttggggagttctttaaacaaataggaattatcaagacaaataagaagaccggaaaaccaatgataaatctttatacagacaaggacacaggaaagccaaagggggaggcaacagtgtcatttgatgaccctccttcagctaaggcagccattgactggtttgatggaaaagaattccatggcaacatcattaaagtgtcctttgccactagaagacctgaattcatgagaggaggtggaagtggaggtgggcggcgaggccgtggaggatatagaggtcgtggaggctttcaagggagaggtggagaccccaaaagtggggattgggtttgccctaatccgtcatgcggaaatatgaactttgctcgaaggaattcctgcaatcagtgcaatgagcctagaccagaggactctcgtccctcaggaggagatttccgggggagaggctacggtggagagaggggctacagaggtcgtgggggcagaggtggagaccgaggcggctatggtggagacagaagtgggggtggctatggtggagacagaagcagcggtggtggctacagcggagatagaagtgggggcggctatggtggagacagaagtgggggtggctatggtggggacagaggcggcggctatggtggggacagaggaggcggctatggaggagaccgaggaggtggctatggaggagatcgaggtggctatggaggagaccgaggtggaggctatggtggagaccgaggaggctatggaggagatcgaggaggttacggaggagatcgaggaggttatggaggagatcgaggaggctatggaggagacagaagccgggggggctatggaggagaccgtggtggtggcagtggctacggtggagaccgaagtggaggctatggaggagacaggagtggtggcggctatggaggagaccgaggtgggggctacggaggagaccgaggtggctatggaggcaaaatgggaggaagaaacgactacagaaatgatcagcgcaaccgaccatactgatgactgttttgaatgttcctttgtctctgacatgatccatagtgaaattgccagagttttgcctgctgctttcctcgtggcctcttcttgggtagtgaaattaagtgacatttggatttttatttgggtgggagggctgggacagtttttcttctagaaatgtctgttgagatttccccctttagtttccaaccttctccccaacccttggagctaaatgcgttgtaaaatattgccaaaatgaaaagtgttttgtaatactgcaataaaggctgcttgtttttgtggaaaaaaaaaaaaaaaaaaaaaa

SEQ ID NO: 29401 - DNA, 7247 bp, Homo Sapiens
gggaatatattcactaaggattctatctgcttactgctacagacctatgtgttaaggaattcttctcctcctccttgcgtagaagttgatcagcactgtggtcagactgcatttatcttgtcattgccagaagaaatcttggacagaatgtaacagtacgtctctctctgattgcgatggaaggtgataaactgatactcctttattaaagttacatcgcactcaccacagaaaaccattctttaaagtgaatagaaaccaagcccttgtgaacacttctattgaacatgactcatggagaagagcttggctctgatgtgcaccaggattctattgttttaacttacctagaaggattactaatgcatcaggcagcagggggatcaggtactgccgttgacaaaaagtctgctgggcataatgaagaggatcagaactttaacatttctggcagtgcatttcccacctgtcaaagtaatggtccagttctcaatacacatacatatcagggatctggcatgctgcacctcaaaaaagccagactgttgcagtcttctgaggactggaatgcagcaaagcggaagaggctgtctgattctatcatgaatttaaacgtaaagaaggaagctttgctagctggcatggttgacagtgtccgtaaaggcaaacaggatagcacattactggcctctttgcttcagtcattcagctctaggctgcagactgttgctctgtcacaacaaatcaggcagagcctcaaggagcaaggatatgccctcagtcatgattctttaaaagtggagaaggatttaaggtgctatggtgttgcatcaagtcacttaaaaactttgttgaagaaaagtaaagttaaagatcaaaagcctgatacgaatcttcctgatgtgactaaaaacctcatcagagataggtttgcagagtctcctcatcatgttggacaaagtggaacaaaggtcatgagtgaaccgttgtcatgtgctgcaagattacaggctgttgcaagcatggtggaaaaaagggctagtcctgccacctcacctaaacctagtgttgcttgtagccagttagcattacttctgtcaagcgaagcccatttgcagcagtattctcgagaacacgctttaaaaacgcaaaatgcaaatcaagcagcaagtgaaagacttgctgctatggccagattgcaagaaaatggccagaaggatgttggcagttaccagctcccaaaaggaatgtcaagccatcttaatggtcaggcaagaacatcatcaagcaaactgatggctagcaaaagtagtgctacagtgtttcaaaatccaatgggtatcattccttcttcccctaaaaatgcaggttataagaactcactggaaagaaacaatataaaacaagctgctaacaatagtttgcttttacatcttcttaaaagccagactatacctaagccaatgaatggacacagtcacagtgagagaggaagcatttttgaggaaagtagtacacctacaactattgatgaatattcagataacaatcctagttttacagatgacagcagtggtgatgaaagttcttattccaactgtgttcccatagacttgtcttgcaaacacggaactgaaaaatcagaatctgaccaacctgtttccctggataacttcactcaatccttgctaaacacttgggatccaaaagtcccagatgtagatatcaaagaagatcaagatacctcaaagaattctaagctaaactcacaccagaaagtaacacttcttcaattgctacttggccataagaatgaagaaaatgtagaaaaaaacaccagccctcagggagtacacaatgatgtgagcaagttcaatacacaaaattatgcaaggacttctgtgatagaaagccccagtacaaatcggactactccagtgagcactccacctttacttacatcaagcaaagcagggtctcccatcaatctctctcaacactctctggtcatcaaatggaattccccaccatatgtctgcagtactcagtctgaaaagctaacaaatactgcatctaaccactcaatggaccttacaaaaagcaaagacccaccaggagagaaaccagcccaaaatgaaggtgcacagaactctgcaacgtttagtgccagtaagctgttacaaaatttagcacaatgtggaatgcagtcatccatgtcagtggaagagcagagacccagcaaacagctgttaactggaaacacagataaaccgataggtatgattgatagattaaatagccctttgctctcaaataaaacaaatgcagttgaagaaaataaagcatttagtagtcaaccaacaggtcctgaaccagggctttctggttctgaaatagaaaatctgcttgaaagacgtactgtcctccagttgctcctggggaacccaacaaagggaagagtgaaaaaaaaagagaaaactcccttaagagatgaaagtactcaggaacactcagagagagctttaagtgaacaaatactgatggtgaaaataaaatctgagccttgtgatgacttacaaattcctaacacaaatgtgcacttgagccatgatgctaagagtgccccattcttgggtatggctcctgctgtgcagagaagcgcacctgccttaccagtgtccgaagactttaaatcggagcctgtttcacctcaggatttttctttctccaagaatggtctgctaagtcgattgctaagacaaaatcaagatagttacctggcagatgattcagacaggagtcacagaaataatgaaatggcacttctagaatcaaagaatctttgcatggtccctaagaaaaggaagctttatactgagccattagaaaatccatttaaaaagatgaaaaacaacattgttgatgctgcaaacaatcacagtgccccagaagtactgtatgggtccttgcttaaccaggaagagctgaaatttagcagaaatgatcttgaatttaaatatcctgctggtcatggctcagccagcgaaagtgaacacaggagttgggccagagagagcaaaagctttaatgttctgaaacagctgcttctctcagaaaactgtgtgcgagatttgtccccgcacagaagtaactctgtggctgacagtaaaaagaaaggacacaaaaataatgtgaccaacagcaaacctgaatttagcatttcttctttaaatggactgatgtacagttccactcagcccagcagttgcatggataacaggacattttcatacccaggtgtagtaaaaactcctgtgagtcctactttccctgagcacttgggctgtgcagggtctagaccagaatctgggcttttgaatgggtgttccatgcccagtgagaaaggacccattaagtgggttatcactgatgcggagaagaatgagtatgaaaaagactctccaagattgaccaaaaccaacccaatactatattacatgcttcaaaaaggaggcaattctgttgccagtcgagaaacacaagacaaggacatttggagggaggcttcatctgctgaaagtgtctcacaggtcacagccaaagaagagttacttcctactgcagaaacgaaagcttctttctttaatttaagaagcccttacaatagccatatgggaaataatgcttctcgcccacacagcgcaaatggagaagtttatggacttctgggaagcgtgctaacgataaagaaagaatcagaataaaatgtacctgccatccagttttggatctttttaaaactaatgagtatgaacttgagatctgtataaataagagcatgatttgaaaaaagcatggtataattgaaacttttttcattttgaaaagtattggttactggtgatgttgaaatatgcatactaatttttgcttaacattagatgtcatgaggaaactactgaactagcaattggttgtttaacacttctgtatgcgtcagataacaactgtgagtagcctatgaatgaaattcttttataaatattaggcataaattaaaatgtaaaactccattcatagtggattaatgcattttgctgcctttattagggtactttattttgcttttcagaagtcagcctacataacacatttttaaagtctaaactgttaaacaactctttaaaggataattatccaataaaaaaaaacctagtgctgattcacagcttattatccaattcaaaaataaattagaaaaatatatgcttacatttttcacttttgctaaaaagaaaaaaaaaggtgtttatttttaactcttggaagaggttttgtggttcccaatgtgtctgtcccaccctgagccttttcaatatatatttctttaaaccttgtgctacttagtaaaaattgattacaattgagggaagtttgatagatcctttaaaaaaaaggcagatttccattttttgtattttaactactttactaaattaatactcctccttttacaaattagaaaagttaacatttatctttaggtggtttcctgaaaagttgaatatttaagaaattgtttttaacagaagcaaaatggcttttctttggacagttttcaccatctcttgtaaaagttaattctcaccattcctgtggtacctgcgagtgttatgaccaggattccttaaacctgaactcagaccacttgcattagaaccatctggagcacttgttttaaaatgcagattcataggcagcatctcagatctacagaacaagaatctctgctaagtggacctggaatcttccatctgcatcttaacatgctctctaggtgtttcttgtgtttgagaaccatgacttatgactttcctcagaacatgagactgtaaaacaaaaacaaaaaactatgtgatgcctctattttccccaatacagtcacacatcagctcaaaatttgcaatattgtagttatatattaccgttatatctttggaaatccgggttcagaacactttttatgacaaaaattgggtggaggggataactttcatatctggctcaacatctcaggaaaatctgtgattatttgtgtgttctaatgagtaacatctacttagttagccttagggatggaaaaacagggccacttaccaaactcaggtgattccaggatggtttggaaacttctcctgaatgcatccttaacctttattaaaaccattgtcctaagaacaatgccaacaaagcttacaacatttagtttaaacccaagaaggacactaaactagattgactaataaaagtacaaggcacatatacgtgacagaattggtactcaatcactccattggatcttttactttaaagtagtgatgaaaagtacatgttgatactgtcttagaagaaattaatatattagtgaagccacatggggtttcagttgcgaaacaggtctgtttttatgttcagtttgtacaatccacaattcattcaccagatattttgttcttaattgtgttccaggttagcaaatgacctatcaaaaattattctataatcactactagttaggatattgatttaaaattgttctacttgaagtggtttctaagatttttatatttaaaaataggtgtgatttcctaatatgatctaaaaccctaaatggttatttttcctcagaatgatttgtaaatagctactggaaatattatacagtaataggagtgggtattatgcaacatcatggagagtgaaggcataggcttattctgacataaaattccactggccagttgaatatattctattccatgtccatactctgacaatcttattgtcaacactatataaataagcttttaaacaagtcatttttcttgatcgttgtggaaggtttggagccttagaggtatgtcagaaaaaatatgttggtattctcccttgggtagggggaaatgacctttttacaagagagatgaaatttaggtcagggaaaagaccaagggccagcatgctacttttgtgtgtgtgtgtgtgggttttgttttgttttttttggttggctggttgttttcattattattaacaaaggaatgagaatatgtaatacttaaataaacatgaccacgaagaatgctgttctgatttactagagaatgttcccaatttgaatttagggtgattttaaagaacagtgagaaagggcatacatccacagattcactttgtttatgcatatgtagatacaaggatgcacatatacacattttcaaggactattttagatatctagacaatttcttctaataaagtcatttgtgaaagggtactacagcttattgacatcagtaaggtagcattcattacctgtttattctctgctgcatcttacagaagagtaaactggtgagagtatatattttatatatatatatatatataatatgtatatatatatatattgacttgttacatgaagatgttaaaatcggtttttaaaggtgatgtaaatagtgatttccttaatgaaaaatacatattttgtattgttctaatgcaacagaaaagccttttaatctctttggttcctgtatattccatgtataagtgtaaatataatcagacaggtttaaaagttgtgcatgtatgtatacagttgcaagtctggacaaatgtatagaataaaccttttatttaagttgtgattacctgctgcatgaaaagtggcatgggggaccctgtgcatctgtgcatttggcaaaatgtcttaacaaatcagatcagatgttcatcctaacatgacagtattccatttctggacatgacgtctgtggtttaagctttgtgaaagaatgtgctttgattcgaagggtcttaaagaatttttttaatcgtcaaccacttttaaacataaagaattcacacaactactttcatgaattttttaatcccattgcaaacattattccaagagtatcccagtattagcaatactggaatataggcacattaccattcatagtaagaattctggtgtttacacaaccaaatttgatgcgatctgctcagtaatataatttgccatttttattagaaatttaatttcttcatgtgatgtcatgaaactgtacatactgcagtgtgaatttttttgttttgttttttaatcttttagtgtttacttcctgcagtgaatttgaataaatgagaaaaaatgcaaaaaaaaaaaaaaaaaaaaa

SEQ ID NO: 29402 - DNA, 6907 bp, Homo Sapiens
ccgcccagccaggtgcaaaatgccgtgtcattgggagactccgcagccggagcattagattacagctcgacggagctcgggaagggcggcgggggtggaagatgagcagaagcccctgttctcggaacgccggctgacaagcggggtgagcgcagccggggcggggacccagcctagcccactggagcagccgggggtggcccgttcccctttaagagcaactgctctaagccaggagccagagattcgagccggcctcgcccagccagccctctccagcgaggggacccacaagcggcgcctcggccctcccgacctttccgagccctctttgcgccctgggcgcacggggccctacacgcgccaagcatgctgagggtcttcatcctctatgccgagaacgtccacacacccgacaccgacatcagcgatgcctactgctccgcggtgtttgcaggggtgaagaagagaaccaaagtcatcaagaacagcgtgaaccctgtatggaatgagggatttgaatgggacctcaagggcatccccctggaccagggctctgagcttcatgtggtggtcaaagaccatgagacgatggggaggaacaggttcctgggggaagccaaggtcccactccgagaggtcctcgccacccctagtctgtccgccagcttcaatgcccccctgctggacaccaagaagcagcccacaggggcctcgctggtcctgcaggtgtcctacacaccgctgcctggagctgtgcccctgttcccgccccctactcctctggagccctccccgactctgcctgacctggatgtagtggcagacacaggaggagaggaagacacagaggaccagggactcactggagatgaggcggagccattcctggatcaaagcggaggcccgggggctcccaccaccccaaggaaactaccttcacgtcctccgccccactaccccgggatcaaaagaaagcgaagtgcgcctacatctagaaagctgctgtcagacaaaccgcaggatttccagatcagggtccaggtgatcgaggggcgccagctgccgggggtgaacatcaagcctgtggtcaaggttaccgctgcagggcagaccaagcggacgcggatccacaagggaaacagcccactcttcaatgagactcttttcttcaacttgtttgactctcctggggagctgtttgatgagcccatctttatcacggtggtagactctcgttctctcaggacagatgctctcctcggggagttccggatggacgtgggcaccatttacagagagccccggcacgcctatctcaggaagtggctgctgctctcagaccctgatgacttctctgctggggccagaggctacctgaaaacaagcctttgtgtgctggggcctggggacgaagcgcctctggagagaaaagacccctctgaagacaaggaggacattgaaagcaacctgctccggcccacaggcgtagccctgcgaggagcccacttctgcctgaaggtcttccgggccgaggacttgccgcagatggacgatgccgtgatggacaacgtgaaacagatctttggcttcgagagtaacaagaagaacttggtggacccctttgtggaggtcagctttgcggggaaaatgctgtgcagcaagatcttggagaagacggccaaccctcagtggaaccagaacatcacactgcctgccatgtttccctccatgtgcgaaaaaatgaggattcgtatcatagactgggaccgcctgactcacaatgacatcgtggctaccacctacctgagtatgtcgaaaatctctgcccctggaggagaaatagaagaggagcctgcaggtgctgtcaagccttcgaaagcctcagacttggatgactacctgggcttcctccccacttttgggccctgctacatcaacctctatggcagtcccagagagttcacaggcttcccagacccctacacagagctcaacacaggcaagggggaaggtgtggcttatcgtggccggcttctgctctccctggagaccaagctggtggagcacagtgaacagaaggtggaggaccttcctgcggatgacatcctccgggtggagaagtaccttaggaggcgcaagtactccctgtttgcggccttctactcagccaccatgctgcaggatgtggatgatgccatccagtttgaggtcagcatcgggaactacgggaacaagttcgacatgacctgcctgccgctggcctccaccactcagtacagccgtgcagtctttgacgggtgccactactactacctaccctggggtaacgtgaaacctgtggtggtgctgtcatcctactgggaggacatcagccatagaatcgagactcagaaccagctgcttgggattgctgaccggctggaagctggcctggagcaggtccacctggccctgaaggcgcagtgctccacggaggacgtggactcgctggtggctcagctgacggatgagctcatcgcaggctgcagccagcctctgggtgacatccatgagacaccctctgccacccacctggaccagtacctgtaccagctgcgcacccatcacctgagccaaatcactgaggctgccctggccctgaagctcggccacagtgagctccctgcagctctggagcaggcggaggactggctcctgcgtctgcgtgccctggcagaggagccccagaacagcctgccggacatcgtcatctggatgctgcagggagacaagcgtgtggcataccagcgggtgcccgcccaccaagtcctcttctcccggcggggtgccaactactgtggcaagaattgtgggaagctacagacaatctttctgaaatatccgatggagaaggtgcctggcgcccggatgccagtgcagatacgggtcaagctgtggtttgggctctctgtggatgagaaggagttcaaccagtttgctgaggggaagctgtctgtctttgctgaaacctatgagaacgagactaagttggcccttgttgggaactggggcacaacgggcctcacctaccccaagttttctgacgtcacgggcaagatcaagctacccaaggacagcttccgcccctcggccggctggacctgggctggagattggttcgtgtgtccggagaagactctgctccatgacatggacgccggtcacctgagcttcgtggaagaggtgtttgagaaccagacccggcttcccggaggccagtggatctacatgagtgacaactacaccgatgtgaacggggagaaggtgcttcccaaggatgacattgagtgcccactgggctggaagtgggaagatgaggaatggtccacagacctcaaccgggctgtcgatgagcaaggctgggagtatagcatcaccatccccccggagcggaagccgaagcactgggtccctgctgagaagatgtactacacacaccgacggcggcgctgggtgcgcctgcgcaggagggatctcagccaaatggaagcactgaaaaggcacaggcaggcggaggcggagggcgagggctgggagtacgcctctctttttggctggaagttccacctcgagtaccgcaagacagatgccttccgccgccgccgctggcgccgtcgcatggagccactggagaagacggggcctgcagctgtgtttgcccttgagggggccctgggcggcgtgatggatgacaagagtgaagattccatgtccgtctccaccttgagcttcggtgtgaacagacccacgatttcctgcatattcgactatgggaaccgctaccatctacgctgctacatgtaccaggcccgggacctggctgcgatggacaaggactctttttctgatccctatgccatcgtctccttcctgcaccagagccagaagacggtggtggtgaagaacacccttaaccccacctgggaccagacgctcatcttctacgagatcgagatctttggcgagccggccacagttgctgagcaaccgcccagcattgtggtggagctgtacgaccatgacacttatggtgcagacgagtttatgggtcgctgcatctgtcaaccgagtctggaacggatgccacggctggcctggttcccactgacgaggggcagccagccgtcgggggagctgctggcctcttttgagctcatccagagagagaagccggccatccaccatattcctggttttgaggtgcaggagacatcaaggatcctggatgagtctgaggacacagacctgccctacccaccaccccagagggaggccaacatctacatggttcctcagaacatcaagccagcgctccagcgtaccgccatcgagatcctggcatggggcctgcggaacatgaagagttaccagctggccaacatctcctcccccagcctcgtggtagagtgtgggggccagacggtgcagtcctgtgtcatcaggaacctccggaagaaccccaactttgacatctgcaccctcttcatggaagtgatgctgcccagggaggagctctactgcccccccatcaccgtcaaggtcatcgataaccgccagtttggccgccggcctgtggtgggccagtgtaccatccgctccctggagagcttcctgtgtgacccctactcggcggagagtccatccccacagggtggcccagacgatgtgagcctactcagtcctggggaagacgtgctcatcgacattgatgacaaggagcccctcatccccatccaggaggaagagttcatcgattggtggagcaaattctttgcctccataggggagagggaaaagtgcggctcctacctggagaaggattttgacaccctgaaggtctatgacacacagctggagaatgtggaggcctttgagggcctgtctgacttttgtaacaccttcaagctgtaccggggcaagacgcaggaggagacagaagatccatctgtgattggtgaatttaagggcctcttcaaaatttatcccctcccagaagacccagccatccccatgcccccaagacagttccaccagctggccgcccagggaccccaggagtgcttggtccgtatctacattgtccgagcatttggcctgcagcccaaggaccccaatggaaagtgtgatccttacatcaagatctccatagggaagaaatcagtgagtgaccaggataactacatcccctgcacgctggagcccgtatttggaaagatgttcgagctgacctgcactctgcctctggagaaggacctaaagatcactctctatgactatgacctcctctccaaggacgaaaagatcggtgagacggtcgtcgacctggagaacaggctgctgtccaagtttggggctcgctgtggactcccacagacctactgtgtctctggaccgaaccagtggcgggaccagctccgcccctcccagctcctccacctcttctgccagcagcatagagtcaaggcacctgtgtaccggacagaccgtgtaatgtttcaggataaagaatattccattgaagagatagaggctggcaggatcccaaacccacacctgggcccagtggaggagcgtctggctctgcatgtgcttcagcagcagggcctggtcccggagcacgtggagtcacggcccctctacagccccctgcagccagacatcgagcaggggaagctgcagatgtgggtcgacctatttccgaaggccctggggcggcctggacctcccttcaacatcaccccacggagagccagaaggtttttcctgcgttgtattatctggaataccagagatgtgatcctggatgacctgagcctcacgggggagaagatgagcgacatttatgtgaaaggttggatgattggctttgaagaacacaagcaaaagacagacgtgcattatcgttccctgggaggtgaaggcaacttcaactggaggttcattttccccttcgactacctgccagctgagcaagtctgtaccattgccaagaaggatgccttctggaggctggacaagactgagagcaaaatcccagcacgagtggtgttccagatctgggacaatgacaagttctcctttgatgattttctgggctccctgcagctcgatctcaaccgcatgcccaagccagccaagacagccaagaagtgctccttggaccagctggatgatgctttccacccagaatggtttgtgtccctttttgagcagaaaacagtgaagggctggtggccctgtgtagcagaagagggtgagaagaaaatactggcgggcaagctggaaatgaccttggagattgtagcagagagtgagcatgaggagcggcctgctggccagggccgggatgagcccaacatgaaccctaagcttgaggacccaaggcgccccgacacctccttcctgtggtttacctccccatacaagaccatgaagttcatcctgtggcggcgtttccggtgggccatcatcctcttcatcatcctcttcatcctgctgctgttcctggccatcttcatctacgccttcccgaactatgctgccatgaagctggtgaagcccttcagctgaggactctcctgccctgtagaaggggccgtggggtcccctccagcatgggactggcctgcctcctccgcccagctcggcgagctcctccagacctcctaggcctgattgtcctgccagggtgggcagacagacagatggaccggcccacactcccagagttgctaacatggagctctgagatcaccccacttccatcatttccttctcccccaacccaacgcttttttggatcagctcagacatatttcagtataaaacagttggaaccacaaaaaaaaaaaaaaaaaaaaaaaaa

SEQ ID NO: 29403 - DNA, 12563 bp, Homo Sapiens; identical to SEQ ID NO: 22917

SEQ ID NO: 29404 - DNA, 4350 bp, Homo Sapiens
agttgagggattgacacaaatggtcaggcggcggcggcggagaaggaggcggaggcgcaggggggagccgagcccgctgggctgcggagagttgcgctctctacggggccgcggccactagcgcggcgccgccagccgggagccagcgagccgagggccaggaaggcgggacacgaccccggcgcgccctagccacccgggttctccccgccgcccgcgcttcatgaatcgcaagtttccgcggcggcggcggctgcggtacgcagaacaggagccgggggagcgggccgaaagcggcttgggctcgacggagggcacccgcgcagaggtctccctggccgcagggggagccgccgccggccgtgcccctggcagccccagcggagcggcgccaagagaggagccgagaaagtatggctgaggaggaggcgcctaagaagtcccgggccgccggcggtggcgcgagctgggaactttgtgccggggcgctctcggcccggctggcggaggagggcagcggggacgccggtggccgccgccgcccgccagttgacccccggcgattggcgcgccagctgctgctgctgctttggctgctggaggctccgctgctgctgggggtccgggcccaggcggcgggccaggggccaggccaggggcccgggccggggcagcaaccgccgccgccgcctcagcagcaacagagcgggcagcagtacaacggcgagcggggcatctccgtcccggaccacggctattgccagcccatctccatcccgctgtgcacggacatcgcgtacaaccagaccatcatgcccaacctgctgggccacacgaaccaggaggacgcgggcctggaggtgcaccagttctaccctctagtgaaagtgcagtgttccgctgagctcaagttcttcctgtgctccatgtacgcgcccgtgtgcaccgtgctagagcaggcgctgccgccctgccgctccctgtgcgagcgcgcgcgccagggctgcgaggcgctcatgaacaagttcggcttccagtggccagacacgctcaagtgtgagaagttcccggtgcacggcgccggcgagctgtgcgtgggccagaacacgtccgacaagggcaccccgacgccctcgctgcttccagagttctggaccagcaaccctcagcacggcggcggagggcaccgtggcggcttcccggggggcgccggcgcgtcggagcgaggcaagttctcctgcccgcgcgccctcaaggtgccctcctacctcaactaccacttcctgggggagaaggactgcggcgcaccttgtgagccgaccaaggtgtatgggctcatgtacttcgggcccgaggagctgcgcttctcgcgcacctggattggcatttggtcagtgctgtgctgcgcctccacgctcttcacggtgcttacgtacctggtggacatgcggcgcttcagctacccggagcggcccatcatcttcttgtccggctgttacacggccgtggccgtggcctacatcgccggcttcctcctggaagaccgagtggtgtgtaatgacaagttcgccgaggacggggcacgcactgtggcgcagggcaccaagaaggagggctgcaccatcctcttcatgatgctctacttcttcagcatggccagctccatctggtgggtgatcctgtcgctcacctggttcctggcggctggcatgaagtggggccacgaggccatcgaagccaactcacagtattttcacctggccgcctgggctgtgccggccatcaagaccatcaccatcctggcgctgggccaggtggacggcgatgtgctgagcggagtgtgcttcgtggggcttaacaacgtggacgcgctgcgtggcttcgtgctggcgcccctcttcgtgtacctgtttatcggcacgtcctttctgctggccggctttgtgtcgctcttccgcatccgcaccatcatgaagcacgatggcaccaagaccgagaagctggagaagctcatggtgcgcattggcgtcttcagcgtgctgtacactgtgccagccaccatcgtcatcgcctgctacttctacgagcaggccttccgggaccagtgggaacgcagctgggtggcccagagctgcaagagctacgctatcccctgccctcacctccaggcgggcggaggcgccccgccgcacccgcccatgagcccggacttcacggtcttcatgattaagtaccttatgacgctgatcgtgggcatcacgtcgggcttctggatctggtccggcaagaccctcaactcctggaggaagttctacacgaggctcaccaacagcaaacaaggggagactacagtctgagacccggggctcagcccatgcccaggcctcggccggggcgcagcgatcccccaaagccagcgccgtggagttcgtgccaatcctgacatctcgaggtttcctcactagacaactctctttcgcaggctcctttgaacaactcagctcctgcaaaagcttccgtccctgaggcaaaaggacacgagggcccgactgccagagggaggatggacagacctcttgccctcacactctggtaccaggactgttcgcttttatgattgtaaatagcctgtgtaagatttttgtaagtatatttgtatttaaatgacgaccgatcacgcgtttttctttttcaaaagtttttaattatttagggcggtttaaccatttgaggcttttccttcttgcccttttcggagtattgcaaaggagctaaaactggtgtgcaaccgcacagcgctcctggtcgtcctcgcgcgcctctccctaccacgggtgctcgggacggctgggcgccagctccggggcgagttcagcactgcggggtgcgactagggctgcgctgccagggtcacttcccgcctcctccttttgccccctccccctccttctgtcccctccctttctttcctggcttgaggtaggggctcttaaggtacagaactccacaaaccttccaaatctggaggagggcccccatacattacaattcctcccttgctcggcggtggattgcgaaggcccgtcccttcgacttcctgaagctggatttttaactgtccagaactttcctccaacttcatgggggcccacgggtgtgggcgctggcagtctcagcctccctccacggtcaccttcaacgcccagacactcccttctcccaccttagttggttacagggtgagtgagataaccaatgccaaactttttgaagtctaatttttgaggggtgagctcatttcattctctagtgtctaaaacctggtatgggtttggccagcgtcatggaaagatgtggttactgagatttgggaagaagcatgaagctttgtgtgggttggaagagactgaagatatgggttataaaatgttaattctaattgcatacggatgcctggcaaccttgcctttgagaatgagacagcctgcgcttagattttaccggtctgtaaaatggaaatgttgaggtcacctggaaagctttgttaaggagttgatgtttgctttccttaacaagacagcaaaacgtaaacagaaattgaaaacttgaaggatatttcagtgtcatggacttcctcaaaatgaagtgctattttcttatttttaatcaaataactagacatatatcagaaactttaaaatgtaaaagttgtacactttcaacattttattacgattattattcagcagcacattctgaggggggaacaattcacaccaccaataataacctggtaagatttcaggaggtaaagaaggtggaataattgacggggagatagcgcctgaaataaacaaaatatgggcatgcatgctaaagggaaaatgtgtgcaggtctactgcattaaatcctgtgtgctcctcttttggatttacagaaatgtgtcaaatgtaaatctttcaaagccatttaaaaatattcactttagttctctgtgaagaagaggagaaaagcaatcctcctgattgtattgttttaaactttaagaatttatcaaaatgccggtacttaggacctaaatttatctatgtctgtcatacgctaaaatgatattggtctttgaatttggtatacatttattctgttcactatcacaaaatcatctatatttatagaggaatagaagtttatatatatataataccatatttttaatttcacaaataaaaaattcaaagttttgtacaaaattatatggattttgtgcctgaaaataatagagcttgagctgtctgaactattttacattttatggtgtctcatagccaatcccacagtgtaaaaattca

SEQ ID NO: 29405 - DNA, 3878 bp, Homo Sapiens
ttgcgggaaagagccaaaccctggcgttggggggcccgggcggggagcccctcccgcggtccacagcgacgcctgcccagccctcctccccttccggctccggcacggggccccgaggcgttcggaggccaggcgggtttctgtcaggcccggggaggaggggcgggcggggcggccgctgcctccccgggacgggccgtaccacgcggacggggaggacggggccaggggactgcagggcggctgcaccgcccgggggcggggtgcggagcgggccggcgggctccccggggcggggcgggagggcggggcgtggggcggacggaaccaccggggcggggtgggaggtaacgggacgggcgcgaccatggcgcggtgagggagcgggggtggggatcggtccgggggaggcctgaggccgctggcttgtgcgctgtctccgccgcccccctctttcgccgccgccgccgccgccccgggcatgtcgtccaactgcaccagcaccacggcggtggcggtggcgccgctcagcgccagcaagaccaagaccaagaagaagcatttcgtgtgccagaaagtgaagctattccgggccagcgagccgatcctcagcgtcctgatgtggggggtgaaccacacgatcaatgagctgagcaatgttcctgttcctgtcatgctaatgccagatgacttcaaagcctacagcaagatcaaggtggacaatcatctcttcaataaggagaacctgcccagccgctttaagtttaaggagtattgccccatggtgttccgaaaccttcgggagaggtttggaattgatgatcaggattaccagaattcagtgacgcgcagcgcccccatcaacagtgacagccagggtcggtgtggcacgcgtttcctcaccacctacgaccggcgctttgtcatcaagactgtgtccagcgaggacgtggcggagatgcacaacatcttaaagaaataccaccagtttatagtggagtgtcatggcaacacgcttttgccacagttcctgggcatgtaccgcctgaccgtggatggtgtggaaacctacatggtggttaccaggaacgtgttcagccatcggctcactgtgcatcgcaagtatgacctcaagggttctacggttgccagagaagcgagcgacaaggagaaggccaaggacttgccaacattcaaagacaatgacttcctcaatgaagggcagaagctgcatgtgggagaggagagtaaaaagaacttcctggagaaactgaagcgggacgttgagttcttggcacagctgaagatcatggactacagcctgctggtgggcatccacgacgtggaccgggcagagcaggaggagatggaggtggaggagcgggcagaggacgaggagtgtgagaatgatggggtgggtggcaacctactctgctcctatggcacacctccggacagccctggcaacctcctcagctttcctcggttctttggtcctggggaattcgacccctctgttgacgtctatgccatgaaaagccatgaaagttcccccaagaaggaggtgtatttcatggccatcattgatatcctcacgccatacgatacaaagaagaaagctgcacatgctgccaaaacggtgaaacacggggcaggggccgagatctcgactgtgaaccctgagcagtactccaaacgcttcaacgagtttatgtccaacatcctgacgtagttctcttctaccttcagccagagccagagagctggatatggggtcggggatcgggagttagggagaagggtgtatttgggctagatgggagggtgggagcagagtcgggtttgggagggctttagcaatgagactgcagcctgtgacaccgaaagagactttagctgaagaggagggggatgtgctgtgtgtgcacctgctcacaggatgtaaccccaccttctgcttacccttgattttttctccccatttgacacccaggttaaaaaggggttccctttttggtaccttgtaaccttttaagataccttggggctagagatgacttcgtgggtttatttgggttttgtttctgaaatttcattgctccaggtttgctatttataatcatatttcatcagcctacccaccctccccatctttgctgagctctcagttcccttcaattaaagagatacccggtagacccagcacaagggtccttccagaaccaagtgctatggatgccagattggagaggtcagacacctcgccctgctgcatttgctcttgtctggattaactttgtaatttatggagtattgtgcacaacttcctccacctttcccttggattcaagtgaaaactgttgcattattcctccatcctgtctggaatacaccaggtcaacaccagagatctcagatcagaatcagagatctcagaggggaataagttcatcctcatgggatggtgaggggcaggaaagcggctgggctcttggacacctggttctcagagaaccctgtgatgatcacccaagccccaggctgtcttagcccctggagttcagaagtcctctctgtaaagcctgcctcccactaggtcaagaggaactagagtacctttggatttatcaggaccctcatgtttaaatggttatttccctttgggaaaacttcagaaactgatgtatcaaatgaggccctgtgccctcgatctatttccttcttccttctgacctcctcccaggcactcttacttctagccgaactcttagctctgggcagatctccaagcgcctggagtgctttttagcagagacacctcgttaagctccgggatgaccttgtaggagatctgtctccctgtgcctggagagttacagccagcaaggtgcccccatcttagagtgtggtgtccaaacgtgaggtggcttcctagttacatgaggatgtgatccaggaaatccagtttggaggcttgatgtgggttttgacctggcctcagccttggggctgtttttccttgttgccccgctctagacttttagcagatctgcagcccacaggcttttttggaaggagtggcttcctgcaggtgttccacctgccttcggagcctgccacccaggccctcagaactgagccacaggctgctctggccaggagagaaacagctctgttgttctgcattgggggaggtacattcctgcatcttctcaccccctcaaccaggaactggggatttgggatgagatatggtcagacttgtagataaccccaaagatgtgaagatcgcttgtgaaaccattttgaatgaatagattggtttcctgtggctccctccaaacctggccaagcccagcttccgaagcaggaaccagcactgtctctgtgcctgactcacagcatataggtcaggaaagaatggagacggcattcttggacttcactggggctgctggattggatgggaaaccttctggaagaggcagatgggggtcaaaccactgccttggccccaggaaggggccataggtaggtctgaacaactgccgcaagaccactacatgacttagggaacttgaaaccaactggctcatggagaaaacaaatttgacttgggaaagggattatgtaggaataatgtttggacttgatttccccacgtcataatgaagaatggaagtttggatctgctcctcgtcaggcgcagcatctctgaagcttggaaagctgtcttccagcagcctccgtggcctcgggttcctaccggcttctctgcatttggtctgctgatcatgttgccataatgtgtatggaaagtgtaacacattcttactggttaaagacgactaccaggtatctaacttgtttaacattga

SEQ ID NO: 29406 - DNA, 1020 bp, Homo Sapiens
ggccttccaaagtgctgggattacaggcgtgagtcaccgcgcccggccaaataaaataaaatgttaaagcaaattcaggactacccctcctccaagtcttctgttccctttgggcgcccaggtgagcgggggaggggctgggggagtaataacatcaaaagagcgccttttcctcccttattccgaggagacttccctgggcctgactcccggtcctgtccccagcgccccgcggcctctggagccccttcagtgaccaagatacagagatcaggacgcctttgcgccgccccaggtgcccgcccctagctggctctgcttgggccgcgagggaaggtgaggtcgggggcggagccggggcgtgacagccggggtgtgtgtccgccgggcttggtgcctccggtggccctgcagcaccgtcccacctctgccaccctccgatggggccgctacctgtgtgcctgccaatcatgctgctcctgctactgccgtcgctgctgctgctgctgcttctacctggccccgggtccggcgaggcctccaggatattacgtgtgcaccggcgtgggatcctggaactggcaggaactgtgggttgtgttggtccccgaacccccatcgcctatatgaaatatggttgcttttgtggcttgggaggccatggccagccccgcgatgccattgactggtgctgccatggccacgactgttgttacactcgagctgaggaggccggctgcagccccaagacagagcgctactcctggcagtgcgtcaatcagagcgtcctgtgcggaccggcagagaacaaatgccaagaactgttgtgcaagtgtgaccaggagattgctaactgcttagcccaaactgagtacaacttaaagtacctcttctacccccagttcctatgtgagccggactcgcccaagtgtgactgactaccttgacttgaaatgctcttttgcacaaggaaataaagcgtcctctcagtaatgaaaaaaaaaaaaaaaaaaaaaaaaa

SEQ ID NO: 29407 - DNA, 3004 bp, Homo Sapiens
ggaggtccagagatcctgagagcccgagcgcccagcgccgcgccgggagagttgagaattatggctgcaggaaaatttgcaagccttcccagaaacatgccggtgaatcaccagttccccctggcctcatccatggaccttctgagcagcaggtcccctctcgctgagcatcgcccagatgcctatcaagatgtgtctatacatggcacccttccacggaagaaaaaaggtcctcctcccataaggtcctgtgatgacttcagtcacatgggcaccctcccccactccaaatccccacggcagaactcgcctgtgacccaggatggcatccaggagagcccatggcaggaccggcacggcgaaaccttcaccttcagggatccacatcttctggacccaactgtggaatatgtgaagttctccaaggagaggcacatcatggacaggacccccgagaaactgaagaaggagctggaggaggagctgctcctgagcagcgaggacctgcgcagccatgcctggtaccacggccgcatcccccgacaggtgtctgaaaaccttgtgcagcgagatggtgacttcctagttcgtgactctctgtccagccctgggaactttgtcctgacctgtcagtggaagaacctcgctcagcacttcaaaatcaaccggacagttctgcgactcagcgaggcctacagccgcgtgcagtaccagttcgagatggagagcttcgactccatccccggcctggtgcgctgctacgtgggcaaccgccggcccatctcccagcagagtggcgccatcatcttccagcccatcaacaggacggtgcctctgcggtgcctggaggagcattatggcacctccccaggccaggcccgggagggcagcctcaccaagggaaggccggatgtggccaagaggctgagcctcaccatgggtggcgtccaggcccgagagcagaatttgcccaggggaaacctcctcagaaacaaagaaaagagtggtagccagcccgcctgcctggatcacatgcaggacagaagagccttgtccctcaaagcccaccagtcagagagctacctgccgattggctgcaagctgccacctcagtcctcgggtgtggacacaagcccctgcccaaactcacctgtgttcaggacgggaagcgagcctgccctgagcccagcagtggttcggagggtctcctcagacgccagggctggggaggcgctgaggggatcagacagtcaactgtgccctaagcccccgcctaagccctgcaaggtgccgttcctcaaggttccctcgtctccctctgcctggctcaactcagaggccaactactgtgaactgaacccagcgtttgccacaggctgcggcaggggagcaaagctaccctcatgtgcccagggaagccacacagaactgctcacagccaagcagaatgaggcgccaggtccccggaactctggcgtcaactacttgatccttgatgatgatgacagggaaagaccttgggaacctgcggcagctcagatggagaaggggcagtgggacaagggcgagtttgtgacgcccctcctggagactgtctcctccttcaggcccaacgagtttgagtcaaagttccttccccctgagaataagcccctggaaacagcaatgttgaaacgtgcaaaagaactgttcaccaacaacgaccccaaggtcatcgcccagcacgtactgagcatggactgcagggttgctaggatacttggagtctctgaagagatgaggaggaacatgggggtgagctcaggcctggaactcattaccttgcctcacggacaccagctgcgcctggacataattgaaagacacaacacaatggccatcggcattgcagtggacattctgggatgcacgggcactttggaggaccgagcggccactctgagtaagatcatccaggtggcggtggaactgaaggattccatgggggacctctattccttctcagctctcatgaaagccctggaaatgccacagatcacaaggttagaaaagacgtggactgctctgcggcaccagtacacccaaactgccattctctatgagaaacagctgaagcccttcagcaaactcctgcatgaaggcagagagtccacatgtgttcccccaaacaatgtatcagtcccactgctgatgccgcttgtgacgttaatggagcgccaggctgtgacttttgaaggaaccgacatgtgggaaaaaaacgaccagagctgtgaaatcatgctgaaccatttggcaacagcgcgattcatggccgaggctgcagacagctaccggatgaatgctgagaggatcctggcaggttttcaaccagatgaagaaatgaatgaaatctgcaagactgaatttcaaatgcgattgctatggggcagcaaaggtgcacaagtcaatcagacagagagatatgagaaattcaaccagattttaactgccctctcgcgtaaattggaacctcctcctgtaaagcaggcagagctttgataactctccagagaacctttagaatatcttttcaagtttccccagcttcatctttgggaaagcttactgtttttgataaagtaataatgtgcaaatctgacaatatacaagcttttagtatccacaggatattaaacgtgtaaattgcacagagcacacttatttatgaattgtctaaagttactactgattttaaaatgaataatttattattaaggtaactactgctaatgttgatcagcaaatttaagagaagacctagctatgttggctggttgctttctattatcatggtatttgaccattttagttttaattccatgtcagataagtgtaaatagaagagtttaaaagcatgaaacatttcagaaggtatcagttatatgatattctttaaacaaatatgaaaaatgtaaatactcatgaatgaaaatacatctttttgtgaaaaaaaaaaaaaaaaaaa

SEQ ID NO: 29408 - DNA, 6518 bp, Homo Sapiens
ggcacgcagaggccgtcacgtgggtcgccgaggctcgcaagtgcgcgtggccgtggcggctggtgtggggttgagtcagttgtgggacccggagctgctgacccagcgggtggcccaccgaaccggtgacacagcggcaggcgttagggctcgggagccgcgagcctggcctcgtcctagagctcggccgagccgtcgccgccgtcgtcccccgcccccagtcagcaaaccgccgccgcgggcgcgcccccgctctgcgctgtctctccgatggcgtccgcctcaggggccatggcgaagcacgagcagatcctggtcctcgatccgcccacagacctcaaattcaaaggccccttcacagatgtagtcactacaaatcttaaattgcgaaatccatcggatagaaaagtgtgtttcaaagtgaagactacagcacctcgccggtactgtgtgaggcccaacagtggaattattgacccagggtcaactgtgactgtttcagtaatgctacagccctttgactatgatccgaatgaaaagagtaaacacaagtttatggtacagacaatttttgctccaccaaacacttcagatatggaagctgtgtggaaagaggcaaaacctgatgaattaatggattccaaattgagatgcgtatttgaaatgcccaatgaaaatgataaattgggtataactccaccagggaatgctccgactgtcacttcaatgagcagcatcaacaacacagttgcaacacctgccagttatcacacgaaggatgaccccaggggactcagtgtgttgaaacaggagaaacagaagaatgatatggaacctagcaaagctgttccactgaatgcatctaagcaagatggacctatgccaaaaccacacagtgtttcacttaatgataccgaaacaaggaaactaatggaagagtgtaaaagacttcagggagaaatgatgaagctatcagaagaaaatcggcacctgagagatgaaggtttaaggctcagaaaggtagcacattcggataaacctggatcaacctcaactgcatccttcagagataatgtcaccagtcctcttccttcacttcttgttgtaattgcagccattttcattggattctttctagggaaattcatcttgtagagtgaagcatgcagagtgctgtttctttttttttttttctcttgaccagaaaaagatttgtttacctaccatttcattggtagtatggcccacggtgaccatttttttgtgtgtacagcgtcatataggctttgcctttaatgatctcttacggttagaaaacacaataaaaacaaactgttcggctactggacaggttgtatattaccagatcatcactagcagatgtcagttgcacattgagtcctttatgaaattcataaataaagaattgttctttctttgtggttttaataagagttcaagaattgttcagagtcttgtaaatgttattttaataatccctttaaattttatctgttgctgttacctcttgaaatatgatttatttagattgctaatcccactcattcaggaaatgccaagaggtattccttggggaaatggtgcctcttacagtgtaaatttttcctcctttacctttgctaatatcatggcagaatttttcttatcccttgtgaggcagttgttgactgagtttttcatccttacaatcctgtcccatggtatttaacataaaaaaaaataaaactgttaacagattcttgctcgatagcttgtttgtgtctgtcgtgttattagagggaactccactatatatggtcacttgaaattatgatgcaaaggtttctcttgcattgaaaccctcttggatattacagtatttttaattgaaagtcctaattctgttaaggaaaggagttgattaaattttaaggtaccactggtattttgggagattataatcagtttgttttcaagataatagaaaataaggtccatgagaatagaagttatgtgatttcagtgagttgatgtgtacagcatggctgtgctccatctgatttaccccattcttaagttctgagagtatgttctcaaggaagatttaactctctttggttttaaattactttttaaccagcctaataaataagtcttactacttttcataatatttcataatagttaaaagtaggtgtttttttcgtgctcaatttggcactcaaaataatgttcattatggaagtttggtaatactgagcaagcctgtggaattttctttatgaaaaatgattttagcctttgcaaatgttaaccatgtgaaacacattttcagtataagtatgcgttacagggtttgatactttcctgcacttaggtttgtcctattcttcatttattcatactaggatagaaaattttggaatcagaaaatagatccagtgtttagctacatacaatctagtacaagtgaatttttattcttaaacataggtgtgttggctctttttttaaaagatgcgctctacctgaaaaggaaattggattttagaactggatgtggtgcagtgaagtattttaggcccaggtctgtgtacacattttatagaagaatgaagtactctgaagtattttggttgccttttcatttcaactgtgttttgaatttgtcagatcacacatatattgtgttattgggcgctgtggtatcttttataaaacctcttgcttgtgtgcaaaagttcctaaaaggaaacacaagtaatgcctatccattactagcatgctatgctgcatgctttactgccattgctgtatgctttactgtctttgtaaaaatccccctctccccttttctggtaactggaaaagcatgctaaaaatagtcttatattttcaccccataaatgcagaatcagtaattccttggcttaaagctcttatataatcaatattattggtggtaaataccaagtttggtatctcatagctatctttttttaaagaaattaagttcttgaaaatttagccaaatcccgttttatgggaatgctctttagaattcattttgttcagcccctttgttctatggttgagaaatctgaggccttacgaaggttaagagaactttccccgtgtctcacaggtaggtagaggcagagctggaactagatatctggtctgttgactctagctcagtgtcttctggtaactgttgaaaattgtcttagtttgagagatggctgaaataatgaacataaaatgctatttataataacaagtatatgtgaaatttcttattgtaagactactaccggcttactgttgaatagtttggttatagtgtttaggctagaaatgcctcccacattggtaataaacattacaaaatacaatgtatttttaggtaggcattttataaaatgcattatgccatggttgcttttgagatagattgtagtctgggtagcatctttaaaatgtatgtgggcttaactgttgttcatatcaggagatgctctgattgtataggtgagactctgtttctgttatttttaattgctgtatgaaatgtgatcagattattttactaccaacagttatagtttgaaagtccaactgtattaattgactgataatatgataatatagagattaaattgtttgtcttcattccttatatgtttagaagtttttgctttgtctgcctgcttacttgtatatgtaagcatgagggaaatacactgttgctaatactgaaattacaatcaagtaactaaggccttgagttcatatgtgacactgaatgcactagcttccttcgttctataactaatgtaccttaacttcccccattcttatatttacaagaagctaagtcattatgttctgagtgtgtggtatgttcccttaaaaaaaaatgacacttggaagaaaaatgtatgaaattcagaaattccgatcaaagaaaagtaattctttctttttttttttgagacagagtcttgctttgttgcccaggctggagggcagtggtgtgatctcacctcactgcagcttccgcctcctgggttcaagtgattctcatggctcagccgcctgagtagctgggattacaggtgtgagccaacaagcccggctaatttttgtatttttagtagagacaaggtttcaccatgttggtcaggctgggctcaaactcctgaatccgcctgcctcggcctcccaaagtgctgggattacaggtgtgagctgccgcacccagccaagaaaaataatactcttaaatacttagatgttcacctaaagttgatattatttggtatgggaattacttttgaactgtaatctttcagattacaccactttgaaaacaagttttaacagtagggtaaaaatatagtttttgagggtattcccaacttgtgatcttctaccactttagagacattcaagtaatagttttcttagagctttgcacattcctattcactgagattttaaaaatttcacctttattcgagggaaggatcaatgcttattaccatttggaaaaacgaagatcagaaggtaaatgatctttattttctagctttaaagggaaattaaaccattcatgaataaactttaaaaatgtgaagtgtccttttccttttcacaatacaaaaaaaatttcaacagattgtgtggtttgtgcatttatatcctgttaagcattaatagctaatcactgggacttgaattctgatggcagatagtctcttgcttagtgagatggagttaactattttttagtaggaagtgagaacagctgattttcatgccacgtttcatagccccacttttggtagactaccaccacgcttcttcgcgtaagcagtggcatcttgggaatgaatgcccagccgctcgtgggttggtgcaaagaagtataaacatatatcactaaggaaaaagaaagtttgtcttgcccttctgacacagtgtgtgcacttcaggcaatttttggaaaatataaaaaattccaaattctgcctttcagcagcatcaattgctaggaacatttcattcatttccctgtaatattaatgttctttaagcataatcactaattataagttgtatcctatttttttccagcttaatttctgtggtttattgaaaaccaagtataaatgtgactaaaagcattttgctttgtttttatagttaactttcttaaggttatggacattttataatgtaacatttgattggcctggcctcttgacaattcccttctagttatgcatatcctcctgttgccacatttcttgttttaaaactcagtttcttgttttccagttgttgctatgtataacacccatcttgaaagagagtatataggaagttattcagataacttttgtagtagtgatattcaactatagcagtaccttaactcatgatgagcttaggaacataaaagataattgttgcttgaatagcacccccagagatactgacctaattggtctggggtggagatctggcatggtagtttttttcaagctccaatcatcggccagacagttgctttatgtaggtttttaaatgccaaaggcagatatgaagtagatttaattaagacttgacttcagcaatacaggggaacttaaaatacttatttttctttaaactgcaggagtcactgttaggtattgcttaaaaaaaattgcataaaagctttgcttgtcaagttaggattgctggaataccactaaagatttttgacttgtgaataaatgagctgtcatcgcaaaaaggcgatttgagaaatgtgggcttcagtattaattgccattttgctgacacccagtgtacctacctacctgagaaatttattttgtccatcatgtatttctcaaagcaaaaggtggttttcaagtataatgtcgttttcaacatgcttattacttagttttacgtcagctcatttcatcatcattgataacttgtgaaatacttatctccatcctatggaataggggagacgggtttagacaggttcaattagctcaagtctacacagctgaagtagcagagaaagtgggatctagatggtctgatcctagtgatctaccatatgaaggacatagtttgtgtcctggtccaagtcaaatattgactcctcacaaacagtaagtatggcaattttgtgatgcctttgattccactttacatggagtactattatttgtgaaatgtctttaagatttttggtcttaaatttttgaagactgctttccccctttatctcccagaaaattgagaagaagtaaactcctgcccactaacaatctcagtccgtgaacaaaaccaacatgaacattcctaaacaagagtgtgtgttactctaagaagaaggctatagaatttatggaaatggcttatgtaacctacaagactggagaacagaatgtgactggccttttctaatggtcctttaagatttaatgattaaagcaagagttttttat

SEQ ID NO: 29409 - DNA, 3564 bp, Homo Sapiens
ggatgctgcggtgagcgcggccgggacgccgcgtcgggctctcggccgcccagcggcgccgcaggggaagccaggccggcagccgcgcgctccccagccggccaccaatcccgccctccccggctcctccggacctcctcggcaggcggcggcggggcctgcctgtgcgctctgcgcccgcccgcgcctaccctccatggcgtttatccggaagaagcagcaggagcagcagctgcagctctactccaaggagagattttccttgctgctgcttaacttggaggagtactactttgaacagcatagagccaatcacattttgcacaagggcagtcaccatgaaaggaaaatcagaggctccttaaaaatatgttcaaaatcggtgatttttgaaccagattcaatatcccagcccatcatcaagattcctttgagagactgtataaaaataggaaagcatggagaaaatggagccaatagacacttcacaaaggcaaaatctgggggtatttcactcattttcagtcaggtatatttcattaaagaacataatgttgttgcaccatataaaatagaaaggggcaaaatggaatatgtttttgaattggatgttcccgggaaagtggaagatgttgtggagacgttgcttcagcttcacagagcatcctgccttgacaaattgggtgaccaaaccgccatgataacagctattttgcagtctcgtttagctagaacatcatttgacaaaaacaggttccaaaacatttctgaaaagctgcacatggaatgcaaagcagaaatggtgacgcctctggtgactaatcctggacacgtgtgcatcacggacacaaacctgtattttcagcccctcaacggctacccgaaacctgtggtccagataacactccaagatgtccgccgcatctacaaaaggaggcacggcctcatgcctctgggcttggaagtattttgcacagaagatgatctgtgttccgacatctacctaaagttctatgaacctcaagatagagatgatctctatttttacattgccacatacctagagcaccatgtggcggagcacactgctgagagctacatgctgcagtggcagcgtggacacctttccaactatcagtacctccttcacctcaacaacctggccgaccgcagctgcaacgacctctcccagtaccctgtgtttccatggataatacatgattattccagctcagaactagatttgtcaaatccaggaaccttccgggatctcagtaagccagtaggggccctaaataaggaacggctggagagactactgacacgctaccaggaaatgcctgaaccaaagttcatgtatgggagtcactactcttccccgggttatgtacttttttatcttgttaggattgcaccagagtatatgctgtgcctgcagaatggaagatttgataatgcagatagaatgttcaacagtattgcagaaacttggaaaaactgtctggatggtgcaacggattttaaagagttaattccagaattctatggtgatgatgtgagctttctagtcaatagcctgaagttggatttgggaaagagacaaggaggacagatggttgacgatgtggagcttcccccttgggcttccagtcccgaggactttctccagaagagcaaagatgcattggaaagcaattatgtgtctgaacaccttcacgagtggattgatctaatatttggctacaaacaaaaagggagtgatgcagttggggcccataatgtatttcatcccctgacctatgaaggaggtgtagacttgaacagcatccaggatcctgatgagaaggtagccatgcttacgcaaatcttggaatttgggcagacaccaaaacaactatttgtgacaccacatcctcgaaggatcaccccaaagtttaaaagtttgtcccagacctccagttataatgcttctatggcagattccccaggtgaagagtcttttgaagacctgaccgaagaaagcaaaacactggcctggaataacatcaccaaactgcagttacacgagcactataaaatccacaaagaagcagttactggaatcacggtctctcgcaatggatcttcagtattcacaacatcccaagattccaccttgaagatgttttctaaagaatcaaaaatgctacaaagaagtatatcattttcaaatatggctttatcgtcttgtttacttttaccaggagatgccactgtcataacttcttcatgggataataatgtctatttttattccatagcatttggaagacgccaggacacgttaatgggacatgatgatgctgttagtaagatctgttggcatgacaacaggctatattctgcatcgtgggactctacagtgaaggtgtggtctggtgttcctgcagagatgccaggcaccaaaagacaccactttgacttgctggccgagctggaacatgatgtcagtgtagatacaatcagtttaaatgctgcaagcacactgttagtttccggcaccaaagaaggcacagtgaatatttgggacctcacaacggccaccttaatgcaccagattccatgccattcagggattgtatgtgacactgcttttagcccagatagtcgccatgtcctcagcacaggaacagatggctgtcttaatgtcattgatgtgcagacaggaatgctcatctcctccatgacatcagatgagccccagaggtgctttgtctgggatggaaattccgttttatctggcagtcagtctggtgaactgctcgtttgggacctccttggagcaaaaatcagtgagagaatacagggccacacaggtgctgtgacatgtatatggatgaatgaacagtgtagcagtatcatcacaggaggggaagacagacaaattatattctggaaattgcagtattaagtgccttttcctctcctgaatattaaattgaactctatttaatgcatttttaaaccaaacttttaaacggactggtgaatgtgcaatgttagtaattagaagttttaccacatggaaaatttgtggttttaaactttctaaatcatggtgacttcattgaaagccattagttgctattctcttagggcagataaaatgcggctgtgttaggaaaaacatgttacactgtaaggcagatgatcgtccccgtatgatgattgtcagaagacaggactaagtagcagagaatagctaagagataaattgggctggggaaacttgtcagaaagcactgaacaattaagaaattttccaagaaaatgtgcagtattctctgctacttctgaatctgttttgtcttcctaatctatcacaattgccacccatcgggttttgggtgtgtgttttcatagcgtggttactttctataatgctgtacccagattctaagaacctggagaaggattagcagttcttagtaagtttactgtgtataggaacggtttgtatttcattacagctattcatcttttctacattaaaaatatttttctctaaagaaaaaaaaaaaaaaa

SEQ ID NO: 29410 - DNA, 4860 bp, Homo Sapiens
aacttgggggacccagcgaaatggaagaagttaggtgtccagagcacgggactttctgctttcttaagaccggcgtccgcgatggcccgaataaaggaaagagcttctacgtgtgccgggcagacacgtgcagcttcgtgcgggccaccgacattcctgtttcccattgcttattgcatgaggactttgtggtagagcttcagggtttgcttctgccacaggacaagaaagaatacagattgttcttccgatgcattagaagtaaggcagaggggaaacgctggtgtggaagtattccatggcaggatcctgattccaaagaacattctgtatccaataagtctcagcatgcatctgagacatttcatcattcttccaactggctgagaaatccattcaaggtacttgacaagaatcaagaaccagctctctggaaacagctcatcaaaggtgaaggtgaggaaaagaaggctgataagaagcaaagagaaaagggagatcagcttttcgatcaaaagaaagaacagaagcctgaaatgatggagaaagacctctcatctggcctggtaccaaagaaaaaacaatctgtagttcaagagaagaagcaagaagagggagcagagattcagtgtgaggcagagactggaggcacacacaaaagagacttttctgaaattaaatctcaacagtgccaaggtaatgagcttacaagaccatctgcatcttctcaggagaaatcaagtggtaagagtcaagatgtccaaagagaatcagaacctctgagagaaaaggttacccagcttttgcctcaaaatgttcacagtcacaactcaataagcaagccccagaaagggggacccctcaacaaggagtacacgaactgggaggctaaagaaacaaaggcaaaggatggccctagcatacaggccacccagaaaagcctgcctcaggggcatttccaagagcggccggagacccacagtgtgcctgctcctggaggaccagcggctcaggctgcaccagcagcaccagggctttccctgggtgagggccgtgaagctgccacaagcagtgacgacgaggaggaagatgatgttgtttttgtttcctctaagcctgggagccccctactctttgactcgactctggacttagagacgaaggaaaacctccaattccctgatcgaagtgtgcaaagaaaggtgtctcctgcctcaggtgtttccaagaaggtagaaccctcagacccagtagcccggcgtgtctaccttacaacacaactgaaacaaaagaagagcacactggcatcagtgaacatccaggctcttccagacaagggtcagaagttgatcaaacaaatccaggagctggaggaagtactcagtggtcttaccctttccccagagcaaggaactaatgagaagagtaacagtcaagtaccacagcagagtcacttcaccaaaactaccactggccctccccacctggtgcctccccaaccccttcctcgtcgtggtacccaacctgtgggttctctagaactaaagtctgcctgccaggtgactgctggaggatccagtcagtgctatcgaggccatacaaaccaagatcacgttcatgcagtgtggaaaatcacaagtgaagccatcggtcaactgcatcgctcacttgagtcatgtcctggtgagacggttgtggcagaagatcccgccgggctgaaggtccctttgctactacaccagaagcaggcattggcttggttactatggcgagaaagtcagaagccacaaggaggaattctggcagatgatatgggcttaggaaaaaccctgacaatgattgcgctcatcctgacccagaagaatcaagagaaaaaggaagaaaaggagaaaagcacagctttgacgtggctctccaaagatgactcttgtgactttacttcccatggaacactaatcatctgtcctgcctccctgatccatcattggaaaaatgaggtggagaaacgggtgaacagcaacaaactaagagtctatctctaccatgggccaaaccgggattcacgtgccagagtcctctctacatatgacatcgtgatcactacctatagcctcgtggccaaggagattcccacaaacaagcaagaggcagagatcccaggtgcaaacctcaatgtggagggcacctcaacacctttgcttcgaatagcctgggctcgaatcatattggatgaagctcacaatgttaagaatccccgagtgcagacttccatagctgtgtgtaagctacaagcctgtgcccgttgggctgtcactggaacccccattcaaaacaacttattggatatgtattcgctgctgaagtttctccgttgctctccatttgatgagttcaatctgtggaggagtcaggttgacaatggctcaaagaaaggaggagaacggttaagtattttaaccaagagccttttgctgaggagaacaaaagaccagctggactctactggcagacctttggtgatactgccccagcgtaaatttcagttgcaccatttaaagctttctgaagatgaagagactgtttacaatgtgttttttgcaagatcaaggtcagctctgcaatcctatctaaaaagacatgaaagtagaggcaaccaatctggaagaagccctaataatccattcagtagagtggcactggagtttgggtctgaggagcctagacactcggaggcagcagactcaccgagatccagcaccgtccacatactgtcccagttgctgagactccgccagtgttgctgtcatctttctttactgaagtcggccctggatccaatggaactgaagggtgaaggtcttgtcctttccctggaagaacagctcagtgctttgaccttgtcagaactccgtgactcagagccatcttccactgtttcccttaacggcaccttcttcaagatggagctttttgaaggcatgcgagagagcaccaagatttcatctctgttggcagaattggaggcaattcaaagaaattcagcatcccaaaagagtgtcattgtctctcagtggaccaacatgctgaaagttgtagcattgcacctgaagaagcatggactgacttatgccaccatcgatggctctgtcaatcccaagcagagaatggacttggtagaggcatttaaccactccagaggccctcaggtaatgctaatctctctcttggccggaggtgttggtctaaacctgactggaggaaatcacctctttcttttggacatgcactggaatccatcacttgaagatcaagcttgtgaccgaatttaccgagtagggcagcagaaagatgttgtcatacacagatttgtttgtgagggaacagtagaagaaaagatcttacagctccaagaaaaaaagaaagatttggccaaacaagttctatcagggtctggagaatctgtcaccaagctcaccttggctgacctcagagtcctttttggcatctaacctcctgtggataagggctcagaatagcaccattgctggtttgtattaggatctgggaataacaacctaaccatgagccttgaactctgttctttgcatttcaatttcaccgtcaagcctttcaccttcctcaaaatgaggcataatcttatccccagaattgaggaggggttgtgttaaccaattagttaaccaattatgttaataatttatttaatgagtggtatggaaaccaattgatttttttagataaaagaatatgttttagagttggatgattttggaaaacaactctggcagaattgtatataagcttcagtaaagttcaaaaagcgggccaggtgtggtggctcatgcctgtaatcccgacactttgggaggccaaggcaggaggatggcttgaagccagtagttcaagaccagcctgggcaacatagtaagaccccatctctatgaagaataaaaaaatgagctaggcgtggtagtgcacacctgtagtcctagctacttgggaggctgaggcaggaggatcccttgagtccaggaggttgaggctgcagtgagctgtgattgtgccactgttttccagcctgggcaatacagtgagaccctgtctcaaaaaaaggaaaaaaaagctcaaaaagttctgtgttgcctttctcttcttagctgatgatgggagaaccagttactaccttctctaacacaggctccatcctatctcttcatctcttcttgccagtgatgttgcacctgtaaccatctttttatgggtggagcagagagtcaatccctgcagccaccctgcagccagccatctctgcagttctctcagtgcaggcagttcttcctctcaggctgaagatcaaggagatgctttgtacatgaacagatgctgagtatctgttatcattgtattgtttagtgtcagtgtatcatttagtatttgtatcactgtaccatttagtgttgtatatcactcagtcatttaatattggttatcaccatacagtttaatatttgtatcatttggttcattgtatcgtttagtatttctattataacatttctatttgtagtatttgtataatatttgtgtcatttttaatagtatttgtatttttacaaatttgcagtatttgtagcatttagtatcattgtttcatttagtatttggtacaatctaataaatactaatccagtccaatactaatccaatccaatactaataatactattggtacaatccaatactaataatactattggtacaatccaatactaataatactaacagtagtattgatacaatctaataaataatgtgtttgacagtgtagcagaaaaaaaa

SEQ ID NO: 29411 - DNA, 3360 bp, Homo Sapiens
cattttacttatggaaaacagtgtggcatattctgctgagcttcgccctggaagaagcctcttttatacatctcttcagggaagagagaagcaatgggcatgttagtatacaatgatcacagccacgcaggcctgcaagctgccttttggacaggctgttgactgccgttccaattagctgattggagaatgtggaatgcagagtgataatgctgcatatctgctatcaggcagcagcaaaggtttttgtcttgggaaggcaagctttccctgcaatattatctcagcagctccctagctgcttaccctgaaaacgagggatccaaacggagggtgttgcactctgctaacgctggtcctgtgcgtggctgtggcatatgagcggcaggtctgaaaaagcaggtgtgtgctgggacgggcactggactggaacgcaggcggacgctctcgggtttacctgcttcctgttaacagattgtgggctcccagggcatatgtctgcacgctgaggccgaggcggagaaggggcttcctgagcgtcccagtacactgacagagacacttggattggacttaatcttaaacctctggagttcaagaccttttaaaaagggctaaataaacaatctctacatgtaaaaggccactgactcctacttcctctgtatagagcaactgttgaactcagctgcctgtaggaaaactgaagactttaataacaaactctccaaggtgaaaatgaacacagggcgtgattctcagtcaccagactcacaaaaggttttagaagcgttcgaccaaacctacaagataaaagatcaccaactcagagccagataacagtgaatggaaactcaggaggtgccgtgagtcccatgagttactatcagaggccgttttccccctcggcatattctctcccagcctcactcaactccagcattgtcatgcagcacggcacatccctcgattccacagacacatatccccagcatgcgcagtctctggatggcaccaccagcagctctatccccctgtaccgatcctcagaggaagagaagagagtgacagtcatcaaagccccgcattacccagggatcgggcccgtggatgaatccggaatccccacagcaattagaacgacagtcgaccggcccaaggactggtacaagacgatgtttaagcaaattcacatggtgcacaagccggatgatgacacagacatgtataatactccttatacatacaatgcaggtctgtacaacccaccctacagtgctcagtcacaccctgctgcaaagacccaaacctacagacctctttccaaaagccactccgacaacagccccaatgcctttaaggatgcgtcctccccagtgcctcccccacatgttccacctccagtcccgccgcttcgaccaagagatcggtcttcaacagaaaagcatgactgggatcctccagacagaaaagtggacacaagaaaatttcggtctgagccaaggagtatttttgaatatgaacctggcaagtcatcaattcttcagcatgaaagaccaactgatcgcataaatccagatgacatagatttagaaaatgagccctggtataaattcttttcagaactggagtttggacgcccgcctcctaaaaagcctctggactatgttcaagatcattcttctggtgttttcaatgaggcctccttgtatcagtcctctatagacagaagcctggaaagacccatgagttctgcaagcatggccagtgacttcaggaagcggaggaagagcgagcctgcagtgggtccaccacggggcttgggagatcaaagtgcgagcaggactagcccaggccgagtggacctcccaggatcaagcaccactcttacaaagtctttcactagctcttctccttcttccccatcaagagcaaaagaccgtgagtcccctagaagttactcatccactttgactgacatggggagaagtgcaccaagggaaagaagaggaactccagaaaaagagaaattgcctgcaaaagctgtttatgattttaaggctcagacatctaaggagttgtcatttaagaaaggagatactgtctacatcctcaggaaaattgatcaaaattggtatgagggagaacaccacgggagagtgggcatcttcccgatctcatacgtagagaaactcacacctcctgagaaagcacagcctgcaagaccacctccgccagcccagcccggagaaatcggagaagctatagccaaatacaacttcaacgcagacacaaatgtggagctgtcactgagaaagggagatagagttattcttcttaaaagagttgatcaaaactggtatgaaggtaaaatcccaggaaccaacagacaaggcatcttccctgtttcctatgtggaggtcgtcaagaagaacacaaaaggtgctgaggactaccctgaccctccaataccccacagctattctagtgataggattcacagcttgagctcaaataagccacagcgtcctgtgtttactcatgaaaatattcaaggtgggggggaaccgtttcaggctctgtataactatactcccaggaatgaagatgagctggagctcagagaaagtgatgtcattgatgtcatggaaaagtgtgatgacggctggtttgtggggacctcaagaagaaccaaattctttggtactttccccggaaactacgtcaagaggctgtgaattgcgctccctccttctgtagaggccgcctgccagccatgcacctgcgtcaacgcgcctgaaacaccccgcgggcctcccgttgtcatgccttacggtttccaatgcgccgtcaccatctccacctgccaccaaaccaccagcagagtagccgccgctgctgtgagcctggggacgacatggcaggctggtccccctccgtgaaagtgtggattcctacttcctgctctaagctttgacacgtcaaaatgtgggatcagaaagaaaaaaatcatgatatttaaaaatggtcaaatatttgaggcaaaaaaaaaaaaaaaaagtgtctccaggaggctgtccagcctcgtggctccatttcaacatctccccccaggcgatgttctcccccaagacgaccagaaaattgtttattggggaatgctgtggtttgcattttcatattcttcgcttggcagtgtgtattcttttcacaagtttgcctagtgtcttggtttacacaatatgacaactgtaactgtactttagctattgtttgcctgcacatacatgttgtaatatgcacagtgattacaacctttaaagcaagaggaggcgagttaatttggatgagtgtgatttt

SEQ ID NO: 29412 - DNA, 8019 bp, Homo Sapiens
gcggcccggtgcgggtgtcggggagaccgggctctctgcccggcgcggcgcggcgcggctcggcccacgagcgaccaccgacatggagtgggctcgggcggccaagtagccgcttctccggagcccggtgccagtgccgcccgcagcccgccttccacccccggccgcgccgccggtcaggccctagggtgaagccgggaggaaaatgaagagttttcaccggaatccgttgaaaataggactgactgcaaagccttaaagaaagaaggacctcgggaggagaaacgaaaagccgcctccgggcaagacttggcgtgctccgagccgaggggctgcttcagggacctcgccccctccctttcccgctggagaaattgccgctgatgcattatccaagtggtggttgggaggatttgcagcaacatttttggttttccctcccccttctatgcattctgtttttttcctcccttttctgtttttcttcttcccgggaagtgaattgctgatgcaaatcggactttattcattaatgatgcaaccggattcgtttcaggattacgttgcacgagttgaattttgaatgaaggagaagagtttttttttttttttttaaagaagtgttgactctctagttcgttgtacttttaattattattttatttaaatatacgacttaattgtattcttttaaaaatgcattaagtatatattttatggtaatttaccctcaaaatatatgtatatgggtgaaattgaagacgcttcagttaagtgaggttactggtgtgttggatgtttaattcagcaccagcattgcatgacagttgtttgaataacaagtggtttatttttaaaaccataccttttaaaatttaggttcagataatagtaaaagtcatcataataatttaaaggaaaaccagcagaaatcgaagcaaacatgtctggagaagtgcgtttgaggcagttggagcagtttattttggacgggcccgctcagaccaatgggcagtgcttcagtgtggagacattactggatatactcatctgcctttatgatgaatgcaataattctccattgagaagagagaagaacattctcgaatacctagaatgggctaaaccatttacttctaaagtgaaacaaatgcgattacatagagaagactttgaaatattaaaggtgattggtcgaggagcttttggggaggttgctgtagtaaaactaaaaaatgcagataaagtgtttgccatgaaaatattgaataaatgggaaatgctgaaaagagctgagacagcatgttttcgtgaagaaagggatgtattagtgaatggagacaataaatggattacaaccttgcactatgctttccaggatgacaataacttatacctggttatggattattatgttggtggggatttgcttactctactcagcaaatttgaagatagattgcctgaagatatggctagattttacttggctgagatggtgatagcaattgactcagttcatcagctacattatgtacacagagacattaaacctgacaatatactgatggatatgaatggacatattcggttagcagattttggttcttgtctgaagctgatggaagatggaacggttcagtcctcagtggctgtaggaactccagattatatctctcctgaaatccttcaagccatggaagatggaaaagggagatatggacctgaatgtgactggtggtctttgggggtctgtatgtatgaaatgctttacggagaaacaccattttatgcagaatcgctggtggagacatacggaaaaatcatgaaccacaaagagaggtttcagtttccagcccaagtgactgatgtgtctgaaaatgctaaggatcttattcgaaggctcatttgtagcagagaacatcgacttggtcaaaatggaatagaagactttaagaaacacccatttttcagtggaattgattgggataatattcggaactgtgaagcaccttatattccagaagttagtagcccaacagatacatcgaattttgatgtagatgatgattgtttaaaaaattctgaaacgatgcccccaccaacacatactgcattttctggccaccatctgccatttgttggttttacatatactagtagctgtgtactttctgatcggagctgtttaagagttacggctggtcccacctcactggatcttgatgttaatgttcagaggactctagacaacaacttagcaactgaagcttatgaaagaagaattaagcgccttgagcaagaaaaacttgaactcagtagaaaacttcaagagtcaacacagactgtccaagctctgcagtattcaactgttgatggtccactaacagcaagcaaagatttagaaataaaaaacttaaaagaagaaattgaaaaactaagaaaacaagtaacagaatcaagtcatttggaacagcaacttgaagaagctaatgctgtgaggcaagaactagatgatgcttttagacaaatcaaggcttatgaaaaacaaatcaaaacgttacaacaagaaagagaagatctaaataaggaactagtccaggctagtgagcgattaaaaaaccaatccaaagagctgaaagacgcacactgtcagaggaaactggccatgcaggaattcatggagatcaatgagcggctaacagaattgcacacccaaaaacagaaacttgctcgccatgtccgagataaggaagaagaggtggacctggtgatgcaaaaagttgaaagcttaaggcaagaactgcgcagaacagaaagagccaaaaaagagctggaagttcatacagaagctctagctgctgaagcatctaaagacaggaagctacgtgaacagagtgagcactattctaagcaactggaaaatgaattggagggactgaagcaaaaacaaattagttactcaccaggagtatgcagcatagaacatcagcaagagataaccaaactaaagactgatttggaaaagaaaagtatcttttatgaagaagaattatctaaaagagaaggaatacatgcaaatgaaataaaaaatcttaagaaagaactgcatgattcagaaggtcagcaacttgctctcaacaaagaaattatgattttaaaagacaaattggaaaaaaccagaagagaaagtcaaagtgaaagggaggaatttgaaagtgagttcaaacaacaatatgaacgagaaaaagtgttgttaactgaagaaaataaaaagctgacgagtgaacttgataagcttactactttgtatgagaacttaagtatacacaaccagcagttagaagaagaggttaaagatctagcagacaagaaagaatcagttgcacattgggaagcccaaatcacagaaataattcagtgggtcagcgatgaaaaggatgcacgagggtatcttcaggccttagcttctaaaatgactgaagaattggaggcattaagaaattccagcttgggtacacgagcaacagatatgccctggaaaatgcgtcgttttgcgaaactggatatgtcagctagactggagttgcagtcggctctggatgcagaaataagagccaaacaggccatccaagaagagttgaataaagttaaagcatctaatatcataacagaatgtaaactaaaagattcagagaagaagaacttggaactactctcagaaatcgaacagctgataaaggacactgaagagcttagatctgaaaagggtatagagcaccaagactcacagcattctttcttggcatttttgaatacgcctaccgatgctctggatcaatttgaaactgtagactccactccactttcagttcacacaccaaccttaaggaaaaaaggatgtcctggttcaactggctttccacctaagcgcaagactcaccagttttttgtaaaatcttttactactcctaccaagtgtcatcagtgtacctccttgatggtgggtttaataagacagggctgttcatgtgaagtgtgtggattctcatgccatataacttgtgtaaacaaagctccaaccacttgtccagttcctcctgaacagacaaaaggtcccctgggtatagatcctcagaaaggaataggaacagcatatgaaggtcatgtcaggattcctaagccagctggagtgaagaaagggtggcagagagcactggctatagtgtgtgacttcaaactctttctgtacgatattgctgaaggaaaagcatctcagcccagtgttgtcattagtcaagtgattgacatgagggatgaagaattttctgtgagttcagtcttggcttctgatgttatccatgcaagtcggaaagatataccctgtatatttagggtcacagcttcccagctctcagcatctaataacaaatgttcaatcctgatgctagcagacactgagaatgagaagaataagtgggtgggagtgctgagtgaattgcacaagattttgaagaaaaacaaattcagagaccgctcagtctatgttcccaaagaggcttatgacagcactctacccctcattaaaacaacccaggcagccgcaatcatagatcatgaaagaattgctttgggaaacgaagaagggttatttgttgtacatgtcaccaaagatgaaattattagagttggtgacaataagaagattcatcagattgaactcattccaaatgatcagcttgttgctgtgatctcaggacgaaatcgtcatgtacgactttttcctatgtcagcattggatgggcgagagaccgatttttacaagctgtcagaaactaaagggtgtcaaaccgtaacttctggaaaggtgcgccatggagctctcacatgcctgtgtgtggctatgaaaaggcaggtcctctgttatgaactatttcagagcaagacccgtcacagaaaatttaaagaaattcaagtcccatataatgtccagtggatggcaatcttcagtgaacaactctgtgtgggattccagtcaggatttctaagataccccttgaatggagaaggaaatccatacagtatgctccattcaaatgaccatacactatcatttattgcacatcaaccaatggatgctatctgcgcagttgagatctccagtaaagaatatctgctgtgttttaacagcattgggatatacactgactgccagggccgaagatctagacaacaggaattgatgtggccagcaaatccttcctcttgttgttacaatgcaccatatctctcggtgtacagtgaaaatgcagttgatatctttgatgtgaactccatggaatggattcagactcttcctctcaaaaaggttcgacccttaaacaatgaaggatcattaaatcttttagggttggagaccattagattaatatatttcaaaaataagatggcagaaggggacgaactggtagtacctgaaacatcagataatagtcggaaacaaatggttagaaacattaacaataagcggcgttattccttcagagtcccagaagaggaaaggatgcagcagaggagggaaatgctacgagatccagaaatgagaaataaattaatttctaatccaactaattttaatcacatagcacacatgggtcctggagatggaatacagatcctgaaagatctgcccatgaaccctcggcctcaggaaagtcggacagtattcagtggctcagtcagtattccatctatcaccaaatcccgccctgagccaggccgctccatgagtgctagcagtggcttgtcagcaaggtcatccgcacagaatggcagcgcattaaagagggaattctctggaggaagctacagtgccaagcggcagcccatgccctccccgtcagagggctctttgtcctctggaggcatggaccaaggaagtgatgccccagcgagggactttgacggagaggactctgactctccgaggcattccacagcttccaacagttccaacctaagcagccccccaagcccagcttcaccccgaaaaaccaagagcctctccctggagagcactgaccgcgggagctgggacccgtgagctgcctcagcactgggacctctcgctctccgctccctgccactcgcctcctctcactttcatctcttccctccacctcgcctgctcggcctgaaagccaccaggggctggcagcagtagcaggacagggattcaggagttctgacgacacgactctcagatccacgcccccagcctaacagcaacaacaaagacagactttccgtagcagcttagattaacgttgatttcattccatgcacttagagttgctttcagtaacattttacccctactcccaaaggtagcttaaatagacagattacacaaatgtaagtgataagaataagattagacagattttgctttcacagtagagtctcattatagtcctaaaatagctcatgggcttctccgcatccagaagggagaattggtccctggagtggctcactaagctcttaatcagcaaacgcagtgagtatcaacctgattgttgccaggaaatccttatgaattaaaacaatgcatattttactacagtacagagtttaaatgaatacataaatgtagaagtactgaatgtatatatttaaaaggagcctcttgtattcaacaaaagatggatgcatatataagagagatgatttaatttaaagaaatatgttgtttcttgtctgtaatgtaatgtaaagggtggaaaggcctcaagctcacatttgtagagagagagcgagagaaatcagagttccctttattgccctgtcctcaaactggtcataggctctagtcacctggggagctgtagaaaacacttgcagagccaggttttgctggtttggggcatgccctgggcaccagagctttaacatttgaagccacttcagcagcagcagcaaaaggcgaactcatctctacccaagatgtttcttttcctagtggtggaatttgaacacttctcactttttattgtattttatcttccgcagataaatgtagaaatacacgattctgtcacctctgatcccttccatctgaaaggttacaaggagtgttgtagcttctgaaggtgcagaaaacaatttctaaaaatgcttttattcctgggctaatcctgtccctccctaagtcacagcgaggtgtctgtcccagggctggagatgcttcccaaggaggagtctgttttgttgagagtgggcgtgggcttcttcacataagcctggggaaggaagaaaaaacggctttcattaccaaataatgtaaaacctcaaaagcaagggcttcaacagccttaaccaaatattattccccatagccagtggaaaatggatgtgacaaccccagtgcgcaggccagagtgagtgagcccagcacggcgctccgactggcttcctctctcaggtgctggattgtggggttagtggcatttccagctggattcctcctgttgtagttgccataaggaaatgagatgcagaatcagaaggatctatttctacagaatcatttcaccagttaagcacatgagtagagaaagagataaaaataaaagtatctcatgaaggaaagagattttgcctctcttttacttttcacctaagtttctctgagaaatagagacaggattctctctttaaaattcagtgaaaatgaagaaagttttcctgcagttgctaacctgagttgcagtgtttaaggccatcatttcactgctgctgtctgtgactccacgtctgtgtcactgaggtgacctgcgtgtcactgaggtggccaccatgctggcctgcggcatgtgcagggagctgaggctgtttccaggtgatgctgctgtgtggagaaggttctgagatgcagtgagggaagaaaggatcctgctggggattccattgtaagcacctataatcgggaattttcatgtaacagctttgacatttaaa

SEQ ID NO: 29413 - DNA, 1787 bp, Homo Sapiens; identical to SEQ ID NO: 27023

SEQ ID NO: 29414 - DNA, 3198 bp, Homo Sapiens
ggagggcttaaggaagtaaaatggcggacctggcgaacgaagaaaagcctgccattgctccgcccgtctttgtgtttcagaaggataaaggacaaaagtcccctgcagagcaaaaaaacttgtcggattcgggagaggagcctcggggggaggctgaggccccccaccatggcacgggtcaccccgagtcagctggcgagcatgccctagaacctcctgcccctgctggcgcctcagccagcactcctccgcctcccgctcctgaagcccagcttcctccttttccgcgagaactggcagggaggtcagctggcggctccagtcctgaaggcggagaagattctgacagagaagatggaaattactgccctcctgtcaagcgagaaagaacatcctctttaacccagttcccaccctcacagtcagaggaaaggagcagtggcttccggttgaagccaccaacgctgatccacggccaagcccccagcgcaggtctgccaagccagaagcccaaggagcagcagcggagcgtgcttcgcccggcagtgttacaagctccgcagccaaaggcgctgtcccagactgtccccagcagtggcaccaacggggtcagcctcccagcagactgcacgggggcagtgcccgcagcatcccctgacactgctgcatggagaagtccttccgaagctgccgatgaggagaaagagccccagaaaaatgagtccagcaatgcctctgaagaggaagcctgtgagaaaaaagaccccgccacacagcaagcctttgtatttgggcagaacttgagggacagagttaagctgataaatgagagcgtggacgaagccgacatggagaatgctggacaccccagcgcagacacgccaaccgcaacgaactatttcctccagtatatcagttccagtttagagaactcaaccaatagtgccgacgcctccagcaacaaatttgtatttggccagaacatgagcgagcgagttttgagccccccaaaattaaacgaggtcagttcagatgccaacagggaaaatgcagctgccgagtcagggtctgagtcctcgtcccaggaggccacccctgagaaagggtccctggctgagtcggcagccgcctacaccaaggcaacagcgcggaagtgtttgttggaaaaagtggaagtcatcaccggggaggaggcggagagcaatgtgttacagatgcagtgcaagctgtttgtctttgacaagacctcacagtcctgggtggagagaggccgggggctgctcagactcaatgacatggcgtccaccgatgacggcacactacagtcccgactagtgatgcggacccaggggagcctgcgactgatcctcaacaccaagctgtgggcccagatgcagatcgacaaggccagcgagaagagcattcgcatcacagccatggacaccgaggaccagggcgtgaaggtcttcctgatctcggccagctccaaggacacaggtcagttgtatgcagccctgcaccaccgcatcctggccctgcgcagccgcgtggagcaggagcaggaggccaagatgcccgcgcctgagcctggggcagccccatccaacgaggaggacgacagcgacgatgacgatgtcctggctccttcaggggccaccgcagctggtgctggtgacgaaggggacgggcagacgaccgggagcacatagcggccgggagcccggctgcacaccaggctgctgctttgtccgtctatccacccgcccacccgcccccaccccaccggcagcgtccaggtgcggggccgggaaccacacaccccactgggccggccacagtctggacccgcacgtcctgttcaaaagcagactcgggaactgcctgaatgtggtttgggacacgagacctcatcatattgatgagcgaacaaacaagaacatttcctccctcccctcctttgaattgaaatggcacattaagacttgtcacggcttctcactgggactggagacctcgttccttcaccccgcgtgtcgccagcctctgggtccagccagagcccctggcttctccgccacccacacccttcccaccctgctgtggggccctgcctttgtggggagcagccagccctctgcccctgcccagggctccccaactataggcctgggacccccgcccagcttggggggctgctcgtacgagtgtagacactgggcccattggacgtgctgttaactactatcttcatttcccacttcccctctctgattgggggtgtatattttacatctttttttctttttattttcgaaggctttgttttggtttcttaggttaagatgctctcgagcgttgagcaggcacagctctgtcgaggtccctgtcccccacctgtggttctggcctctgaggttgggggactacttgtttcccaccccaggttcctccaggccaagtcatggggtgatgaggagttggggccctgtctgtcctaggcctggagagtgcctgtctgggaaaaggtcactggacctggaagggtccccagggtcccctgactcccgtctccatctgtcacgtggttcaccatcatcaggcaccaggcgcaaactgcttcccgctgttggccatcccttccccagccacaggtgtccctgcccccaggacagtccagggccaggggcttctgtgagaggcagagggggaccctcaccaaatcttggtggaagagcccaggggctggtcccagaacaggcagtctcacaagcacgcagcacactggagtggacgcctgtgcccacccgagcctggagcatggccaagagccagcttgcaccacccacctgggaggccgaggaggaggtcccctgggcacagggcctctttgggacttcagaggaaatctcccagtcccactctcggagggttaagagaaggcctcctgcagctgtgccgtccacacctctaggtcgccagagccctgcccccagcccccagcaagcctgagcccgggaagaaccagaggccctcccgagagacccagtcacacgtctctgctttaagccttagccagctagtgacgagtacaacgagataacgcccatgtgttttggaacatttatgtaagattgtcatatgaaatgtatttgggaactacattaaacttttaactaaaaaaaaaaaaaaaaaaaaaaa

SEQ ID NO: 29415 - DNA, 5227 bp, Homo Sapiens
gctcctcctccgctccgccagtgtccggccgcgggccggccttagtgactggggcggcgggccccggggccgcggcgtggggcgggcaggcggacgccggccgcgggctgctttcgtcggctcccaagctctcccggagcgagcagccgcccgcgagccgccgcggagcctcctcgcccgctcccgccggcgagcaagatgatgtgcgaggtgatgccgaccatcagcgaagcagaaggcccccctggaggaggtggaggccatggttccggctccccttcacagccagatgcagattcacattttgaacagttgatggtctccatgctagaagaaagggaccgccttcttgatacactgagagagactcaagaaacgctggccttaacccaggggaagttacacgaggttggtcatgaaagagattccttgcagagacagctcaacacggcacttccacaggagttcgcagcacttactaaagaactcaatgtatgcagggaacagctccttgaaagggaagaagaaattgctgaactgaaagcagaaaggaataacaccaggctgctgttagagcatttggaatgccttgtctccaggcatgagcggtctcttaggatgaccgtggtgaagagacaagcgcagtctccagcaggcgtgtccagcgaagtggaagtgctgaaagcactgaagtccttatttgaacaccacaaagctctggatgaaaaggtgagagagcgattacgagtagcacttgaaagatgtagtttgttagaagaggaattaggtgccacacacaaagagctaatgattcttaaagaacagaataatcagaaaaaaactctaacagatggagtgctggacataaaccatgaacaagaaaatacaccaagcacgagtggaaagagatcttctgatggttctttaagccacgaggaagaccttgctaaagtaattgagctccaagaaatcataagtaagcagtcaagggaacagagccaaatgaaagaacgcctggcttccctttccagtcatgtgacagaactggaagaggatctggacacggctagaaaagatctcatcaaatctgaagaaatgaacacaaaattgcaacgagatgtccgtgaagccatggcccaaaaggaagatatggaagagagaatcactactcttgaaaaacgctacctcgctgcacagcgtgaagccacatctgtgcatgacctcaatgataaacttgaaaatgaaattgcaaataaagattctatgcatcgacagactgaagataaaaaccgccagttacaggagcgcttggaattggcagagcaaaagctgcaacagacactgaggaaggcagagacgctcccggaggtggaggcggagctggcccagagggtggcagcgctttccaaggctgaagagagacacggcaacattgaagaaaggttacgacagatggaagcacagttggaggagaagaatcaagaactgcagcgggcaaggcaaagagaaaaaatgaacgaagaacataataaacgtttatcagacactgttgacaagctgctttcagaatctaatgagaggcttcaacttcatcttaaagagagaatggctgctttggaagataagaactctcttttaagagaagttgaaagtgcaaaaaagcagttagaagaaacacaacacgataaggatcagcttgtcctaaacattgaagcactgagggctgaactagaccacatgagactaagaggtgcttcacttcatcatggccgaccccacttgggcagtgtcccagatttcaggttccccatggcagacggccacacagactcctacagcaccagtgcagtgctgcggcgcccacagaaaggccggctggcagccctgcgagatgagccttccaaggtacaaactcttaatgagcaggattgggaacgtgcccagcaagctagtgtcttggcaaatgtagcacaagcattcgagagtgatgctgacgtgtctgatggtgaagatgacagggacactctcctcagctcagttgacctgctatcgcccagcgggcaggccgacgcgcacacactagccatgatgcttcaggagcagctggacgccatcaacaaagagatcaggttgattcaggaagaaaaagaaaatacagagcagcgggcagaggagattgaaagtcgagttggcagtggaagtctagacaatcttggtcgttttagatcaatgagctccattcccccctaccctgcttcctcgcttgctagctcctcccctccgggcagtgggcgctccaccccacgaaggatccctcacagcccagctcgggaagtggacagactgggcgtcatgacccttttgccaccttccagagaagaggtacgagatgacaagacaaccataaagtgtgaaacctccccgccttcctccccgagagcccttcggttagaccggctgcacaaaggggcgctgcacaccgtcagccacgaggacatcagggacataaggaactccacaggctcccaggatggtcccgtgagcaaccccagcagtagcaacagtagccaggactcgctccacaaagccccaaagaagaaaggcattaagtcctccattggccgcttgtttggcaagaaagaaaagggccgacctggacaaactggcaaagaagcattaggacaagctggtgtttccgagacggataactcatctcaggatgccttgggacttagcaaattggggggacaggctgaaaaaaatcgtaaacttcaaaaaaagcatgaattgctggaggaagcccggagacaaggtttaccttttgcccaatgggacgggccaacggttgtggtctggctagagctctgggttgggatgccagcctggtatgtggctgcctgccgagcaaacgtgaaaagcggggccatcatgtcggccctgtccgacacagagatccagcgtgagattggcatcagcaaccccctgcacaggctgaagctgaggctggccatccaggagatcatgtcgctgaccagcccgtctgccccgcccacatctagaacgacactcgcctatggggacatgaaccacgagtggatcggcaacgagtggctccccagcctgggcctcccccagtaccgcagctacttcatggagtgccttgtagacgccaggatgctggaccacttgaccaagaaagaccttcgagggcagctgaaaatggtcgacagttttcacagaaacagtttccagtgtggaattatgtgcctgagaaggttaaattatgaccggaaagaactggaaagaaaaagagaagaaagtcagagtgaaataaaagacgtgcttgtttggagcaatgatcgagtgattcgctggatcctgtcaattggccttaaagaatatgcaaacaatcttatagagagtggtgttcacggagcacttctggccttagatgaaaccttcgacttcagtgcactggcactgctgttacagatcccgacgcagaacacacaggctcgtgctgtcttggaaagagaatttaacaaccttttggtcatggggactgatagaaggtttgatgaagatgatgataaaagctttaggagagcaccttcatggagaaaaaagtttagaccaaaggacattcgtggcttagctgctgggtcagcagagactctccctgcaaacttccgggtgacttcttctatgtcttccccctctatgcagccaaagaagatgcagatggacggcaatgtatcaggaacacagaggttggattctgctacagtcaggacttactcctgctaaagtctcctgttgtttacccacactacttctacagatgattatgcagcatttgaatccaacaaagactacattttggaatccagtggaatctttaatcttgttaatacttgttatatggaccctaagatattttattacagagtttttaattagtgaaaaattcatgaataccatagagaaaatattttagaatttaatgtttcttatatttatgtaaacttatgactcttcatttatatagttacttactttttcatgtatatccaggctataaatatcctttcaaatcatgttcttatacctaattttagtctttcaaatgaatgtactgtaatgcttgtatgtataaatcctatgaatagagggcttttgtaaattatgcatttattgtaattatcattaattttttaatgataaaccatgacaaaggattttacgtttataaaattatgacagaagccatgtgcattatcctttacggacgcagcctagctctacagcaatcatcctgaaataagcatacctaatttcaagcaattgttgtattttcatgactgaccttaactgtactttttctagcaagagatgctttattctgcagcatgaacagatttaaaatggctggtgttaaatatcagctcctaataagatgtggactgaaaacactatcacaacactatgagaagcccctagcactggttaacgctttcctagcctagtctctggatttggggagcttgtcttcagtggctgagactgtgagctgggagcagttctctcagctggagagactcgggatggggtaacctggggaccagtctagcccctgcaccctcttccctgcctctgctccttgggagcgggtggagagacacccatgtggctccccttagggccagcaccaagcaccacgctctcatcctgcaagtcggcgcacacagtggatgaaggcaggagacccagaaagcagtgcagtgcagctctaataaaggccttatttttcttatgtaaatcatctttttacatttgtttgtaaacatgtttaaagaacgaacctagtgggacatttttagactttgatgctctagccattttggattgtgtaagttgcagatgtggcttttactttttaaatggcatattaacaagccagcaaagtgtgtcagaccatggcgtggtatttattgtgcagcagatccagagacagaggcagcctgtcttttcagttggtttctgcttttaatttacttgtacaattcattgttactgttctgtttttctattaatcttttgtcaacttcctgattatgtaacaaagtatgtacagtctacttttgaactatttttatcacagtattatttattgctttctttcaataaagtactgaagcattttccactgccaaaaaaaaaaaaaaaa

SEQ ID NO: 29416 - DNA, 1733 bp, Homo Sapiens
gggcatgagaccagccaggcactgggaaacaaggtttggtgccagagattttggtggcttccaagactgctttttcagagacaggctcatggacacagcacggattgcagttgtcggggcaggtgtggtggggctctccacggctgtgtgcatctccaaactggtgccccgatgctccgttaccatcatttcagacaagtttactccagataccaccagtgatgtggcagccggaatgcttattcctcacacttatccagatacacccattcacacgcagaagcagtggttcagagaaacctttaatcacctctttgcaattgccaattctgcagaagctggagatgctggtgttcatttggtatcaggttggcagatatttcagagcactccgactgaagaagtgccattctgggctgacgtggttctgggatttcgaaagatgactgaggctgagctgaagaaattcccccagtatgtgtttggtcaggcttttacaaccctgaaatgtgaatgccctgcctacctcccgtggttggagaaaaggataaagggaagtggaggctggacactcactcggcgaatagaagacctgtgggaacttcatccgtcctttgacatcgtggtcaactgttcaggccttggaagcagacagcttgcaggagactcaaagattttccctgtaaggggccaagtcctccaagttcaggctccctgggtggagcattttatccgagatggcagtgggctgacatatatttatcctggtacatcccatgtaaccctaggtggaactaggcaaaaaggggactggaatctgtccccggatgcagaaaatagcagagagattctttcccgatgctgtgctctggagccctccctccacggagcctgcaacatcagggagaaggtgggcttgaggccctacaggccaggcgtgcgactgcagacagagctccttgcgcgagatggacagaggctgcctgtagtccaccactatggccatgggagtgggggcatctcagtgcactggggcactgctctggaggccgccaggctggtgagcgagtgtgtccatgccctcaggacccccattcccaagtcaaacctgtagatgacataaaatgacagcaaagagactgagagactgttgatcaaagcacagaacaggttcaaataacttttccactgcatgaaagtttaattagacatttctttgttttcaacattagaagtggtgtaacatgtaagctgagcacggtggcatgcctatagtcccagctacttgagaggctgaggcaggaggattgttgagcccaggagtttgagtgcaatctgggtaacattttttagaggtgccagttcccacctctaaaaaaaacaccaacaacaaaagaaatgatgcaacatgtaggcttacttaggaagtccagcattaatggcatagggcataaagctctattttttgttaaaaatacttcttatagagtaaaatttatttagaactgatgtccaaggacctatgcagatttatatgaatgttggaagctatagagattttgatatcatttggcttataaatccacaggaggagataatgtatggaaaacatttaaatcactgtcaattgcagagctgcctgtgatcttcttaggttatagccaagtcagcaacataattcctctaaataaaattacattgtgctcacaaaaaaaaaaaaaaaaaaaaaaaaa

SEQ ID NO: 29417 - DNA, 2734 bp, Homo Sapiens
gctcggcgctgtagccgccgctgccgccgctgctcttggctcggggacgcgggcgggcgctccgagaggctctggtgcctgcggctgctgctctcctccgacgcccggggctgcggcgctccgggtcccggcccctgtcccggcatctctcgggtccctgagccccggccacgggtcccgcgtccggccggagagaacgcactcagctgctcgagccgccccgggctcgcgcccccgggccatgaagaggggcccgtgaggcgcgcgcggagtcggaggaagaggagggaggagggaggccgaggaggagggcgcgggaggcggaggatgccgccgcggctgctgccgccgccgccacccgcgggtccccggcgaccctgactccagacccgaggatggagccggcgctgggcgctgcagctgctcccggcgcgtccccgaccaggtagctggtgtcacttcggtgtggttggaagaagactttctccccagctgcattcccggaggcgccctttcgacctggaggccgggtctgctggccacagggctgccgcactggctgggactgccagctgggcctggagacgctggtggctgtggactccccagcttggagcagtccctctttgacctcaccccttggagaagcaaccccatgaaggtgcccagccatgcaatgttcctggaaggccgtcctcctccttgccctggcctccattgccatccagtacacggccatccgcaccttcaccgccaagtcctttcacacctgccccgggctggcagaggccgggctggccgagcgactgtgcgaggagagccccaccttcgcctacaacctctcccgcaagacccacatcctcatcctggccaccacgcgcagcggctcctccttcgtgggccagctcttcaaccagcacctggacgtcttctacctgtttgagcccctctaccacgtccagaacacgctcatcccccgcttcacccagggcaagagcccggccgaccggcgggtcatgctaggcgccagccgcgacctcctgcggagcctctacgactgcgacctctacttcctggagaactacatcaagccgccgccggtcaaccacaccaccgacaggatcttccgccgcggggccagccgggtcctctgctcccggcctgtgtgcgaccctccggggccagccgacctggtcctggaggagggggactgtgtgcgcaagtgcgggctactcaacctgaccgtggcggccgaggcgtgccgcgagcgcagccacgtggccatcaagacggtgcgcgtgcccgaggtgaacgacctgcgcgccctggtggaagacccgcgattaaacctcaaggtcatccagctggtccgagacccccgcggcattctggcttcgcgcagcgagaccttccgcgacacgtaccggctctggcggctctggtacggcaccgggaggaaaccctacaacctggacgtgacgcagctgaccacggtgtgcgaggacttctccaactccgtgtccaccggcctcatgcggcccccgtggctcaagggcaagtacatgttggtgcgctacgaggacctggctcggaaccctatgaagaagaccgaggagatctacgggttcctgggcatcccgctggacagccacgtggcccgctggatccagaacaacacgcggggcgaccccaccctgggcaagcacaaatacggcaccgtgcgaaactcggcggccacggccgagaagtggcgcttccgcctctcctacgacatcgtggcctttgcccagaacgcctgccagcaggtgctggcccagctgggctacaagatcgccgcctcggaggaggagctgaagaacccctcggtcagcctggtggaggagcgggacttccgccccttctcgtgacccgggcggtgcgggtgggggcgggaggcgcaaggtgtcggttttgataaaatggaccgtttttaactgttgccttattaacccctccctctcccacctcatcttcgtgtccttcctgcccccagctcaccccactcccttctgccccttttttgtctctgaaatttgcactacgtcttggacgggaatcactggggcagagggcgcctgaagtagggtcccgccccccccaccccattcagacacatggatgttgggtctctgtgcggacggtgacaatgtttacaagcaccacatttacacatccacacacgcacacgggcactcgcgaggcgacttctcaagcttttgaatgggtgagtggtcgggtatctagtttttgcactgtcttactattcaaggtaagaggatacaaacaagaggaccacttgtctctaatttatgaatggtgtccatcctttccccatccctgcctcctgcccctgacgcccatttccccccttagagcagcgaaactgccccctcctgcccgcccttgcctgtcggtgaggcaggtttttactgtgaggtgaacgtggacctgtttctgtttccagtctgtggtgatgctgtctgtctgtctgagtctcgtggccgcccctggaccagtgatgactgatgaatcttatgagcttctgattgatctcggggtccatctgtgatatttctttgtgccaaaaagaaaaaaaaagagtggatcagtttgctaaatgaacattgaaattgaaatgctttatctgtgttttctgtaaataaaagagtgcaataatcgaaaaaaaaaaaaaaaa

SEQ ID NO: 29418 - DNA, 1867 bp, Homo Sapiens
gggcgagcgcgacgcgggagccggggcggcgcgggcagcgcgggccggccgggctgtgcggggcgagcggcggcgcggcgggggccttcggccggggcggcagctgggcgccggcgggagctagcagcgtctgcagccgcgcccggccagccccctccggctcggcatggagctgccagctgttggcgagcacgtcttcgcggtggagagcatcgagaagaagcggatccgcaagggcagagtggagtatctggtgaaatggagaggctggtcgcccaaatataacacgtgggaaccggaggagaacatcctggaccccaggctgctgatcgccttccagaacagggaacggcaggagcagctgatgggatatcggaagagagggccgaagcccaaaccgctagtggtgcaggtgcctacctttgcccgtcgttccaatgtcctgaccggcctccaggactcctccactgacaaccgtgccaagctggatttgggcgcgcaggggaagggccaggggcatcagtacgagctcaacagcaagaagcaccaccagtaccagccgcacagcaaggaggggaagccccggccgccgggcaagagcggcaagtactactaccagctcaacagcaagaagcaccacccctaccagcccgaccccaaaatgtacgacctgcagtaccagggcggccacaaggaggcgcccagccccacctgcccggacctgggggccaagagccacccgcccgacaagtgggcgcaaggtgcgggggccaaaggctacctgggggcggtgaagcccctggccggtgcggcgggtgctccaggcaaaggctccgagaagggcccccccaacggaatgatgccggcccccaaagaggctgtgacgggcaacgggattgggggcaagatgaagatagtcaagaacaagaacaagaacggacgcatcgtgatcgtgatgagcaaatacatggagaacggcatgcaggcggtgaagatcaagtccggcgaggtggcagagggggaggctcgctcccccagccacaagaagcgggcagccgacgagcgccaccctcctgccgacaggacttttaaaaaggcggcgggcgcagaggagaagaaggtggaggcgccgcccaagaggagggaggaggaggtgtccggggttagcgatccgcagccccaggatgccggctcccgcaagctgtccccgaccaaggaggcctttggagagcagcccctgcagctcaccaccaagcccgacctgcttgcctgggacccggcccggaacacgcacccgccctcacaccacccgcacccgcacccccatcaccaccaccaccaccaccaccaccaccaccacgccgtcggcctgaatctctcccacgtgcgcaagcgctgcctctccgagacccacggcgagcgcgagccctgcaagaagcggctgactgcgcgcagcatcagcacccccacctgcctggggggcagcccagccgctgagcgcccggccgacctgccaccagccgccgccctccggcagcccgaggtcatcctgctagactcagacctggatgaacccatagacttgcgctcggtcaagagccgcagcgaggccggggagccgcccagctccctccaggtgaagcccgagacaccggcgtcggcggcggtggcggtggcggcggcagcggcacccaccacgacggcggagaagcctccagccgaggcccaggacgaacctgcagagtcgctgagcgagttcaagcccttctttgggaatataattatcaccgacgtcaccgcgaactgcctcaccgttactttcaaggagtacgtgacggtgtagccggagggcgtcggaaggggcgcc

SEQ ID NO: 29419 - DNA, 2813 bp, Homo Sapiens; identical to SEQ ID NO: 22783

SEQ ID NO: 29420 - DNA, 4733 bp, Homo Sapiens
gtgggatttggggggcgctggtgggcacccctggatctggcggctgcggcctcgcggggggaggctgatcggtgacaggggcagggggctattttgggggtagaaggcagtgagagcgtgagggggaggggggtccccagcgcccaagccggagccagagacgcggagcccgcgcgagcgtcggagacagggctccagggctccgaagcgacagagccgggccccggccgctgccaggggccccgcccggcccccccactccaccccacgtccctcctgcagcccagctccgcccgcagccgccgcggaccaggcaggcccgcaccgccgccatgatgtgcgaggtgatgcccaccatcagcgaggatggccggcggggctcggcgctgggcccggacgaggcgggcggggagctggagcgcctcatggtcacgatgctcacggagcgcgagcgcctgctggagacgctgcgcgaggcacaggacgggttggctacagcgcagctgcggctgcgcgagctcggccacgagaaggactcgctgcagcgccagctcagcatcgcgctgccccaggagtttgcagctctgacgaaggagctgaacttatgtcgggagcagctgctggagagggaggaagagattgcagagctgaaggcggaacggaacaacacgcggctgctcctggaacacctggagtgcctggtgtccaggcacgagaggtcactgcgcatgaccgtggtgaagcgccaggcccagtccccgggtggggtctcctcggaggtagaagtgctcaaagctctaaagtctctcttcgagcaccacaaggccctggatgagaaggtccgggagcggctgcggatggcgctggagcgcgtggcagtgctcgaggaggagctggaactgagcaatcaggagactctgaaccttcgagaacagctgtctaggcggcggtcagggctggaagagccgggcaaggatggggatgggcagactcttgccaatggcctgggtcctggcggggattccaaccggcgcacagcagagctggaggaggccctggagcggcagcgcgccgaggtgtgccagctgcgggagcgcctggcggtgctgtgccgtcagatgagccagctggaggaggagttgggcaccgcgcaccgtgagctgggcaaggcagaggaagccaactccaagctgcagcgcgacctcaaggaggcgctggcgcagcgggaagatatggaggagcggattacaacactggagaagcgctacctgagcgcccagcgggaggccacgtctctgcacgacgccaacgacaaactggagaacgagttagctagcaaggagtcgttgtatcggcagagtgaagagaagagccgtcagctggccgagtggttggacgacgccaagcagaagctgcagcagacgctgcagaaagcggagaccttgcccgagatagaggcgcagctggcgcagcgcgtggcggcgctcaacaaggccgaggaacgtcatgggaattttgaggagcggcttcggcagctggaggcccagctggaagagaagaatcaagagctgcagcgggcccggcagcgggagaagatgaacgatgaccacaataagcggctgtccgagacggtggacaagctgctgagcgagtccaacgagcgcttacagcttcacctcaaggagcgcatgggggcgctggaggagaagaactccctgagcgaggagatagccaacatgaagaagcttcaggatgagttgctgctaaacaaggagcagctcttggccgaaatggagcggatgcagatggagatcgaccagctgcgggggaggccaccatcctcctactccaggtctctccctggcagtgccctggagctccgttactctcaggcacccactttaccttctggtgcccacctggatccctatgtggctggcagtggtcgggcaggcaagaggggccgctggtcaggggtcaaggaggagccctccaaggattgggagcggtctgcccctgcgggctccataccacccccattccctggggaactggacggctccgatgaggaggaggcagaggggatgtttggggccgagctgctgtcccccagtgggcaggctgacgtgcagacgctggccatcatgcttcaggagcagctggaggccatcaacaaggagatcaagctgatccaagaggagaaggagacaacagaacagagggcagaggagctggagagtcgggtgtccagctctggcttggactcgttgggccgctaccgcagcagctgctccctgcccccctccctcaccacctctacccttgccagcccctcccctcccagctctggccactcaacaccccgcctggcaccccctagccctgcccgtgagggcaccgacaaggctaatcatgtccctaaggaggaagctggagctccacgaggggaggggccggccatcccaggagacaccccaccacccactccccgctctgcccgtcttgagagaatgacccaggccttggcactgcaggcggggtccctggaagatgggggacccccacggggaagtgagggcaccccagattctctgcacaaagcccccaagaagaagagcatcaagtcatccataggccgtctctttggcaagaaagagaagggacgaatgggacccccaggccgggacagctcttctctggctggaacaccctcagatgagacactggccactgaccctctggggctagccaagctgacaggcccaggagacaaggaccgaaggaacaagaggaagcatgaactcctggaggaggcctgccgccagggcctaccttttgctgcctgggacgggcccaccgtggtgtcctggctggagctgtgggtgggcatgcctgcctggtatgtggccgcctgccgggccaatgtcaagagcggtgccatcatggccaacctgtcagacacggagatccagcgcgagatcggcatcagcaacccgctgcaccgactcaagctacgcctcgccatccaggagatggtctcgctcacctcgccctcagcccccgcctcctcccgcacttccacaggaaacgtgtggatgacacacgaggagatggagtcccttacggccacgaccaagcccgagaccaaggagatcagctgggagcagatcctggcatatggcgacatgaaccacgagtgggtggggaacgactggctgcccagcctggggctgccccaataccgcagctacttcatggagtcgctggtggacgctcgaatgttagatcaccttaacaagaaggagctccggggccaactcaagatggtggacagctttcacagggtgagtctacattatgggattatgtgcctgaaacggctcaactatgaccggaaggacctggagcggaggcgggaagaaagtcagacccagatccgagacgtgatggtgtggtccaatgagcgggtcatgggttgggtgtccgggctgggcctgaaggaatttgccacgaacctcacggagagcggggtacacggggcactgctcgccctggacgagaccttcgactactccgacctggccttgctcctgcagatccccacgcagaatgcacaggcccggcagcttctggagaaggaattcagcaaccttatctccttaggcacagacaggcggctggacgaggacagcgccaagtctttcagccgctccccatcctggcggaagatgttccgggagaaggacctccgaggcgtaactcccgactcagctgagatgttgccccccaactttcgttcggctgcagcgggagccctgggctctccggggctccctctccgcaagctgcagccagaaggccagacttctgggagttcccgggcagacggcgtttcggtccggacctattcctgctagtgcaggcctccaggtgacctcactcggacggaagaatcttcccgaggctgggctgttccctctcctgcccggactgtggcctcgccggggagagcgggcgggggagctcgcgccgaggactggaccatctgtacagaccagcgggagtgcgcgcgcccgcctcgcacagggccggggcctggaccaaaccacatgaactggactgagagggggaagaagcggggaggaagaaatcccgccccaaacgtccgctttccttttctctactttgtaatttattgatcagtttctgttgggagacgggtgtcctttacccgcgggaagggggcggggcttccctcccgggccgcatgcggggagaggctgctccctcccctttttcctgcccagtcgcggggcccaagtcttccttcttcgtccgaaaggaggggaggggggactcgctgctacaagcctcgccccctgtgccactcagctccgccccgccgcgtccggtcgccggtcccccgggtcatctgcgggcgggttcccctctccctcccccgtgtctcgtgtccccggggcctcaccgccccccgtgctgtggccgtgtccgtgccccgggggtagggggcgcagaatggcgcttccccttctcctctggctccggggtttgcatgggagaatcctctttccacgatgccgctgggcgacgtggcgtgggggcagggggacggtgggggagccctcgcccccgactctcggtcggcctccccgccccaggcgtcactcagtgatcacgggtaaagagaactgtttcaaaaaaaaaaaaaaaaa

SEQ ID NO: 29421 - DNA, 2880 bp, Homo Sapiens
tgctgctctccgcccgcgtccggctcgtggccccctacttcgggcaccatggacacctcccggctcggtgtgctcctgtccttgcctgtgctgctgcagctggcgaccgggggcagctctcccaggtctggtgtgttgctgaggggctgccccacacactgtcattgcgagcccgacggcaggatgttgctcagggtggactgctccgacctggggctctcggagctgccttccaacctcagcgtcttcacctcctacctagacctcagtatgaacaacatcagtcagctgctcccgaatcccctgcccagtctccgcttcctggaggagttacgtcttgcgggaaacgctctgacatacattcccaagggagcattcactggcctttacagtcttaaagttcttatgctgcagaataatcagctaagacacgtacccacagaagctctgcagaatttgcgaagccttcaatccctgcgtctggatgctaaccacatcagctatgtgcccccaagctgtttcagtggcctgcattccctgaggcacctgtggctggatgacaatgcgttaacagaaatccccgtccaggcttttagaagtttatcggcattgcaagccatgaccttggccctgaacaaaatacaccacataccagactatgcctttggaaacctctccagcttggtagttctacatctccataacaatagaatccactccctgggaaagaaatgctttgatgggctccacagcctagagactttagatttaaattacaataaccttgatgaattccccactgcaattaggacactctccaaccttaaagaactaggatttcatagcaacaatatcaggtcgatacctgagaaagcatttgtaggcaacccttctcttattacaatacatttctatgacaatcccatccaatttgttgggagatctgcttttcaacatttacctgaactaagaacactgactctgaatggtgcctcacaaataactgaatttcctgatttaactggaactgcaaacctggagagtctgactttaactggagcacagatctcatctcttcctcaaaccgtctgcaatcagttacctaatctccaagtgctagatctgtcttacaacctattagaagatttacccagtttttcagtctgccaaaagcttcagaaaattgacctaagacataatgaaatctacgaaattaaagttgacactttccagcagttgcttagcctccgatcgctgaatttggcttggaacaaaattgctattattcaccccaatgcattttccactttgccatccctaataaagctggacctatcgtccaacctcctgtcgtcttttcctataactgggttacatggtttaactcacttaaaattaacaggaaatcatgccttacagagcttgatatcatctgaaaactttccagaactcaaggttatagaaatgccttatgcttaccagtgctgtgcatttggagtgtgtgagaatgcctataagatttctaatcaatggaataaaggtgacaacagcagtatggacgaccttcataagaaagatgctggaatgtttcaggctcaagatgaacgtgaccttgaagatttcctgcttgactttgaggaagacctgaaagcccttcattcagtgcagtgttcaccttccccaggccccttcaaaccctgtgaacacctgcttgatggctggctgatcagaattggagtgtggaccatagcagttctggcacttacttgtaatgctttggtgacttcaacagttttcagatcccctctgtacatttcccccattaaactgttaattggggtcatcgcagcagtgaacatgctcacgggagtctccagtgccgtgctggctggtgtggatgcgttcacttttggcagctttgcacgacatggtgcctggtgggagaatggggttggttgccatgtcattggttttttgtccatttttgcttcagaatcatctgttttcctgcttactctggcagccctggagcgtgggttctctgtgaaatattctgcaaaatttgaaacgaaagctccattttctagcctgaaagtaatcattttgctctgtgccctgctggccttgaccatggccgcagttcccctgctgggtggcagcaagtatggcgcctcccctctctgcctgcctttgccttttggggagcccagcaccatgggctacatggtcgctctcatcttgctcaattccctttgcttcctcatgatgaccattgcctacaccaagctctactgcaatttggacaagggagacctggagaatatttgggactgctctatggtaaaacacattgccctgttgctcttcaccaactgcatcctaaactgccctgtggctttcttgtccttctcctctttaataaaccttacatttatcagtcctgaagtaattaagtttatccttctggtggtagtcccacttcctgcatgtctcaatccccttctctacatcttgttcaatcctcactttaaggaggatctggtgagcctgagaaagcaaacctacgtctggacaagatcaaaacacccaagcttgatgtcaattaactctgatgatgtcgaaaaacagtcctgtgactcaactcaagccttggtaacctttaccagctccagcatcacttatgacctgcctcccagttccgtgccatcaccagcttatccagtgactgagagctgccatctttcctctgtggcatttgtcccatgtctctaattaatatgtgaaggaaaatgttttcaaaggttgagaacctgaaaatgtgagattgagtatatcagagcagtaattaataagaagagctgaggtgaaactcggtttaaa

SEQ ID NO: 29422 - DNA, 2058 bp, Homo Sapiens
cacagccggccgacaccacaccagccggggagccgccgccgccgccgccacctctgagcagccggctgggagcgagagccgacagctagtctgcaagccaccgctgtcgccatggggagccgcgtctcgcgggaagacttcgagtgggtctacaccgaccagccgcacgccgaccggcgccgggagatcctggcaaagtatccagagataaagtccttgatgaaacctgatcccaatttgatatggattataattatgatggttctcacccagttgggtgcattttacatagtaaaagacttggactggaaatgggtcatatttggggcctatgcgtttggcagttgcattaaccactcaatgactctggctattcatgagattgcccacaatgctgcctttggcaactgcaaagcaatgtggaatcgctggtttggaatgtttgctaatcttcctattgggattccatattcaatttcctttaagaggtatcacatggatcatcatcggtaccttggagctgatggcgtcgatgtagatattcctaccgattttgagggctggttcttctgtaccgctttcagaaagtttatatgggttattcttcagcctctcttttatgcctttcgacctctgttcatcaaccccaaaccaattacgtatctggaagttatcaataccgtggcacaggtcacttttgacattttaatttattactttttgggaattaaatccttagtctacatgttggcagcatctttacttggcctgggtttgcacccaatttctggacattttatagctgagcattacatgttcttaaagggtcatgaaacttactcatattatgggcctctgaatttacttaccttcaatgtgggttatcataatgaacatcatgatttccccaacattcctggaaaaagtcttccactggtgaggaaaatagcagctgaatactatgacaacctccctcactacaattcctggataaaagtactgtatgattttgtgatggatgatacaataagtccctactcaagaatgaagaggcaccaaaaaggagagatggtgctggagtaaatatcattagtgccaaagggattcttctccaaaactttagatgataaaatggaatttttgcattattaaacttgagaccagtgatgctcagaagctcccctggcacaatttcagagtaagagctcggtgataccaagaagtgaatctggcttttaaacagtcagcctgactctgtactgctcagtttcactcacaggaaacttgtgacttgtgtattatcgtcattgaggatgtttcactcatgtctgtcattttataagcatatcatttaaaaagcttctaaaaagctatttcgccaggcacggtggctcatgcctataatcccagcactttgggaggccaaggtgggtggatcacctgaggtcaggagttcgagaccagcctggccaacacggtgaaaccccatctctactaaaaatgcaaaaattagccgggcgtggcggcacatgcctgtaatcccagctacatgggaggctgaggtgggagaattgcttgaacccaggaggcggaggcagaggctgcagtgacccaagattgtgccactgcactccaccctgggcaacagagcaagaccccatctcaaaaataaataaatatatataaaaaataaaaagctatttctagtttatttcactataaagttttgctttattaaaaagctaataaacagctattaatcacagtgtattagtatttgttacatttttgtatttcactatctttatactatataatatggtaacttgggtaccgggggaactttaaaatttcatctcaaaaataatttttaaaaagcctgaggtatgatatagcataaaagattgagatgaaaatatatttccctgtaagctgaattactcatttaaaaattttaacttctatatgggacccgaattagacactgctgaatcctgtacagccttactcataaataaagtacttactgaatttccaccattcaaaaaaaaaaaaaaa

SEQ ID NO: 29423 - DNA, 7380 bp, Homo Sapiens
cggaactcgcgggttcggagccgcccgctgaggtcagaaggaggcgtctgcgctgatcgggtccgccgcgcgccagagccagagtcgcagccgaggggagccggggccggagcccgagcccgagccgagccggagcccgagcgagcggcggagaccgtgcccccgcctcggccccgcgccgccgcggccaggcccggcatggaggaggagtgccgggtgctctccatacagagccacgtcatccgcggctacgtgggcaaccgggcggccacgttcccgctgcaggttttgggatttgagattgacgcggtgaactctgtccagttttcaaaccacacaggctatgcccactggaagggccaagtgctgaattcagatgagctccaggagttgtacgaaggcctgaggctgaacaacatgaataaatatgactacgtgctcacaggttatacgagggacaagtcgttcctggccatggtggtggacattgtgcaggagctgaagcagcagaaccccaggctggtgtacgtgtgtgatccagtcttgggtgacaagtgggacggcgaaggctcgatgtacgtcccggaggacctccttcccgtctacaaagaaaaagtggtgccgcttgcagacattatcacgcccaaccagtttgaggccgagttactgagtggccggaagatccacagccaggaggaagccttgcgggtgatggacatgctgcactctatgggccccgacaccgtggtcatcaccagctccgacctgccctccccgcagggcagcaactacctgattgtgctggggagtcagaggaggaggaatcccgctggctccgtggtgatggaacgcatccggatggacattcgcaaagtggacgccgtctttgtgggcactggggacctgtttgctgccatgctcctggcgtggacacacaagcaccccaataacctcaaggtggcctgtgagaagaccgtgtctaccttgcaccacgttctgcagaggaccatccagtgtgcaaaagcccaggccggggaaggagtgaggcccagccccatgcagctggagctgcggatggtgcagagcaaaagggacatcgaggacccagagatcgtcgtccaggccacggtgctgtgagggccccgccgcttgcccgtgacacgcagcgcgttggtgtctccgtgtttgtccctgtgaaaacatgtaacgtctgccttagagccatgaccgaaacttgatatttttttctttcatgagtgtccggcatctgctggtcttcattgtgaaacgtgccagtcgtgctttgtgaaaaataacaaagtggtcacagaaatttgtgatctgaaaacccggctcccttccccacaaggctcctgggcctccgggaagacgggcccctgtttgccatctcgggggtgttccctgtgggagggtgagtgggtgaggccgagcctgctgcgtgtggagcctcgagtgggccctggctgccactaccgtacagaggccgtgtcgcgctgggctgggcctgggtggcctctgtctttgcatctctgagaaggagtcgggtggtaacggttggggtcaggaagaattctgccaagtatctttactgtcattctgaccatagcctctttgttcccgcattcgaacttttggttcttactttgctgctcgtttagtccctggggatttcagatcttaggctgttgtttcaccgtatgggagggttgatgtgagcttgcttggagacacacggtgcagcatcagggaccttcccaggccccagcaaattcaagtcggtctgcagacctctcagctacccgcgggacctcttgtaacccatcggcatcttccaggaatccgccgagtgacttgaggaagatgctaacgcagtaaggtctgtgctgggccaagagcagctttgaagctccagagaaccaccccgtcaggttccttgtggaagctcccctcatccgtggtgcagcaggctgagcactgcgcgtttgccacgtgctgcccgtgacagcacattgagccacagcatttgtagacaggacagaggggtgcctgccccctgcccctgctggcacatttaacccttgtcccctgacctcagttctgtgccccaccaaatgcccaggggcaagaggccaccctggaagctgccaatcttccaaggtgggtgtggggcacggtgggggcgggcagctcccaggcccttgggcaggctggggtgacggcagaggccacagcaccagctctgacaagtcctatcatcctctgctcagcagtgacctccctggccccactttgcccagagtttggggtccccccaggtatagctataggcggcagtgcctgtccctggcctgccttgatttcagccacacccctgcagccctgcatcccagctctggggtgtgcagaggtttgtgtctccagggaacccacggctggagagaaatagggagatgcaggaagtgggggcccatggggcccccaagaagcggactctccaaggggtacccccaccccgctaccttccccacggacgggcccctcctggagcccataccctcctgtgaggccattccagtgtcttctagaaagactcgcttgccaggagtgcgttctttgttgaaaaatgccctgaagcgaaaagatgcaggtttatatggaacccccaccccctcccccactctcccactctgttcgttctgaatgtcttcacgagcgtgcatcagggcgcctggctcccccacctcagccagtgagtcagacacgggtttcgcagccatgtttcctggctccgaggacacgggtggcaggcccgttgcagcccagagccactggtccctacagggcgccgccacaccagcaggaaggaggatggctgtgtccggagcctggcggggaggcggcctccccagtatgtgagtgcagggatctgccagaaccacctggccctctgtagggcgtttaactggaaataccctcactgccaagtggagactggggcgtgtgccacattgccagccaccaggaaagcttttctttttcttttttttttttttttaaacaccaagagcacgtatagcatgggggaaagaacctaaatgtctctctgtcctgtgagctggtgaaaaacccagcatgagaacgcagtgtcaggtgtgggactccttctgcccctgcagtgggtgttacgggcggtgtgccctggcgagcaagctttgattcttggttctttgagctcgtttcagaggctgagtccccacatcagctttagttcttggacttccctgtattaagcaagaattaggagaatggctgtccctgcaggcgcctcccgtaaatcctgagctctctggcgcaatctgaaacttctcttctgttttctttggctgtatcagccgaaccaggagaggcctgggctgcgactaaggagaaagaaatcgggggtttctgagagcagatggtgcctttgtgggtgcagggcttttgtggaaattgtcagcctctacgggcagagtccggcatcccctccccagactgcctgctgtcaaaccacggagcagctggagcctgccctgtccacggcccgtttccacccgggcatgttcgtctctcatgacttcggcagaggcccctggtggccttcagtttcagtttctcatccaggaaggtaaccttgggcattggcagtgggtttccctatggcttggatccagattagaattgatctttgttttcactttccatagttaataacatgcaaaataatgagaagaatttattttaaggtgacagctatactggtccaacatcgcctgcttattgtcagggtacagaagtttaatactttcttaatccagtttttcaaacttctccctgtagaccgtaaggatgaattccacaataggatcctttttaaaatcgattttaaattgttgcctagtcctgccaaggttattatgtgcatctgttatttttccaatacatgtaaacagttgcagcatgatgctttgtttaatgtcctgttcttaagctcgttagagccagttttgaaacgtttggtcttaccgtgaacggaggctggcttggcttagccacgctgatgagtaagtgagggatgtctccatcttgagatcaccaggcaagagagttgcctgcaccaggtaagaggccaaagcccctggggtaacagtccccaccgctacccgaggtaaaacaataaaagctatgtggttgagctcaggcctctcgtgcctggtgtcagagaaggcagagcccacagtaggtgcagggtgcaaggccctgggagggcactggccagggaaggtggtatagatggccctcagattgcggggccccgagcagctccccactctgcccgtccaccttccctggctccagcctcattctctctttagtttaactatgcaaagagaggaggttgagagtgttctggcagctggagctcttttccttgtccttcctgccctccgatggggccacctgtgtcggggcagcagtgtccatgtttatggagatcagaggtgtccccactgtgtggctggactgtactctgctgcccgggtagccaggagtctctccctctctcccctgccgcctgcctggtctcatgggcctccttcacacacccctccctgtggatcgcctgcctgggcccagagcaggggaactggagtttgtgagtgagcagagcaggttatgtgcagacagggaaacgagaactttggacctggctttctgagtccaggtgagagctgtgtggccccccgatgccactctgcccgccggagggatgtgcctgctgagccttttccttccacgccgcctctcactgccaggccagcggcttccgctgagactcgctggagaggcggctcccgtgtccgtccaccgagcactcagatggatgctgatcaccagggccgagggggctcccagaaggaccccaggccctggggagggtggctgtgggaggccaagtccactgcccggaagtcttgtcagccctaagccagggaagcctggagcgtggcctggcgggtctgggtggacaccgtccccactccggactcccagcacaggggaggatacctgagcctgtatggccctgtagccctgggcagagctgggcctgtcgtgtgttcctgcctggcaggtgcaggtgctggccatctgcaggtggaaggaggtgggaatcttggattttttgtttttttttgtctttttttttttgagatgaagtctcgctctgacacccaggctggcgtgcagtggtgtgatctcggctcactgcaaactccgcttcctgggttcaagtggttctcctgccccagcctcccaagtagctgggattacaggcatgcgccaccacgctcagctgatttttgtatttttagtagagatggggtttcaccatgttggccaagctggtctcaaactcctgacctcaagtgatctgcccgcctcggcctcccagagtgctgggattacaggcgtgagccagtgcacccggcggaatcttggaatttttatagacagcacctcagtttctgactccagccgcacacctcctgcctctgccagcaggggttgccgccagaccagagccagggccaggtccctgcgtccatcccccccggtaggatggacgtgagccatccttctaggggacttttttcagtgtgcgactcgtctctgttaggtggtaggagccagtttgtgtggcctgtgccacgctccacagtgcgtggctgggctctgtgtgtggcctgtgtcccctgtccctgcaggacccagcaggcatcgtggcgtgacagctgtgtccaagccactgcccgggcatcccatcacccaccagggtgcacggtctctcctgctgggggctttctgtcgcatgtgtgtctcctgtcgactctgcagtttgttctcagagcagaatgtttcctgttctcagtgcacaaagacactggttttcaatcggcgtctaaaaccacgttcctgcctttcattgcaacacggtgtgttcatttgtttaaaacagtttaatgagtaagtttagatgactggtcaatatcttaaaaatgtatattagtaagaagttcttcctggaatttttctttcgattctggcagaataaacaggtgtttttagttttcccactgtctgagccaagcaggaccctgtcccagagcaagagatgtccccttccatctctgacccttgcctgggacaagctttgatggggggccccagcttcaaggctgtggtgggaacagcacccccaaatgccagcctctcctttcttcccatccaccagtatactgcggggccatttctggtctttgtccaacaggaaacccatttctggtgggatatgccttccagtgccacagggccactcaccccatgcatctctgtcctgcccgtcagtgctgggacggacagcaagggcaagcccagtgtctggcggataggtgggtgggaacagagaggggagaatgccgtcctaagcttctgcttggggatcccccacacgacctgggtactgcctgggaaacctgtcctaagtaaaactatggacctcgcctcgcccaccggcctgcgaagccagcatctccgtgaaggtggatggaagcgcctttgtcctcattttgagctgcaagctgggtcagcggctctgaagccctcgagtgactttctaacccaagacccagcccctggcaggaggagggtgggtgcagggctggtgggacaaaaagaggcctcagcaggcctggaagacccttccagtacatcccacagcgtgtcgagcagctgggagaacctgtgtcaagctcgagccgtcataggtccccatgaggtgtctgaagccccttcttggtgatgggaggcagaggtgctgacgttctggagcatggacgtgagtcctcagctggctccgcgtgggcccttggagggtgccaggtgtgtggtgaccttctggatgcctttaacttcatggctgcgtcattcctgatttagaactttaaccggagcttcatctagtgattgcaaaactggaccaatgggaggacggcggcgcagcccgctccctccgtggaatggagctcagctcttcggaggcatcaaagcacctgtcgcctccgtggtccccctgctgagggagtgcggcctctgcaaggttcgggggtggcttcgtttgcctggagtggccggccctgcttgtgccatgtggatgtttgtgagcctcggtcctacagcactgtgtaggctgcatctgtttcgtgctggtcctgttgacttgtatgatatccacaaataaatattttcatggcggtaaaaaaa

SEQ ID NO: 29424 - DNA, 2256 bp, Homo Sapiens
tcagagtccggctcaggctccggctgcggctccagcccgcgatgccccattccgtgaccctgcgcgggccttcgccctggggcttccgcctggtgggcggccgggacttcagcgcgcccctcaccatctcacgggtccatgctggcagcaaggctgcattggctgccctgtgcccaggagacctgatccaggccatcaatggtgagagcacagagctcatgacacacctggaggcacagaaccgcatcaagggctgccacgatcacctcacactgtctgtgagcaggcctgagggcaggagctggcccagtgcccctgatgacagcaaggctcaggcacacaggatccacatcgatcctgagatccaggacggcagcccaacaaccagcaggcggccctcaggcaccgggactgggccagaagatggcagaccaagcctgggatctccatatggacaaccccctcgctttccagtccctcacaatggcagcagcgaggccaccctgccagcccagatgagcaccctgcatgtgtctccaccccccagcgctgacccagccagaggcctcccgcggagccgggactgcagagtcgacctgggctccgaggtgtacaggatgctgcgggagccagccgagcccgtggccgcggagcccaagcagtcaggctccttccgctacttgcagggcatgctagaggccggcgagggcggggattggcccgggcctggcggcccccggaacctcaagcccacggccagcaagctgggcgctccgctgagcggcctgcaggggctgcccgagtgcacgcgctgcggccacggcatcgtgggcaccatcgtcaaggcacgggacaagctctaccatcccgagtgcttcatgtgcagtgactgcggcctgaacctcaagcagcgtggttacttctttctggacgagcggctctactgtgagagccacgccaaggcgcgcgtgaagccgcccgagggctacgacgtggtggcggtgtaccccaatgccaaggtggaactcgtctgagctgggaccctgctcccacgcctgcttcttaaggtccctgctcggccggtgtaaatatgtttcaccctgtccctctaataaagctcctctgctccaccttgaacctgtcacctggcctgccaccctcctgcgcaggccatgcatggctcccgagtacagtagtatctgcttaggtgccaggcatgtcctaggctctgggtgcagtagtgagcaggacgggtaccatgctgccctgaaggggccacagcctgggtggaaggcagacctgaatcacaacgggccagctctagtaatacgaaggtgaggtctgggatgctgcgtgcggcgcgacgacaggaggtatgacctgggtggggtcagggaaagtcttagctgagaactaagagatgagggaggcacaaactctgcacgggggaactgtgtgtgcaaaggtgagctgggggcgagaaaggcctctgtggccgtcatcggcactagcgggttgggggtggtggtggggtgctggcagcctcaggagcgatcgctcccctggagagggtgattgagtgtggagatcaccggggccgccgcgggccgtctgcacttctgttccaggtttttctggcattttctgttccaggtttcttccacccacgagcactttattctcctccgagacccccttttcttccccttcctctctcccaccagggggcgcgcttaaatttccagacagagaccagaaggaaggtttagaaagaaaagaacacttgcccagggcagctttgccctccaagaggctccctcctgtctctaagtcaattccacccctcctcgaagtcccggcttccacccctctcctcagagtcccggcgtttacctcgtggtgtgtttgccttgggcctttcatgccccggctgcacacatcgtctgtgaattgtggctgttcactcccgaggatgtgtcctagactccgggtcgcgtggatctaccctctagtttacttgctcgggagaagaaactgactcgttttatttagtgcctatttagcgagcccagagtaacgtacatttgtgctgttttcaattttgtgctatcgcaaatcacaaaaaaactgttatcaattcacattcatcatcagcacgagacccatttccttgtgctcctgccagctcaggatattatgtttcttttttcatttttgccagtctgttaagtaaaatgtcatatgcgtttgttttaa

SEQ ID NO: 29425 - DNA, 3122 bp, Homo Sapiens; identical to SEQ ID NO: 22752

SEQ ID NO: 29426 - DNA, 3310 bp, Homo Sapiens
gacctcgtgaaataaaagtgcagaaaacaaacccaggcgatcacagcagcagccgccgcggcagcagcaccaacagcaggaggagcaggaggagccggaggaggaggaggaggaggaggcaaagttagagttggggctggcgctccggagttgctgggctcagcgcagctcccattcattaaggaaccagctgcggaggaaggtggccgagcgcccgcgctgcccactcgctcgctcgcgcactcagacgcgcgccacaacagcgcgccccaagctgcgcagctctgcaaaagtttctgctcgggatctggctctcttccccttggactttagaacgatttagggttgacagaggaaagcagaggcgcgcaggaggagcagaaaacaccaccttctgcagttggaggcaggcagccccggctgcactctagccgccgcgcccggagccggggccgacccgccactatccgcagcagcctcggccaggaggcgacccgggcgcctgggtgtgtggctgctgttgcgggacgtcttcgcggggcgggaggctcgcgccgcagccagcgccatgcaaaactacaagtacgacaaagcgatcgtcccggagagcaagaacggcggcagcccggcgctcaacaacaacccgaggaggagcggcagcaagcgggtgctgctcatctgcctcgacctcttctgcctcttcatggcgggcctccccttcctcatcatcgagacaagcaccatcaagccttaccaccgagggttttactgcaatgatgagagcatcaagtacccactgaaaactggtgagacaataaatgacgctgtgctctgtgccgtggggatcgtcattgccatcctcgcgatcatcacgggggaattctaccggatctattacctgaagaagtcgcggtcgacgattcagaacccctacgtggcagcactctataagcaagtgggctgcttcctctttggctgtgccatcagccagtctttcacagacattgccaaagtgtccatagggcgcctgcgtcctcacttcttgagtgtctgcaaccctgatttcagccagatcaactgctctgaaggctacattcagaactacagatgcagaggtgatgacagcaaagtccaggaagccaggaagtccttcttctctggccatgcctccttctccatgtacactatgctgtatttggtgctatacctgcaggcccgcttcacttggcgaggagcccgcctgctccggcccctcctgcagttcaccttgatcatgatggccttctacacgggactgtctcgcgtatcagaccacaagcaccatcccagtgatgttctggcaggatttgctcaaggagccctggtggcctgctgcatagttttcttcgtgtctgacctcttcaagactaagacgacgctctccctgcctgcccctgctatccggaaggaaatcctttcacctgtggacattattgacaggaacaatcaccacaacatgatgtaggtgccacccacctcctgagctgtttttgtaaaatgactgctgacagcaagttcttgctgctctccaatctcatcagacagtagaatgtagggaaaaacttttgcccgactgatttttaaaaaggaaaaaaaaaatgttttactatgtggccttccaaaataggtagtgtttgcctatgtggaaacaacagcaaactaacaccaagtgccagagtcctggatgtgcaattggtttaagtgttcatgttctagtgaacacagcttgttcaggaacaaacactaaaacgatttgagtagaggctgctggtcaccttttgtgacctgaggaatcccaggcctgtgagaaaagcaaaaattcacattgcagcacatgatgccagaaatagcactgaatcaagaaaatagccattgcggagctgccctcttgagtctttctgtccatcccattctattctgtactgtgactttagttcaggaagttttgttttgtgttttaaataaaaggaaagagcaagtttgctcagtcaagtgatcagatcccgaatctagattcccagttctaaggccttatcacctcccctgcccataggccaacaaccatagttcctcacattagtgattagcagactctttgtggacgagtgaatttcacaaacagcacaatttcagaagaaatcgagggcacaggccctcacttttcttcttttgacgcatcatcctgtgatgttgaaatgtcaattgcaggatgctgatgttgtgcacgtcaatcaccgggcacttgcatactcttagaaacagttcgacttcggttactgccttctcccttgaaatccttgctgcgtgcccaccaggatttcctgtgagggcccaggaatgagcaaggcatggtctgccaccagctgacggaaagcagccttctgtacaacagatgggagggtgaagggggcagaatgaaaatcgaaccaaccttttagctgttgcaaatcagaaggagccagagaagcaggcagtctcatgcatgagaggttacccttcaggatgacagagctgagggtctttgtaggagttgctcttgctgtgtaaagcactattgtcttggggttgagccctagggcagttcttggtaggttctgctgggcagaacatatgggttaaatctcggtagagagtttccctcatcctctatccgtaagtgtccttccatgcaaggtcccactctaggtgatagacagggaccccttctactgaacctttgaggaaaggaggaaggaagaaatgcgtttagatcttggatgcagacctttcaaagggttaaatgtaaccatatggatcaaccacatgcacatccttactacagaatccgtcctttcatttcaacttatagcaagctatgatttttatatataaatattatataaataatgtataaaacattaaaagttaactatgtaagatattatttctgaaacaatttagctatatccactatgattataaactgtgtctcgacctgtgttatttacattagctgcttaaaaaagcattgagttaatttttttaaatatcaactaaaatatcatagttctgtggtagacattgttttataatgaaataactgcaactagagaaaactgtataaaaacattaaattgtcagtatttttgtaaggttccattttgtaaagagaataatattcaaagacttttgtagcatacaaagtgaaaacttgtatctgcgaaactatacttgtattaaatgtgctttttaaataaaagctcgtaacacaactaaaaaaaaaaaaaaaaaa

SEQ ID NO: 29427 - DNA, 3974 bp, Homo Sapiens
tgtgcctggagataccattgtggaccctggagaggcacctgctgcttatgcggtaaaacctctaccaccccaaacctggtcagtttgaggggagccgctgccatagtatccacagagaaggccggagttccagccgtgtggagcagcagaggggagtctgacagggtcacctcctccacagagagaattggcagctgactgcactgccaggagccaaggcctaggtgtgtggagcctggaagaccagggatacctgaggcaggaggtgcagcgtgtggagtgagaaacccgagagggactggggcctgtgctcaggatcagcagagcaggcaggcagagtggagagggagagacggagccccagaaggggagcaggaggagagggaagtagtggcagcagcccaggccaggcgtgtgtcctgcaagtgctaggaccagccacccctccccatggcctccaagccggctgccgggaagagcagaggggagaagcggaagagggtggtgctgacactgaaggagaagattgacatctgcacgcgcctggagaagggcgagagccggaaggcactgatgcaggagtacaatgtgggcatgtccaccctctacgacatcagggcccacaaggcgcagctgctccggttcttcgccagctccgactccaacaaggcgctggagcagcggcgcacgctgcacacgcccaagctggagcacctggaccgcgtcctgtacgagtggttcctggggaagcgctccgagggcgtccccgtgtcaggccccatgctcatcgagaaggccaaggacttctacgagcagatgcagctcactgagccctgcgtgttctccggagggtggctttggcgctttaaggccagacacggcattaaaaagctagatgcatccagtgaaaagcagtcagccgaccaccaggccgcggagcagttctgtgcgtttttcaggagcttggctgctgagcacgggctgtccgccgagcaggtttacaacgctgatgagaccggccttttctggcggtgcctgccaaatcccactccggaaggcggggctgtgcctggccccaagcagggcaaggaccggctgaccgtgctgatgtgtgccaacgccacgggctcccacaggctcaagcccttggccatcgggaagtgcagcggtcccagggctttcaaaggcatccagcacctgcccgtcgcctataaggcccaggggaacgcctgggtggacaaggagattttttccgattggttccatcatatctttgtgccctcggtgagagagcacttcagaaccataggtttgccggaagacagcaaagccgttctcttgctggacagctcccgggctcacccgcaggaggccgagctggtgtccagtaacgttttcaccatcttcctgcctgccagcgtggcctcattggtgcagcccatggagcagggcattcggagagatttcatgaggaacttcattaaccctccggtccccctgcagggcccccacgcccgctacaacatgaacgatgccatattcagcgtggcctgtgcctggaacgcagtccctagccacgtcttcaggcgggcctggaggaagctgtggccgtcggttgcgtttgccgaaggctcctcctctgaggaggagttggaggcagagtgcttcccagtgaagccccacaacaagtcctttgcacacatcctggagcttgtgaaggaaggctcctcctgcccgggccagcttcgccagcgccaggccgccagctggggggtagcgggaagggaggcagaagggggacggccccctgctgccacgtcgccagcagaggttgtgtggagttcagaaaagactccgaaagctgaccaggacggcagaggagatcctggtgagggcgaggaggtggcctgggagcaggcggccgtggcctttgacgcagtcctgcgctttgcggagcggcagccatgcttcagtgcgcaggaagtggggcagctgcgggcgctgcgtgccgtgttccggagccagcagcaggtgaggaggcggcgtggtgccctcggggctgtggtcaaggttgaagccctccaggagggccctggtggctgtggggccacagctcagtctcccttgccctgctcatccacagcaggtgacaactgatggcttctctgccctgccctggccactggccctgtttctccccacaccctggagtggcatggtcctgtgccccgaccccacctgaggcaggagggcatgtgcagacactcaagagcccttccaggagtgggtcgcccacgggtgtggctcgggtgcccaggacggtctgtgcccgaggttcctgtcaatacaggttttattttatcacttgccgtgtcatccgaaagtgaggaaatgttttggaagggtccaccctagcctagaacaagccagagccgcaccctggctggaatgggggccaggctgagccgatctggtctcgtgttcgctggctgatcattgcagtatcagagggtggagatgtcagtctgtccacgtggagagaagttgccctccaggccgacaggaggccatgcccaccgcccctggacaggcttcgtctcagaaggctctatctgctgggctggcggccatccccgtgttgggtggaccccgagcacggttgcctgaggtccgatggcccgagagctgggactcagttcttggcctgctagcggctgaacaggccgcacatctcacttcagttgtggcctcattcagcagaatgactctggaaccatcctctgttacccgcagatcctgtcccatgggctctggccccaagatgttggggggccccacggagagttgacttggtagagttcctttctgggaagaaagtaggagtggctgaccaggccctgctcatcacccggatagaggacacggaccctgtgtggtattttggcattttggctcagagtccaatgtaccatgttgcccagaatttcatacttatggcctttacatgaatacgtcttgatcagacattcagagattagtcttaggtttgcacgtaagtcactgaaaacagtaaaacaggctgcttagatttctagcagtatgtgtgctcttatccccagctgttagcacgttagtaatacttttggggaggagttgtctgtcctggtcagttttcacagaggcggttgtaagaggatgtggttattttctccatgtctgtagttgctttgcggcatctccatttcacgggcaacactcactgcctgcagctgagattccagaacgccctgtgtccacagtgattagcctcgtctttcagcgagcataaaataggtgcattgtccttttcttttcttgaggcagggtctcactctgttgaccaggctggagtgaagtggtgtgatcccagctcactgcagcctcgacctccctggcttgagtgatcctcccgccccagcctcctgagtagctgggactagaggcacgcaccaccgcgcctttttattttttttgtagagacagggtctcactgtgttgcccaggctggtcttgaactcttggcctcaagcgatcctccttcctcatccttctaaagtgctgggattacaggtgtgagccacagcactcggcctaaataggtttttcttgctatgttattttcagtgctttgcccttgaattcttttcctctcttaaattcatatcatttggccgagtcagcacgtagtttgcattccagcgtctgctgttgattccactgaaacctctgttctcatgaaggagaggatttggctcgctgtggtttctcgtactttcacatctctgtagatacaggggcaaaagtcattgctgacagagccctatctatgtcctggaagtgtgtgtttcttgctttgaatgcatgtgtgaagattataaaagccaaatagtttttaaagatctcggtgctgaacgacagtcccagttcccatttgt

SEQ ID NO: 29428 - DNA, 4134 bp, Homo Sapiens
cgaagatggcggcgtcgcgtcgctctcagcatcatcaccaccatcatcaacaacagctccagcccgccccaggggcttcagcgccgccgccgccacctcctcccccactcagccctggcctggccccggggaccaccccagcctctcccacggccagcggcctggcccccttcgcctccccgcggcacggcctagcgctgccggagggggatggcagtcgggatccgcccgacaggccccgatccccggacccggttgacggtaccagctgttgcagtaccaccagcacaatctgtaccgtcgccgccgctcccgtggtcccagcggtttctacttcatctgccgctggggtcgctcccaacccagccggcagtggcagtaacaattcaccgtcgtcctcttcttccccgacttcttcctcatcttcctctccatcctcccctggatcgagcttggcggagagccccgaggcggccggagttagcagcacagcaccactggggcctggggcagcaggacctgggacaggggtcccagcagtgagcggggccctacgggaactgctggaggcctgtcgcaatggggacgtgtcccgggtaaagaggctggtggacgcggcaaacgtaaatgcaaaggacatggccggccggaagtcttctcccctgcacttcgctgcaggttttggaaggaaggatgttgtagaacacttactacagatgggtgctaatgtccacgctcgtgatgatggaggtctcatcccgcttcataatgcctgttcttttggccatgctgaggttgtgagtctgttattgtgccaaggagctgatccaaatgccagggataactggaactatacacctctgcatgaagctgctattaaagggaagatcgatgtgtgcattgtgctgctgcagcacggagctgacccaaacattcggaacactgatgggaaatcagccctggacctggcagatccttcagcaaaagctgtccttacaggtgaatacaagaaagacgaactcctagaagctgctaggagtggtaatgaagaaaaactaatggctttactgactcctctaaatgtgaattgccatgcaagtgatgggcgaaagtcgactcctttacatctagcagcgggctacaacagagttcgaatagttcagcttcttcttcagcatggtgctgatgttcatgcaaaagacaaaggtggacttgtgcctcttcataatgcatgttcatatggacattatgaagtcacagaactgctactaaagcatggagcttgtgttaatgccatggatctctggcagtttactccactgcacgaggctgcttccaagaaccgtgtagaagtctgctctttgttacttagccatggcgctgatcctacgttagtcaactgccatggcaaaagtgctgtggatatggctccaactccggagcttagggagagattgacttatgaatttaaaggtcattctttactacaagcagccagagaagcagacttagctaaagttaaaaaaacactcgctctggaaatcattaatttcaaacaaccgcagtctcatgaaacagcactgcactgtgctgtggcctctctgcatcccaaacgtaaacaagtgacagaattgttacttagaaaaggagcaaatgttaatgaaaaaaataaagatttcatgactcccctgcatgttgcagccgaaagagcccataatgatgtcatggaagttctgcataagcatggcgccaagatgaatgcactggacacccttggtcagactgctttgcatagagccgccctagcaggccacctgcagacctgccgcctcctgctgagttacggctctgacccctccatcatctccttacaaggcttcacagcagcacagatgggcaatgaagcagtgcagcagattctgagtgagagtacacctatacgtacttctgatgttgattatcgactcttagaggcatctaaagctggagacttggaaactgtgaagcaactttgcagctctcaaaatgtgaattgtagagacttagagggccggcattccacgcccttacacttcgcagcaggctacaaccgcgtgtctgttgtagagtacctgctacaccacggtgccgatgtccatgccaaagacaagggtggcttggtgccccttcataatgcctgttcatatggacactatgaggtggctgagcttttagtaaggcatggggcttctgtcaatgtggcggacttatggaaatttacccctctccatgaagcagcagctaaaggaaagtatgaaatctgcaagctccttttaaaacatggagcagatccaactaaaaagaacagagatggaaatacacctttggatttggtaaaggaaggagacacagatattcaggacttactgaaaggggatgctgctttgttggatgctgccaagaagggctgcctggcaagagtgcagaagctctgtaccccagagaatatcaactgcagagacacccagggcagaaattcaacccctctgcacctggcagcaggctataataacctggaagtagctgaatatcttctagagcatggagctgatgttaatgcccaggacaagggtggtttaattcctcttcataatgcggcatcttatgggcatgttgacatagcggctttattgataaaatacaacacgtgtgtaaatgcaacagataagtgggcgtttactcccctccatgaagcagcccagaaaggaaggacgcagctgtgcgccctcctcctagcgcatggtgcagaccccaccatgaagaaccaggaaggccagacgcctctggatctggcaacagctgacgatatcagagctttgctgatagatgccatgcccccagaggccttacctacctgttttaaacctcaggctactgtagtgagtgcctctctgatctcaccagcatccaccccctcctgcctctcggctgccagcagcatagacaacctcactggccctttagcagagttggccgtaggaggagcctccaatgcaggggatggcgccgcgggaacagaaaggaaggaaggagaagttgctggtcttgacatgaatatcagccaatttctaaaaagccttggccttgaacaccttcgggatatctttgaaacagaacagattacactagatgtgttggctgatatgggtcatgaagagttgaaagaaataggcatcaatgcatatgggcaccgccacaaattaatcaaaggagtagaaagactcttaggtggacaacaaggcaccaatccttatttgacttttcactgtgttaatcagggaacgattttgctggatcttgctccagaagataaagaatatcagtcagtggaagaagagatgcaaagtactattcgagaacacagagatggtggtaatgctggcggcatcttcaacagatacaatgtcattcgaattcaaaaagttgtcaacaagaagttgagggagcggttctgccaccgacagaaggaagtgtctgaggagaatcacaaccatcacaatgagcgcatgttgtttcatggttctcctttcattaatgccattattcataaagggtttgatgagcgacatgcatacataggaggaatgtttggggccgggatttattttgctgaaaactcctcaaaaagcaaccaatatgtttatggaattggaggaggaacaggctgccctacacacaaggacaggtcatgctatatatgtcacagacaaatgctcttctgtagagtgacccttgggaaatcctttctgcagtttagcaccatgaaaatggcccacgcgcctccagggcaccactcagtcattggtagaccgagcgtcaatgggctggcatatgctgaatatgtcatctacagaggagaacaggcatacccagagtatcttatcacttaccagatcatgaagccagaagccccttcccagaccgcaacagccgcagagcagaagacctagtgaatgcctgctggtgaaggccagatcagatttcaacctgggactggattacagaggattgtttctaataacaacatcaatattctagaagtccctgacagcctagaaataagctgtttgtcttctataaagcattgctatagtg

SEQ ID NO: 29429 - DNA, 7586 bp, Homo Sapiens
gttctttgtgacacatcacacagaattggagtgctgtccttctggagagtggtggagaaccaagatacagttcagaaccaaaggaatagagaagggctttgatttctttttggctttagattggggatttgggaggcttagcaggaaagatgtccactgaaaatgtggaagggaagcccagtaaccttggggagagaggaagagcccggagctccactttcctcagggttgtccagccaatgtttaaccacagtattttcacttctgcagtctctcctgctgcagaacgcatccgattcatcttgggagaggaggatgacagcccagctccccctcagctcttcacggaactggatgagctgctggccgtggatgggcaggagatggagtggaaggaaacagccaggtggatcaagtttgaagaaaaagtggaacagggtggggaaagatggagcaagccccatgtggccacattgtcccttcatagtttatttgagctgaggacatgtatggagaaaggatccatcatgcttgatcgggaggcttcttctctcccacagttggtggagatgattgttgaccatcagattgagacaggcctattgaaacctgaacttaaggataaggtgacctatactttgctccggaagcaccggcatcaaaccaagaaatccaaccttcggtccctggctgacattgggaagacagtctccagtgcaagtaggatgtttaccaaccctgataatggtagcccagccatgacccataggaatctgacttcctccagtctgaatgacatttctgataaaccggagaaggaccagctgaagaataagttcatgaaaaaattgccacgtgatgcagaagcttccaacgtgcttgttggggaggttgactttttggatactcctttcattgcctttgttaggctacagcaggctgtcatgctgggtgccctgactgaagttcctgtgcccacaaggttcttgttcattctcttaggtcctaaggggaaagccaagtcctaccacgagattggcagagccattgccaccctgatgtctgatgaggtgttccatgacattgcttataaagcaaaagacaggcacgacctgattgctggtattgatgagttcctagatgaagtcatcgtccttccacctggggaatgggatccagcaattaggatagagcctcctaagagtcttccatcctctgacaaaagaaagaatatgtactcaggtggagagaatgttcagatgaatggggatacgccccatgatggaggtcacggaggaggaggacatggggattgtgaagaattgcagcgaactggacggttctgtggtggactaattaaagacataaagaggaaagcgccattttttgccagtgatttttatgatgctttaaatattcaagctctttcggcaattctcttcatttatctggcaactgtaactaatgctatcacttttggaggactgcttggggatgccactgacaacatgcagggcgtgttggagagtttcctgggcactgctgtctctggagccatcttttgcctttttgctggtcaaccactcactattctgagcagcaccggacctgtcctagtttttgagaggcttctatttaatttcagcaaggacaataattttgactatttggagtttcgcctttggattggcctgtggtccgccttcctatgtctcattttggtagccactgatgccagcttcttggttcaatacttcacacgtttcacggaggagggcttttcctctctgattagcttcatctttatctatgatgctttcaagaagatgatcaagcttgcagattactaccccatcaactccaacttcaaagtgggctacaacactctcttttcctgtacctgtgtgccacctgacccagctaatatctcaatatctaatgacaccacactggccccagagtatttgccaactatgtcttctactgacatgtaccataatactacctttgactgggcatttttgtcgaagaaggagtgttcaaaatacggaggaaaccttgtcgggaacaactgtaattttgttcctgatatcacactcatgtcttttatcctcttcttgggaacctacacctcttccatggctctgaaaaaattcaaaactagtccttattttccaaccacagcaagaaaactgatcagtgattttgccattatcttgtccattctcatcttttgtgtaatagatgccctagtaggcgtggacaccccaaaactaattgtgccaagtgagttcaagccaacaagtccaaaccgaggttggttcgttccaccgtttggagaaaacccctggtgggtgtgccttgctgctgctatcccggctttgttggtcactatactgattttcatggaccaacaaattacagctgtgattgtaaacaggaaagaacataaactcaagaaaggagcagggtatcacttggatctcttttgggtggccatcctcatggttatatgctccctcatggctcttccgtggtatgtagctgctacggtcatctccattgctcacatcgacagtttgaagatggagacagagacttctgcacctggagaacaaccaaagtttctaggagtgagggaacaaagagtcactggaacccttgtgtttattctgactggtctgtcagtctttatggctcccatcttgaagtttatacccatgcctgtactctatggtgtgttcctgtatatgggagtagcatcccttaatggtgtgcagttcatggatcgtctgaagctgcttctgatgcctctgaagcatcagcctgacttcatctacctgcgtcatgttcctctgcgcagagtccacctgttcactttcctgcaggtgttgtgtctggccctgctttggatcctcaagtcaacggtggctgctatcatttttccagtaatgatcttggcacttgtagctgtcagaaaaggcatggactacctcttctcccagcatgacctcagcttcctggatgatgtcattccagaaaaggacaagaaaaagaaggaggatgagaagaaaaagaaaaagaagaagggaagtctggacagtgacaatgatgattctgactgcccatactcagaaaaagttccaagtattaaaattccaatggacatcatggaacagcaacctttcctaagcgatagcaaaccttctgacagagaaagatcaccaacattccttgaacgccacacatcatgctgataaaattcctttccttcagtcactcggtatgccaagtcctcctagaactccagtaaaagttgcctcaaattagactagaacttgaacctgaagacaatgattatttctggaggagcaagggaacagaaactacattgtaacctgtttgtctttcttaaaactgacatttgttgttaatgtcatttgtttttgtttggctgtttgtttattttttaacttttatttcgtctcagtttttggtcacaggccaaataatacagcgctctctctgcttctctcttgcatagatacaatcaagacaatagtgcaccgttccttaaaaacagcatctgaggaatcccccttttgttcttaaactttcagatgtgtcctttgataaccaaattctgtcactcaagacacagacacccacagaccctgtcctttgcctctattaagcagaggatggaagtattaaggattttgtaacaccttttatgaaaatgttgaaggaacttaaaactttagctttggagctgtgcttactggcttgtctttgtctggtagaacaaaccttgacctccagacagagtcccttctcacttatagagctctccaggactggaaaaagtgctgctattttaacttgctcttgcttgtaaatcctaatcttagagttatcaaaagaagaaaaaactgaaggtactttactccctatagagaaaccattgccatcattgtagcaagtgctggaatgtcccttttttcctatgcaacttttttataaccctttaatgaacttatctgtggagtacattgaagaatatttttcttcctagattttgttgtttaaattatggggcctaacctgccacttattttttgtcaatttttaaaacttttttttaattactgtaaagaaaatgaattttttcctgcagcaggaaacatagttttcagtagttctacctcttatttgtagctgccaggctttctgtaaaaattgtattgtatataatgtgatttttacacatacatacacacacaaatacacaatctctagggtaagccagaaggcaagatcagattaaaaacaccatgtttctaagcatccatttttccctttctttaaaagaaacttaactgttctatgaaggagattgagggagaagagacaaactcctatgtcatgagaataaccgatgttctgataatagtagcatctaggtacagatgctggttgtattaccacgtcaatgtcctatgcagtattgttagacattttctcattttgaaatatttgtgtgtttgtgtatgtgctctgtgccatggctggtgtatatatgtgcaatgttagaaggcaaaagagtgatggtaggcagagggcaaagtcattgaatctcttatgccagttttcataaaacccaaaccacatatgaaaaaatccattaagggtccaagaagtctgtccatatgaaaatgagggtaaatatagtttatttcccaggtatcagtcattataattgatataatagctctaacatgcaatataaaattcataggagtattaatagcccatttacacatctataaaatgtaatgggattgcagagctgcagagtacagtgtaacagtactctcatgcaatttttttcaggatgcaaaggcaattattctttgtaagcgggacatttagatatatttgtgtacatattatatgtatgtatatttcaaagtaccacactgaaaattagacatttattaaccaaatttaacgtggtatttaaaggtaatatttttaatatgatacattacatattgtgaatgtatactaaaaaaacattttaaatgttaaaattataatttcagattcatataaccacaactgtgatatatcctaactataaccagttgttgaggggtatactagaagcagaatgaaaccacattttttggtttgataatatgcacttattgactcccactcattgttatgttaattaagttattattctgtctccttgtaattttgattacaaaaattttattatcctgagttagctgttacttttacagtacctgatactcctaaaacttttaacttatacaaattagtcaataatgaccccaattttttcattaaaataatagtggtgaattatatgttattgtgttaaaacctcacttgccaaattctggcttcacatttgtatttagggctatccttaaaatgatgagtctatattatctagctttctattaccctaatataaactggtataagaagactttccttttttctttatgcatggaagcatcaataaattgtttaaaaaccatgtatagtaaattcagcttaacccgtgatcttcttaagttaaaggtacttttgttttataaaagctctagataaaactttcttttctgatcatgaatcaagtatctgtggtttcatgcccctctctatacctttcaaagaactcctgaagcaacttaactcatcatttcagcctctgagtagaggtaaaacctatgtgtacttctgtttatgatccatattgatatttatgacatgaacacagaatagtaccttacatttgctaaacagacagttaatatcaaatcctttcaatattctgggaacccagggaagtttttaaaaatgtcattactttcaaaggaacagaagtagttaaccaaactaacaagcaaaacctgaggtttacctagtgacaccaaattatcggtattttaactgaatttacccattgactaagaatgaaccggatttggtggtggttttgtttctatgcaaactggacacaaattacaacagtaaatttttttataagtgcttctcccttctccatgatgtgacttccggagataaaggattcaaaagataaagacaaagtacgctcagagttgttaaccagaaagtcctggctgtggttgcagaaacactgttggaagaaaagagatgactaagtcaagtgtctgccttatcaaaagagcaaaaatgcctctggttttgtgtttgggagaaaaatatcttggacgcactgttttccttgataaaagtcatcttctctactgtgtgaaatgaatacttggaattctaattgttttgtgtgccaggggcagtaatgtccctgcctcttctcccaatcaaggttgaggagtggggctggggagaggacttaactgacttaagaagtaggaaaacaaaaacctctctcctcagccttccacctccaagagaggaggaaaaacagttgtctgctgtctgtaattcagtttgcgtgtattttatgctcatgcaccaacccatacagagtaaatcttttatcaactatatactggtgtttaatagagaatgattgtcttccgagttttttggttccttttttaactgtgttaaagtacttgaaatgtattgactgctgactatattttaaaaacaaaatgaaataatttgagttgtattacagaggttgacattgttcagggatgggacaaagccttcttcaatccttttcatactacttaatgattttggtgcaggaacctgagattttctgatttatatttcatgatatttcacatttgctcttcacagcatgagcatgaagcccagtggcaccaaatggctgggtacaatcaagtgatattttgtagcacctcactatctgaaaggccatgagttttcagatgatttcattgagcttcattgcagcctgaaattttaaaaaagttgtgtaatacgccaaccagtcaagttgtgttttggccagagatttagatatgtccaatttcctggctcatttcattgtgctctatgggtacgtataaaaagcaagaattctgtttcctaggcaaacattgcaactcagggctaaagtcatccagtgaaacttttagagccagaagtaactttgtcccagtcctacaatgtgaaaagagtgaatagttgcctctttttagccattttcatggctggtacatattcgtacgcattacttttcagaatcaatacgcactttcagatattcttatttttattctcttaagtctttattaactttggagagagaaatgatgcatctttttattttaaatgaagtagatcaacatggtggaacaaaatgataaagaacagaaaacatttcaatatattactaataactttttccaatataaatcctaaaattcctataacatagtattttacagttttatgaagctttctattgtgacttttatggaattaagagatgaagaagatgagatattttagcatttatatttttcaaaattatatgtatacttaaaaataaagtaactttatgc

SEQ ID NO: 29430 - DNA, 4896 bp, Homo Sapiens
gagctgcagtcagatccggggatggagggagccggagaagaggagtgagaaggccggggaggcaggccctgctgtcttcctgcaggccggcagcctgctggcagtggaggaccaggccgtccaggaaaggaaggggtcaggaggtcgggcagggcctcagcaggttcagacaagtccccagaagggagctgcaggcgccctcgagtccaggccccaagcctggctccggttgtccaaagagggcctaggccaggcctctggtgcggaaactgagtcacagccagacctcagggcacggcctagacgcttacgagccaaagttaggggtagagagcagagacctccggggggtctcagggagtagggggcttcagggcctcccagtctagagccggattggcgagttagacgcttgtagatccaaggttggattggggtggggtctctgggacgttggatcgctacgcaaggattggggggattcaagtgcttagagatcgaagtctgccctgggtagggggagtcagacaattggaaagcctaggtagttatttggggaggggtctctacgccttggcgaagcgcacagctgcatctttttggcttgaggcctgaggccttgtcgagaagcttccgtgaaagggtgggccagccgggccacgagaaagaaagtgaataaatcaggaatataagtgggcggggggcccctgagaggggggtcgcaaagggtgagacatggccaccaggcgtttaaccgacgctttcttgttgttgcggaataattccatccaaaaccggcagctgttagccgagcaacttgctgatgaccgtatggcactggtgtcaggcatcagcttagatccagaagcagcgattggtgtgacaaaacggccacctcctaagtgggtggatggagtggatgaaattcagtatgatgttggccggattaagcagaagatgaaagaattggccagccttcatgacaagcatttaaacagacccaccctggatgacagcagcgaagaggaacatgccattgagataactacccaagagatcactcagctcttccacaggtgccagcgtgccgtgcaggccctgccgagccgggcccgggcctgctccgagcaggaggggcggctgcttgggaacgtggtggcctcgctggcgcaggccctgcaggaactctccaccagcttccggcacgcacagtcaggctacctcaaacgcatgaagaatcgagaggaaagatcccagcattttttcgacacatcagtaccactaatggatgatggagacgataacactctttaccatcggggttttacagaggaccagttagttctggtggagcagaacacactgatggtggaagagcgggaacgagagattcgccagattgtacagtccatttctgacctgaatgaaatattcagggacttaggggcgatgattgtagaacagggtacagtccttgacagaattgactataacgttgaacagtcctgtatcaaaactgaagatggtttgaaacagcttcacaaggcagaacagtatcaaaagaagaatcggaagatgcttgtgattttaatattatttgtcatcatcattgtgctcattgttgtcctcgttggcgtgaagtctcgataagtggcattgggttttcgtgtgtgccgcgcgtgtggatctcccgggtgtgaggggcttggcctgcgccccgccagctgcccgcagaggtgcagcctcgaggaatctgagggcgtcggggcagcgaacctttgcatccacggactcctccttccctagtcctgctcaagcggtccggggaatgggtttttgtttttccttcattgttgagaatttaaggacctttgatactgctgcacaatagagattgagttctgggatcagttataatatatattttttttagaaagagaaaatgagctgagagtttacaggcactgcagaagctgttcagtattatatgtgtatatgctatttttttagcagccatgtctgagcagaatgttaacataatttttggaaaaattttctttaaaccatctggtttttaagaaatttggtaccaaaaattgatgagtagaggcaaaaatgccccttcatctttctctatatattttccagttgaaaacaaactaagaagtcctttaagaatttataatccgttccccattaacttaatttagcttttccatcactgttaatgatcagagtaacaaagtgtgaaaaataagaaaccatcattgatgttaattaacacatttagatgggccagttaaaacagcttcataagttttaaattaattgtaaatggaatattcctcatttaaaatttttgcactgcattttctactgtaaaccaaaagaggttactaagcaaaaccacctaaatttaagttggtgatttaaatgaatctcacattaaaagaaagcttgacagtgttatgaaagccaccagactcagccagtgtgtccccatgggtatccccagccatccttgctcaatccattacttatatactaactacataatgacctgttcaaaccagactctatttaatgaactgtgaatttacacagaggccattttaaatgggtcaccccatttaggattagtggatctcaaattattaaccaaacatcactccatttcaaagtaaaatattccaccagcgatttgatttattggctcttccattgccactgagcaatgcccaggaagcaggcacattgccaaggactgggggcatcttgactaggaagctcctcgtttgtgtgagcgtgggtcagaccgccaaagtaggacttcatcgtttacctacctattatcaatatggtgcttgaatatattcctataactgtagaacagtgtggaaagtgatggtaactttgaagttgttcatgttttattggctttgttttaattgacactagtagagttttaatggtctttgtgtaaattttaatggcttttccattgtttttgcttctcttaaaaagtttaagaagaatatgacctcattaaatgtgctgttttatttggaccagtcacacaaaatgtctctctagagttgactttaaagttgtttacagaaatttaaactcaattccagagattgaagttgtccaaacagctcatgggcttagtgtccaaacccctgcccagccttccctttccaagttggtgccacctccaggtagccattggtggttttcctattactgatgtggctgtggaatgataaggtcctagaggggccctggcatttcaggaagcggacctggtattccctgacaaacattgcttaggaaagagggccggagaataagaagccagcacctcatcagtcagccctgcaatgtgagacttccgtagctgttgagagtcactgcaggtgttctttcatcccatctgattttaacccatggttgagacgttccaagttagatctgctgctcttaggtgtggggctgtccacattagggaacttgcctcaaaaacagtccacagtggcaataccggacttctgttcaagctttttaaagtgctgagccttacaaacccctgaaggaaggtgaccctttaagagaggatcatctttttttatatttattttcaccaaatagggtgatgagggttggtttttgttccctcaacccatttgggtaaaataacggatctgattagaaactgttttaaggaggggctgggctcggtggctcacgcctgtaatcccagactttgagaggccaaggcggtcacgaggtcaggagttcgagaccagcctagccaacatggtgaaaccccgtctctacaaaaaatacaaaaattagccgggtgggacacgcctgtaatcccagctactcaagaggctgaggcaggagaatagcttgaacccgggaggcagaggttgcagtgagccgagatcacaccactgcactccagcctgggtgacagagcgaggctccgtctcaaaaaaaaaaaaaaaaaattgttttagcgctgggtttcccaaggtgggagagacagacccagcctggagctggcccctggcctgtgtgctgacttcttggggtcctcaaaccactgtatttttctgttgagcctgtacttggggagagatcagtagcatttgaggaagtaagagaaaagaatcatggtacctcagggtttctttccctttactcgctggcagccattgtctgtgggcacctcatgtttttccacactctactgggccgtggaggtaacgatcacccaggccagtctcctctgcctgggatgcgccctctgagaggaggcctagcagggcaggctccctctgggcatccctggatgcagcctctggacacatgcctcctttaaagtgtccgggtgcagctcaggttgagtggaggtagaaggagaaacagacatgtttaccacgcgttttccaaagctcctgatctttcccaagattgtaactgaaaactgctgtctcttgttttgttcgttttgggggtggtggtgctggctgggccatgcttgtgaagtgatgtgtgtctctgatttaacggattcactgttttctctgctaattgagagagcgttatttacattatttatttgttttgacacaagtgctttcagtgttttatcctagctaatggcttcttaaaggtaataaaacccttccaacgtaattggtcagataaaactttttttcttgtatgcttaaataaagcaattagtgaagcacttctatccaaaatgacttttttgtccttttttaaaaccaatttactgttactggaaactttttgtacaataaagcaatcacgcagattaaagaacatcctgcaatcctagtattaattttaaaaaaaaaaaaa

SEQ ID NO: 29431 - DNA, 1970 bp, Homo Sapiens
ggcgcggagctcgggcggccgtggaggaactcagcctcggccgcaggaggcgccgggagcggagccgccgggagtcgcgcaacaggtttccttctccatcgctgcgcccacaggggacgcgcgccctgccgggagaggggcttctcggttcgcactctcgctcccagtccaggcaaaatgaaagaccggctagcagaacttctggacttgtccaagcaatatgaccagcagttcccagacggggacgatgagtttgactcgccccacgaggacatcgtgttcgagacggaccacatcctggagtccctgtaccgagacatccgggacattcaggatgaaaaccagctgctggtggccgacgtgaagcggctgggaaagcagaacgcccgcttcctcacgtccatgcggcgcctcagcagcatcaagcgcgacaccaactccatcgccaaggccatcaaggcccggggcgaggtcatccactgcaagctgcgcgccatgaaggagctgagcgaggcggctgaggcccagcacggcccgcactcggcagtggcgcgcatttcgcgggcgcagtacaacgcgctcaccctcaccttccagcgcgccatgcacgactacaaccaggccgagatgaagcagcgcgacaactgcaagatccgcatccagcgccagctggagatcatgggcaaggaagtctcgggcgaccagatcgaggacatgttcgagcagggtaagtgggacgtgttttccgagaacttgctggccgacgtgaagggcgcgcgggccgccctcaacgagatcgagagccgccaccgcgaactgctgcgcctggagagccgcatccgcgacgtacacgagctcttcttgcagatggcggtgctggtggagaagcaggccgacaccctgaacgtcatcgagctcaacgtacaaaagacggtcgactacaccggccaggccaaggcgcaggtgcggaaggccgtgcagtacgaggagaagaacccctgccggaccctctgctgcttctgctgtccctgcctcaagtagcaggccggcccgggccgccaccgcccatcccagaccatggagcgcgctgggaaggacgcaccaaagccgggagctctgccctgcagggagttgccccaaccctttccggaactcagtctttagaaaagaaacgccaggttcaagaattgcaaaccagcctgtgcttggaaagatggttagttgataccgtccgatgattcttcagtaaagatagattcccacaaagttgtgcaatgtcattatatgacaccttgcactcttaccgtcttgacagaagccaagtaaggaactgaagttgtatctgactgtagggtgaatgtctgaggcctgcctcctaataaagactcaaggaggaagtcaattgggcatctgctaatagaatgaactcatgatggaaacttcagttcatttactttgtcctgaaaattccctggttctgttccattttgagcgaaattggccttgggaaaaaccacgttcttcctttccgattcttcatccggtctacgctatgcaattcctccccaaatatagatcttatttctgctcatttcccctacttattaaaatcacaccaaacacttactattttcttatctctttcactttttaaatatctttcaccaggttatattttggtattatttttccaaacatttttaagcactgaatatcgaacaagcactcaaattgaagtatcagtcatgttttgtgtatttttcgctgataaaaattatttaacatttatatttttacttgattacatatgcacatgtatgtaaatgtaaaatactaatattcactaatatatgtacataatgatcaattggtttaacttcttttatgtaagtatggtatataaatttcaagacgaaaaaaaaaaaaaaaaaaaaaaaaaaaaaaaaaaaaaaaaaaaaaaaaaaaaaaaa

SEQ ID NO: 29432 - DNA, 1986 bp, Homo Sapiens
tggggcctgaatcaactgctggtgtttgttgagcagaaacagtgagtctctgacttcccaccaacagctaacctgatatggaagagccaagaggcatctcagatttgtcaacattgctttaatgagctgaggaacttctcatggtaaactcagcagctgagtaacaggatgatggcaccacaacaggtagataatcaaggcaggaggtcaaagcactggagccaacacccgcccaggatggggtataaaagggttgggaggagaggaggcttcagtctcagtggctcagccttcccagctgatctgaagctcctgtgcagcctcagccctacaccatgacctccttctacagcacctcctcatgccctctgggttgcaccatggctcctggagcaagaaatgtctttgtctctcctatcgatgttgggtgccagcctgtggcagaggccaatgctgcctccatgtgcctcttggccaacgtggcacacgccaacagagtccgtgtggggtcgactcccctgggccgccccagcctctgtctgcccccaaccagtcacactgcttgtcccttgccagggacctgtcacattcccggcaacatcggaatctgtggggcctacggcaaaaacaccctgaatggccatgagaaggagaccatgaagttcctgaatgaccgcctggccaactacctggagaaggtgcgccagctggagcaggagaatgcagagctggagaccacactcctcgagaggagcaagtgccacgagtccaccgtgtgccccgactaccagtcctacttccgtacaatcgaggagctccagcagaagatcctgtgcagcaaggctgagaatgccaggctgattgtacaaattgacaacgcgaagctggctgctgatgactttaggatcaagctggagagtgagcgctcccttcaccagctggtggaggcggacaagtgcgggacgcagaagctcctggatgacgcgaccctggccaaggccgacctggaggcccagcaggagtccctgaaggaggagcagctctccctcaagagcaaccacgagcaggaagtaaagattctgaggagtcagctgggggagaagttccggatcgagctggacattgagcccaccattgacctgaacagggtgttgggggagatgcgggctcagtacgaggccatggtggagaccaaccaccaggatgtggaacagtggttccaagcccagtctgaaggcatcagcctgcaggccatgtcctgctccgaggagctgcagtgctgccagtcggagatcctggagctgagatgcacggtgaatgccctggaggtggagcgccaagcccagcacaccttgaaggactgtctgcagaactccctgtgtgaagcggaggaccgctacggcacagagctggcccagatgcagagcctcattagcaacttggaagagcagttgtctgagatccgggccgacctggagcggcagaaccaggagtaccaggtgctgctggacgtgaaggcccggttggagaacgagattgccacataccggaaccttactcccctgcaatccctgttccacgcctgcctcctgtacttcttgtccaagctgtggccctgtcaccggtgggtctccctctggccatggagccagcatggggagatgattctgaaggcccgagttaggagattgaggctggttgcactggggtcaggagtgccctcaccttgcccagtcttccttcaagactagactcactgaggcattttccctaaatcaaccggtagcagatacttccaaggagtggctccctgcctatgcctctaagctgtattttttgttgttgctaaaatgttgtaattatcttccatgaaagcaattatttttcctggtgtctcttcttggtacttttagttctattccagtgtttcagaatctccaaaaatgtaactgggttccctgcattaaatggtcaataaacctcctt

SEQ ID NO: 29433 - DNA, 3215 bp, Homo Sapiens
cctgtgcagcagctgaggaaccgtggatttcatattatagactaaaaccccattaaaactgctcaaaatccttcctgcagctgccaggcaacaacgaaagaagagaggtaaatcctattcttttccaatacaactgaagcactacattttagctctggctgctttacattgcagctcagtgttattagtagaaatatggatactgagacgagaacacagcactgcattgtccagccaggaaaaatagcagatgtaaaaagcttcaatgcatcaactgtcgggaagagtcaacagtgctacaagcagaacgggcaactacagctcttttgtttaacgaaagagagaatatgaaagaaagggaaaatttcagaagactaggacccatatgaacaaggagggtaactcgaagacaagcagacagatggacactttggatactgtgaaaagcaatcgcaggaggcagactgttgggggatgtgcgcatgttcgatagcatcttttttgctgaagtgatggcgtgccaaaagtattttcagtgggcataatcctcttcacataaatggcctgaccaaggagaatgactacaagagagacaatgtgactgaattagaaaatgattgccaaagaatagtattaaggagaagaaaacatttttgtcaccaatctctcatataccactactggatatttacaacatgcttcagtggaggagaagacactgctgctttgcaaagatgacctggaatgccaaaaggtctctgttccgcactcatcttattggagtactttctctagtgtttctttttgctatgtttttgtttttcaatcatcatgactggctgccaggcagagctggattcaaagaaaaccctgtgacatacactttccgaggatttcggtcaacaaaaagtgagacaaaccacagctcccttcggaacatttggaaagaaacagtccctcaaaccctgaggcctcaaacagcaactaactctaataacacagacctgtcaccacaaggagttacaggcctggagaatacacttagtgccaatggaagtatttacaatgaaaaaggtactggacatccaaattcttaccatttcaaatatattattaatgagcctgaaaaatgccaagagaaaagtccttttttaatactactaatagctgcagagcctggacaaatagaagctagaagagctattcggcaaacttggggcaatgaaagtctagcacctggtattcaaatcacaagaatatttttgttgggcttaagtattaagctaaatggctaccttcaacgtgcaatactggaagaaagcagacaatatcatgatataattcaacaggaatacttagatacgtactataatttgaccattaaaacactaatgggcatgaactgggttgcaacatactgtccacatattccatatgttatgaaaactgacagtgacatgtttgtcaacactgaatatttaatcaataagttactgaagccagatctgcctcccagacataactatttcactggttacctaatgcgaggatatgcacccaatcgaaacaaagatagcaagtggtacatgccaccagacctctacccaagtgagcgttatcctgtcttctgttctggaactggttatgttttttctggagatctggcagaaaagatttttaaagtttctttaggtatccgccgtttgcacttggaagatgtatatgtagggatctgtcttgccaagttgagaattgatcctgtaccccctcccaatgagtttgtgttcaatcactggcgagtctcttattcgagctgtaaatacagccacctaattacctctcatcagttccagcctagtgaactgataaaatactggaaccatttacaacaaaataagcacaatgcctgtgccaacgcagcaaaagaaaaggcaggcaggtatcgccaccgtaaactacattagaaaagacaattttttttcaatgtgcaatttgtaaatattgctaaaagcatgtatagttaggaactgattacatccgtaggacaagttttagttaaaactcatcacataaagaaattcaagaagtatttttttaatttctgaagaagttaattcttaaaactataacattatataacaaaaaaggtttcccaaaacaatctatttaaaaaactgtataaggagattctgtgtattaacatgcaataacaagcatgcataaatcaatggttcaagtcttctgttagggggccaataaaatgtatctgcatatgttttccacataaattttaattcaagaaatgacagtcaaaagatccttcattttagattaagcttttcattttaatatataatttaatgtaaataaaacatcactatcaattttaaggaaactttttaattgtgcaaaggataaattttttgacctattttagggttctaaatgcaataagatttagttgagttattccacaaacacattataaagttcagatgtttcatcaatgcagttctcacgaaagtatttactttttaaaaataactgagatattattttaaatttcttttattaatactttcttttattaatatatgggggaaaattattttgacatgacgtggtaaaatgtgaaaaactaatgtgtctcaggctcaagtttttatagttattaaatgtttcaaaatagacaagttttgtttcctcattgatgttaagaaccaaactcctatttcaatgagttattggattagaccaattactgcactcttaaacagcaccaccatttaatttcatgtaatatctaacttcgaatatatctgtaaaggataatcgaagcaaaagtaatcacttaaaggcacaaataggatgtactgttgaaaaagataaagagtgcaggtgcagtttcattcaacacatttttaagatgcatgtctgccaaaatgcaacatacgggaagtttatttcctgacagcaggtgtacacatgccaacacttaatcattttatggcacctatttctttcttggagtgccaagtttgcaaacctgcagtttttaatttggtagatgacaaatattctgaatcaccaattaaaaacctttttgggagggatggggaaaactacaaacgtttgacaaacacaattctaggatgaacaatgtatacaatgcacttttatgaagtttttaaaaataaaggaaaacaaaaaacttt

SEQ ID NO: 29434 - DNA, 658 bp, Homo Sapiens
gccggacggacgctcgtcttcgcccgccatggccgagagcgactgggacacggtgacggtgctgcgcaagaagggccctacggccgcccaggccaaatccaagcaggctatcttagcggcacagagacgaggagaagatgtggagacttccaagaaatgggctgctggccagaacaaacaacattctattaccaagaacacggccaagctggaccgggagacagaggagctgcaccatgacagggtgaccctggaggtgggcaaggtgatccagcaaggtcggcagagcaaggggcttacgcagaaggacctggccacgaaaatcaatgagaagccacaggtgatcgcggactatgagagcggacgggccatacccaataaccaggtgcttggcaaaatcgagcgggccattggcctcaagctccggggaaaggacattggaaagcccatcgagaaggggcctagggcgaaatgaacacaaagcctcgaaatcagtgcgctccagctgatctcgttccgccggttccccttggccgccagttccgttctcctcacgggccgaacggaacaaggggtccagcttgcgggggaccctccccagcccattcctgctgtcaaacaaacaaaaccttgcaaagcgaaaaaaaaaaaaaaaaaa

SEQ ID NO: 29435 - DNA, 4546 bp, Homo Sapiens
taccagtttgaatacatggcccagcacctggtgtttgccaactgcattcctttgatcctaaagttcttcaatcaaaacatcatgtcctacatcactgccaagaacagcatttctgtcctgaatgaaagtggcgcgccgcccctgacgttacccggatcggagaggttggaattcagattacggctgcgattcgggtgtctcggaccccggtgtgcaccggaccacggggaggcggctccaaaggcgcggtgaacgttggtgagggagggcagctctgcgccccaagagatggctcacaacaagatcccgccgcggtggctgaactgtccccggcgcggccagccggtggcaggaagattcttacctctgaagacaatattaggaccaagatatgatagtcaagttgctgaagaaaatcggttccatcccagcatgctctcaaattacctaaagagcctaaaggttaaaatgggcttgttggtggacctgacaaatacttcaaggttctatgaccgaaatgacatagaaaaagaaggaatcaaatatataaaacttcagtgtaaaggacatggtgagtgccctaccactgagaatactgagacctttattcgtctgtgtgagcggtttaatgaaagaaatccgcctgaacttataggtgttcattgtactcatggcttcaatcgcactggtttcctcatatgtgcctttttggtggagaaaatggattggagtatcgaagcagcagttgctacttttgcccaagccagaccaccaggaatctacaagggtgattatttgaaggaactttttcgtcggtatggtgacatagaggaagcaccacccccacctctattgccagattggtgttttgaggatgatgaagacgaagatgaggatgaggatggaaagaaggaatcagaacccgggtcaagtgcttcttttggcaaaaggagaaaagaacggttaaaactgggcgctattttcttggaaggtgttactgttaaaggtgtaactcaagtaacaacacaaccaaagttaggagaggtacagcagaagtgtcatcaattctgtggctgggaagggtctggattccctggagcacagcctgtttccatggacaagcaaaatattaaacttttagacctgaagccatacaaagtaagctggaaagcagatggtactcggtacatgatgttgattgatggcacaaatgaagtttttatgattgatagagacaattcagtatttcatgtttcaaatctggaatttccatttcgtaaagatcttcgtatgcatttatcaaatactctcttggatggcgagatgattattgacagagtaaatggacaggctgttcctagatatttgatatatgacataattaaattcaattcacagcccgttggagattgtgattttaatgttcgtctgcagtgtatagaacgagaaattataagtcctcgacacgaaaaaatgaagactgggctcattgacaaaacacaggaaccatttagcgtcagaaataagccgttttttgacatctgtacttcaagaaagctacttgaaggaaattttgccaaagaagtgagccatgaaatggatggacttatttttcagcctactggaaaatacaaacctggtcgatgtgatgatattttgaaatggaagcctcccagtctgaattctgtggattttcgtctaaaaataaccagaatgggaggagaagggttacttcctccgaatgttggcctcctgtatgttggaggttatgaaagaccctttgcacaaatcaaggtgacaaaagagctgaaacagtatgacaacaaaattatagaatgcaaatttgagaacaacagctgggtcttcatgagacagagaacagacaaaagttttcctaatgcctacaacactgccatggctgtgtgtaacagcatctcaaaccctgtcaccaaggagatgctgtttgagttcatcgacagatgtactgcagcttctcaaggacagaagcgaaaacatcatctggaccctgacacggagctcatgccaccaccacctcccaaaagaccacgccctttaacctaagacctgcctgtgacttgagggttaagaagaaagaggaatgaggaaaaaacgctgttgcccatttttgtcgccgagaaattgaaaaacgactgtggcttgatgttgatacacatttgaaattttttttaaaaaaaaagaattatcgtagccagcctgtaaatacttgatgcattcgtttcctcagtgctgcaatacatcatggacttaaacatcttatttatctgataaactcagccttaccttgtggaatctgaagattgaaatatccaaaggtttaaacaagatggaaatcaatgaaaaagaggccttgtttatatatgggtagcttcacatttaatttataaagttaacaatctggaaactgtgagcccataaaacagtattttttagaagttgtgttacaactgtagcaaattttccttttaaaaaatccaggcaatggcattaaacattcttgctatcatttaccatggatttcctacatttctgagatccctgtattcaaaaacaaatgacagggttgttaagttgtactatattaaacaacttggtctggtttatatcattttaacaagttttttggaaatgtaaaagaaaaaagtaaagctccatttttgtgaattgcattgtttctaaaggaagtattttgagtattttcatctgtttgtattgtttcgactatgatatcagatatccagtgtgtccattctggcagtggttttgagttacttcatggaacttggacatacaccaccaggtcctttatgtgttgttctcctgggagacttctttttttaaatgccaggctacttctgctttacctcagtggtatcagcacattgttaattacgttaaaacacacaactcactgtgatctatgggagtgatatcaaatacaaacgatgttgtgttccttctctcgaacaaaacagcaaagggaatgccagctaacttctttgattagaaggtaatgtcatggaatagaatgctgtcaccagaaaatgctctcccactgctagataaatgcagaggcaaagtgtagacatctgtaggaactaaatatcaaggaaatcaagacatttattttcaaagcgagaattctatctacattctattctgcggatgttatttctgttatacatctgaattttaaaatgtttactgatagataatggatttaaagggcggctaattgattgtctgccattgttgataaactgttctaattggtttgtgaaagaactctgagaattagctaaatggaggctagtgtatttatttttagaggtacatgttttaagtaaatgtatttaaaacaaattttcatggtctgaattgtatatgtaaatgcatatctgtgtaagtatatgcaagtgtatattctttctactgatttcagtcagacacgaaatccaactgaattacccggtagactgaatatctgacgggatttctatatggacatagcacagatgaaccaaaaatgtatttatattcacctgagttttaatgtttttaaacaaagttttctcctgcagtgcttttctatatgaaatagttgagtcaagcttgggcttttttcttcgttgttcccaagtcatgtaatgtatagtgaatttatccaaaacgccattgtaacgttttttactagagtgtttttgcacatttgggcgctaaagggattaaaacaactgatgccacaatgactattgaaggagggaaaattctcaaggttccatagtatctttacaaaatggattaaaaaaaaatgcctatgcaacttcaaatagtctgatgcctgcttccccaggacgagtgactcttccacggtgtgctgctttccctccgagcctgtggaaaggcagagcccttttgcagatacgaaagcaagcttttgccaatgatctttaatggagttaaaatgtttatggtaattgtaacctttcaaatgagttacgtgaaaagagcatctcacttttaatacacccagatattttcttcaagtctttgcgcatttttagcaggacttaattttcctaaatttattctttcctttcaattatagtgacatagagtagttggccttataagtagatcccatttagcccctgaacataataccatctgcagtattataaaagtcatttagaaggtcagggggataatctagaggcaggattttggacattgtgaaggaaatgtgctccttctcagctcacttcaataactattttctgagactgaagttttttagacaagaataagaaaactttgctttcttcagttatcacatgtgaaagcttttgctttttgttaggaaaaggtgtggatgactctactgcgtggatggttacatttgctttccgtgaaatgctcagaaaatgtcaggacattccttttccaattgtgtgtcagtgcgtattgtaataaaactactgatggaattccggaaaaaaaaaaaaaa

SEQ ID NO: 29436 - DNA, 1407 bp, Homo Sapiens
ctctccccggcccgatccgcccgccggctccccctcccccgatccctcgggtcccgggatgggggggcggtgaggcaggcacagccccccgcccccatggccgcccgtcggagccagaggcggagggggcgccggggggagccgggcaccgccctgctggtcccgctcgcgctgggcctgggcctggcgctggcctgcctcggcctcctgctggccgtggtcagtttggggagccgggcatcgctgtccgcccaggagcctgcccaggaggagctggtggcagaggaggaccaggacccgtcggaactgaatccccagacagaagaaagccaggatcctgcgcctttcctgaaccgactagttcggcctcgcagaagtgcacctaaaggccggaaaacacgggctcgaagagcgatcgcagcccattatgaagttcatccacgacctggacaggacggagcgcaggcaggtgtggacgggacagtgagtggctgggaggaagccagaatcaacagctccagccctctgcgctacaaccgccagatcggggagtttatagtcacccgggctgggctctactacctgtactgtcaggtgcactttgatgaggggaaggctgtctacctgaagctggacttgctggtggatggtgtgctggccctgcgctgcctggaggaattctcagccactgcggcgagttccctcgggccccagctccgcctctgccaggtgtctgggctgttggccctgcggccagggtcctccctgcggatccgcaccctcccctgggcccatctcaaggctgcccccttcctcacctacttcggactcttccaggttcactgaggggccctggtctccccgcagtcgtcccaggctgccggctcccctcgacagctctctgggcacccggtcccctctgccccaccctcagccgctctttgctccagacctgcccctccctctagaggctgcctgggcctgttcacgtgttttccatcccacataaatacagtattcccactcttatcttacaactcccccaccgcccactctccacctcactagctccccaatccctgaccctttgaggcccccagtgatctcgactcccccctggccacagacccccagggcattgtgttcactgtactctgtgggcaaggatgggtccagaagaccccacttcaggcactaagaggggctggacctggcggcaggaagccaaagagactgggcctaggccaggagttcccaaatgtgaggggcgagaaacaagacaagctcctcccttgagaattccctgtggatttttaaaacagatattatttttattattattgtgacaaaatgttgataaatggatattaaatagaataagtcataaaaaaaaaaaaaaaaaaaaaa

SEQ ID NO: 29437 - DNA, 2130 bp, Homo Sapiens
cattgtgttgggcacagctctcactcaccctccggcttcctgtcggggctttctcagccccaccccacgtttggacatttggagcatttccttccctgacagccggacctgggactgggctggggccctggcggatggagacatgctgcccctgctgctgctgcccctgctgtggggggggtccctgcaggagaagccagtgtacgagctgcaagtgcagaagtcggtgacggtgcaggagggcctgtgcgtccttgtgccctgctccttctcttacccctggagatcctggtattcctctcccccactctacgtctactggttccgggacggggagatcccatactacgctgaggttgtggccacaaacaacccagacagaagagtgaagccagagacccagggccgattccgcctccttggggatgtccagaagaagaactgctccctgagcatcggagatgccagaatggaggacacgggaagctatttcttccgcgtggagagaggaagggatgtaaaatatagctaccaacagaataagctgaacttggaggtgacagccctgatagagaaacccgacatccactttctggagcctctggagtccggccgccccacaaggctgagctgcagccttccaggatcctgtgaagcgggaccacctctcacattctcctggacggggaatgccctcagccccctggaccccgagaccacccgctcctcggagctcaccctcacccccaggcccgaggaccatggcaccaacctcacctgtcagatgaaacgccaaggagctcaggtgaccacggagagaactgtccagctcaatgtctcctatgctccacagaccatcaccatcttcaggaacggcatagccctagagatcctgcaaaacacctcataccttccggtcctggagggccaggctctgcggctgctctgtgatgctcccagcaacccccctgcacacctgagctggttccagggctcccctgccctgaacgccacccccatctccaataccgggatcttggagcttcgtcgagtaaggtctgcagaagaaggaggcttcacctgccgcgctcagcacccgctgggcttcctgcaaatttttctgaatctctcagtttactccctcccacagttgctgggcccctcctgctcctgggaggctgagggtctgcactgcagatgctcctttcgagcccggccggccccctccctgtgctggcggcttgaggagaagccgctggaggggaacagcagccagggctcattcaaggtcaactccagctcagctgggccctgggccaacagctccctgatcctccacggggggctcagctccgacctcaaagtcagctgcaaggcctggaacatctatgggtcccagagcggctctgtcctgctgctgcaagggagatcgaacctcgggacaggagtggttcctgcagcccttggtggtgctggtgtcatggccctgctctgtatctgtctgtgcctcatcttctttttaatagtgaaagcccgcaggaagcaagcagctgggagaccagagaaaatggatgatgaagaccccattatgggtaccatcacctcgggttccaggaagaagccctggccagacagccccggagatcaagcatctcctcctggggatgcccctcccttggaagaacaaaaggagctccattatgcctcccttagtttttctgagatgaagtcgagggagcctaaggaccaggaggccccaagcaccacggagtactcggagatcaagacaagcaagtgaggatttgcccagagttcagtcctggctggaggagccacagcctgtctgggggaaaggacaagtcagggaccacttgctgaagcacgaagagcccttgtggcaatgttaacattaactgatgtttaagtgctccaagcagagcagaaagaaaacagatgatggaattagagaggtgggctcaaatctaggccctggcactgtcatcaagcaattcactgcatccctctgtgcctcagtttcccattctgtaaatcagagatcatgcatgctacctcaaaggttgttgtgaacattaaagaaatcaacacatggaaatcaaaaaaaaaaaaaaa

SEQ ID NO: 29438 - DNA, 3561 bp, Homo Sapiens
agtgtagctgcgagaacctttgcacgcgcacaaactacggggacgatttctgattgatttttggcgctttcgatccaccctcctcccttctcatgggactttggggacaaagcgtcccgaccgcctcgagcgctcgagcagggcgctatccaggagccaggacagcgtcgggaaccagaccatggctcctggaccccaagatccttaagttcgtcgtcttcatcgtcgcggttctgctgccggtccgggttgactctgccaccatcccccggcaggacgaagttccccagcagacagtggccccacagcaacagaggcgcagcctcaaggaggaggagtgtccagcaggatctcatagatcagaatatactggagcctgtaacccgtgcacagagggtgtggattacaccattgcttccaacaatttgccttcttgcctgctatgtacagtttgtaaatcaggtcaaacaaataaaagttcctgtaccacgaccagagacaccgtgtgtcagtgtgaaaaaggaagcttccaggataaaaactcccctgagatgtgccggacgtgtagaacagggtgtcccagagggatggtcaaggtcagtaattgtacgccccggagtgacatcaagtgcaaaaatgaatcagctgccagttccactgggaaaaccccagcagcggaggagacagtgaccaccatcctggggatgcttgcctctccctatcactaccttatcatcatagtggttttagtcatcattttagctgtggttgtggttggcttttcatgtcggaagaaattcatttcttacctcaaaggcatctgctcaggtggtggaggaggtcccgaacgtgtgcacagagtccttttccggcggcgttcatgtccttcacgagttcctggggcggaggacaatgcccgcaacgagaccctgagtaacagatacttgcagcccacccaggtctctgagcaggaaatccaaggtcaggagctggcagagctaacaggtgtgactgtagagttgccagaggagccacagcgtctgctggaacaggcagaagctgaagggtgtcagaggaggaggctgctggttccagtgaatgacgctgactccgctgacatcagcaccttgctggatgcctcggcaacactggaagaaggacatgcaaaggaaacaattcaggaccaactggtgggctccgaaaagctcttttatgaagaagatgaggcaggctctgctacgtcctgcctgtgaaagaatctcttcaggaaaccagagcttccctcatttaccttttctcctacaaagggaagcagcctggaagaaacagtccagtacttgacccatgccccaacaaactctactatccaatatggggcagcttaccaatggtcctagaactttgttaacgcacttggagtaatttttatgaaatactgcgtgtgataagcaaacgggagaaatttatatcagattcttggctgcatagttatacgattgtgtattaagggtcgttttaggccacatgcggtggctcatgcctgtaatcccagcactttgataggctgaggcaggtggattgcttgagctcgggagtttgagaccagcctcatcaacacagtgaaactccatctcaatttaaaaagaaaaaaagtggttttaggatgtcattctttgcagttcttcatcatgagacaagtctttttttctgcttcttatattgcaagctccatctctactggtgtgtgcatttaatgacatctaactacagatgccgcacagccacaatgctttgccttatagttttttaactttagaacgggattatcttgttattacctgtattttcagtttcggatatttttgacttaatgatgagattatcaagacgtagccctatgctaagtcatgagcatatggacttacgagggttcgacttagagttttgagctttaagataggattattggggcttacccccaccttaattagagaaacatttatattgcttactactgtaggctgtacatctcttttccgatttttgtataatgatgtaaacatggaaaaactttaggaaatgcacttattaggctgtttacatgggttgcctggatacaaatcagcagtcaaaaatgactaaaaatataactagtgacggagggagaaatcctccctctgtgggaggcacttactgcattccagttctccctcctgcgccctgagactggaccagggtttgatggctggcagcttctcaaggggcagcttgtcttacttgttaattttagaggtatatagccatatttatttataaataaatatttatttatttatttataagtagatgtttacatatgcccaggattttgaagagcctggtatctttgggaagccatgtgtctggtttgtcgtgctgggacagtcatgggactgcatcttccgacttgtccacagcagatgaggacagtgagaattaagttagatccgagactgcgaagagcttctctttcaagcgccattacagttgaacgttagtgaatcttgagcctcatttgggctcagggcagagcaggtgtttatctgccccggcatctgccatggcatcaagagggaagagtggacggtgcttgggaatggtgtgaaatggttgccgactcaggcatggatgggcccctctcgcttctggtggtctgtgaactgagtccctgggatgccttttagggcagagattcctgagctgcgttttagggtacagattccctgtttgaggagcttggcccctctgtaagcatctgactcatctcagagatatcaattcttaaacactgtgacaacaggatctaaaatggctgacacatttgtccttgtgtcacgttccattattttatttaaaaacctcagtaatcgttttagcttctttccagcaaactcttctccacagtagcccagtcgtggtaggataaattacggatatagtcattctaggggtttcagtcttttccatctcaaggcattgtgtgttttgttccgggactggtttggctgggacaaagttagaactgcctgaagttcgcacattcagattgttgtgtccatggagttttaggaggggatggcctttccggtcttcgcacttccatcctctcccacttccatctggcgtcccacaccttgtcccctgcacttctggatgacacagggtgctgctgcctcctagtctttgcctttgctgggccttctgtgcaggagacttggtctcaaagctcagagagagccagtccggtcccagctcctttgtcccttcctcagaggccttccttgaagatgcatctagactaccagccttatcagtgtttaagcttattcctttaacataagcttcctgacaacatgaaattgttggggttttttggcgttggttgatttgtttaggttttgctttatacccgggccaaatagcacataacacctggttatatatgaaatactcatatgtttatgaccaaaataaatatgaaacctcatattaaaaaaaaaaaaaaaaaaaaaaaaaaaaaaa

SEQ ID NO: 29439 - DNA, 3905 bp, Homo Sapiens
gacagataccctccttccggccgcgccactcgggaggcggatcccgtgggcctgaggaggcttcccccgcccggtttgctttccctccctcgctggcgctgccgcgagtccaccgagcggcctctgaggagcagccgcaggaggaggaggaggtcgtcgggggcggcgggcggagaccgcgctctcgcttccccggcggcggcaagggcaggacaatggaggtggcggtggagaaggcggtggcggcggcggcagcggcctcggctgcggcctccggggggccctcggcggcgccgagcggggagaacgaggccgagagtcggcagggcccggactcggagcgcggcggcgaggcggcccggctcaacctgttggacacttgcgccgtgtgccaccagaacatccagagccgggcgcccaagctgctgccctgcctgcactctttctgccagcgctgcctgcccgcgccccagcgctacctcatgctgcccgcgcccatgctgggctcggccgagaccccgccacccgtccctgcccccggctcgccggtcagcggctcgtcgccgttcgccacccaagttggagtcattcgttgcccagtttgcagccaagaatgtgcagagagacacatcatagataacttttttgtgaaggacactactgaggttcccagcagtacagtagaaaagtcaaatcaggtatgtacaagctgtgaggacaacgcagaagccaatgggttttgtgtagagtgtgttgaatggctctgcaagacgtgtatcagagctcatcagagggtaaagttcacaaaagaccacactgtcagacagaaagaggaagtatctccagaggcagttggtgtcaccagccagcgaccagtgttttgtccttttcataaaaaggagcagctgaagctgtactgtgagacatgtgacaaactgacatgtcgagactgtcagttgttagaacataaagagcatagataccaatttatagaagaagcttttcagaatcagaaagtgatcatagatacactaatcaccaaactgatggaaaaaacaaaatacataaaattcacaggaaatcagatccaaaacagaattattgaagtaaatcaaaatcaaaagcaggtggaacaggatattaaagttgctatatttacactgatggtagaaataaataaaaaaggaaaagctctactgcatcagttagagagccttgcaaaggaccatcgcatgaaacttatgcaacaacaacaggaagtggctggactctctaaacaattggagcatgtcatgcatttttctaaatgggcagtttccagtggcagcagtacagcattactttatagcaaacgactgattacataccggttacggcacctccttcgtgcaaggtgtgatgcatccccagtgaccaacaacaccatccaatttcactgtgatcctagtttctgggctcaaaatatcatcaacttaggttctttagtaatcgaggataaagagagccagccacaaatgcctaagcagaatcctgtcgtggaacagaattcacagccaccaagtggtttatcatcaaaccagttatccaagttcccaacacagatcagcctagctcaattacggctccagcatatgcagcaacagcaaccgcctccacgtttgataaactttcagaatcacagccccaaacccaatggaccagttcttcctcctcatcctcaacaactgagatatccaccaaaccagaacataccacgacaagcaataaagccaaaccccctacagatggctttcttggctcaacaagccataaaacagtggcagatcagcagtggacagggaaccccatcaactaccaacagcacatcctctactccttccagccccacgattactagtgcagcaggatatgatggaaaggcttttggttcacctatgatcgatttgagctcaccagtgggagggtcttataatcttccctctcttccggatattgactgttcaagtactattatgctggacaatattgtgaggaaagatactaatatagatcatggccagccaagaccaccctcaaacagaacggtccagtcaccaaattcatcagtgccatctccaggccttgcaggacctgttactatgactagtgtacaccccccaatacgttcacctagtgcctccagcgttggaagccgaggaagctctggctcttccagcaaaccagcaggagctgactctacacacaaagtcccagtggtcatgctggagccaattcgaataaaacaagaaaacagtggaccaccggaaaattatgatttccctgttgttatagtgaagcaagaatcagatgaagaatctaggcctcaaaatgccaattatccaagaagcatactcacctccctgctcttaaatagcagtcagagctctacttctgaggagactgtgctaagatcagatgcccctgatagtacaggagatcaacctggacttcaccaggacaattcctcaaatggaaagtctgaatggttggatccttcccagaagtcacctcttcatgttggagagacaaggaaagaggatgaccccaatgaggactggtgtgcagtttgtcaaaacggaggggaactcctctgctgtgaaaagtgccccaaagtattccatctttcttgtcatgtgcccacattgacaaattttccaagtggagagtggatttgcactttctgccgagacttatctaaaccagaagttgaatatgattgtgatgctcccagtcacaactcagaaaaaaagaaaactgaaggccttgttaagttaacacctatagataaaaggaagtgtgagcgcctacttttatttctttactgccatgaaatgagcctggcttttcaagaccctgttcctctaactgtgcctgattattacaaaataattaaaaatccaatggatttgtcaaccatcaagaaaagactacaagaagattattccatgtactcaaaacctgaagattttgtagctgattttagattgatctttcaaaactgtgctgaattcaatgagcctgattcagaagtagccaatgctggtataaaacttgaaaattattttgaagaacttctaaagaacctctatccagaaaaaaggtttcccaaaccagaattcaggaatgaatcagaagataataaatttagtgatgattcagatgatgactttgtacagccccggaagaaacgcctcaaaagcattgaagaacgccagttgcttaaataatatgcagcaccactagcttgtgctggtttttagatttttttgttttcaaaaaaacatttgtcagtaatttaacatcactacaaaaagaagagtttgtgactattctcatctctgttttggacgtttactagactttgatttccttaatagcccatttctgttaacctcttatcactaagaaagaaaggaaagaaggagatgaatagaagaaagaaaatggaaagaaggaaaaaaggaggatagaaaaaggatggaagaaagaagcattgaaaacaaagacattcttcccacttcttggatttttaaaccacagtctggagtgatagctactgtagaaaggaaatagactttgtatgaactctttaagttgaaaagtaaaaaatatatgtggtttggatgtgtgctttaattcagctttagaaattaataccactacccgtgaattatatggcctgacaatatgaattaggtgtactgtactgaagaacagtactccacaaacatgggtggtaacaagagttccatcccaggaggccaaacggtgcaacagaagggtaggttagatgctattaagaaggcacttaatagtacatcatgtaagatggcaactgtattaaagaaaaatccggaaaacaaaaa

SEQ ID NO: 29440 - DNA, 1546 bp, Homo Sapiens; identical to SEQ ID NO: 22913

SEQ ID NO: 29441 - DNA, 5556 bp, Homo Sapiens
acggctgcgagaagacgacagaaggggaggcattgcctcgctgctttcttttcaccaagacgggctgaggattgtacagctctaggcggagttggggctcttcggatcgcttagattctcctctttgctgcatttccccccacgtcctcgttctcccgcgtctgcctgcggacccggagaagggagaatggagagggggctgccgctcctctgcgccgtgctcgccctcgtcctcgccccggccggcgcttttcgcaacgataaatgtggcgatactataaaaattgaaagccccgggtaccttacatctcctggttatcctcattcttatcacccaagtgaaaaatgcgaatggctgattcaggctccggacccataccagagaattatgatcaacttcaaccctcacttcgatttggaggacagagactgcaagtatgactacgtggaagtcttcgatggagaaaatgaaaatggacattttaggggaaagttctgtggaaagatagcccctcctcctgttgtgtcttcagggccatttctttttatcaaatttgtctctgactacgaaacacatggtgcaggattttccatacgttatgaaattttcaagagaggtcctgaatgttcccagaactacacaacacctagtggagtgataaagtcccccggattccctgaaaaatatcccaacagccttgaatgcacttatattgtctttgcaccaaagatgtcagagattatcctggaatttgaaagctttgacctggagcctgactcaaatcctccaggggggatgttctgtcgctacgaccggctagaaatctgggatggattccctggtgttggccctcacattgggcgttactgtggacagaaaacaccaggtcgaatccgatcctcatcgggcattctctccatggttttttacaccgacagcgcgatagcaaaagaaggtttctcagcaaactacagtgtcttgcagagcagtgtctcagaagatttcaaatgtatggaagctctgggcatggaatcaggagaaattcattctgaccagatcacagcttcttcccagtatagcaccaactggtctgcagagcgctcccgcctgaactaccctgagaatgggtggactcccggagaggattcctaccgagagtggatacaggtagacttgggccttctgcgctttgtcacggctgtcgggacacagggcgccatttcaaaagaaaccaagaagaaatattatgtcaagacttacaagatcgacgttagctccaacggggaagactggatcaccataaaagaaggaaacaaacctgttctctttcagggaaacaccaaccccacagatgttgtggttgcagtattccccaaaccactgataactcgatttgtccgaatcaagcctgcaacttgggaaactggcatatctatgagatttgaagtatacggttgcaagataacagattatccttgctctggaatgttgggtatggtgtctggacttatttctgactcccagatcacatcatccaaccaaggggacagaaactggatgcctgaaaacatccgcctggtaaccagtcgctctggctgggcacttccacccgcacctcattcctacatcaatgagtggctccaaatagacctgggggaggagaagatcgtgaggggcatcatcattcagggtgggaagcaccgagagaacaaggtgttcatgaggaagttcaagatcgggtacagcaacaacggctcggactggaagatgatcatggatgacagcaaacgcaaggcgaagtcttttgagggcaacaacaactatgatacacctgagctgcggacttttccagctctctccacgcgattcatcaggatctaccccgagagagccactcatggcggactggggctcagaatggagctgctgggctgtgaagtggaagcccctacagctggaccgaccactcccaacgggaacttggtggatgaatgtgatgacgaccaggccaactgccacagtggaacaggtgatgacttccagctcacaggcggcaccactgtgctggccacagaaaagcccacggtcatagacagcaccatacaatcagagtttccaacatatggttttaactgtgaatttggctggggctctcacaagaccttctgccactgggaacatgacaatcacgtgcagctcaagtggagtgtgttgaccagcaagacgggacccattcaggatcacacaggagatggcaacttcatctattcccaagctgacgaaaatcagaagggcaaagtggctcgcctggtgagccctgtggtttattcccagaactctgcccactgcatgaccttctggtatcacatgtctgggtcccacgtcggcacactcagggtcaaactgcgctaccagaagccagaggagtacgatcagctggtctggatggccattggacaccaaggtgaccactggaaggaagggcgtgtcttgctccacaagtctctgaaactttatcaggtgattttcgagggcgaaatcggaaaaggaaaccttggtgggattgctgtggatgacattagtattaataaccacatttcacaagaagattgtgcaaaaccagcagacctggataaaaagaacccagaaattaaaattgatgaaacagggagcacgccaggatacgaaggtgaaggagaaggtgacaagaacatctccaggaagccaggcaatgtgttgaagaccttagaccccatcctcatcaccatcatagccatgagtgccctgggggtcctcctgggggctgtctgtggggtcgtgctgtactgtgcctgttggcataatgggatgtcagaaagaaacttgtctgccctggagaactataactttgaacttgtggatggtgtgaagttgaaaaaagacaaactgaatacacagagtacttattcggaggcatgaaggcagacagagatgaaaagacagtcaaaggacggaagtggaaggacgggagtgagctggggagctgttgatctttcactatacaggctgggaagtgtgttgatgaccactgagccaggcttttctcaggagcttcaatgagtatggccgacagacatggacaaggagctgtgttcaccatcggactcatgttcagtcagcttttttcctgttggtttcatttgaataatcagatgctggtgttgagaccaagtatgattgacataatcattcatttcgacccctcctgcccctctctctctctctcctctcccctttgtggattctttttggaaactgagcgaaatccaagatgctggcaccaagcgtattccgtgtggccctttggatggacatgctacctgaaacccagtgcccagaatatactagaatcaccgcatttcagtggactcctgaagttgtacttgtgtataattgcccgcgtcgtgcataggcaaagaaggattaggctgttttctttttaaagtactgtagcctcagtactggtgtagtgtgtcagctctgtttacgaagcaatactgtccagttttcttgctgtttttccggtgttgtactaaacctcgtgcttgtgaactccatacagaaaacggtgccatccctgaacacggctggccactgggtatactgctgacaaccgcaacaacaaaaacacaaatccttggcactggctagtctatgtcctctcaagtgcctttttgtttgtactggttcattgtgttacattaacgacccactctgcttcttgctggtgaaagccctgctctttaatcaaactctggtggcccactgactaagaagaaagtttattttcgtgtgagatgccagcccctccgggcaggcaagggctctgaagatttggcaacgtggcttaattgttctgctttttctgtagttcaatttcatgtttcttgacccttttgtataaagctacaatattctctcttattgttctttcatatggaatgtattttcaaatgtaaactctcttctctttctctctcctatctctctgtcttttttctctcttagaattggaggatttgccattgtccaggaaagaaacttgcagctttaacctgctgggaatggcaaacgattttactagactttatgtttaaaaataaataaataagggaaattcctaactttgccctccaaagtctaactttggttttcttgttaactggttaaagtgacagtatcttttttccttatctattctattcaaaatgacctttgatagaaatgttggcatttagtagaaatagtgataagttgaggaaagaaataatacaaattggctttcaagtgaggcccaaaggaagaactggataaaatcttccaaatccaaaagcatgagatttttctatccaaatatgcaaaaatgacccaagagaactttcttattttgctactgagtcacacaagggaagtggaaggaagaacagttaatttaagaatgaaactataaatcctgatgcctgggggtcaagtattttaagataagagggggaaaaacacataaagtcaaacaaatgttttaaaaattcataacagcaaccttgaaaaaatagacttaaatgaatgcttctagaaacttccagcggctcacaaagaataagcctgccttagggctggcaacatctaagcctctaacagcacagggaagcaaatatcttaccaggcagcctatgaattaacccaaagaagctttggttggttttggtggatttttatcatgccatgttggacatgagattttttagatcttccttcccacattgctagacgtctcactcaaagacatttgttgggagtcacatttgcatcatagacgagacagtccattcatcttagttaaattggattgagaatgccttttgtttccaggaaaatattgatcaccatgaaagaagaatagttttttgtccccagagacattcatttagttgatataatcctaccagaaggaaagcactaagaaacactcgtttgttgtttttaaaggcaacagacttaaagttgtcctcagccaaggaaaaatgatactgcaactttaaaatttaaagtatcttgcactgataaatatatttaaaaattatatgtttataaagttattaatttgtaaaggcagtgttacaaaatgttcagtttatattgttttagattgttttgtaatttttaaaggtgtaaaataacatattttttctttatggaaatctataaaactttctgtagtaaaatgttttcattttactggtatattattgcttcatgttttgtaccatcataagattttgtgcagattttttttacagaaattattattttctatgacaatatgacacttgtaaattgttgtttcaaaatgaacagcgaagccttaactttaaatgacatttgtattctcagacactgagtagcataaaaaccacatagaactgaactgtaacttaaattccaaactatgactactacattccaaagaaacagttgaattaaacattttcataaaataaaaaaaaaaaaaaaaaaaa

SEQ ID NO: 29442 - DNA, 16382 bp, Homo Sapiens
ctgcagccatgggtgccctatggagctggtggatactctgggctggagcaaccctcctgtggggattgacccaggaggcttcagtggacctcaagaacactggcagagaggaattcctcacagccttcctgcagaactatcagctggcctacagcaaggcctacccccgcctccttatctccagtctgtcagagagccccgcttcagtctccatcctcagccaggcagacaacacctcaaagaaggtcacagtgaggcccggggagtcggtcatggtcaacatcagtgccaaggctgagatgataggcagcaagatcttccagcatgcggtggtgatccattctgactatgccatctctgtgcaggcactaaatgccaagcctgacacagcggagctgacactgctgcggcccatccaggccctaggcaccgagtattttgtgctcacaccccccggcacctcagccaggaatgtcaaggagtttgccgtggtggccggtgccgcaggtgcctcggtcagtgtcacgctgaaggggtcagtgacattcaatggcaagttctatccagcaggcgatgtcctaagagtgactctacagccctacaatgtggcccagctacagagctcagtggatctctcggggtcaaaggtcacagctagtagccccgtggctgtcctctctggccacagctgtgcgcagaaacatacgacctgcaaccatgtggttgagcagctgctacccacgtctgcctggggcacccactatgtagtacccacgctggcctcccaatctcgctatgatttggccttcgttgtggccagccaggccacaaagctgacctacaaccatgggggtatcactggctcccgtgggctccaggcaggtgatgtggtagagtttgaggtccggccatcctggccactctacctgtctgcaaatgtgggcatccaggtcctgttgtttggcacaggtgccataaggaatgaagtgacttatgacccctacctggtcctgatcccagatgtggcggcctactgcccagcctatgtggtcaagagtgtaccaggctgtgagggcgtggccctggtagtggcacagacgaaggctatcagcgggctgaccatagatgggcatgcagtgggggccaagctcacctgggaggctgtgccaggcagtgagttctcgtatgctgaagtggagctcggcacagctgacatgatccacacggccgaggccaccaccaacttgggactgctcaccttcgggctggccaaggctataggctacgcaacagctgctgattgcggccggactgtactgtccccagtggagccctcctgcgaaggcatgcagtgcgcagccgggcagcgctgccaggtggtaggcgggaaggccgggtgtgtggcggagtccaccgctgtctgccgcgcccagggcgacccccattacaccaccttcgacggccgtcgctacgacatgatgggcacctgttcgtacacgatggtggagctgtgcagcgaggacgacaccctgcccgccttcagcgtggaggccaagaacgagcaccggggcagccgccgcgtctcctacgtgggcctcgtcactgtgcgcgcctacagccactctgtgtcgctgacccgcggtgaagttggcttcgtcctggttgacaaccagcgctcgcgcctgccagtctccctgagtgagggtcgcctgcgtgtgtaccagagcggaccacgggccgtggtggagctggtctttgggctggtggtcacttatgactgggactgccagctggcactcagcctgcctgcacgcttccaagaccaggtgtgcgggctgtgtggcaactataatggtgacccagcagacgacttcctcacgcctgacggggctctggctcctgacgctgtggagttcgcaagtagctggaagctggatgatggggactacctgtgtgaggatggctgccagaacaactgtcccgcctgcaccccaggccaggcccaacactatgagggcgaccgactctgtggcatgctgaccaagctcgatggccccttcgctgtctgccatgacaccctggaccccaggcccttcctggagcagtgtgtatatgacctgtgtgtggtcggtggggagcggctcagcctgtgccgtggcctcagcgcctatgcccaggcctgtctggagcttggcatctcggttggggactggagatcaccagccaactgccccctgtcctgccctgccaacagccgctatgagctctgcggccctgcttgcccgacctcctgcaacggggctgcggcgccgtccaactgctccgggcgcccctgcgtggagggctgcgtgtgcctcccaggcttcgtggccagcggcggcgcctgcgtgccggcctcgtcgtgtggctgcaccttccagggtctccagctcgctccgggccaggaagtgtgggcggacgagttgtgccaaaggcgctgcacctgcaacggcgccacccatcaggtcacctgccgcgacaagcagagctgcccggcgggtgagcgctgcagcgtccagaacggcctcctgggctgctaccccgatcgcttcgggacctgccaggggtccggggacccacactatgtgagcttcgacggccggcgcttcgacttcatgggcacctgcacgtacctgctggtcggctcatgcggccagaacgcagcgctgcctgccttccgggtgctggtggaaaacgagcatcggggcagccagactgtgagctacacgcgcgccgtgcgggtggaggcccgcggggtgaaggtggccgtgcgccgggagtaccccgggcaagtgctggtggatgacgtccttcagtatctgcccttccaagcagcagatgggcaggtgcaggtgttccgacagggcagggatgccgtcgtgcgcacggactttggcctgactgtcacttatgactggaatgcacgagtgactgccaaggtgcccagcagctatgctgaggccctgtgtggactctgtgggaacttcaacggggacccagctgatgacctggctctgcggggtgggggtcaagctgccaatgcactggcctttgggaacagctggcaagaagagacgaggcccggctgtggagcaactgaaccgggtgactgtcccaagctggactccctggtggcccagcagctgcagagcaagaatgagtgtggaatccttgccgaccccaaggggcccttccgggagtgccatagcaagctggacccccagggtgccgtgcgcgactgtgtctatgaccgctgcctgctgccaggccagtctgggccactgtgtgacgcactggccacctatgctgctgcatgccaggctgctggagccacagtgcacccctggaggagtgaagaactttgcccactgagctgcccaccccacagccactatgaggcgtgttcctacggctgcccgctgtcctgtggagacctcccagtgcccgggggctgtggctcagaatgccatgagggctgcgtgtgcgatgagggctttgcgctcagtggtgagtcctgcctgcccctggcctcctgtggctgcgtacaccagggcacctaccacccaccaggccagaccttctaccctggccccggatgtgattccctttgccactgccaggagggcggcctggtgtcctgtgagtcctccagctgcggaccgcacgaggcctgccagccatccggtggcagcttgggctgtgtggccgtgggctctagcacctgccaggcgtcaggagacccccactacaccaccttcgatggccgccgcttcgacttcatgggcacctgcgtgtatgtgctggctcagacctgcggcacccggcctggcctgcatcggtttgccgtcctgcaggagaacgtggcctggggtaatgggcgagtcagtgtgaccagggtgatcacggtccaggtggcaaacttcaccctgcggctggagcagagacagtggaaggtcacggtgaacggtgtggacatgaagctgcccgtggtgctggccaacggccagatccgtgcctcccagcatggttcagatgttgtgattgagaccgacttcggcctgcgtgtggcctacgaccttgtgtactatgtgcgggtcaccgtccccggaaactactaccagcagatgtgtggcctgtgtgggaactacaacggcgaccccaaggatgacttccagaagcccaatggctcacaggcaggcaacgccaatgagttcggcaactcctgggaggaggtggtgcccgactctccctgcctgccgcccaccccttgcccgccggggagcgaggactgtatccccagccacaagtgtcctcccgagctggagaagaagtatcagaaggaggagttctgtgggctcctctccagccccacagggccactgtcctcctgccacaagctggtggatccccagggtcccttgaaagattgcatctttgatctctgcctgggtggtgggaacctgagcattctctgcagcaacatccatgcctacgtgagtgcttgccaggcggctggaggccacgtggagccctggaggactgaaactttctgtcccatggagtgccctccgaacagtcactacgagctctgtgcggacacctgctccctgggctgctcagctctcagtgcccctccacagtgccaggatgggtgtgctgagggctgccagtgtgactccggcttcctctacaatggccaagcctgcgtgcccatccagcaatgcggctgctaccacaatggtgtctactatgagccggagcagacagtcctcattgacaactgtcggcagcagtgcacgtgccatgcgggtaaaggcatggtgtgccaggaacacagctgcaagccggggcaggtgtgccagccctccggaggcatcctgagctgcgtcaccaaagacccgtgccacggcgtgacatgccggccacaggagacatgcaaggagcagggtggccagggcgtgtgcctgcccaactatgaggccacgtgctggctgtggggcgacccacactaccactccttcgatggccggaagtttgacttccagggcacctgtaactatgtgctggcaacaactggctgcccgggggtcagcacccagggcctgacacccttcaccgtcaccaccaagaaccagaaccggggcaaccctgctgtgtcctacgtgagagtcgtcaccgtggctgccctcggcaccaacatctccatccacaaggacgagatcggcaaagtccgggtgaacggtgtgctcacagccttgcctgtctctgtggccgacgggcggatttcagtgacccagggtgcatcgaaggcactgctggtggctgactttggactgcaagtcagctatgactggaactggcgggtagacgtgacgctgcccagcagctatcatggcgcagtgtgcgggctctgcggtaacatggaccgcaaccccaacaatgaccaggtcttccctaatggcacactggctccctccatacccatctggggcggcagctggcgagccccaggctgggacccactgtgttgggacgaatgtcgggggtcctgcccaacgtgccctgaggaccggttggagcagtacgagggccctggcttctgcggacccctggcccccggcacagggggccctttcaccacctgccatgctcatgtgccacctgagagcttcttcaagggctgtgttctggacgtctgcatgggtggtggggaccgtgacattctttgcaaggctctggcttcctatgtggccgcctgccaggctgctggggttgtcatcgaagactggcgggcacaggttggctgtgagatcacctgcccagaaaacagccactatgaggtctgtggcccaccctgcccggccagctgtccgtcccctgcaccccttacgacgccagccgtatgtgagggcccctgtgtggagggctgccagtgcgacgcgggtttcgtgttaagtgctgaccgctgtgttcccctcaacaacggctgcggctgctgggccaatggcacctaccacgaggcgggcagtgagttttgggctgatggcacctgctcccagtggtgtcgctgcgggcctgggggtggctcgctggtctgcacacctgccagctgtgggctgggtgaagtgtgtggcctcctgccatccggccagcacggctgccagcccgtcagcacagctgagtgccaggcgtggggtgacccccattacgtcactctggatgggcaccgattcaatttccaaggcacctgcgagtacctgctgagtgcaccctgccacggaccacccttgggggctgagaacttcactgtcactgtagccaatgagcaccggggcagccaggctgtcagctacacccgcagtgtcaccctgcaaatctacaaccacagcctgacactgagtgcccgctggccccggaagctacaggtggacggcgtgttcgtcactctgcccttccagctggactcgctcctgcacgcacacctgagcggcgccgacgtggtggtgaccacaacctcagggctctcgctggctttcgacggggacagcttcgtgcgcctgcgcgtgccggcggcgtacgcgggctctctctgtggcttatgcgggaactacaaccaggaccccgcagacgacctgaaggcggtgggcgggaagcccgccggatggcaggtgggcggcgcccagggctgcggggaatgtgtgtccaagccatgcccgtcgccgtgcaccccagagcagcaagagtccttcggcggcccggacgcctgcggcgtgatctccgccaccgacggcccgctggcgccctgccacggccttgtgccgcccgcgcagtacttccagggctgcttgctggacgcctgccaagttcagggccatcctggaggcctctgtcctgcagtggccacctacgtggcagcctgtcaggccgctggggcccagctccgcgagtggaggcggccggacttctgtcccttccagtgccctgcccacagccactacgagctctgcggtgactcctgtcctgggagctgcccgagcctgtcggcacccgagggctgtgagtcggcctgccgtgaaggctgtgtctgcgatgctggcttcgtgctcagtggtgacacgtgtgtacctgtgggccagtgtggctgcctccacgatgaccgctactacccactgggccagaccttctaccctggccctgggtgtgattccctttgccgctgccgggagggcggtgaggtgtcctgtgagccctccagctgcggcccgcatgagacctgccggccatccggtggcagcttgggctgcgtggccgtgggctctaccacctgccaggcgtcgggagatccccactacaccaccttcgatggccgccgcttcgacttcatgggcacctgcgtgtatgtgctggctcagacctgcggcacccggcctggcctacatcggtttgccgtcctgcaggagaacgtggcctggggtaatgggcgagtcagtgtgaccagggtgatcacggtccaggtggcaaacttcaccctgcggctggagcagagacagtggaaggtcacggtgaacggtgtggacatgaagctgcccgtggtgctggccaacggccagatccgtgcctcccagcatggttcagatgttgtgattgagaccgacttcggcctgcgtgtggcctacgaccttgtgtactatgtgcgggtcaccgtccctggaaactactaccagctgatgtgtggcctgtgtgggaactacaacggcgaccccaaggatgacttccagaagcccaatggctcgcaggcaggcaacgccaatgagttcggcaactcctgggaggaggtggtgcccgactctccctgcctgccgccgcccacctgcccgccggggagcgagggctgtatccccagcgaggagtgtcctcccgagctggagaagaagtatcagaaggaggagttctgtgggctcctctccagccccacagggccactgtcctcctgccacaagctggtggatccccagggtcccttgaaagattgcatctttgatctctgcctgggtggtgggaacctgagcattctctgcagcaacatccatgcctacgtgagtgcttgccaggcggctggaggccacgtggagccctggaggaatgaaactttctgtcccatggaatgccctcagaacagtcactacgagctctgtgcggacacctgctccctgggctgctcggctctcagtgcccctctgcagtgcccagatgggtgtgctgagggctgccagtgtgactccggcttcctctacaacggccaagcctgcgtgcccatccagcaatgtggctgctaccacaatggtgcctactatgagccggagcagacagtcctcattgacaactgtcggcagcagtgcacgtgccatgcgggtaaagtcgtggtgtgccaggaacacagctgcaagccggggcaggtgtgccagccctccggaggcatcctgagctgcgtcaccaaagacccgtgccacggcgtgacatgccggccacaggagacatgcaaggagcagggtggccagggtgtgtgcctgcccaactatgaggccacgtgctggctgtggggcgacccacactaccactccttcgatggccggaagtttgacttccagggcacctgtaactatgtgctggcaacaactggctgcccgggggtcagcacccagggcctgacacccttcaccgtcaccaccaagaaccagaaccggggcaaccctgctgtatcctacgtgagagtcgtcaccgtggctgccctcggcaccaacatctccatccacaaggacgagatcggcaaagtccgggtgaacggtgtgctcacagccttgcctgtctccgtggccgacgggcggatttcagtggcccagggtgcatcgaaggcactgctggtggctgactttggactgcaagtcagctatgactggaactggcgggtagacgtgacgctccccagcagctatcatggcgcagtgtgcgggctctgcggtaacatggaccgcaaccccaacaatgaccaggtcttccctaatggcacactggctccctccatacccatctggggcggcagctggcgagccccaggctgggacccactgtgttgggacgaatgtcgggggtcctgcccaacgtgccctgaggaccggttggagcagtacgagggccctggcttctgcggacccctggcccccggcacagggggccctttcaccacctgccatgctcatgtgccacctgagagcttcttcaagggctgtgttctggacgtctgcatgggtggtggggaccatgacattctttgcaaggctctggcttcctacgtggccgcctgccaggccgctggggttgtcatcgaagactggcgggcacaggttggctgtgagatcacctgcccagaaaacagccactatgaggtctgtggcccaccctgcccggccagctgtccgtcccctgcaccccttacgacgccagccgtatgtgagggcccctgtgtggagggctgccagtgcgacgcgggtttcgtgttaagtgctgaccgctgtgttcccctcaacaacggctgcggctgctgggccaatggcacctaccacgaggcgggcagtgagttttgggctgatggcacctgctcccagtggtgtcgctgcgggcctgggggtggctcgctggtctgcacacctgccagctgtgggctgggtgaagtgtgtggcctcctgccatccggccagcacggctgccagcccgtcagcacagctgagtgccaggcgtggggtgacccccattacgtcactctggatgggcaccgattcgatttccaaggcacctgcgagtacctgctgagtgcaccctgccacggaccacccttgggggctgagaacttcactgtcactgtagccaatgagcaccggggcagccaggctgtcagctacacccgcagtgtcaccctgcaaatctacaaccacagcctgacactgagtgcccgctggccccggaagctacaggtggacggcgtgttcgtcactctgcccttccagctggactcgctcctgcacgcacacctgagcggcgccgacgtggtggtgaccacaacctcagggctctcgctggctttcgacggggacagcttcgtgcgcctgcgcgtgccggcggcgtacgcgggctctctctgtggcttatgcgggaactacaaccaggaccccgcagacgacctgaaggcggtgggcgggaagcccgccggatggcaggtgggcggcgcccagggctgcggggaatgtgtgtccaagccatgcccgtcgccgtgcaccccagagcagcaagagtccttcggcggcccggacgcctgcggcgtgatctccgccaccgacggcccgctggcgccctgccacggccttgtgccgcccgcgcagtacttccagggctgcttgctggacgcctgccaagttcagggccatcctggaggcctctgtcctgcagtggccacctacgtggcagcctgtcaggccgctggggcccagctccgcgagtggaggcggccggacttctgtcccttccagtgccctgcccacagccactacgagctctgcggtgactcctgtcctgggagctgcccgagcctgtcggcacccgagggctgtgagtcggcctgccgtgaaggctgtgtctgcgatgctggcttcgtgctcagtggtgacacgtgtgtacctgtgggccagtgtggctgcctccacgatgaccgctactacccactgggccagaccttctaccctggccctgggtgtgattccctttgccgctgccgggagggcggtgaggtgtcctgtgagccctccagctgcggcccgcatgagacctgccggccatccggtggcagcttgggctgcgtggccgtgggctctaccacctgccaggcgtcgggagatccccactacaccaccttcgatggccgccgcttcgacttcatgggcacctgcgtgtatgtgctggctcagacctgcggcacccggcctggcctacatcggtttgccgtcctgcaggagaacgtggcctggggtaatgggcgagtcagtgtgaccagggtgatcacggtccaggtggcaaacttcaccctgcggctggagcagagacagtggaaggtcacggtgaacggtgtggacatgaagctgcccgtggtgctggccaacggccagatccgtgcctcccagcatggttcagatgttgtgattgagaccgacttcggcctgcgtgtggcctacgaccttgtgtactatgtgcgggtcaccgtccctggaaactactaccagctgatgtgtggcctgtgtgggaactacaacggcgaccccaaggatgacttccagaagcccaatggctcgcaggcaggcaacgccaatgagttcggcaactcctgggaggaggtggtgcccgactctccctgcctgccgccgcccacctgcccgccggggagcgagggctgtatccccagcgaggagtgtcctcccgagctggagaagaagtatcagaaggaggagttctgtgggctcctctccagccccacagggccactgtcctcctgccacaagctggtggatccccagggtcccttgaaagattgcatctttgatctctgcctgggtggtgggaacctgagcattctctgcagcaacatccatgcctacgtgagtgcttgccaggcggctggaggccacgtggagccctggaggaatgaaactttctgtcccatggaatgccctcagaacagtcactacgagctctgtgcggacacctgctccctgggctgctcggctctcagtgcccctctgcagtgcccagatgggtgtgctgagggctgccagtgtgactccggcttcctctacaacggccaagcctgcgtgcccatccagcaatgtggctgctaccacaatggtgtctactatgagccggagcagacagtcctcattgacaactgtcggcagcagtgcacgtgccatgtgggtaaagtcgtggtgtgccaggaacacagctgcaagccggggcaggtgtgccagccctccggaggcatcctgagctgcgtcaacaaagacccgtgccacggcgtgacatgccggccacaggagacatgcaaggagcagggtggccagggtgtgtgcctgcccaactatgaggccacgtgctggctgtggggcgacccacactaccactccttcgatggccggaagtttgacttccagggcacctgtaactatgtgctggcaacaactggctgcccgggggtcagcacccagggcctgacacccttcaccgtcaccaccaagaaccagaaccggggcaaccctgctgtatcctacgtgagagtcgtcaccgtggctgccctcggcaccaacatctccatccacaaggacgagatcggcaaagtccgggtgaacggtgtgctcacagccttgcctgtctccgtggccgacgggcggatttcagtggcccagggtgcatcgaaggcactgctggtggctgactttggactgcaagtcagctatgactggaactggcgggtagacgtgacgctccccagcagctatcatggcgcagtgtgcgggctctgcggtaacatggaccgcaaccccaacaatgaccaggtcttccctaatggcacactggctccctccatacccatctggggcggcagctggcgagccccaggctgggacccactgtgttgggacgaatgtcgggggtcctgcccaacgtgccctgaggaccggttggagcagtacgaggggcctggcttctgcggacccctggcatctggcacagggggccccttcaccacctgccatgctcatgtgccacctgagagcttcttcaagggctgtgttctggacgtctgcatgggtggtggggaccatgacattctttgcaaggctctggcttcctacgtggccgcctgccaggccgctggggttgtcatcgaagactggcgggcacaggttggctgtgagatcacctgcccagaaaacagccactatgaggtctgtggcccaccctgcccggccagctgtccgtcccctgcaccccttacgacgccagccgtatgtgagggcccctgtgtggagggctgccagtgcgacgcgggtttcgtgttaagtgctgaccgctgtgttcccctcaacaacggctgcggctgctgggccaatggcacctaccacgaggcgggcagtgagttttgggctgatggcacctgctcccagtggtgtcgctgcgggcctgggggtggctcgctggtctgcacacctgccagctgtgggctgggtgaagtgtgtggcctcctgccatccggccagcacagctgccagcccgtcagcacagctgagtgccaggcgtggggtgacccccattacgtcactctggatgggcaccgattcgatttccaaggcacctgcgagtacctgctgagtgcaccctgccacggaccacccttgggggctgagaacttcactgtcactgtagccaatgagcaccggggcagccaggctgtcagctacacccgcagtgtcaccctgcaaatctacaaccacagcctgacactgagtgcccgctggccccggaagctacaggtcgacggcgtgttcgtggctctgcctttccagctggactcgctcctgcacgcacacctgagcggcgccgacgtggtggtgaccacaacctcagggctctcgctggctttcgatggggacagcttcgtgcgcctgcgcgtgccggcggcgtacgcggcctctctctgtggcttatgcgggaactacaaccaggaccccgcagacgacctgaaggctgtgggcgggaagcccgctggatggcaggtgggcggggcccagggctgcggggaatgtgtgtccaagccatgcccgtcgccgtgcaccccagagcagcaggagtccttcggcggcccggacgcctgcggcgtgatctccgccaccgacggcccgctggcaccctgccacggccttgtgccgcccgcgcagtacttccagggctgcttgctggacgcctgccaagttcagggccatcctggaggcctctgtcctgcagtggctacctacgtggcagcctgtcaggccgctggggcccagctcggcgagtggaggcggccggacttctgtcccttgcagtgccctgcccacagccactatgagctctgcggtgactcctgccctgtgagctgcccgagcctctcagcacccgagggctgtgagtcggcctgccgtgaaggctgtgtctgcgatgctggcttcgtactcagtggtgacacctgcgtacccgtgggccagtgtggctgcctccatgatggccgctactacccactgggcgaggtcttctacccgggccctgagtgtgagcgacgctgtgagtgtgggccaggtggccatgtcacctgccaggagggcgcagcctgtgggccccatgaggagtgccggttagaggatggtgtccaggcctgtcatgccacaggctgtggccgctgcctggccaacgggggcatccactacatcacccttgatggccgtgtctacgacctgcatggctcctgctcctatgtcttggcccaagtctgccacccaaagcctggggacgaggacttttccatcgtgcttgagaagaatgcagctggacatctccaacgcctcctggttactgtggctggccaggttgtgagcctagctcaggggcagcaggtcaccgtggacggcgaggctgtggccctgcctgtggctgtgggccgcgtgcgggtgaccgccgagggccgaaacatggttctgcagacgaccaaggggctgcggcttctctttgatggcgatgcccacctcctcatgtccatccccagccccttccgtggacggctctgtggcctctgtgggaacttcaatggcaactggagtgacgactttgtcctgcccaatggctcagcagcgtccagtgtggagaccttcggggctgcatggcgggtgcccggctcctccaagggctgtggcgagggctgcgggccccaaggctgcccagtgtgcttggcagaggagactgcaccctatgagagcaacgaggcctgcgggcagctccggaacccccagggccccttcgcgacctgccaggcggtgctgagtccctctgagtacttccgccaatgcgtatacgacctgtgcgcgcaaaagggtgacaaagccttcctgtgccgcagcctggcagcctacacggcggcctgtcaggcagctggcgtggccgtgaagccctggaggacagacagcttctgcccgctccattgccccgcccacagccactactccatctgcactcgcacctgccagggatcctgtgcggctctctccggcctcacgggctgcaccacccgctgttttgagggctgtgagtgcgacgaccgcttcctgctttcccagggtgtctgcatccctgtccaagattgtggctgcacccataatggccgatacttgccggtaaactcctccctgctgacctcagactgcagcgagcgctgttcctgttcctcaagctctggcctgacatgccaggccgctggctgcccaccaggccgtgtatgtgaggtcaaggctgaagcccggaactgctgggccacccgtggtctctgtgtcctgtctgtgggtgccaacctcaccacctttgatggggcccgtggtgccaccacctctcctggtgtctatgagctctcttcccgctgcccaggactacagaataccatcccctggtaccgtgtagttgccgaagtccagatctgccatggcaaaacggaggctgtgggccaggtccacatcttcttccaggatgggatggtgacgttgactccaaacaagggtgtgtgggtgaatggtctccgagtggatctcccagctgagaagttagcatctgtgtccgtgagtcgtacacctgatggctccctgctagtccgccagaaggcaggggtccaggtgtggcttggagccaatgggaaggtggctgtgattgtcagcaatgaccatgctgggaaactgtgtggggcctgtggaaactttgacggggaccagaccaatgattggcatgactcccaggagaagccagcgatggagaaatggagagcgcaggacttctccccatgttatggctgatcagtcatccaccaggaacgaagatttcctgaagaagacctggtccctctggaggttgcggtggctgaaggatgcatcatgtgctcctaccctgctctaccgcttttctgggtcacagaggccaaatgtgagagcattgaataaatatcttaagct

SEQ ID NO: 29443 - DNA, 5032 bp, Homo Sapiens
gctgagcgggttggcatctggggcagcgggctcgctccaggccgtcgggggccgctcgccagcgtcgcccgctgtgttgggagcgcgggccgtgggcgtcgctcggccttgtccgcggcgtccccgctgccggccacggcgctcagcgcttgtgctctgtattgcaggtctaccccgagccccggagcgagagcgagtgcctgagcaacatccgcgagttcctgcgcggctgcggggcttccctgcggctggagacgtttgatgcaaatgatttgtatcaggggcagaattttaacaaggtcctcagttccttagtgactctaaataaagtaacagcagacatcgggctggggagtgactccgtgtgtgcccggccctcgtctcaccgcataaagtcttttgactcccttggatcacagtctttgcacactcggacttcaaaactgttccagggccagtatcggagtttggacatgaccgataatagcaacaatcaactggtagtaagagcaaagtttaacttccagcagaccaatgaggacgagctttccttctcaaaaggagacgtcatccatgtcacccgtgtggaagagggaggctggtgggagggcacactcaacggccggaccggctggttccccagcaactacgtgcgcgaggtcaaggccagcgagaagcctgtgtctcccaaatcaggaacactgaagagccctcccaaaggatttgatacgactgccataaacaaaagctattacaatgtggtgctacagaatattttagaaacagaaaatgaatattctaaagaacttcagactgtgctttcaacgtacctacggccattgcagaccagtgagaagttaagttcagcaaacatttcatatttaatgggaaatctagaagaaatatgttctttccagcaaatgctcgtacagtctttagaagaatgcaccaagttgcccgaagctcagcagagagtcggaggctgctttttaaacctgatgccacagatgaaaaccctgtacctcacgtattgtgccaatcacccttctgcagtgaatgtcctcacggaacacagtgaggagttgggggagttcatggagaccaaaggtgccagcagccctgggattctcgtgctgaccacgggcctgagcaaacccttcatgcgcctggataaataccctacgctgctcaaagagctcgagagacacatggaggattatcatacagatagacaagatattcaaaaatccatggctgccttcaaaaacctttcagcccaatgtcaagaagtccggaagaggaaagagcttgagctgcagatcctgacggaagccatccggaactgggagggcgatgacattaaaactctgggcaacgtcacttacatgtcccaggtcctgattcagtgtgccggaagtgaggaaaagaatgaaagatatcttctactcttcccaaatgttttgctaatgttgtctgccagtcctaggatgagtggctttatctatcagggaaagcttccaacgacaggaatgacaatcacaaagcttgaggacagtgaaaatcatagaaatgcatttgaaatatcagggagcatgattgagcggatattagtgtcgtgcaacaaccagcaggatctgcaggaatgggtggagcacctacagaagcaaacgaaggtcacgtctgtgggaaaccccaccataaagcctcattcagtgccatctcataccctcccctcccacccggtcactccgtccagcaagcacgcagacagcaagcccgcgccgctgacgcccgcctaccacacgctgccccacccctcccaccacggcaccccgcacaccaccatcaactggggacccctggagcctccgaaaacacccaagccctggagcctgagctgcctgcggcccgcgcctcccctccggccctcagctgctctctgctacaaggaggatcttagtaagagccctaagaccatgaaaaagctgctgcccaagcgcaaacctgaacggaagccttcagatgaggagttcgcgtcccggaaaagcacagctgctttggaagaagatgctcagattctgaaagtcattgaagcttactgcaccagcgccaaaacaaggcaaacactcaattcaagttcacgcaaagaatctgctccacaagttttgcttccagaagaagagaaaattatagtggaagaaactaaaagtaatggtcagacagtgatagaagaaaagagtcttgtggataccgtatatgcattaaaggatgaagttcaagaattaagacaggacaacaaaaagatgaagaaatctctagaggaagaacagagagcccgcaaagacctggagaagctggtgaggaaagtcctgaagaacatgaatgatcctgcctgggatgagaccaatctataagggacgtcctcagttctttctgttgaagaccagttctgaggtgaagctgggcacccctgacccaagtcggggtgcactcaggaccacagggcagggctgggtggggcgccaccttgctctctgtatatagaaaagctggagcttattctgcgaatggagacgatcaaaccatgactgatgaatccagacaggagggattgactctgaggacctgagctacatcaatccactctgtgaacatctcagttacctcattctgcaataagttcagtgactgactaaaagtcttgtttttccagactttgaattgaatatataaatattatatatacatgtttcttgtaaatatcccattttgaatgcatacctgtggtggttctgtccgggctaatccccatgctagaatgtcctttccagctacgtgaataagaagtcccatgcccgcacccaccggaagcagaagcctggtggatgcctggttcgttccgcagcaccagggcctccaccgtgctgtggcagcaccccccatgtcggtatttctaaataaccttatttatacctgcagagatacacttcagtcccattcagaagtcttctcttaaagcagcattacagtcccagacctgcgggtttctgagggcaacttgctggctgacagactcagtcttgacctcaaggaaggcccatacggcactgccgcatccacctagaggtgtttgctcttgtccgctgtctgagtactgtgattctcagatgagtttgctgcgttttgggaggacacagacggttctgtataggctagttcagtaacaacaaaatacactgttttgtcttccctcaaagagagatcttactagaacctgtaaatagaatgtattatttattataagtcactgcagctgatgaaaacagatggaggccatgctgcaggctgatactgatgggtggagttttgtcatcaggccagcctcatcccgaggtctcctccaccattggccgtagccagcaggcttcagtgctcaccgaaagtaaaatcccctccttcagcaagaataaagcaatatacaccttaggttccactaagtaacataggcataagcagggaacgtttcccccactgtgttccagtgcagaggagacgaagcctgtcctcaccgcggctcgctgggcccaggctggctctggaaagcctgtgcggtcctgggcaggaagcccggcccgtggagcaggttttcgttctgcttcagcaataaataagggtgaccacagggactttgcttttggtttcctttcctgtgaaaaggttggttttaaagtgagatacacttttccgtagaacaagtgttctatctttaaaaacccaaattgcagcaccgtggattactggtctcagaacaactcattgcgcatcagatttgactctctgattttctgtctattggccaaattgccctttaactgcacctgaatcctttgtgtactgatgcctttgagctgggcaccttgggagagtgttgtgttgctgtttacggttcttccttgcccttgctaattacagtctctggtgcccagcaagcccctttggcttccttccgtgactggtcacgttgtctgcctgggctcagcgtggacctgccccatgctgcagaacctggcctcacctggacttttcactagaattgccagcttcctcaacttagcagatcattcactcatgcgggcacaagcaaagatcaacactttcttttttggtaagcttgagttttacaagttattttttggtgatgcgtaagacattgcagtgggaaaccattcaacttgagtttattggagtttgctgttgtagcaggttttaactcaggaacaactcttgtctgatctctccgcccctctgccgggaggcgacattaactgtcctctcggagccggtagcgttgctgtccgagtccccaggacggatctcctgcagacctgccttaatgctcagatcgaagtatttcacaagaatacttgtgtttttaacagcccttcccctggacggtgcggccatgagggcctcatgttacggcattgccttttctttctgtggatccagtatcttcctcggctttttagggagcaggaaaaatgcgtctgagagcaactctttttaaaaacctgccctgttgtatataactgtgtctgtttcaccgtgtgacctcccaagggggtgggaacttgatataaacgtttaaaggggccacgatttgcccgagggttactcctttgctctcaccttgtatggatgaggagatgaagccatttcttatcctgtagatgtgaagcactttcagttttcagcgatgttggaatgtagcatcagaagctcgttccttcacactcagtggcgtctgtgcttgtccacatgcgctgggcgtctgggaccttgaatgcctgccctggttgtgtggactccttaatgccaatcatttcttcacttctctgggacacccagggcgcctgttgacaagtgtggagaaactcctaatttaaatgtcacagacaatgtcctagtgttgactactacaatgttgatgctacactgttgtaattattaaactgattatttttcttatgtc

SEQ ID NO: 29444 - DNA, 4701 bp, Homo Sapiens
ggcgaggccggcggctgccgggcctccaatctcggcggcggcggcggcaacaggggagcctgggtctcgcggcctgcgagtccgtcgcgtgctgagggagacgcaggaggtggagccggccgggtgctcgagggaaggagactggaagctggttccggcgtgaggagagtctgaaaaaggggagcgcggagaggaggctggaagaggaagatgcctagcacagaccttctgatgttgaaggcctttgagccctacttagagattttggaagtatactccacaaaagccaagaattatgtaaatggacattgcaccaagtatgagccctggcagctaattgcatggagtgtcgtgtggaccctgctgatagtctggggatatgagtttgtcttccagccagagagtttatggtcaaggtttaaaaagaaatgttttaagctcaccaggaagatgcccattattggtcgtaagattcaagacaagttgaacaagaccaaggatgatattagcaagaacatgtcattcctgaaagtggacaaagagtatgtgaaagctttaccctcccagggtctgagctcatctgctgttttggagaaacttaaggagtacagctctatggacgccttctggcaagaggggagagcctctggaacagtgtacagtggggaggagaagctcactgagctccttgtgaaggcttatggagattttgcatggagtaaccccctgcatccagatatcttcccaggactacgcaagatagaggcagaaattgtgaggatagcttgttccctgttcaatgggggaccagattcgtgtggatgtgtgacttctgggggaacagaaagcatactgatggcctgcaaagcatatcgggatctggcctttgagaaggggatcaaaactccagaaattgtggctccccaaagtgcccatgctgcatttaacaaagcagccagttactttgggatgaagattgtgcgggtcccattgacgaagatgatggaggtggatgtgcgggcaatgagaagagctatctccaggaacactgccatgctcgtctgttctaccccacagtttcctcatggtgtaatagatcctgtccctgaagtggccaagctggctgtcaaatacaaaataccccttcatgtcgacgcttgtctgggaggcttcctcatcgtctttatggagaaagcaggatacccactggagcacccatttgatttccgggtgaaaggtgtaaccagcatttcagctgacacccataagtatggctatgccccaaaaggctcatcattggtgttgtatagtgacaagaagtacaggaactatcagttcttcgtcgatacagattggcagggtggcatctatgcttccccaaccatcgcaggctcacggcctggtggcattagcgcagcctgttgggctgccttgatgcacttcggtgagaacggctatgttgaagctaccaaacagatcatcaaaactgctcgcttcctcaagtcagaactggaaaatatcaaaggcatctttgtttttgggaatccccaattgtcagtcattgctctgggatcccgtgattttgacatctaccgactatcaaacctgatgactgctaaggggtggaacttgaaccagttgcagttcccacccagtattcatttctgcatcacattactacacgcccggaaacgagtagctatacaattcctaaaggacattcgagaatctgtcactcaaatcatgaagaatcctaaagcgaagaccacaggaatgggtgccatctatggcatggcccagacaactgttgacaggaatatggttgcagaattgtcctcagtcttcttggacagcttgtacagcaccgacactgtcacccagggcagccagatgaatggttctccaaaaccccactgaacttggaccctttctagtctcaaggggattccagccttcagaaggttcttgggatatggaacaggccgtgcacaactttgacatctggtcttgctccatagagcacaactcaagatagaccatgagacagcttgagcctcaggattcttgttcttcctcttatcttccttttgtggtttttaatttgaagaccccagagaattccattacataatgattttgcccttgttataaatgttaccctaggaattgttttaaccatttccttttctaaactctctagctttcaactttacttaaacattgtgtggtagctctgacctgtcctgattctttagagaagctggggtacagtttatgagatagctagagcttctttgttatctcaggcaggaggcgtttacataacagatgtttcctcagctgggtgtgaggtatactctaagcaggaggctttttcagccttctctctcttttttttttttttttttttttgagatggaattttgctcttttgcccagtctggagtgcagtggcatgatctcagctcactgcaacctccacccactgggttcaagcgattcttctgcctcagcctcccgagtagctgggattaccggcacccaccaccacgcctggctaatttttcaattttctttttcagtagagacgggttcaccgtgttggccaggctggtcttgaactcctgacctcaggtgatacccgcccccccgcctcagcctcccaaagtgctgggattacaggcgtgagccaccgtgcctggccctgtctctcttaagagtaggttcattgtctgtcttagagtcacttctattgcaactcattttctttttccagggcacagatcgaccaagctgccgttccctattctgcaggacaggactattctagcatacctgcttcgtccacccaggcagggtttggggtggtctcttctgtgcctgcagtccccatttgacacttggttgccaccatctttggagattattgtttggaatgatgcttccattggctttttcttgttaccatggactaggaagaaaacatggtttccaaataatctgggagcttttggccatggtgccgccttcctgaattggcagtggtcagagcacacctgaaccctatcctgggctggtgatgagcagaaatcagacctttttctatgcttttttgaatatcagagtaggatgaacacccagattcaaatatgtcaccaaagttggtggtggtccttccctgcacccttgcgttaagccattatgtaatgaaaatgtgtttgcttgaaggaacagctcaaagcaccttcacaagttgccttgacttaccctaggtgggtgtgaaagagcacccgtagcaaggaaaattttctctattagtgtgttcttctgcctcttcccccttgattcagctttcagaggtactatggcagttttgcctcaggtgctgaacatttctcagccctggctaaaagggagcagcacagggagagaaacaggataggaaagcagaatggcgagcagcctatggcccagggcctgtaatcccttcccaagactagctgctcagggtggtgcagggacaggaccagaccctgcgcctatttcctgccttctttcccctatagggaactctgtaggctgagccactgtcctgctcttatgacattatatcttgtgcctttctcctcagcagtgagcagtgagctactcctggcccaggccctaggggaaatggatcagtctttgaggtttctatttggggaggggagtacttaagatgagtcaaaagacactttcctctgttccattccccatctcagggactcctgaatattcagcctctccaggctggtgtcttctagtttcccccactgggaatgctggctgggagagccatgactaccagacttttcctcaggctccttggcatgttagtctgaattgttcttgagcactgtactactgacccaacaactgtgactagctggccacgccattcagggctggtgtggcatttatgtgtgtgtgtgtgtgtgtgtgtttttcctgtttgcccagcagtgcattgtgggttccaagagtgggtagtgtgtgtatgtgtgtgtgtcagagggagacctggcaggcacctctttgagagtagctgtggtcagagctgtttggtcagtgcattatgttgaatgaggtccaggaacccagagccacccagcagacaccactgtggcttgccagctgccaagatggagaagcatgtgcccctgtagagcgtctccccagaaccagaccccgagccactcgcttcctctgtgctgtgacaacattggtgccaggggagatggtgtttttcaaagggacctactgtagccactttaatttacaattaagagccttagtttgacttaacacttttgtaggcttttcattgtgtatttttgtgtatgtgtgcatatagcagctactctgtagcagaggtgggtagagacacttaatagtatcatgtcgcatgcagatgtcacatcggcctctgcaaaaactgtactgtcttgtttctgcattagacttaagtagtcatgtgaatatactgctatgtcacttttaatattacgagttttatacttggaaaatggtacttgcttcttttaaatctctgtcttctctaacctcccccttcccatttcaatgctcccttcctaatttcagcaataatctcaaaaagcaattaaatagttaaatgaccctaattgtaaaaaaaaaaaaaaa

SEQ ID NO: 29445 - DNA, 4417 bp, Homo Sapiens; identical to SEQ ID NO: 22982

SEQ ID NO: 29446 - DNA, 15164 bp, Homo Sapiens
gaattccgcctctgcggagccgggctcgggtcgccggagccgcgccccaccccgccagctccagagccacgactaatggctgaaggataaatcaacatggcaactatgattccaccagtgaagctgaaatggcttgaacacttgaacagctcctggattacagaggacagtgaatctattgctacaagagagggagttgctgttctgtattctaaactggttagcaataaggaagtagtacctttgccccaacaagttttatgcctcaaaggaccacagttgccagactttgaacgtgagtctctttcaagtgatgagcaggaccactatttggatgcccttcttagcagccagctagcattggcaaagatggtatgttcagattccccatttgccggggcacttagaaaacgactgcttgtactccagcgtgtcttttatgcactttctaataaataccatgacaaaggcaaggtgaagcagcagcagcattctccggagagcagttctggttcagcagatgtccattctgttagtgaacgcccccggtcaagcactgatgcacttatagaaatgggtgttcgaactggtctaagtttattatttgcgcttctaagacaaagttggatgatgcctgtgtcaggacctggtctcagtctttgcaacgatgtcattcatactgcaattgaagttgtgagctctttgccaccattatcattagcaaatgaaagcaagattcctcctatgggcttggactgcttatcgcaagtaacaacatttcttaaaggagtcactattcctaattctggggcagacactttaggtcgtagattagcttctgagttgctgcttggtttggcagctcaacgaggctcattgcgatatcttcttgaatggatagaaatggctttgggggcttcggcagttgtacacaccatggagaaaggcaaactactctcaagccaggaaggaatgatcagctttgactgctttatgaccatattaatgcagatgaggcgttctttgggttcatctgctgatcggagtcagtggagagaaccaaccagaacatcggatggcttgtgctccctttacgaggcagcattatgtctctttgaagaggtttgcagaatggcttctgattattcgagaacatgtgctagcccagatagcattcagactggtgatgctcccattgtctccgaaacctgtgaggtttatgtttgggggagcaatagcagccatcagttggtagaaggtacacaggagaaaatactgcaacccaaactggctcctagtttctctgatgcacagaccattgaagctggacagtactgcacttttgtcatttctacggatggctcagttagagcttgcgggaaaggcagctatgggagactgggccttggagactccaataatcagtcaactttaaaaaagttaacattcgagcctcacagatccattaaaaaggtttcatcttctaaaggatctgatggtcacactttagcctttacgacagaaggagaagtcttcagttggggagatggtgattatgggaaactggggcatggaaatagttcaacacagaaatatcccaagcttattcagggacctctacaaggaaaggtagttgtttgtgtgtcagctggatacagacatagtgctgctgtcacagaggatggggaattatacacatggggtgaaggagactttggaagattaggtcatggtgacagcaatagtcgtaacattccaacattagtaaaagacatcagcaatgtaggagaggtttcttgtggcagttcacatactattgctctgtctaaagatgggagaactgtatggtcttttggaggaggagacaatggtaaacttggtcatggtgataccaacagagtgtataaacctaaagttattgaagctttacaaggaatgttcattcgcaaagtttgtgctgggagccagtcttcacttgctttgacatcaacagggcaggtctatgcttggggctgtggagcttgtctaggttgtggttcttcagaagctactgctttgagacccaagcttattgaagaactggctgccacaagaatagttgatgtttctattggagacagtcattgtttggctctttctcatgataatgaagtttatgcctggggcaataactcaatggggcaatgtggtcagggaaattccacaggtcctattactaaaccaaagaaagtgagtggcttagatggcatagctattcagcagatttcggctggaacatcacatagtctggcatggactgctcttcctagggacagacaagttgttgcatggcaccgaccttattgtgtagatcttgaagagagtaccttctcacacctgcgttcttttcttgagagatactgtgataaaataaacagtgagattcccccactccctttcccttcatcaagagaacaccacagttttctcaagctgtgcctgaagctactttcaaatcaccttgctcttgcacttgcgggaggggtagctaccagcattctcgggaggcaggcaggtccacttcgaaatttgctcttcagactgatggactcaactgtcccagatgaaatccaagaggtggtaattgaaactttatcagtgggagcaaccatgctgttacctccattacgagaacggatggaattacttcattctcttttacctcaaggacctgatagatgggaaagcttatctaaaggacagagaatgcaactggatatcatcctgacaagtttgcaagatcatacccacgtagcctccctacttggctatagttcaccctctgatgctgctgacctatcttctgtgtgtactggctacggaaatctgtcagatcaaccttacggcactcagagctgccatccagatacccacctggctgaaattttgatgaagaccctcttaagaaatttaggattttatacagatcaagcatttggagagctagaaaagaatagtgataaatttctacttggaacatcatcatcagaaaacagtcagcctgctcatcttcatgaactgctatgttcactacagaaacagctgctggcattttgccatatcaataacattagtgagaactcaagcagtgtggcattgcttcataaacatcttcagcttttgttgcctcatgccacagatatttattcacgttctgcaaatttgctcaaagaaagtccttggaatggcagtgttggagaaaaattaagagatgtgatatacgtctcagctgctggcagtatgctctgccagattgttaactccctgctgttactccctgtgtcagtggctcggcctttattgagttacctcctcgacttgttgccacctcttgattgccttaatagactcctgccagctgctgatcttttagaagaccaggagttacagtggcctcttcatggagggccagaactaattgatcctgctggtctgccattacctcagccagctcagtcctgggtatggcttgtggatctagaaagaacaattgctctccttattgggcggtgtcttggtggcatgcttcagggctcccctgtgtctccagaggaacaggacactgcatattggatgaaaacgccactgttcagtgacggtgtagaaatggacactcctcaattggataaatgtatgagttgcctgttagaagtagcactttctggaaatgaagaacagaagccttttgattataaattgcggcctgaaattgctgtctatgtagacttggcattgggttgttctaaagagcctgcccgaagcctttggatcagcatgcaggactatgctgttagtaaagattgggacagtgcaactttaagtaatgagtcactcttggacactgtgtctagatttgttcttgcagctcttctgaaacacacaaatttacttagtcaagcatgtggagaaagccgatatcaacctggtaaacacttatcagaagtgtaccgttgtgtatacaaagttcgaagtcgtttacttgcttgcaagaaccttgaacttattcaaacaaggtcatcatcacgggacagatggatatcagaaaaccaggactctgcagatgttgatcctcaggagcattcatttactcgaactattgatgaagaagctgaaatggaagaacaggctgagagagaccgggaagaggggcatccggagccagaggatgaagaggaggaacgggaacatgaagtgatgacagctggcaaaatctttcagtgtttcctctcagcccgtgaagtagctcgtagccgagaccgagatagaatgaacagtggggcagggtctggggctcgagctgatgatccacctcctcagtctcagcaagagcgaagggtcagcacagaccttcctgagggtcaggatgtgtacactgctgcatgcaactccgtgatccatcggtgtgccctgttaatattaggagtaagtcctgtgatagatgagcttcagaagcgaagagaagaaggacagttgcagcaaccttcaacaagtgcctctgaagggggtggacttatgaccaggagtgaaagtcttactgcagagagccggctagtccacacaagcccaaattatagactgatcaaatcgaggagtgaatctgatttgtctcagcctgaatcagatgaagagggttacgcactgagtggcagacaaaatgttgatttggatttggcagcatctcacagaaagagaggtcctatgcacagtcaattggaatccctgagtgactcttgggctcgcctgaaacatagcagagactggttatgcaactcctcctattcctttgagtcagattttgatcttaccaagtctttgggagttcacactttgattgaaaatgttgtaagctttgtgagtggagatgtggggaatgccccaggttttaaagagccagaggaaagtatgtctacaagtccccaggcctccatcattgcaatggaacagcagcagttaagggcagaacttcgtttagaggcacttcatcagatcctcgttctattgtctgggatggaagaaaaaggtagcatctcactggcaggaagcagattgagttcaggcttccagtcctccacactactcacgtctgtgaggctgcagttcctagcagggtgttttggtttaggcactgttggacacacaggagccaagggagagagtggccgattgcatcactatcaggatgggatcagagcagctaagagaaatattcagattgaaatccaggtagctgtgcataaaatttatcaacagttgtctgctaccctggaaagagccctgcaagcaaacaagcatcacattgaagcccagcaacgtctgcttctggttacagtttttgccctaagtgttcattatcaaccagtagatgtttctttggcaatttccactggtctgctaaacgtattgtcacagttgtgtggtacagacaccatgctaggacagcccctgcagttgttgccaaagacgggtgtttcccagcttagcacagctttgaaagtggccagtacaaggttgctccagattctagccatcactactgggacctatgctgataaactgagtcccaaagtagttcaatccttgttggatctactctgtagtcagttgaagaatttattgtcccaaactggtgtactacatatggcctctttcggagaaggggagcaagaagacggtgaagaagaagaaaaaaaagttgactccagtggagaaactgagaagaaagatttcagagctgctcttaggaaacaacatgcagccgaactccatctaggggattttttagtttttcttcgcagagttgtatcttcaaaagcaattcaatcaaaaatggcttccccaaagtggaccgaagtgcttctaaatatagcatctcagaaatgttcttcaggtatccctctggttggtaacttaagaacaaggctccttgcacttcatgtccttgaagctgtgctgccagcttgtgaatctggtgtagaagatgatcaaatggcccagattgttgagcgcttattttcccttctctctgattgtatgtgggagacacccattgctcaggccaaacatgctattcagataaaggaaaaagaacaagaaataaaactacagaagcagggcgagttggaagaagaagatgagaatcttcctatccaagaagtatcctttgacccggagaaagctcagtgttgcctagtggagaatggacagattttaactcacggcagtggagggaaaggatatggattggcatctacaggagtaacttctgggtgctatcagtggaagttttatattgtgaaggaaaacagaggtaatgaaggcacgtgtgttggagtttctcgctggccagtacatgactttaatcaccgcactacctcggatatgtggctctatagggcctacagtggtaacctctatcacaatggagaacagactctcacattgtccagctttactcaaggagatttcattacctgtgtgttagacatggaagccaggaccatttcttttgggaaaaatggagaggaacccaaattagcttttgaagatgtggatgcagcagagttgtacccatgtgtgatgttctatagtagcaatccaggggaaaaggtgaaaatttgtgatatgcagatgcgtggcacaccccgagacttacttccaggagaccctatttgtagtccagtagcagcagtgctggctgaggccactattcagctcgtccgtatccttcaccgaacagaccgttggacttactgcattaacaaaaaaatgatggaaaggcttcacaaaattaagatatgtattaaagagtcaggtcagaagctaaagaaaagccgctcggttcagagccgagaggaaaatgaaatgagagaggagaaggagagcaaagaggaagagaaaggtaaacatactaggcatggcctcgctgacctctcagagctgcagctgaggactctttgcatagaggtgtggcccgtgctggctgtgataggaggagttgatgctggtcttagagttggaggtcggtgtgttcacaagcaaactgggcgccatgccacgctgctgggagtggtcaaagagggcagcacgtctgccaaggtccaatgggatgaagcagaaattactatcagcttcccaactttttggtcgcctagtgatactccattgtataatctggaaccctgtgaaccattgccgtttgatgtggcgcgattccgaggcctgacggcttctgtgctgctggacctaacatatctcactggcgttcatgaagacatgggcaaacagagcaccaaacgacatgaaaagaaacaccgacatgaatccgaggagaaaggggatgttgagcagaaacctgagagtgaatccgctttagatatgcgaacaggcctaacatctgatgacgtcaaaagtcagagtaccacaagctccaaatcagaaaatgaaatcgcttcattttctttagatccaacactgccaagtgtggaatcccaacatcaaataacagaagggaaaagaaaaaatcatgaacacatgtccaaaaaccatgatgtagcccagtcagaaatcagagcagtccagctgtcctatctttacctcggtgctatgaagtcacttagtgcccttcttggctgtagtaaatatgctgagctgttgctgataccaaaagttctggctgaaaatggccacaactcagactgtgcaagttctccagttgttcatgaagacgtggagatgcgagcagccctgcagttcttgatgcgacacatggtgaagcgagcagtcatgcggtcacccataaagagagcattgggattagctgatctggaacgagcgcaagccatgatctataaattagtggttcatgggcttttggaagaccagtttgggggcaaaattaagcaagagattgatcaacaagctgaagaaagtgaccctgcccagcaggcacagacaccagttactactagcccatcagcctcaagcacgacctcctttatgagcagctctctggaggacaccacaactgccaccactccagtcactgacacagaaacagtgcctgcatccgagtccccgggagtgatgcctcttagtcttctcaggcaaatgttctctagttacccaactaccactgtacttcccacacgtcgggcacagactcctccaatatcttcgttaccaacctctccttctgatgaagtaggaaggaggcaaagtttaacttctcctgattcccagtcagcaaggccagctaaccgcacagccttgtcagacccaagcagtagactttcaacttctcctcctcctccagcaattgcagttcccttgctggaaatggggttctctcttcggcagattgccaaagccatggaagctacaggtgctaggggagaggctgatgcccagaatatcactgtccttgccatgtggatgatagagcaccctgggcatgaggatgaagaggagccccagtcgggcagcacagcagactctaggcctggagcagccgttctaggcagtggcgggaagtcaaatgatccctgttatttgcagtcacctggagacataccatcagctgatgctgctgaaatggaggaaggttttagtgaaagccctgataatttggatcatacagagaatgcagcttctggaagtggaccatcagctagaggtcgctcagcggtaacaagaagacacaagtttgacttagctgctcgcacactgctagcaagagcagcgggattataccgctctgtgcaggcccacaggaatcaaagtcggagagaaggaatatctttgcagcaagacccaggggcgttgtatgactttaatttagatgaggaattggaaattgatcttgatgatgaggcgatggaagctatgtttggacaagacctgaccagtgacaatgatattctgggaatgtggatcccagaggtactggattggcctacctggcatgtttgtgagtctgaagacagggaagaagtggtggtgtgtgaactgtgtgaatgcagcgtcgtcagcttcaatcagcacatgaagagaaaccatccaggctgtgggcgcagtgcaaaccgccagggctatcgcagcaatggttcctatgtggatggctggtttggcggtgaatgtgggagtggaaatccatactacctgttatgtggcacctgcagggagaagtacttagccatgaagaccaaatctaagtcaacaagttctgaaaggtacaagggacaagctccagatctaattggcaagcaagacagtgtgtatgaagaagactgggacatgttggatgttgatgaagatgaaaagctaactggtgaagaagaatttgaattacttgctggaccgcttggtttaaatgaccggcgcattgtaccagaaccagttcagttccctgacagcgatccactgggagcatcagtagcaatggtcacagccaccaacagtatggaagagactctgatgcaaataggttgccatggctccgtagaaaagagctcctctgggagaataacgttaggagagcaggcagctgccctagcaaaccctcatgaccgtgtggtggctttaaggagagtgactgctgctgctcaggttcttctggccagaaccatggtcatgagagcgctgtctcttctctcagtcagtggttccagttgtagcctggctgctggtcttgagtctctggggctaacagatatccgaacgctagttcgattaatgtgcttggcagcagcagggagagctggcctctccaccagcccttctgccatggctagcacctcagaacgatcacgaggtgggcatagcaaggctaacaagcctatctcttgcctggcctatttgagcacagcagtgggatgtctggcatcaaatgctcctagtgctgccaaactgcttgtacagttgtgtacacagaacttgatttctgctgcaacaggtgtaaatctaaccacagttgatgactcaattcagcgaaagtttctacccagctttctccgaggaattgctgaagagaacaagcttgtgacctccccaaactttgttgtaacacaggcccttgtggcattgctagcagacaaaggggccaaactaagacctaactatgataagtcagaagttgaaaagaaaggccctctggagttggctaatgccctggcagcctgctgcctctcctccaggctgtcctcacagcatcggcaatgggcagctcagcaactcgtgcgcactcttgctgcacacgaccgtgacaaccaaactactctgcagacacttgctgatatgggaggagatcttagaaaatgctcctttatcaaattggaggctcatcagaacagagtaatgacatgtgtttggtgtaataaaaaaggtcttttggctacaagtggcaatgatggcaccatccgcgtatggaatgttaccaagaagcaatattcactgcaacagacctgtgtgttcaacagattggaaggggatgctgaggaaagcctgggatcacccagtgatccaagtttctcaccagtttcctggagtatcagtggcaaatatctagcaggcgctttggaaaagatggtgaatatctggcaagttaatggaggaaaaggattagtagatattcagcctcattgggtatctgccctggcttggccagaagagggtccggctacagcctggtcaggagagtctccagaattgttgttggtgggacggatggatggatctctgggactgattgaagttgttgatgtgtccaccatgcaccgtcgagaattggagcattgctatcgaaaggatgtgtctgttacttgcattgcatggttcagtgaagacagaccatttgcagtgggatattttgatggaaaactgttactgggaacaaaggaaccacttgagaaaggaggcattgttctaattgatgcacataaggatactcttattagcatgaagtgggaccctacaggtcatattcttatgacatgtgccaaagaagacagtgtgaaactctggggctctatttcgggatgctggtgctgtctacattcactctgccatccatctattgtaaatggcattgcttggtgccgccttccagggaaaggatccaagttgcagttactgatggctactggctgtcagagtggcttagtatgtgtttggcgcattcctcaagatactacacagaccaatgtgactagtgcagaaggatggtgggaccaggaatcaaattgccaggatggatataggaaatcatcaggagccaagtgtgtttatcagctgcggggacacatcactcctgttcggactgttgcctttagttctgatgggttggccctggtgtctggtggactaggtgggctcatgaacatttggtctttaagggatggctctgtcttgcaaactgttgtgataggctctggagctattcagaccacagtatggattccagaagttggagtagctgcttgctcaaatagatcaaaggatgttttggtcgtgaattgtacagcagaatgggcagctgccaatcatgttttggcaacctgtaggacagcattgaaacagcagggtgttctgggattgaacatggctccctgcatgagagcatttttggagcggctccccatgatgcttcaggagcagtatgcctatgaaaagcctcatgtggtttgtggtgaccaacttgttcatagcccctatatgcaatgcttggcttcccttgctgtgggacttcatctggatcagctgttgtgtaaccctccagtgccaccacaccaccagaactgtctgcctgaccctgcatcctggaatccaaatgaatgggcctggttagaatgtttctcaaccactataaaagctgccgaagccctgaccaatggagcccagtttccagaatcttttaccgttccagatctagaacctgttccagaggatgaacttgtatttctaatggataacagtaaatggattaacggcatggatgaacaaattatgtcttgggcaacttccagacctgaggactggcacctgggaggtaaatgtgatgtctacttatggggtgctggtaggcatggacagctggcagaagctggaagaaatgtaatggtacctgcagcagctccctcattctcacaggcccaacaggtcatttgtggtcagaattgtacctttgtcatccaggccaatggcacagtgttggcttgtggggaaggaagttatggcagattaggacaaggaaattcagatgaccttcatgtgctgacagttatttcagccttacaaggctttgtggtgacccagctggtgacttcctgtggttctgatgggcactctatggccctaactgaaagtggtgaggtctttagctggggagatggtgactatggtaaacttggccatgggaacagcgacaggcagcggcggcccaggcagatcgaggccttacaaggagaagaagtggtgcagatgtcttgtggcttcaagcactcagcagtggtcacttcagatggcaaactgttcacctttgggaatggtgactatggtcgtctgggtcttggaaatacctctaacaaaaaacttccagagagagtgactgcactggagggatatcagattggacaggtggcctgtggattaaaccacactttggcagtgtcagcagatggttccatggtgtgggcttttggagatggagactatggaaaactaggcttaggaaattccactgcaaaatcttcacctcagaaaattgacgtcctttgtggaattggaataaaaaaggttgcttgtggaactcagttttctgttgctttgaccaaagatggtcatgtgtatacctttggtcaagatcgcctgataggcttgccagaggggcgtgctcgcaatcacaatcgaccgcaacaaatccctgtcctggctggagtaatcattgaagatgtggcagttggagctgaacacacacttgctttggcatcaaatggagatgtgtatgcctgggggagcaattcagaagggcagctcggcttaggccataccaaccatgttcgagaaccaaccctggtaacaggtctgcaagggaaaaatgttcggcagatctcggctggccgctgccacagtgctgcatggacagcaccacctgtcccaccaagagcaccaggtgtgtcagtacctctgcagctgggcctgcctgacacagtgcccccccagtatggggcgctgagagaagtcagcattcacacggtgcgggccaggctccggctgctctaccacttctctgacctcatgtactcatcctggagactgctgaaccttagccccaacaaccagaacagcacatcccattataatgctggaacttggggcattgtacagggacaacttcggcctttgttagccccaagagtctacactctgccaatggtgcgctccataggaaaaaccatggttcaaggcaaaaactatggacctcagataactgtaaagaggatatcaaccagaggacggaagtgtaagcctatttttgtccaaatagcgagacaagtagttaagctgaatgcttcagacctccgcctgccttcccgagcgtggaaggttaagctggttggagaaggggctgatgatgctggaggagtgtttgatgacaccatcacagagatgtgccaggaacttgaaactggtattgttgaccttcttataccctctcccaatgccaccgcagaagtgggttacaatagggacaggttcctttttaacccttctgcctgcctcgatgaacacttaatgcagtttaagtttttaggaattttaatgggggttgccattcgcacaaagaagcctctggacctccacttggcccctctggtgtggaagcagctgtgctgtgtcccactcaccctagaggacctggaggaggtggatctgctctacgtgcagactctcaacagcattcttcacattgaagacagtgggattaccgaggagagtttccatgagatgattcctcttgattcttttgttggccagagtgctgatggcaaaatggttcctataatccctggtggaaatagtatcccactcacattttccaacaggaaggaatatgtggagagggccattgaatatcgacttcatgagatggacagacaggtggctgcagtccgagaagggatgtcctggattgttcctgtgccgctgctgtccctcctcacagcaaaacaactggagcagatggtgtgtgggatgcccgagatctctgtggaagtcttgaagaaagtggtgcggtaccgtgaggtggatgagcagcatcagctggtgcagtggttctggcacacgctggaagagttctccaatgaggagcgggtgcttttcatgaggtttgtgtcaggaagatctcgactaccagccaacactgctgacatttctcagagatttcaaatcatgaaggttgataggccttacgacagtctgcctacctcacagacctgcttcttccagctgaggctgcccccgtactccagccagctggtcatggccgagcgcctgcgctatgccatcaacaactgccgctcaatcgacatggacaactacatgctctcgagaaacgtggacaacgccgagggctccgacactgactactgaccgtgcgggtgctctcaccctcccttctctccctcaataatgctcacttctgatttgatgttgatatacttttatggtaactacatagatgttataagaacataaaccaacattataaacaatggccacatttagttactctaaatgtaacaaagaaattagatgtttttatttttctgtgattgtacaaaaacaacaaaaacgaagtgctctcagtcaggtttttccctccatatttttggtcacttttgataagtttgcatgaaaccattttggtgcatttttagttgggaatggtacatttttgtaaatccacccagtgaacatgaaattgtacattgtgtataattgttcattagaaaggacagttttacatgaatattcatatatttattttgttttaatttgaattgcctgttcagggttccttatgcagagaaataaagcagattcaggaattggaaaaaaaaaaaaaaaaaaaa

SEQ ID NO: 29447 - DNA, 4878 bp, Homo Sapiens
gtccgccatttgcaaggggcccggagcgggatcgcggcacctgccgagcgggtcgccgcctctgccgcggtccttggaccccgccgccgccctggcctgggagcttgccccgccgcagcggccggcagcgcggcgctccgcgggcggcaggcacgggccccgggccccctcacggcgcccagccgcgggcctcccgaggcaaaagcccgtgggccgccgcgatggccctcaagatggtgaagggcagcatcgaccgcatgttcgacaagaatctgcaggacttggtccgcggcatccgtaaccacaaggaggacgaggcaaaatacatatctcagtgcattgatgagatcaagcaggagctgaagcaggacaacatagcggtgaaggcgaacgcggtctgcaagctgacgtatttacagatgttgggatacgacatcagctgggccgccttcaacatcatagaagtgatgagtgcctccaagttcaccttcaagcgaattggctacctcgctgcttcccagagctttcacgaaggcaccgacgtcatcatgctgaccaccaatcagatccgtaaggacttgagcagccccagccagtacgacacaggtgttgcactgacgggtctgtcctgcttcgtcaccccagaccttgccagagacctggcaaatgacatcatgacactgatgtcacacaccaagccctacatcaggaagaaggctgtgctgatcatgtacaaggtgttcctgaagtaccccgagtcgctgcgccctgcctttccccggctgaaggagaagctggaggaccccgaccccggggttcagtcggctgccgtcaatgtcatctgcgagctggccagacgcaaccctaagaactacctgtccctggccccgctctttttcaagctgatgacgtcctccaccaacaactgggtcctcatcaagatcatcaagctgttcggtgctcttactcctttggaaccgcggctgggcaagaagctgatcgagcccctcaccaatctcatccacagcacgtctgccatgtctctcctctatgaatgtgtgaacaccgtgattgcagtgctcatctcgctgtcctccggcatgcccaaccacagcgccagcatccagctttgtgttcagaaattaaggatattgatcgaggactccgatcagaacttgaagtacctggggctgctggcaatgtccaagatcctgaagacccaccccaagtccgtgcagtcccacaaggacctcatcctgcagtgcctggacgacaaggacgagtccatccggctgcgggccctggacctgctctatgggatggtgtccaagaagaacctgatggagatcgtgaagaagctgatgacccacgtagacaaggcagagggtaccacctaccgtgacgagctgctcaccaagatcattgacatctgcagccagtccaactaccagtacatcaccaacttcgagtggtacatcagcatcctggtggagctgacccggctggagggcacacggcacggccacctcatcgccgcccaaatgctggacgtggccatccgcgtgaaggccatccgcaagttcgccgtgtcccagatgtctgcgctgcttgacagtgcacacctgctggccagcagcacccagcggaacgggatctgtgaggtgctgtacgctgccgcctggatctgcggggagttctcagagcatctgcaggaaccacaccacactttggaggccatgctgcggcccagagtcaccacgctgccaggccacatccaggccgtgtatgtgcagaacgtggtcaagctctacgcctccatcctgcagcagaaggagcaggccggggaggcagagggcgctcaggccgtcacccagctcatggtggaccggctgccccagtttgtgcagagcgcagacctggaggtgcaggagcgggcgtcctgcatcctgcagctggtcaagcacatccagaagcttcaggccaaggacgtgcctgtggcagaggaggtcagcgctctctttgctggggagctgaacccagtggcccccaaggcccagaagaaggttccagtccccgaaggcctggacctggacgcctggatcaatgagccactctcggacagcgagtcagaggacgagaggcccagggccgtcttccacgaggaggagcagcggcgtcccaagcaccggccgtcggaggcggacgaggaagagctggctcggcgccgagaggcccggaagcaggagcaggccaacaaccccttctacatcaagagctcgccatcgccacagaagcggtaccaggacaccccgggcgtggagcacattcccgtggtgcagattgacctctccgtccccttgaaggttccagggctgcctatgtcagatcagtatgtgaagctggaggaggagcggcggcaccggcagaagctggagaaggacaagaggaggaaaaagaggaaggagaaggagaagaagggcaagcgccgccacagctcgctgcccacggagagcgacgaggacatcgcccctgcccagcaggtggacatcgtcacagaggagatgcctgagaatgctctgcccagcgacgaggatgacaaagaccccaacgacccctacagggctctggatattgacctggataagcccttagccgacagcgagaaactgcctattcagaaacacagaaacaccgagacctcaaaatcccctgagaaggacgttcccatggtagaaaagaagagcaagaaacccaagaagaaagagaaaaaacacaaagagaaagagagagacaaggagaagaagaaggagaaggagaagaagaaatctcccaagcctaagaagaagaagcacaggaaggagaaggaggagcggaccaaaggcaagaagaagtccaagaagcagcctccaggcagcgaggaggcagcgggggagccggtgcagaatggcgcgccagaggaggagcagctcccgcctgagtccagctactccctcctcgctgaaaattcctatgttaaaatgacctgtgacatccggggcagtctgcaggaggacagccaggtcactgtggccatcgtgctggagaacaggagcagcagcatcctcaagggcatggagctcagcgtgctggactcactcaatgccaggatggcccggccgcagggctcctccgtccacgatggcgtccccgtgcctttccagctgcccccaggcgtctccaacgaagcccagtatgtgttcaccatccagagcatcgtcatggcgcagaagctcaaggggaccctgtccttcattgccaagaatgacgagggtgcgacccacgagaagctggacttcaggctgcacttcagctgcagctcctacttgatcaccactccctgctacagtgacgcctttgctaagttgctggagtctggggacttgagcatgagctcaatcaaagtcgatggcattcggatgtccttccagaatcttctggcgaagatctgttttcaccaccatttttccgttgtggagcgagtggactcctgcgcctccatgtacagccgctccatccagggccaccatgtctgcctcctggtgaaaaaggtgagaactctgtctcagtcgacgggaagtgcagtgactccacgctactgagcaacttgttagaagagatgaaggcgacgctggccaagtgttgagagctgcctgcgagccccgcaccaccccgcggagcacgtacccagggaccgcagccctgacgtgtctcgcctctcctcagtcgtgtgtactgtacccaagcctgagtgttaatttaactctatgttgtccgccgtgtagacatccgaggtcatttgttgcgttgaattatctgaccatccttttttactgtgactcttcccattctctttggcaagaagtccccttctcgcccccaaaccagcaagggactcccccacctgggtctgtgccctgccccgcgctgggggccgagtccttgaatgtggcttcaggggctcctgtcctgggccagggcctgatgggcaccacgtgaggggcacttggtggacagggcggggctgacgtggcctcctctggggtcgcctgcttttgacccaaaggtcctgacggttgcgtccgggggaggggaaggaagggccgctgtcgccaaggttttctctcccagaacccacagtgggaaagcggtcttgccaggcgttgtccattgtcagtgtgctcgtgggctggtgactgggtcttgggatcccaggccacgcgccagccaggctgtgggcagggcggggccagggacgccaaagagaggttgcagtcagaaccgtggacggggtgggttgaggcctctctgccacccgtcttcctggtcagcagaagtgcatctcggcttgggtttggggtggtccgcatcccctgcttgccactatgcgcaccaaggtttccccacatccttcccagcacccttaggaaggcccaggcagggcctggaagcagcggacctgggctgttctgtgttgaaggagtgtgcccagtgcccttgggcaggacctgtgagagccacctcacaggcagagcccccaccaggcagggcaaggagactccgctcactccccacggccagcgtgggcacaggactgacccttcttcagagataatgacattttatcttctccttttgatgaaaactgtcactttagcatgtaatccattacagaatcccatgcagtgattccaggatttgaaattgtatgatgtgttacataagaatttatttgctatcgacattcccgtataaagagagagacatatcacgctgctgtcatgattttgtgtcaagatgatccaataaagttgtaaaacaggcatttccaaaaaaaaaaaa

SEQ ID NO: 29448 - DNA, 2746 bp, Homo Sapiens
ggctccgacttggactccctgctccgctgctgccgcttcggccccgcacgcagccagccgccagccgcccgcccggcccagctcccgccgcggccccttgccgcggtccctctcctggtcccctcccggttggtccgggggtgcgcagggggcagggcgggcgcccaggggaagctcgagggacgcgcgcgcgaaggctcctttgtggacttcacggccgccaacatctgggcgcagcgcgggccaccgctggccgtctcgccgccgcgtcgccttggggacccgagggggctcagccccaaggacggagacttcgattcgggaccagccccccgggatgcggtagcggccgctgtgcggaggccgcgaagcagctgcagccgccgccgcgcagatccacgctggctccgtgcgccatggtcacccacagcaagtttcccgccgccgggatgagccgccccctggacaccagcctgcgcctcaagaccttcagctccaagagcgagtaccagctggtggtgaacgcagtgcgcaagctgcaggagagcggcttctactggagcgcagtgaccggcggcgaggcgaacctgctgctcagtgccgagcccgccggcacctttctgatccgcgacagctcggaccagcgccacttcttcacgctcagcgtcaagacccagtctgggaccaagaacctgcgcatccagtgtgaggggggcagcttctctctgcagagcgatccccggagcacgcagcccgtgccccgcttcgactgcgtgctcaagctggtgcaccactacatgccgccccctggagccccctccttcccctcgccacctactgaaccctcctccgaggtgcccgagcagccgtctgcccagccactccctgggagtccccccagaagagcctattacatctactccgggggcgagaagatccccctggtgttgagccggcccctctcctccaacgtggccactcttcagcatctctgtcggaagaccgtcaacggccacctggactcctatgagaaagtcacccagctgccggggcccattcgggagttcctggaccagtacgatgccccgctttaaggggtaaagggcgcaaagggcatgggtcgggagaggggacgcaggcccctctcctccgtggcacatggcacaagcacaagaagccaaccaggagagagtcctgtagctctggggggaaagagggcggacaggcccctccctctgccctctccctgcagaatgtggcaggcggacctggaatgtgttggagggaagggggagtaccacctgagtctccagcttctccggaggagccagctgtcctggtgggacgatagcaaccacaagtggattctccttcaattcctcagcttcccctctgcctccaaacaggggacacttcgggaatgctgaactaatgagaactgccagggaatcttcaaactttccaacggaacttgtttgctctttgatttggtttaaacctgagctggttgtggagcctgggaaaggtggaagagagagaggtcctgagggccccagggctgcgggctggcgaaggaaatggtcacaccccccgcccaccccaggcgaggatcctggtgacatgctcctctccctggctccggggagaagggcttggggtgacctgaagggaaccatcctggtaccccacatcctctcctccgggacagtcaccgaaaacacaggttccaaagtctacctggtgcctgagagcccagggcccttcctccgttttaagggggaagcaacatttggaggggatggatgggctggtcagctggtctccttttcctactcatactataccttcctgtacctgggtggatggagcgggaggatggaggagacgggacatctttcacctcaggctcctggtagagaagacaggggattctactctgtgcctcctgactatgtctggctaagagattcgccttaaatgctccctgtcccatggagagggacccagcataggaaagccacatactcagcctggatgggtggagaggctgagggactcactggagggcaccaagccagcccacagccagggaagtggggagggggggcggaaacccatgcctcccagctgagcactgggaatgtcagcccagtaagtattggccagtcaggcgcctcgtggtcagagcagagccaccaggtcccactgccccgagccctgcacagccctccctcctgcctgggtgggggaggctggaggtcattggagaggctggactgctgccaccccgggtgctcccgctctgccatagcactgatcagtgacaatttacaggaatgtagcagcgatggaattacctggaacagttttttgtttttgtttttgtttttgtttttgtgggggggggcaactaaacaaacacaaagtattctgtgtcaggtattgggctggacagggcagttgtgtgttggggtggtttttttctctatttttttgtttgtttcttgttttttaataatgtttacaatctgcctcaatcactctgtcttttataaagattccacctccagtcctctctcctcccccctactcaggcccttgaggctattaggagatgcttgaagaactcaacaaaatcccaatccaagtcaaactttgcacatatttatatttatattcagaaaagaaacatttcagtaatttataataaagagcactattttttaatgaaaaaaaaaaaaaaaaa

SEQ ID NO: 29449 - DNA, 4663 bp, Homo Sapiens
gtcgggtccgtcccgtgcgggcaggtgccgcccctctgccggcgacgccccgggccgcccgcccgtccgcttgccaccatggagctggaggacggtgtggtgtatcaggaggagcccggcggctccggggccgtgatgtcggagcgggtgtccggcctggccggctccatctaccgcgagttcgagcggcttatcgggcgctatgacgaggaggtggtcaaagagctgatgccgctggtggtggctgtgctggagaacctggactcggtgttcgcgcaggaccaggagcaccaggtggagctggagctgctgcgggacgacaacgagcagctcatcacccagtacgagcgggagaaggcgctgcgcaagcacgctgaggagaaattcattgaatttgaagactctcaagaacaggaaaaaaaggacttacagacccgagtggaatctttagaatctcaaacaagacaacttgagctgaaagcgaaaaactatgctgaccagattagcagacttgaagaaagagaagcagaactgaagaaggaatataatgcattacatcaaagacacactgagatgatccataattatatggaacatttagaaagaacaaaacttcatcagctctcagggagtgatcaactagaatccacagctcatagtagaattagaaaagaacgccctatatcattaggaattttcccattacctgctggagatggattgcttacacctgatgctcagaaaggaggagagacccctggatctgagcaatggaaatttcaggaattaagtcaaccacgttctcataccagcctgaaggatgagctttctgatgttagccaaggcggatctaaagctaccactccagcatcaacagctaattcagatgtggcaacaattcctactgatactcccttaaaggaagaaaacgaaggatttgtgaaggttacagatgcgccaaataaatcagagataagcaaacacattgaagtacaggtagcccaggaaactagaaatgtatctactggctctgctgaaaatgaagaaaagtcagaagttcaagcaatcatcgaatctactcctgagctggatatggacaaagatctcagtggatataaaggttcaagcactcccaccaaaggcatagagaacaaagcttttgatcgcaatacagaatctctctttgaagaactgtcttcagctggctcaggcctaataggagatgtggatgaaggagcagatttactaggaatgggtcgggaagttgagaatcttatattagaaaatacacaactgttggaaaccaaaaatgctttgaacatagtgaagaatgatttgatagcaaaagtggatgaactgacctgtgagaaagatgtgctgcaaggggaattggaggctgtgaagcaagccaaactgaaactagaggaaaagaacagagaattggaggaagagcttaggaaagctcgggcagaagctgaagatgcaaggcaaaaagcaaaagatgacgatgatagtgatattcccacagcccagaggaaacggtttactagagtagaaatggcccgtgttctcatggagcgaaaccagtataaagagagattgatggagcttcaggaagctgttcgatggacagagatgattcgggcatcacgagaaaatccagccatgcaggaaaaaaaaaggtcaagcatttggcagtttttcagccgacttttcagctcctcaagtaacacgactaagaagcctgaaccacctgttaatctgaagtacaatgcacccacgtctcatgttactccgtccgtcaagaaaagaagcagcaccttatctcagctccctggggataagtccaaagcctttgatttccttagtgaagaaactgaagctagtttagcctcacgcagagaacaaaagagagagcagtatcgtcaggtaaaagcacatgttcagaaggaagacggtagagtgcaggcttttggctggagtctgcctcagaagtacaaacaggtaaccaatggtcaaggtgaaaataagatgaaaaatttacctgtgcctgtctatctcagacctctggatgaaaaagatacatcaatgaagctgtggtgtgctgttggagtcaatttatctggtgggaagaccagagatggtggttctgttgttggagcaagtgtattttacaaggatgttgctggtttggatacagaaggcagtaaacagcgaagtgcctctcagagtagtttagataagttagatcaggaacttaaggaacagcagaaggagttaaaaaatcaagaagaattatccagtctagtttggatctgtaccagcactcattcggctacaaaagttcttattattgatgctgttcaacctggcaacatcctagacagtttcactgtttgcaactctcatgttctgtgcattgcaagtgtgccaggtgcacgagaaacagactaccctgcaggagaagatctttcagaatctggtcaggtagacaaagcatctttatgtggaagtatgacaagcaacagctcagcagagacagacagcctgttaggaggcatcacagtggttggttgttctgcagaaggtgtgacgggagctgccacttcccctagtacaaatggtgcttctccagtgatggataaaccaccagaaatggaagcagaaaatagtgaggttgatgaaaatgttccaacagcagaagaagcaactgaagctacagaagggaatgcggggtcagctgaagacacagtggacatctcccaaactggcgtctacacagagcatgtctttacagatcctttgggagttcagatcccagaagacctctccccagtgtatcagtcgagcaatgactcagatgcatataaagatcaaatatcagtactgccaaatgaacaagacttggtgagagaagaagcccagaaaatgagtagtcttttaccaactatgtggcttggagctcaaaatggctgtttgtatgtccattcatctgtagcccagtggaggaaatgtctccattccattaaacttaaagattcgattctcagtattgtacacgtgaagggaatcgtgttagtagccctggctgacggcacccttgcaatctttcacagaggagtggatgggcagtgggatttgtcaaactatcacctcttagaccttggacggcctcatcattccatccgttgcatgactgtggtacatgacaaagtctggtgtggctataggaacaaaatctatgtggtgcagccaaaggccatgaaaatagagaaatcttttgatgcacatcccaggaaggagagccaagtgcgacagcttgcgtgggtgggggatggcgtgtgggtctccattcgcttggattctacgctccgtctctatcatgcacacacttatcaacatctacaggatgtggacattgagccttatgtaagcaaaatgttaggtactggaaaactgggcttctcttttgtgagaattacagctcttatggtgtcttgtaatcgtttgtgggtggggacaggaaatggtgtcattatctccatcccattgacagaaacaaataaaacctcaggtgtaccaggaaatcgtcctggaagtgtaatccgtgtatatggtgatgaaaacagtgataaagtgactccagggacatttataccctattgttcaatggcacatgcacagctttgcttccatgggcaccgggatgctgtgaaattctttgtggcagtcccaggtcaagtcatcagcccacaaagtagcagtagtggcacggatctgacgggtgacaaagcagggccatctgcacaggagcctggtagtcagacgcccttgaagtctatgcttgtcatcagtggaggagagggctacatcgacttccgaatgggtgatgaaggtggagaatcagaacttcttggagaggatcttccacttgaaccttctgtcaccaaagcagaaaggagtcacttgatagtgtggcaagtgatgtatggcaatgagtgagcccatgggaaacaggtggagatggggaagccgtctcttctgcatggtttattttccctctatccttttatttaatgctcttttgtgagataagtttcaccacataatgtgtgagcattttttcctgttaactttatattacaaaatccgttctaccataacaatacagaggaactagctgtgttactgcaccagtgttataggtaacttcagtatattatgaacaaatcaaagaatgtttacttcctgcaaactggtgaattatagaaagcaatccagatgtggtttactctgccacagtctaatgtcattcacttcatttgatggggtcacttgttagctgtcactaataatggaattaatgggaaacacttgataaatgaaactgtaccgttaaatacaatagctgagttttccccagtgtattgtaaaattgacacacactaatacaagatggattatcaggatgtatctaaatgtcccgagagggttaaaagctaactgtaaattactttaactttcactttcaaatctgacaaatcttgtttatatggtatataaaactttgttttcatcagatttgggggggttttatattaaagaaattaagactacactatttaaataaacgtttcctgtttctgaaaaaaaaaaaaaaaaa

SEQ ID NO: 29450 - DNA, 7054 bp, Homo Sapiens
ccgcggcctgggcctgcgccgctcagctctctggaaactagcgcctcagctgcgcggcgcgtaggtcgcggggagctccgaaccgccggcgcccggccatggcggtctccaggctagatcgcctttttattttactggatactggcactactcctgttacaagaaaagctgctgcacagcaacttggagaagtggtgaagcttcatccccatgaactaaataatctcctgtctaaagtgttgatatatttaaggagtgcaaattgggatacccggattgcagcaggacaagctgttgaagctatagtgaaaaatgtacctgagtggaatccagtgccgagaaccagacaagaacctacttccgaaagttctatggaagattcacctactacagagcgattgaattttgacagatttgatatatgtagattgttacaacatggtgcatcactcctgggatctgctggtgccgaatttgaagtccaagatgaaaaatcaggtgaagtggatcctaaagagaggatagcacgccaacgaaaattattacagaagaaacttggccttaatatgggagaagcaattggaatgagtactgaagaacttttcaatgatgaggatttggattataccccaacttcagcatcctttgttaacaaacaacctactcttcaggcagctgaattgattgactcagagtttcgagcaggaatgagcaatagacaaaagaacaaagctaaaagaatggccaagttatttgcaaaacagagatccagggatgcagtggaaactaatgagaagagcaatgatagcactgatggggagccagaagaaaagagacggaaaatagcaaatgttgttattaatcagtctgcaaatgattccaaagtcttgattgataatattccagacagctcttccttaattgaagagacaaatgaatggcctttggaaagcttttgtgaagaactttgcaatgacctttttaatccctcctgggaggttcgacatggtgcaggcactggacttagggaaattcttaaagctcatgggaaaagtggtggtaaaatgggtgacagcactttagaagagatgattcagcagcatcaagagtggttggaagacttggttattagactcctttgtgtttttgcattagacagatttggagactttgtttctgatgaagttgtggcaccagttcgtgaaacttgtgctcaaacattaggtgtggttttaaaacacatgaacgaaacaggagttcataagactgtggatgtgctgctaaaattacttacacaagaacaatgggaagttagacatggtggtctgctgggaataaaatatgctttggcagtccgtcaggatgtaattaatactttattgcctaaagttttaactagaataattgaaggactccaggatcttgatgatgatgtcagagctgttgctgcagcatcattagtgcctgtagtagaaagccttgtctatcttcagacacaaaaggtgcccttcattataaatacattgtgggatgctcttctggaattagatgatctaacagcttcaacaaatagtattatgactctcctttcatccttgttaacttaccctcaggtccaacaatgcagtattcagcagtcactgacagttttagttccacgtgtctggccttttttgcatcacactatatcatcagttcgaagagcagcattggaaactctgtttacgttattatcaacacaggaccagaactcttcatcttggcttatacctatactgcctgatatgctccgacacatttttcagttctgtgttttggaaagcagccaggaaattctggaccttattcacaaggtttggatggaactgttgagtaaggcttcagttcagtatgtggtagcagctgcttgcccatggatgggtgcttggctttgcttgatgatgcagccttctcatttacctatcgatttaaatatgttgctagaagtaaaagctagagccaaggaaaaaacaggtggtaaggtgcgccaaggccaaagccagaataaagaagtacttcaggagtatattgcaggtgccgacaccatcatggaagacccagccaccagggattttgtagttatgcgggccagaatgatggcagccaagttgttaggagcactttgttgctgtatttgtgatccaggtgtaaatgtggtaactcaagaaattaaaccagctgaatccctgggccagttactactcttccatttgaactccaagtctgctttacagaggattagtgtagctttggtaatctgtgaatgggctgctttacaaaaggagtgtaaagctgttaccttagctgtgcagccgcgtttacttgatatcctttcagaacatttatattatgacgaaattgccgttccattcacacgaatgcagaatgaatgtaaacaacttatatcatcattagctgatgtacatattgaagttggtaatcgagtaaacaacaatgttttaacaatagatcaagctagtgacttggtcactactgtttttaatgaagccacatcatctttcgatttaaatcctcaagtgttacaacagttagatagtaaacgacagcaggtccaaatgacagttacagagaccaaccaggagtggcaagtgttgcagttgagagtgcatacttttgctgcctgtgcagttgtgagcttgcagcagcttccggagaaattaaatcctatcataaaaccattaatggagacaattaaaaaagaagagaatacactagtgcaaaactatgcagctcagtgcatagctaaactccttcagcagtgcacaacaaggacgccctgtcccaattcaaaaattattaaaaacctctgtagctcactttgtgtggacccatatctaactccttgtgtcacatgtccagtaccaacacaaagtggccaggaaaattctaaaggatccacctcagaaaaagatggaatgcaccatactgtcaccaagcacagaggtataattacactctacaggcaccagaaagctgcctttgctatcacaagtaggcgaggtcctacccccaaagcagtaaaagctcaaatagcagatcttcctgcaggaagtagtggaaatattcttgttgaacttgatgaggcccagaagccttacctggtacaacggagaggagctgaatttgctttgacaactatagtaaagcattttggtggtgaaatggcagtgaagttgccacatctctgggatgctatggttggcccattgaggaatacaatcgacataaataattttgatggaaaatccctcctggataagggagatagccctgctcaagaattggtgaattctctgcaggtttttgaaacagcagcagcttcaatggattctgagcttcatcccttgttggtccagcatttgccacatctttatatgtgccttcaataccccagtactgcagtgaggcacatggctgctcgttgtgtaggtgtcatgagcaaaatagctaccatggaaacaatgaatatttttttggagaaggttcttccgtggctgggagcaattgatgacagtgtcaaacaagagggtgcaattgaagcacttgcctgtgtaatggaacaactagatgttggtattgttccatatattgtccttttagttgttcctgtattaggaagaatgagtgatcagacagacagtgtgagattcatggccacgcagtgctttgcaacgctaattagactcatgccacttgaggcaggcattccagaccctccaaacatgtcagcagaattaatccaattgaaagccaaggagcgacactttttggagcaattgttagatgggaaaaaattggaaaattataaaattccagtaccaatcaatgctgaactcagaaaatatcagcaggatggtgtgaactggttagcatttcttaataagtataaacttcatggaattctgtgtgatgacatgggtttaggaaaaactttacagtccatctgcattctagcaggagatcattgtcatagggcccaggaatatgcaagatcaaaattagcagaatgtatgccacttccttccttagtggtttgtccgccaacattaacaggccattgggtggatgaagtaggtaaattttgctctagagaatatctcaacccgttgcattacactggacctcccactgaaagaataaggttacagcaccaagtaaaaaggcacaatctaatagtggcttcatatgatgttgtgaggaatgacatagatttctttagaaatattaaatttaactactgcattcttgatgaaggccatgtcatcaaaaatggaaaaacaaagttgtcaaaagcagtaaaacaactgactgctaattataggattattctttctggaacaccaatccagaacaacgttttggagctgtggtcattatttgatttcctcatgccaggatttttgggtactgaacgccagtttgctgctcgatatggtaaacctatattagcaagtagggatgctcgaagctccagtcgagagcaagaagcaggtgttcttgctatggatgcgctgcaccgccaagtactaccgtttcttttgagaagaatgaaagaagatgttttgcaggatcttccacctaaaattattcaagactattattgtactcttagtcctctccaggttcagctctatgaagattttgctaagtctcgtgccaagtgtgatgttgatgaaacagtttcttcagctacactttctgaagaaactgaaaaaccaaagcttaaagctacaggccacgtattccaggcattacagtacttacgtaaactgtgcaaccatccagcattagtcttaacacctcaacatccagaattcaagaccactgccgaaaaactggcagttcagaattcttctctacatgatattcaacatgcccctaagctctcagctttgaaacaattgctgttggactgcggtttgggaaatggcagcacttccgagagtggcacagagtctgttgtggcccagcacaggatactgatattctgtcagctgaaaagcatgcttgatatagtagagcatgatctcctcaaacctcacttgccctctgtcacttatttgagattagatggcagcatacctcctggtcagaggcattccattgtttcccggtttaataatgatccatctatagacgttctgttacttaccactcacgttggtggcctgggacttaatttgacaggcgctgacacagtagtatttgtggagcatgactggaatcctatgcgagatctacaagccatggaccgggcccatcgcattgggcagaaacgtgtggttaacgtataccgattgataaccagaggaacattggaagaaaaaataatggggttgcagaaattcaagatgaacatagcgaatactgttattagccaagagaattctagtttgcagagcatggggactgatcagcttcttgatctgtttactcttgataaggatggcaaagcagaaaaagctgacacctctacttctgggaaagcaagtatgaaatcaattcttgaaaacctgagtgatctttgggatcaagagcagtatgattcagagtacagcctggaaaattttatgcattctctcaagtaactatcaaatattgtaaatgcaattgctgctagttcagttacatttctgctgatattcagcaaatttctaagtttatggtgaacttttaactcaatgtgtaaatagatctggagaatattcagcataatgctggctcttgtttcactgggggaaacaagttattctcaaatatttgcactgtattaaatttaaatgttaatgtgaaatggtttaaattttacatgctgaaaagctgcagagcagaggaaccaaaccaggtttatttgtgctaccaggaggtgttcttaatgggaacaggcctcctatctttagtcactttgtacaggatgatatccatgagtactttagtgtttgtatatgttttttcttttaaatagaacttgtttttataattgatttaaaatagggctttttttctataaaagccttaatgagccataattttaagaatataagaataatgactatgatattggtcagtcttagaacatgaaaatgtcagacaatgaatttaatcgggcccttggtggaaacatttatatatttaatgcagatgcatagtgtttttcaaatctttaacatcattttttcaacttttaagatataatatcaactattctaaatacaggtaatggtatatttaaggctaccataacatcctatttagagggtggttttttttaatttatctaatggctacgatatagccagattcaaataacatatgtactcaataggtttcaatcatatatataatatattttttgtaactatgaacatacacagttttccagaaatagattttacactgtttagaattccaacacctacagtggaaagactgtttattgtagtaatgcatggctgaagcataaaagggagagagaatttctttatatacacaaacatacatgaatatgcatatctatatgcatagatgtacctatcctgcacccaaaaaggtgcctggtattggcactaaaatcatgtagttatactgggcagcaataataattgggcatgaggctgattactcaatggtgagggtaggtatatgtagatagatgtgcatgtatgtgtttgtatatataattttataagtttcacgcataaattaatacatgcctgtgtgcatacatatgtatgggatatatttgtatatatatgtacaggtaataaacatccccaaggtttgtggctggccatacacataggcatcagtttaacaaccatcagacctcagctgtacaataacaggtgttttgtttaattaaaattatactgttctgcagcatttagacatttgtcacatttcattagctttgacaaccatactgtaacattaaacctagcattccacaagagaataaatataagattgaaactgtaaaaaaaaaaaaaaaaaa

SEQ ID NO: 29451 - DNA, 1781 bp, Homo Sapiens
gcctcccacccagggctggcatccctgctccctgccctgggtcccagactgtgtcctccatcaccgcagggtcggtgaggggctgggctggacaccagggcccgccctcccatcactgagctccactccttcctcattttgctgctgattctagccccaaacaaaacaggttgagctttttcctcccctcagaagctcctctctggctcgtggctgccttctgagtgttgcagacggcgccggccgggaaggggggcctgggccagccctgccaggactgggacgctgctgctggcgcctggccctccatcaggccagcctgtggcaggagagtgagctttgccgcggcagacgcctgaggatgatgccccagctgcagttcaaagatgccttttggtgcagggacttcacagcccacacgggctacgaggtgctgctgcagcggcttctggatggcaggaagatgtgcaaagacatggaggagctactgaggcagagggcccaggcggaggagcggtacgggaaggagctggtgcagatcgcacggaaggcaggtggccagacggagatcaactccctgagggcctcctttgactccttgaagcagcaaatggagaatgtgggcagctcacacatccagctggccctgaccctgcgtgaggagctgcggagtctcgaggagtttcgtgagaggcagaaggagcagaggaagaagtatgaggccgtcatggaccgggtccagaagagcaagctgtcgctctacaagaaggccatggagtccaagaagacatacgagcagaagtgccgggacgcggacgacgcggagcaggccttcgagcgcattagcgccaacggccaccagaagcaggtggagaagagtcagaacaaagccaggcagtgcaaggactcggccaccgaggcagagcgggtatacaggcagagcattgcgcagctggagaaggtccgggctgagtgggagcaggagcaccggaccacctgtgaggcctttcagctgcaagagtttgaccggctgaccattctccgcaacgccctgtgggtgcacagcaaccagctctccatgcagtgtgtcaaggatgatgagctctacgaggaagtgcggctgacgctggaaggctgcagcatagacgccgacatcgacagtttcatccaggccaagagcacgggcacagagccccccgctccggtgccctaccagaactattacgatcgggaggtcaccccgctgaccagcagccctggcatacagccgtcctgcggcatgataaagaggttctctggactgctgcacggaagtcccaagaccacttcgttggcagcttctgctgcgtccacagagaccctgacccccacccccgagcggaatgagggtgtctacacagccatcgcagtgcaggagatacagggaaacccggcctcaccagcccaggagtaccgggcgctctacgattatacagcgcagaacccagatgagctggacctgtccgcgggagacatcctggaggtgatcctggaaggggaggatggctggtggactgtggagaggaacgggcagcgtggcttcgtccctggttcctacctggagaagctttgaggaagggccaggagccccttcggacctgccctgccagtggagccagcagtgcccccagcactgtccccaccttgctagggcccagaaccaagcgtcccccagccccgagagggagcctgtcgtctcccagggaataaaggagtgcgttctgttcaaaaaaaaaaaaaaa

SEQ ID NO: 29452 - DNA, 1327 bp, Homo Sapiens
tcgctcgccgcctcgcgccgagactagaagcgctgcgggaagcagggacagtggagagggcgctgcgctcgggctacccaatgcgtggactatctgccgccgctgttcgtgcaatatgctggagctccagaacagctaaacggagtcgccacaccactgtttgtgctggatcgcagcgctgcctttccttatgaagaagacacaaacttggattctcacttgcatttatcttcagctgctcctatttaatcctctcgtcaaaactgaagggatctgcaggaatcgtgtgactaataatgtaaaagacgtcactaaattggtggcaaatcttccaaaagactacatgataaccctcaaatatgtccccgggatggatgttttgccaagtcattgttggataagcgagatggtagtacaattgtcagacagcttgactgatcttctggacaagttttcaaatatttctgaaggcttgagtaattattccatcatagacaaacttgtgaatatagtggatgaccttgtggagtgcgtgaaagaaaactcatctaaggatctaaaaaaatcattcaagagcccagaacccaggctctttactcctgaagaattctttagaatttttaatagatccattgatgccttcaaggactttgtagtggcatctgaaactagtgattgtgtggtttcttcaacattaagtcctgagaaagggaaggccaaaaatccccctggagactccagcctacactgggcagccatggcattgccagcattgttttctcttataattggctttgcttttggagccttatactggaagaagagacagccaagtcttacaagggcagttgaaaatatacaaattaatgaagaggataatgagataagtatgttgcaagagaaagagagagagtttcaagaagtgtaattgtggcttgtatcaacactgttactttcgtacattggctggtaacagttcatgtttgcttcataaatgaagcagctttaaacaaattcatattctgtctggagtgacagaccacatctttatctgttcttgctacccatgactttatatggatgattcagaaattggaacagaatgttttactgtgaaactggcactgaattaatcatctataaagaagaacttgcatggagcaggactctattttaaggactgcgggacttgggtctcatttagaacttgcagctgatgttggaagagaaagcacgtgtctcagactgcatgtaccatttgcatggctccagaaatgtctaaatgctgaaaaaacacctagctttattcttcagatacaaactgcag

SEQ ID NO: 29453 - DNA, 13764 bp, Homo Sapiens
tcactgacacatagagtaacttctagttctccaagctctactcatgatgaaagagaagatgttcaaaagaaaacattcacaaaatgggtaaatgcacaattttctaagtttgggaagcagcatattgagaacctcttcagtgacctacaggatgggaggcgcctcctagacctcctcgaaggcctgacagggcaaaaactgccaaaagaaaaaggatccacaagagttcatgccctgaacaatgtcaacaaggcactgcgggttttgcagaacaataatgttgatttagtgaatattggaagtactgacatcgtagatggaaatcataaactgactcttggtttgatttggaatataatcctccactggcaggtcaaaaatgtaatgaaaaatatcatggctggattgcaacaaaccaacagtgaaaagattctcctgagctgggtccgacaatcaactcgtaattatccacaggttaatgtaatcaacttcaccaccagctggtctgatggcctggctttgaatgctctcatccatagtcataggccagacctatttgactggaatagtgtggtttgccagcagtcagccacacaacgactggaacatgcattcaacatcgccagatatcaattaggcatagagaaactactcgatcctgaagatgttgataccacctatccagataagaagtccatcttaatgtacatcacatcactcttccaagttttgcctcaacaagtgagcattgaagccatccaggaagtggaaatgttgccaaggccacctaaagtgactaaagaagaacattttcagttacatcatcaaatgcactattctcaacagatcacggtcagtctagcacagggatatgagagaacttcttcccctaagcctcgattcaagagctatgcctacacacaggctgcttatgtcaccacctctgaccctacacggagcccatttccttcacagcatttggaagctcctgaagacaagtcatttggcagttcattgatggagagtgaagtaaacctggaccgttatcaaacagctttagaagaagtattatcgtggcttctttctgctgaggacacattgcaagcacaaggagagatttctaatgatgtggaagtggtgaaagaccagtttcatactcatgaggggtacatgatggatttgacagcccatcagggccgggttggtaatattctacaattgggaagtaagctgattggaacaggaaaattatcagaagatgaagaaactgaagtacaagagcagatgaatctcctaaattcaagatgggaatgcctcagggtagctagcatggaaaaacaaagcaatttacatagagttttaatggatctccagaatcagaaactgaaagagttgaatgactggctaacaaaaacagaagaaagaacaaggaaaatggaggaagagcctcttggacctgatcttgaagacctaaaacgccaagtacaacaacataaggtgcttcaagaagatctagaacaagaacaagtcagggtcaattctctcactcacatggtggtggtagttgatgaatctagtggagatcacgcaactgctgctttggaagaacaacttaaggtattgggagatcgatgggcaaacatctgtagatggacagaagaccgctgggttcttttacaagacatccttctcaaatggcaacgtcttactgaagaacagtgcctttttagtgcatggctttcagaaaaagaagatgcagtgaacaagattcacacaactggctttaaagatcaaaatgaaatgttatcaagtcttcaaaaactggccgttttaaaagcggatctagaaaagaaaaagcaatccatgggcaaactgtattcactcaaacaagatcttctttcaacactgaagaataagtcagtgacccagaagacggaagcatggctggataactttgcccggtgttgggataatttagtccaaaaacttgaaaagagtacagcacagatttcacaggctgtcaccaccactcagccatcactaacacagacaactgtaatggaaacagtaactacggtgaccacaagggaacagatcctggtaaagcatgctcaagaggaacttccaccaccacctccccaaaagaagaggcagattactgtggattctgaaattaggaaaaggttggatgttgatataactgaacttcacagctggattactcgctcagaagctgtgttgcagagtcctgaatttgcaatctttcggaaggaaggcaacttctcagacttaaaagaaaaagtcaatgccatagagcgagaaaaagctgagaagttcagaaaactgcaagatgccagcagatcagctcaggccctggtggaacagatggtgaatgagggtgttaatgcagatagcatcaaacaagcctcagaacaactgaacagccggtggatcgaattctgccagttgctaagtgagagacttaactggctggagtatcagaacaacatcatcgctttctataatcagctacaacaattggagcagatgacaactactgctgaaaactggttgaaaatccaacccaccaccccatcagagccaacagcaattaaaagtcagttaaaaatttgtaaggatgaagtcaaccggctatcaggtcttcaacctcaaattgaacgattaaaaattcaaagcatagccctgaaagagaaaggacaaggacccatgttcctggatgcagactttgtggcctttacaaatcattttaagcaagtcttttctgatgtgcaggccagagagaaagagctacagacaatttttgacactttgccaccaatgcgctatcaggagaccatgagtgccatcaggacatgggtccagcagtcagaaaccaaactctccatacctcaacttagtgtcaccgactatgaaatcatggagcagagactcggggaattgcaggctttacaaagttctctgcaagagcaacaaagtggcctatactatctcagcaccactgtgaaagagatgtcgaagaaagcgccctctgaaattagccggaaatatcaatcagaatttgaagaaattgagggacgctggaagaagctctcctcccagctggttgagcattgtcaaaagctagaggagcaaatgaataaactccgaaaaattcagaatcacatacaaaccctgaagaaatggatggctgaagttgatgtttttctgaaggaggaatggcctgcccttggggattcagaaattctaaaaaagcagctgaaacagtgcagacttttagtcagtgatattcagacaattcagcccagtctaaacagtgtcaatgaaggtgggcagaagataaagaatgaagcagagccagagtttgcttcgagacttgagacagaactcaaagaacttaacactcagtgggatcacatgtgccaacaggtctatgccagaaaggaggccttgaagggaggtttggagaaaactgtaagcctccagaaagatctatcagagatgcacgaatggatgacacaagctgaagaagagtatcttgagagagattttgaatataaaactccagatgaattacagaaagcagttgaagagatgaagagagctaaagaagaggcccaacaaaaagaagcgaaagtgaaactccttactgagtctgtaaatagtgtcatagctcaagctccacctgtagcacaagaggccttaaaaaaggaacttgaaactctaaccaccaactaccagtggctctgcactaggctgaatgggaaatgcaagactttggaagaagtttgggcatgttggcatgagttattgtcatacttggagaaagcaaacaagtggctaaatgaagtagaatttaaacttaaaaccactgaaaacattcctggcggagctgaggaaatctctgaggtgctagattcacttgaaaatttgatgcgacattcagaggataacccaaatcagattcgcatattggcacagaccctaacagatggcggagtcatggatgagctaatcaatgaggaacttgagacatttaattctcgttggagggaactacatgaagaggctgtaaggaggcaaaagttgcttgaacagagcatccagtctgcccaggagactgaaaaatccttacacttaatccaggagtccctcacattcattgacaagcagttggcagcttatattgcagacaaggtggacgcagctcaaatgcctcaggaagcccagaaaatccaatctgatttgacaagtcatgagatcagtttagaagaaatgaagaaacataatcaggggaaggaggctgcccaaagagtcctgtctcagattgatgttgcacagaaaaaattacaagatgtctccatgaagtttcgattattccagaaaccagccaattttgagcagcgtctacaagaaagtaagatgattttagatgaagtgaagatgcacttgcctgcattggaaacaaagagtgtggaacaggaagtagtacagtcacagctaaatcattgtgtgaacttgtataaaagtctgagtgaagtgaagtctgaagtggaaatggtgataaagactggacgtcagattgtacagaaaaagcagacggaaaatcccaaagaacttgatgaaagagtaacagctttgaaattgcattataatgagctgggagcaaaggtaacagaaagaaagcaacagttggagaaatgcttgaaattgtcccgtaagatgcgaaaggaaatgaatgtcttgacagaatggctggcagctacagatatggaattgacaaagagatcagcagttgaaggaatgcctagtaatttggattctgaagttgcctggggaaaggctactcaaaaagagattgagaaacagaaggtgcacctgaagagtatcacagaggtaggagaggccttgaaaacagttttgggcaagaaggagacgttggtggaagataaactcagtcttctgaatagtaactggatagctgtcacctcccgagcagaagagtggttaaatcttttgttggaataccagaaacacatggaaacttttgaccagaatgtggaccacatcacaaagtggatcattcaggctgacacacttttggatgaatcagagaaaaagaaaccccagcaaaaagaagacgtgcttaagcgtttaaaggcagaactgaatgacatacgcccaaaggtggactctacacgtgaccaagcagcaaacttgatggcaaaccgcggtgaccactgcaggaaattagtagagccccaaatctcagagctcaaccatcgatttgcagccatttcacacagaattaagactggaaaggcctccattcctttgaaggaattggagcagtttaactcagatatacaaaaattgcttgaaccactggaggctgaaattcagcagggggtgaatctgaaagaggaagacttcaataaagatatgaatgaagacaatgagggtactgtaaaagaattgttgcaaagaggagacaacttacaacaaagaatcacagatgagagaaagcgagaggaaataaagataaaacagcagctgttacagacaaaacataatgctctcaaggatttgaggtctcaaagaagaaaaaaggctctagaaatttctcatcagtggtatcagtacaagaggcaggctgatgatctcctgaaatgcttggatgacattgaaaaaaaattagccagcctacctgagcccagagatgaaaggaaaataaaggaaattgatcgggaattgcagaagaagaaagaggagctgaatgcagtgcgtaggcaagctgagggcttgtctgaggatggggccgcaatggcagtggagccaactcagatccagctcagcaagcgctggcgggaaattgagagcaaatttgctcagtttcgaagactcaactttgcacaaattcacactgtccgtgaagaaacgatgatggtgatgactgaagacatgcctttggaaatttcttatgtgccttctacttatttgactgaaatcactcatgtctcacaagccctattagaagtggaacaacttctcaatgctcctgacctctgtgctaaggactttgaagatctctttaagcaagaggagtctctgaagaatataaaagatagtctacaacaaagctcaggtcggattgacattattcatagcaagaagacagcagcattgcaaagtgcaacgcctgtggaaagggtgaagctacaggaagctctctcccagcttgatttccaatgggaaaaagttaacaaaatgtacaaggaccgacaagggcgatttgacagatctgttgagaaatggcggcgttttcattatgatataaagatatttaatcagtggctaacagaagctgaacagtttctcagaaagacacaaattcctgagaattgggaacatgctaaatacaaatggtatcttaaggaactccaggatggcattgggcagcggcaaactgttgtcagaacattgaatgcaactggggaagaaataattcagcaatcctcaaaaacagatgccagtattctacaggaaaaattgggaagcctgaatctgcggtggcaggaggtctgcaaacagctgtcagacagaaaaaagaggctagaagaacaaaagaatatcttgtcagaatttcaaagagatttaaatgaatttgttttatggttggaggaagcagataacattgctagtatcccacttgaacctggaaaagagcagcaactaaaagaaaagcttgagcaagtcaagttactggtggaagagttgcccctgcgccagggaattctcaaacaattaaatgaaactggaggacccgtgcttgtaagtgctcccataagcccagaagagcaagataaacttgaaaataagctcaagcagacaaatctccagtggataaaggtttccagagctttacctgagaaacaaggagaaattgaagctcaaataaaagaccttgggcagcttgaaaaaaagcttgaagaccttgaagagcagttaaatcatctgctgctgtggttatctcctattaggaatcagttggaaatttataaccaaccaaaccaagaaggaccatttgacgttcaggaaactgaaatagcagttcaagctaaacaaccggatgtggaagagattttgtctaaagggcagcatttgtacaaggaaaaaccagccactcagccagtgaagaggaagttagaagatctgagctctgagtggaaggcggtaaaccgtttacttcaagagctgagggcaaagcagcctgacctagctcctggactgaccactattggagcctctcctactcagactgttactctggtgacacaacctgtggttactaaggaaactgccatctccaaactagaaatgccatcttccttgatgttggaggtacctgctctggcagatttcaaccgggcttggacagaacttaccgactggctttctctgcttgatcaagttataaaatcacagagggtgatggtgggtgaccttgaggatatcaacgagatgatcatcaagcagaaggcaacaatgcaggatttggaacagaggcgtccccagttggaagaactcattaccgctgcccaaaatttgaaaaacaagaccagcaatcaagaggctagaacaatcattacggatcgaattgaaagaattcagaatcagtgggatgaagtacaagaacaccttcagaaccggaggcaacagttgaatgaaatgttaaaggattcaacacaatggctggaagctaaggaagaagctgagcaggtcttaggacaggccagagccaagcttgagtcatggaaggagggtccctatacagtagatgcaatccaaaagaaaatcacagaaaccaagcagttggccaaagacctccgccagtggcagacaaatgtagatgtggcaaatgacttggccctgaaacttctccgggattattctgcagatgataccagaaaagtccacatgataacagagaatatcaatgcctcttggagaagcattcataaaagggtgagtgagcgagaggctgctttggaagaaactcatagattactgcaacagttccccctggacctggaaaagtttcttgcctggcttacagaagctgaaacaactgccaatgtcctacaggatgctacccgtaaggaaaggctcctagaagactccaagggagtaaaagagctgatgaaacaatggcaagacctccaaggtgaaattgaagctcacacagatgtttatcacaacctggatgaaaacagccaaaaaatcctgagatccctggaaggttccgatgatgcagtcctgttacaaagacgtttggataacatgaacttcaagtggagtgaacttcggaaaaagtctctcaacattaggtcccatttggaagccagttctgaccagtggaagcgtctgcacctttctctgcaggaacttctggtgtggctacagctgaaagatgatgaattaagccggcaggcacctattggaggcgactttccagcagttcagaagcagaacgatgtacatagggccttcaagagggaattgaaaactaaagaacctgtaatcatgagtactcttgagactgtacgaatatttctgacagagcagcctttggaaggactagagaaactctaccaggagcccagagagctgcctcctgaggagagagcccagaatgtcactcggcttctacgaaagcaggctgaggaggtcaatactgagtgggaaaaattgaacctgcactccgctgactggcagagaaaaatagatgagacccttgaaagactccaggaacttcaagaggccacggatgagctggacctcaagctgcgccaagctgaggtgatcaagggatcctggcagcccgtgggcgatctcctcattgactctctccaagatcacctcgagaaagtcaaggcacttcgaggagaaattgcgcctctgaaagagaacgtgagccacgtcaatgaccttgctcgccagcttaccactttgggcattcagctctcaccgtataacctcagcactctggaagacctgaacaccagatggaagcttctgcaggtggccgtcgaggaccgagtcaggcagctgcatgaagcccacagggactttggtccagcatctcagcactttctttccacgtctgtccagggtccctgggagagagccatctcgccaaacaaagtgccctactatatcaaccacgagactcaaacaacttgctgggaccatcccaaaatgacagagctctaccagtctttagctgacctgaataatgtcagattctcagcttataggactgccatgaaactccgaagactgcagaaggccctttgcttggatctcttgagcctgtcagctgcatgtgatgccttggaccagcacaacctcaagcaaaatgaccagcccatggatatcctgcagattattaattgtttgaccactatttatgaccgcctggagcaagagcacaacaatttggtcaacgtccctctctgcgtggatatgtgtctgaactggctgctgaatgtttatgatacgggacgaacagggaggatccgtgtcctgtcttttaaaactggcatcatttccctgtgtaaagcacatttggaagacaagtacagataccttttcaagcaagtggcaagttcaacaggattttgtgaccagcgcaggctgggcctccttctgcatgattctatccaaattccaagacagttgggtgaagttgcatcctttgggggcagtaacattgagccaagtgtccggagctgcttccaatttgctaataataagccagagatcgaagcggccctcttcctagactggatgagactggaaccccagtccatggtgtggctgcccgtcctgcacagagtggctgctgcagaaactgccaagcatcaggccaaatgtaacatctgcaaagagtgtccaatcattggattcaggtacaggagtctaaagcactttaattatgacatctgccaaagctgctttttttctggtcgagttgcaaaaggccataaaatgcactatcccatggtggaatattgcactccgactacatcaggagaagatgttcgagactttgccaaggtactaaaaaacaaatttcgaaccaaaaggtattttgcgaagcatccccgaatgggctacctgccagtgcagactgtcttagagggggacaacatggaaactcccgttactctgatcaacttctggccagtagattctgcgcctgcctcgtcccctcagctttcacacgatgatactcattcacgcattgaacattatgctagcaggctagcagaaatggaaaacagcaatggatcttatctaaatgatagcatctctcctaatgagagcatagatgatgaacatttgttaatccagcattactgccaaagtttgaaccaggactcccccctgagccagcctcgtagtcctgcccagatcttgatttccttagagagtgaggaaagaggggagctagagagaatcctagcagatcttgaggaagaaaacaggaatctgcaagcagaatatgaccgtctaaagcagcagcacgaacataaaggcctgtccccactgccgtcccctcctgaaatgatgcccacctctccccagagtccccgggatgctgagctcattgctgaggccaagctactgcgtcaacacaaaggccgcctggaagccaggatgcaaatcctggaagaccacaataaacagctggagtcacagttacacaggctaaggcagctgctggagcaaccccaggcagaggccaaagtgaatggcacaacggtgtcctctccttctacctctctacagaggtccgacagcagtcagcctatgctgctccgagtggttggcagtcaaacttcggactccatgggtgaggaagatcttctcagtcctccccaggacacaagcacagggttagaggaggtgatggagcaactcaacaactccttccctagttcaagaggaagaaatacccctggaaagccaatgagagaggacacaatgtaggaagtcttttccacatggcagatgatttgggcagagcgatggagtccttagtatcagtcatgacagatgaagaaggagcagaataaatgttttacaactcctgattcccgcatggtttttataatattcatacaacaaagaggattagacagtaagagtttacaagaaataaatctatatttttgtgaagggtagtggtattatactgtagatttcagtagtttctaagtctgttattgttttgttaacaatggcaggttttacacgtctatgcaattgtacaaaaaagttataagaaaactacatgtaaaatcttgatagctaaataacttgccatttctttatatggaacgcattttgggttgtttaaaaatttataacagttataaagaaagattgtaaactaaagtgtgctttataaaaaaaagttgtttataaaaacccctaaaaacaaaacaaacacacacacacacacatacacacacacacacaaaactttgaggcagcgcattgttttgcatccttttggcgtgatatccatatgaaattcatggctttttctttttttgcatattaaagataagacttcctctaccaccacaccaaatgactactacacactgctcatttgagaactgtcagctgagtggggcaggcttgagttttcatttcatatatctatatgtctataagtatataaatactatagttatatagataaagagatacgaatttctatagactgactttttccattttttaaatgttcatgtcacatcctaatagaaagaaattacttctagtcagtcatccaggcttacctgcttggtctagaatggatttttcccggagccggaagccaggaggaaactacaccacactaaaacattgtctacagctccagatgtttctcattttaaacaactttccactgacaacgaaagtaaagtaaagtattggatttttttaaagggaacatgtgaatgaatacacaggacttattatatcagagtgagtaatcggttggttggttgattgattgattgattgatacattcagcttcctgctgctagcaatgccacgatttagatttaatgatgcttcagtggaaatcaatcagaaggtattctgaccttgtgaacatcagaaggtattttttaactcccaagcagtagcaggacgatgatagggctggagggctatggattcccagcccatccctgtgaaggagtaggccactctttaagtgaaggattggatgattgttcataatacataaagttctctgtaattacaactaaattattatgccctcttctcacagtcaaaaggaactgggtggtttggtttttgttgcttttttagatttattgtcccatgtgggatgagtttttaaatgccacaagacataatttaaaataaataaactttgggaaaaggtgtaagacagtagccccatcacatttgtgatactgacaggtatcaacccagaagcccatgaactgtgtttccatcctttgcatttctctgcgagtagttccacacaggtttgtaagtaagtaagaaagaaggcaaattgattcaaatgttacaaaaaaacccttcttggtggattagacaggttaaatatataaacaaacaaacaaaaattgctcaaaaaagaggagaaaagctcaagaggaaaagctaaggactggtaggaaaaagctttactctttcatgccattttatttctttttgatttttaaatcattcattcaatagataccaccgtgtgacctataattttgcaaatctgttacctctgacatcaagtgtaattagcttttggagagtgggctgacatcaagtgtaattagcttttggagagtgggttttgtccattattaataattaattaattaacatcaaacacggcttctcatgctatttctacctcactttggttttggggtgttcctgataattgtgcacacctgagttcacagcttcaccacttgtccattgcgttattttctttttcctttataattctttctttttccttcataattttcaaaagaaaacccaaagctctaaggtaacaaattaccaaattacatgaagatttggtttttgtcttgcatttttttcctttatgtgacgctggaccttttctttacccaaggatttttaaaactcagatttaaaacaaggggttactttacatcctactaagaagtttaagtaagtaagtttcattctaaaatcagaggtaaatagagtgcataaataattttgttttaatctttttgtttttcttttagacacattagctctggagtgagtctgtcataatatttgaacaaaaattgagagctttattgctgcattttaagcataattaatttggacattatttcgtgttgtgttctttataaccaccgagtattaaactgtaaatcataatgtaactgaagcataaacatcacatggcatgttttgtcattgttttcaggtactgagttcttacttgagtatcataatatattgtgttttaacaccaacactgtaacatttacgaattatttttttaaacttcagttttactgcattttcacaacatatcagacttcaccaaatatatgccttactattgtattatagtactgctttactgtgtatctcaataaagcacgcagttatgttac

SEQ ID NO: 29454 - DNA, 14000 bp, Homo Sapiens
atgctgtctgtgaagctgaatctgtgagaacacctcactattcacggcaaccggagtggaagaaacaggtgcaaaaagattgtgtgtttgtctgcttttgtgaggctggtcagagattctgtgcctgctttatctgtgcttggctatgactctacctccaggtttaccataccccatagaatgtgtaagagaaaagtaccaacagggaaatcagcaaaaagctttcctatgaaggtgtgtagccagcctccgcagaatttgaaatgtctgaggtttcttctgatgaaagagaagatgttcaaaagaaaacattcacaaaatgggtaaatgcacaattttctaagtttgggaagcagcatattgagaacctcttcagtgacctacaggatgggaggcgcctcctagacctcctcgaaggcctgacagggcaaaaactgccaaaagaaaaaggatccacaagagttcatgccctgaacaatgtcaacaaggcactgcgggttttgcagaacaataatgttgatttagtgaatattggaagtactgacatcgtagatggaaatcataaactgactcttggtttgatttggaatataatcctccactggcaggtcaaaaatgtaatgaaaaatatcatggctggattgcaacaaaccaacagtgaaaagattctcctgagctgggtccgacaatcaactcgtaattatccacaggttaatgtaatcaacttcaccaccagctggtctgatggcctggctttgaatgctctcatccatagtcataggccagacctatttgactggaatagtgtggtttgccagcagtcagccacacaacgactggaacatgcattcaacatcgccagatatcaattaggcatagagaaactactcgatcctgaagatgttgataccacctatccagataagaagtccatcttaatgtacatcacatcactcttccaagttttgcctcaacaagtgagcattgaagccatccaggaagtggaaatgttgccaaggccacctaaagtgactaaagaagaacattttcagttacatcatcaaatgcactattctcaacagatcacggtcagtctagcacagggatatgagagaacttcttcccctaagcctcgattcaagagctatgcctacacacaggctgcttatgtcaccacctctgaccctacacggagcccatttccttcacagcatttggaagctcctgaagacaagtcatttggcagttcattgatggagagtgaagtaaacctggaccgttatcaaacagctttagaagaagtattatcgtggcttctttctgctgaggacacattgcaagcacaaggagagatttctaatgatgtggaagtggtgaaagaccagtttcatactcatgaggggtacatgatggatttgacagcccatcagggccgggttggtaatattctacaattgggaagtaagctgattggaacaggaaaattatcagaagatgaagaaactgaagtacaagagcagatgaatctcctaaattcaagatgggaatgcctcagggtagctagcatggaaaaacaaagcaatttacatagagttttaatggatctccagaatcagaaactgaaagagttgaatgactggctaacaaaaacagaagaaagaacaaggaaaatggaggaagagcctcttggacctgatcttgaagacctaaaacgccaagtacaacaacataaggtgcttcaagaagatctagaacaagaacaagtcagggtcaattctctcactcacatggtggtggtagttgatgaatctagtggagatcacgcaactgctgctttggaagaacaacttaaggtattgggagatcgatgggcaaacatctgtagatggacagaagaccgctgggttcttttacaagacatccttctcaaatggcaacgtcttactgaagaacagtgcctttttagtgcatggctttcagaaaaagaagatgcagtgaacaagattcacacaactggctttaaagatcaaaatgaaatgttatcaagtcttcaaaaactggccgttttaaaagcggatctagaaaagaaaaagcaatccatgggcaaactgtattcactcaaacaagatcttctttcaacactgaagaataagtcagtgacccagaagacggaagcatggctggataactttgcccggtgttgggataatttagtccaaaaacttgaaaagagtacagcacagatttcacaggctgtcaccaccactcagccatcactaacacagacaactgtaatggaaacagtaactacggtgaccacaagggaacagatcctggtaaagcatgctcaagaggaacttccaccaccacctccccaaaagaagaggcagattactgtggattctgaaattaggaaaaggttggatgttgatataactgaacttcacagctggattactcgctcagaagctgtgttgcagagtcctgaatttgcaatctttcggaaggaaggcaacttctcagacttaaaagaaaaagtcaatgccatagagcgagaaaaagctgagaagttcagaaaactgcaagatgccagcagatcagctcaggccctggtggaacagatggtgaatgagggtgttaatgcagatagcatcaaacaagcctcagaacaactgaacagccggtggatcgaattctgccagttgctaagtgagagacttaactggctggagtatcagaacaacatcatcgctttctataatcagctacaacaattggagcagatgacaactactgctgaaaactggttgaaaatccaacccaccaccccatcagagccaacagcaattaaaagtcagttaaaaatttgtaaggatgaagtcaaccggctatcaggtcttcaacctcaaattgaacgattaaaaattcaaagcatagccctgaaagagaaaggacaaggacccatgttcctggatgcagactttgtggcctttacaaatcattttaagcaagtcttttctgatgtgcaggccagagagaaagagctacagacaatttttgacactttgccaccaatgcgctatcaggagaccatgagtgccatcaggacatgggtccagcagtcagaaaccaaactctccatacctcaacttagtgtcaccgactatgaaatcatggagcagagactcggggaattgcaggctttacaaagttctctgcaagagcaacaaagtggcctatactatctcagcaccactgtgaaagagatgtcgaagaaagcgccctctgaaattagccggaaatatcaatcagaatttgaagaaattgagggacgctggaagaagctctcctcccagctggttgagcattgtcaaaagctagaggagcaaatgaataaactccgaaaaattcagaatcacatacaaaccctgaagaaatggatggctgaagttgatgtttttctgaaggaggaatggcctgcccttggggattcagaaattctaaaaaagcagctgaaacagtgcagacttttagtcagtgatattcagacaattcagcccagtctaaacagtgtcaatgaaggtgggcagaagataaagaatgaagcagagccagagtttgcttcgagacttgagacagaactcaaagaacttaacactcagtgggatcacatgtgccaacaggtctatgccagaaaggaggccttgaagggaggtttggagaaaactgtaagcctccagaaagatctatcagagatgcacgaatggatgacacaagctgaagaagagtatcttgagagagattttgaatataaaactccagatgaattacagaaagcagttgaagagatgaagagagctaaagaagaggcccaacaaaaagaagcgaaagtgaaactccttactgagtctgtaaatagtgtcatagctcaagctccacctgtagcacaagaggccttaaaaaaggaacttgaaactctaaccaccaactaccagtggctctgcactaggctgaatgggaaatgcaagactttggaagaagtttgggcatgttggcatgagttattgtcatacttggagaaagcaaacaagtggctaaatgaagtagaatttaaacttaaaaccactgaaaacattcctggcggagctgaggaaatctctgaggtgctagattcacttgaaaatttgatgcgacattcagaggataacccaaatcagattcgcatattggcacagaccctaacagatggcggagtcatggatgagctaatcaatgaggaacttgagacatttaattctcgttggagggaactacatgaagaggctgtaaggaggcaaaagttgcttgaacagagcatccagtctgcccaggagactgaaaaatccttacacttaatccaggagtccctcacattcattgacaagcagttggcagcttatattgcagacaaggtggacgcagctcaaatgcctcaggaagcccagaaaatccaatctgatttgacaagtcatgagatcagtttagaagaaatgaagaaacataatcaggggaaggaggctgcccaaagagtcctgtctcagattgatgttgcacagaaaaaattacaagatgtctccatgaagtttcgattattccagaaaccagccaattttgagcagcgtctacaagaaagtaagatgattttagatgaagtgaagatgcacttgcctgcattggaaacaaagagtgtggaacaggaagtagtacagtcacagctaaatcattgtgtgaacttgtataaaagtctgagtgaagtgaagtctgaagtggaaatggtgataaagactggacgtcagattgtacagaaaaagcagacggaaaatcccaaagaacttgatgaaagagtaacagctttgaaattgcattataatgagctgggagcaaaggtaacagaaagaaagcaacagttggagaaatgcttgaaattgtcccgtaagatgcgaaaggaaatgaatgtcttgacagaatggctggcagctacagatatggaattgacaaagagatcagcagttgaaggaatgcctagtaatttggattctgaagttgcctggggaaaggctactcaaaaagagattgagaaacagaaggtgcacctgaagagtatcacagaggtaggagaggccttgaaaacagttttgggcaagaaggagacgttggtggaagataaactcagtcttctgaatagtaactggatagctgtcacctcccgagcagaagagtggttaaatcttttgttggaataccagaaacacatggaaacttttgaccagaatgtggaccacatcacaaagtggatcattcaggctgacacacttttggatgaatcagagaaaaagaaaccccagcaaaaagaagacgtgcttaagcgtttaaaggcagaactgaatgacatacgcccaaaggtggactctacacgtgaccaagcagcaaacttgatggcaaaccgcggtgaccactgcaggaaattagtagagccccaaatctcagagctcaaccatcgatttgcagccatttcacacagaattaagactggaaaggcctccattcctttgaaggaattggagcagtttaactcagatatacaaaaattgcttgaaccactggaggctgaaattcagcagggggtgaatctgaaagaggaagacttcaataaagatatgaatgaagacaatgagggtactgtaaaagaattgttgcaaagaggagacaacttacaacaaagaatcacagatgagagaaagcgagaggaaataaagataaaacagcagctgttacagacaaaacataatgctctcaaggatttgaggtctcaaagaagaaaaaaggctctagaaatttctcatcagtggtatcagtacaagaggcaggctgatgatctcctgaaatgcttggatgacattgaaaaaaaattagccagcctacctgagcccagagatgaaaggaaaataaaggaaattgatcgggaattgcagaagaagaaagaggagctgaatgcagtgcgtaggcaagctgagggcttgtctgaggatggggccgcaatggcagtggagccaactcagatccagctcagcaagcgctggcgggaaattgagagcaaatttgctcagtttcgaagactcaactttgcacaaattcacactgtccgtgaagaaacgatgatggtgatgactgaagacatgcctttggaaatttcttatgtgccttctacttatttgactgaaatcactcatgtctcacaagccctattagaagtggaacaacttctcaatgctcctgacctctgtgctaaggactttgaagatctctttaagcaagaggagtctctgaagaatataaaagatagtctacaacaaagctcaggtcggattgacattattcatagcaagaagacagcagcattgcaaagtgcaacgcctgtggaaagggtgaagctacaggaagctctctcccagcttgatttccaatgggaaaaagttaacaaaatgtacaaggaccgacaagggcgatttgacagatctgttgagaaatggcggcgttttcattatgatataaagatatttaatcagtggctaacagaagctgaacagtttctcagaaagacacaaattcctgagaattgggaacatgctaaatacaaatggtatcttaaggaactccaggatggcattgggcagcggcaaactgttgtcagaacattgaatgcaactggggaagaaataattcagcaatcctcaaaaacagatgccagtattctacaggaaaaattgggaagcctgaatctgcggtggcaggaggtctgcaaacagctgtcagacagaaaaaagaggctagaagaacaaaagaatatcttgtcagaatttcaaagagatttaaatgaatttgttttatggttggaggaagcagataacattgctagtatcccacttgaacctggaaaagagcagcaactaaaagaaaagcttgagcaagtcaagttactggtggaagagttgcccctgcgccagggaattctcaaacaattaaatgaaactggaggacccgtgcttgtaagtgctcccataagcccagaagagcaagataaacttgaaaataagctcaagcagacaaatctccagtggataaaggtttccagagctttacctgagaaacaaggagaaattgaagctcaaataaaagaccttgggcagcttgaaaaaaagcttgaagaccttgaagagcagttaaatcatctgctgctgtggttatctcctattaggaatcagttggaaatttataaccaaccaaaccaagaaggaccatttgacgttcaggaaactgaaatagcagttcaagctaaacaaccggatgtggaagagattttgtctaaagggcagcatttgtacaaggaaaaaccagccactcagccagtgaagaggaagttagaagatctgagctctgagtggaaggcggtaaaccgtttacttcaagagctgagggcaaagcagcctgacctagctcctggactgaccactattggagcctctcctactcagactgttactctggtgacacaacctgtggttactaaggaaactgccatctccaaactagaaatgccatcttccttgatgttggaggtacctgctctggcagatttcaaccgggcttggacagaacttaccgactggctttctctgcttgatcaagttataaaatcacagagggtgatggtgggtgaccttgaggatatcaacgagatgatcatcaagcagaaggcaacaatgcaggatttggaacagaggcgtccccagttggaagaactcattaccgctgcccaaaatttgaaaaacaagaccagcaatcaagaggctagaacaatcattacggatcgaattgaaagaattcagaatcagtgggatgaagtacaagaacaccttcagaaccggaggcaacagttgaatgaaatgttaaaggattcaacacaatggctggaagctaaggaagaagctgagcaggtcttaggacaggccagagccaagcttgagtcatggaaggagggtccctatacagtagatgcaatccaaaagaaaatcacagaaaccaagcagttggccaaagacctccgccagtggcagacaaatgtagatgtggcaaatgacttggccctgaaacttctccgggattattctgcagatgataccagaaaagtccacatgataacagagaatatcaatgcctcttggagaagcattcataaaagggtgagtgagcgagaggctgctttggaagaaactcatagattactgcaacagttccccctggacctggaaaagtttcttgcctggcttacagaagctgaaacaactgccaatgtcctacaggatgctacccgtaaggaaaggctcctagaagactccaagggagtaaaagagctgatgaaacaatggcaagacctccaaggtgaaattgaagctcacacagatgtttatcacaacctggatgaaaacagccaaaaaatcctgagatccctggaaggttccgatgatgcagtcctgttacaaagacgtttggataacatgaacttcaagtggagtgaacttcggaaaaagtctctcaacattaggtcccatttggaagccagttctgaccagtggaagcgtctgcacctttctctgcaggaacttctggtgtggctacagctgaaagatgatgaattaagccggcaggcacctattggaggcgactttccagcagttcagaagcagaacgatgtacatagggccttcaagagggaattgaaaactaaagaacctgtaatcatgagtactcttgagactgtacgaatatttctgacagagcagcctttggaaggactagagaaactctaccaggagcccagagagctgcctcctgaggagagagcccagaatgtcactcggcttctacgaaagcaggctgaggaggtcaatactgagtgggaaaaattgaacctgcactccgctgactggcagagaaaaatagatgagacccttgaaagactccaggaacttcaagaggccacggatgagctggacctcaagctgcgccaagctgaggtgatcaagggatcctggcagcccgtgggcgatctcctcattgactctctccaagatcacctcgagaaagtcaaggcacttcgaggagaaattgcgcctctgaaagagaacgtgagccacgtcaatgaccttgctcgccagcttaccactttgggcattcagctctcaccgtataacctcagcactctggaagacctgaacaccagatggaagcttctgcaggtggccgtcgaggaccgagtcaggcagctgcatgaagcccacagggactttggtccagcatctcagcactttctttccacgtctgtccagggtccctgggagagagccatctcgccaaacaaagtgccctactatatcaaccacgagactcaaacaacttgctgggaccatcccaaaatgacagagctctaccagtctttagctgacctgaataatgtcagattctcagcttataggactgccatgaaactccgaagactgcagaaggccctttgcttggatctcttgagcctgtcagctgcatgtgatgccttggaccagcacaacctcaagcaaaatgaccagcccatggatatcctgcagattattaattgtttgaccactatttatgaccgcctggagcaagagcacaacaatttggtcaacgtccctctctgcgtggatatgtgtctgaactggctgctgaatgtttatgatacgggacgaacagggaggatccgtgtcctgtcttttaaaactggcatcatttccctgtgtaaagcacatttggaagacaagtacagataccttttcaagcaagtggcaagttcaacaggattttgtgaccagcgcaggctgggcctccttctgcatgattctatccaaattccaagacagttgggtgaagttgcatcctttgggggcagtaacattgagccaagtgtccggagctgcttccaatttgctaataataagccagagatcgaagcggccctcttcctagactggatgagactggaaccccagtccatggtgtggctgcccgtcctgcacagagtggctgctgcagaaactgccaagcatcaggccaaatgtaacatctgcaaagagtgtccaatcattggattcaggtacaggagtctaaagcactttaattatgacatctgccaaagctgctttttttctggtcgagttgcaaaaggccataaaatgcactatcccatggtggaatattgcactccgactacatcaggagaagatgttcgagactttgccaaggtactaaaaaacaaatttcgaaccaaaaggtattttgcgaagcatccccgaatgggctacctgccagtgcagactgtcttagagggggacaacatggaaactcccgttactctgatcaacttctggccagtagattctgcgcctgcctcgtcccctcagctttcacacgatgatactcattcacgcattgaacattatgctagcaggctagcagaaatggaaaacagcaatggatcttatctaaatgatagcatctctcctaatgagagcatagatgatgaacatttgttaatccagcattactgccaaagtttgaaccaggactcccccctgagccagcctcgtagtcctgcccagatcttgatttccttagagagtgaggaaagaggggagctagagagaatcctagcagatcttgaggaagaaaacaggaatctgcaagcagaatatgaccgtctaaagcagcagcacgaacataaaggcctgtccccactgccgtcccctcctgaaatgatgcccacctctccccagagtccccgggatgctgagctcattgctgaggccaagctactgcgtcaacacaaaggccgcctggaagccaggatgcaaatcctggaagaccacaataaacagctggagtcacagttacacaggctaaggcagctgctggagcaaccccaggcagaggccaaagtgaatggcacaacggtgtcctctccttctacctctctacagaggtccgacagcagtcagcctatgctgctccgagtggttggcagtcaaacttcggactccatgggtgaggaagatcttctcagtcctccccaggacacaagcacagggttagaggaggtgatggagcaactcaacaactccttccctagttcaagaggaagaaatacccctggaaagccaatgagagaggacacaatgtaggaagtcttttccacatggcagatgatttgggcagagcgatggagtccttagtatcagtcatgacagatgaagaaggagcagaataaatgttttacaactcctgattcccgcatggtttttataatattcatacaacaaagaggattagacagtaagagtttacaagaaataaatctatatttttgtgaagggtagtggtattatactgtagatttcagtagtttctaagtctgttattgttttgttaacaatggcaggttttacacgtctatgcaattgtacaaaaaagttataagaaaactacatgtaaaatcttgatagctaaataacttgccatttctttatatggaacgcattttgggttgtttaaaaatttataacagttataaagaaagattgtaaactaaagtgtgctttataaaaaaaagttgtttataaaaacccctaaaaacaaaacaaacacacacacacacacatacacacacacacacaaaactttgaggcagcgcattgttttgcatccttttggcgtgatatccatatgaaattcatggctttttctttttttgcatattaaagataagacttcctctaccaccacaccaaatgactactacacactgctcatttgagaactgtcagctgagtggggcaggcttgagttttcatttcatatatctatatgtctataagtatataaatactatagttatatagataaagagatacgaatttctatagactgactttttccattttttaaatgttcatgtcacatcctaatagaaagaaattacttctagtcagtcatccaggcttacctgcttggtctagaatggatttttcccggagccggaagccaggaggaaactacaccacactaaaacattgtctacagctccagatgtttctcattttaaacaactttccactgacaacgaaagtaaagtaaagtattggatttttttaaagggaacatgtgaatgaatacacaggacttattatatcagagtgagtaatcggttggttggttgattgattgattgattgatacattcagcttcctgctgctagcaatgccacgatttagatttaatgatgcttcagtggaaatcaatcagaaggtattctgaccttgtgaacatcagaaggtattttttaactcccaagcagtagcaggacgatgatagggctggagggctatggattcccagcccatccctgtgaaggagtaggccactctttaagtgaaggattggatgattgttcataatacataaagttctctgtaattacaactaaattattatgccctcttctcacagtcaaaaggaactgggtggtttggtttttgttgcttttttagatttattgtcccatgtgggatgagtttttaaatgccacaagacataatttaaaataaataaactttgggaaaaggtgtaagacagtagccccatcacatttgtgatactgacaggtatcaacccagaagcccatgaactgtgtttccatcctttgcatttctctgcgagtagttccacacaggtttgtaagtaagtaagaaagaaggcaaattgattcaaatgttacaaaaaaacccttcttggtggattagacaggttaaatatataaacaaacaaacaaaaattgctcaaaaaagaggagaaaagctcaagaggaaaagctaaggactggtaggaaaaagctttactctttcatgccattttatttctttttgatttttaaatcattcattcaatagataccaccgtgtgacctataattttgcaaatctgttacctctgacatcaagtgtaattagcttttggagagtgggctgacatcaagtgtaattagcttttggagagtgggttttgtccattattaataattaattaattaacatcaaacacggcttctcatgctatttctacctcactttggttttggggtgttcctgataattgtgcacacctgagttcacagcttcaccacttgtccattgcgttattttctttttcctttataattctttctttttccttcataattttcaaaagaaaacccaaagctctaaggtaacaaattaccaaattacatgaagatttggtttttgtcttgcatttttttcctttatgtgacgctggaccttttctttacccaaggatttttaaaactcagatttaaaacaaggggttactttacatcctactaagaagtttaagtaagtaagtttcattctaaaatcagaggtaaatagagtgcataaataattttgttttaatctttttgtttttcttttagacacattagctctggagtgagtctgtcataatatttgaacaaaaattgagagctttattgctgcattttaagcataattaatttggacattatttcgtgttgtgttctttataaccaccgagtattaaactgtaaatcataatgtaactgaagcataaacatcacatggcatgttttgtcattgttttcaggtactgagttcttacttgagtatcataatatattgtgttttaacaccaacactgtaacatttacgaattatttttttaaacttcagttttactgcattttcacaacatatcagacttcaccaaatatatgccttactattgtattatagtactgctttactgtgtatctcaataaagcacgcagttatgttac

SEQ ID NO: 29455 - DNA, 5136 bp, Homo Sapiens
tgtttctcttttcagtaagtgtggacctttgtgtaccagagagaacatcatggtggctttcaaaggggtctggactcaagctttctggaaagcagtcacagcggaatttctggccatgcttatttttgttctcctcagcctgggatccaccatcaactggggtggaacagaaaagcctttaccggtcgacatggttctcatctccctttgctttggactcagcattgcaaccatggtgcagtgctttggccatatcagcggtggccacatcaaccctgcagtgactgtggccatggtgtgcaccaggaagatcagcatcgccaagtctgtcttctacatcgcagcccagtgcctgggggccatcattggagcaggaatcctctatctggtcacacctcccagtgtggtgggaggcctgggagtcaccatggttcatggaaatcttaccgctggtcatggtctcctggttgagttgataatcacatttcaattggtgtttactatctttgccagctgtgattccaaacggactgatgtcactggctcaatagctttagcaattggattttctgttgcaattggacatttatttgcaatcaattatactggtgccagcatgaatcccgcccgatcctttggacctgcagttatcatgggaaattgggaaaaccattggatatattgggttgggcccatcataggagctgtcctcgctggtggcctttatgagtatgtcttctgtccagatgttgaattcaaacgtcgttttaaagaagccttcagcaaagctgcccagcaaacaaaaggaagctacatggaggtggaggacaacaggagtcaggtagagacggatgacctgattctaaaacctggagtggtgcatgtgattgacgttgaccggggagaggagaagaaggggaaagaccaatctggagaggtattgtcttcagtatgactagaagatcgcactgaaagcagacaagactccttagaactgtcctcagatttccttccacccattaaggaaacagatttgttataaattagaaatgtgcaggtttgttgtttcatgtcatattactcagtctaaacaataaatatttcataatttacaaaggaggaacggaagaaacctattgtgaattccaaatctaaaaaaagaaatatttttaaaatgttcttaagcaaatatatacctattttatctagttacctttcattaacaaccaattttaaccgtgtgtcaagatttggttaagtcttgcctgacagaactcaaagacacgtctatcagcttattccttctctactggaatattggtatagtcaattcttatttgaatatttattctattaaactgagtttaacaatggcaaaatacagtatgtcacagtcatgcacattcaagagagaaaatataacaagttcttttatgagcaatcccttatgcatagactaccttggcaaaagagcattagcaagtgtcactgctcatcagttacttccttccatttatatcacaaatacccaagtttcaattctaacttcatttcatggtatttcttcctcctcaatgcccaaggtaatgtgggactaaagcccagaaatttgaaaagaatattcagaaatccttcccaaatcataagggcacctattgagattcaagacaagcagactcgtaaaatcttgtagaggcagaggcaaagttatcatcatacaaaaatcacaaacaaaaaggagatctgtattcgggtatcaaacggttgatctgttttcagtgcacaccctcaaatgcaccacaccagttttacgatctaagcttttaacccctttaccactttgcttatttttaaaaaatttattggcaaaactggggattttgtttgtaactttggttatctatatttaaacattagctgagacatatttttgataacaagaacttagctagttgagtcctggctttttgttgattattaagctgtgttcactctagaaggtgtaaaggccctgtcccaatctctgctctctcacttctcgtgacatttgttgataatctttactgcaagtgtaatgatatttgagtgaattaaaatgcatgacagacaaggtacaacatggttgcagaataaaagggtgaggacatcagatcactctgtattcaaagcttactagacgaacaatctttcatttctggatatattgtagctaacccaacacatttttaaactatttttgttactgactcacttacttgtcaaaataattggtttttctgtcctgctttgccttttgtcactagaatgttctccagaaaccccagtttctgtcatcttaactgtctagtctagccgttaacttagacaaagaagtgcaaatgtcaatttcactaaacaaaagctattagaagtaaagcagaaacctatcactgcaaggagtgacttgtaaataactgatgatcaagggctgtcttctctcaagcatggttccaactctgtgtcactttttagcgttaatggcagttgtgtgtctgtggcagtgagataatggaccactattaaacctgattctcttcggtgctaggaaagagtgatgtgtgagattcccagagagtcgtcacaccagtgttatgcctgggagtgccactggcataccgcaggtgcctaaatcccaggcccctttctcagggggcgtggccacaccacacactgcgccagtgacacatagttacttcctggctgggacggcacctatagaaactagggtacaaatctcccaaagatggtttgcaccgtcatttcaaatgtttgcacaatataccacttagaggcttaaaatcagggtggttcagttcaaaaggtaatatcaaccgtcagcaaacatgtcagtttaaaaataagttcggttaacaaggaagtgttaagcagattttttgaatacacttacaatatactggcttataatcatttttattctgccatatggtttatttcatatacactcacttttacactcacttccaattatagcattcaataagttacggttaaagaaaagtgaatggtgtttttgtaatttgttttctagtagctagcagagagcctggcacatagtatgtattcaaaacaagtgtgttaattaataaaaatatataaatctcatttgagatttaagaatataaataattttcttttaatctttattttgctcaatatttaataggaagtatgatttcaaggactactaaaggaaggcaatatacatgtgaaaaccataaaatacattttttgcattctactatttttaggggcatgaaatgaatgaaagctttagcacttttttgcccctacatatgagacaacatattttgtatttcactcaaggctctgccagtaaaaagtaatgaaattgtacctttctaatgacatctatgcagcaggggtctatcgccttgtggatggcaccaaattatccaagtgtattaggagactggggcttttttctttaatcccttcttattaatgaagtgcatagtgctgctcccaggagaccactgctgacagatacacagagaagagatcagagaggaaaaactgggaagacataaatgaattatacccagccatgaaacaatgccaactgtctcttccctaaggaagagtacaagtaccctaaaattgaaaggtggtccctacactgaaaacgcacatagtttgtcaaaagtgtacaaaagggaaagagtcttattttaagctttcaggctttcttaaaaacttggggaccagaatttcaatgtatgtttccattgttgaagataacattttcttcaaagagccttaaccttttgtactggaaggaaatattttctggacttaagtagttgcctaaatttaagattcctacactttatttctgccattgatgcttttcctaaacccttatactatctttttattatctgagccttttcctaatgcagctcataggtgctagctagagctgctgctcagtattgaagactttacaaggagattagaaatctttggaaaacatatgtgatgaaattgagctatatgatttatcagagatctgattccaaagagcacagaatactgttctcagaccatgaaaccagacaacacatgtattggtttaaactcgataatgacaggaaaattccaaactagagcagtaaattcaaatggtaagatgaatcctagaaggcctctgattgcagcatgttgacaccaacctcacgttacgaacaattcacagagaatttgcctttgtggcaactgaagatggaagtctggggggcacagacaaccttatcaaacaatataaaagccaatataaattctcataagcactatagaatttgcaaattcagaacattttatacctaaaagtaattctgtctttcctaaagtgtttttaacatgaaaattagtaggaagatgtggttactatttggaaagtgtaatgtaacaaaactctcttttgttaccacaaattttgtgagtttagtactctacagattgccccataagagcagtagcttttgaaactcataattctctgaaataaatgaaagacatttaattcaaggatcaaaaattgtggccatctttgcaaatgactacctatagcctgtgaaaatacatttcaaaaaatgttatgtgcaatgaacactaaatttaagagcagttacagtgtgactcactcatgtttaaaaaaaatcgaagagctaaaaaatacgtctaatttatgtaacccattggaatgtatttctaggttctcttcaggattaattaaataaacatgcaatttatgaaaacatataaacaattatttatcacttttatgacccaaatcacaataaaattgtcatttaggataaactggggagaatagactgaacatatggttatattcacagttatttattaacttaaatgttattccaacattagagctaatgttaaaaagatttaaactgtaacgtctaatatttggaataatatattaaagtattagcactgtggttgattttcttgaattatgttgcatcttgtactactaagcttgtgaaaataaacatttggatgttttaaaaggtaaaaaaaaaaaaaaaa

SEQ ID NO: 29456 - DNA, 3275 bp, Homo Sapiens
gcaggccagtcccagctggatctccggccagagcccgaggctgctgcgccgggcggctgcagcctccgctccagcgcccgcgccgtgccctgcatcccgggagcccggctggacccgcggcggctcggccggtgttccccctcccctccctggggcagcagccaccatgttctcgtgtgtgaagccctatgaggaccagaactactcagccctgaggcgggactgccggcgcaggaaggtgctcttcgaggaccccctcttccccgccactgacgactcactctactataagggcacgccggggcccgccgtcaggtggaagcgacccaagggcatctgcgaggacccccgcctctttgtggatggcatcagctcccacgacctgcaccagggccaggtgggcaactgctggtttgtggcagcctgctcgtcacttgcctcccgggagtcgctgtggcaaaaggtcatcccagactggaaggagcaggaatgggaccccgaaaagcccaacgcctacgcgggcatcttccacttccacttctggcgcttcggggaatgggtggacgtggtcatcgatgaccggctgcccacagtcaacaaccagctcatctactgccactccaactcccgcaatgagttttggtgcgccctagtggagaaggcctatgccaaactggcaggctgttaccaggccctggatggaggcaacacagcagacgcactggtggacttcacgggtggtgtttctgagcccatcgacctgaccgagggtgactttgccaacgatgagactaagaggaaccagctctttgagcgcatgttaaaggtgcacagccggggcggcctcatcagtgcctccatcaaggcagtgacagcagctgacatggaggcccgcctggcgtgcggcctggtaaagggccacgcatacgccgtcactgatgtgcgcaaggtgcgcctgggccacggcctactggccttcttcaagtcagagaagttggacatgatccgcctgcgcaacccctggggcgagcgggagtggaacgggccctggagtgacacctcggaggagtggcagaaagtgagcaagagtgagcgggagaagatgggtgtgaccgtgcaggacgacggtgagttctggatgaccttcgaggacgtgtgccggtacttcacggacatcatcaagtgccgcgtgatcaacacatcccacctgagcatccacaagacgtgggaggaggcccggctgcatggcgcctggacgctgcatgaggacccgcgacagaaccgcggtggcggctgcatcaaccacaaggacaccttcttccagaacccacagtacatcttcgaagtcaagaagccagaagatgaagtcctgatctgcatccagcagcggccaaagcggtctacgcgccgggagggcaagggtgagaacctggccattggctttgacatctacaaggtggaggagaaccgccagtaccgcatgcacagcctgcagcacaaggccgccagctccatctacatcaactcacgcagcgtcttcctgcgcaccgaccagcccgagggccgctatgtcatcatccccacaaccttcgagccaggccacactggcgagttcctgctccgagtcttcactgatgtgccctccaactgccgggagctgcgcctggatgagcccccacacacctgctggagctccctctgtggctacccccagctggtgacccaggtacatgtcctgggagctgctggcctcaaggactccccaacaggggctaactcttatgtgatcatcaagtgtgagggagacaaagtccgctcggctgtgcagaagggcacctccacaccagagtacaatgtgaaaggcatcttctaccgcaagaagctgagccagcccatcactgtacaggtctggaaccaccgagtgctgaaggatgaatttctgggccaggtgcacctaaaggctgacccggacaacctccaggccctgcataccctccacctccgggaccgaaatagccggcagcccagcaacctgccaggcactgtggccgtgcacattctcagcagcacctccctcatggctgtctgacacctgcccacctacctggctctgaccgttcccaccaccatctgcatgtccccactgggcctgagtctagcctgggagccaggatactggggtccttttcccactcttccactgacttgctgtgtgaccttaggaagtctctgcccctctctcagcctcagtgtcccgagggccccgaagcattccattctcgtggaggagtttccttgctgagatttcaaatagtcctccccacctcaactgtcaccactgctaagggactctatccattgagcacattttcctaaggccctgctgtctgccgaggagcgccaagaagatgtcacttgtttacacacgaactgccacatccccaagctccgttcttgcccctcgtgtcctaggcccaacccagcctcccagacctcactttccccatcagcaatacctggtgttctcccaccttgaaaggactcttggctcctgccgggttcctgctcaggctggaattgggaaaatatgcaggtgacatttgttcattctctaatcccatcctctcacccatccatttcctcactcagtggagatttgccaaatgaataaacgacacctttgaggccccaggtgaagcggggccctactccggcctctgccttgggcctcgcctctgtcctcaggtcctctcagaggcagatacctaggggagctgctgctgcctgctcattctagcttccgattccattcccagcccctgcgttaaggtccctggagaggtggcgtcagtgggggtgaggaagggcatcttcctgactcctctgcccagtgctggaaggagcatgcctgggttagtgggccaggggccaggcagctgggggcctttggggaccagaaggggagatgtgctcccagagcctctctgctgtaagaccccagcttttcctggaagatgggactctggggtgtgtggtgctcaccagagtcaggccacccactgggctcggcaggagataggggagagcaattactttgttcactgtatgcacccgcgggggcctgggagtccccatttgcaggtgggtagggcctccagcccacaccacccagacctaggcttccctcttctcaggatccaccacagggttaggggacaggaagcctgttctattctcaataaatcttacaaaattccaaaaaaaaaaaaaaaaaa

SEQ ID NO: 29457 - DNA, 1299 bp, Homo Sapiens
ttgttggaagacatgaagatgctggaagacacagagatgctggaagacgtggagatgttggaagacgagcagatgctggaagccctggagatgctggaagacctggagatataggaagacatggatttgttggaagacgtagcttagttggaagacatatattttctggaagacgtggattttctggaagacatggcttggttggaagacgtggattttctggaagacgtacctttgttggaagacatacctttgttggaagacgtacctttgttggaagacgtacctttgttggaagacacaagtaggctggaagacattaatttgatggaagacatggctttgttggaagacgtggatttgctggaagacacggatttcctggaagacctggatttttcggaagctatggatttgagggaagacaaggattttctggaagacatggatagtctggaagacatggctttgttggaagacgtggacttgctggaagacacggatttcctggaagacccggattttttggaagctatagatttaagggaagacaaggattttctggaagacatggatagtctggaagacctggaggccattggaagatgtggattttctggaagacatggcttttttggaagacgtagattttcaggaagacccaaattatccggaagacttggattgttgggaagacgtggattttctggaagactgggaggttactggaagacatggattttctggaagacatggattttctggaagacgtggatcttcaggaagacatatattggctggaagacctggattttttccggaagatgtggattgactggaagacctggatttggtggaagacgtagatttttctggaagacactgactgactggaagacctggatttctttctggaagacactgattgactggaagacctggatttctttctggaagacactgattgactggaagatctagatttttctggaagaactagatttactggaagacttggatttggtggaagacacagatttttctggaagacatggattagctggaagatctgtatttgatggaagaccttgaaattattggaagacatggatttcctggaagacgtggattttcctggaagatctggatttggtggaagaccagtaattgctggaagactggatttgctggaagacttgatttactggaagacttggagcttcttggaagacatggattgtccggaagacatggattgtctggaagatgtggattttctggaagctcaggattatctgg

SEQ ID NO: 29458 - DNA, 4100 bp, Homo Sapiens
gtacctcatgtgacaagttccaatttcttttcaagtcaattgaactgaaatctccttgttgctttgaaatcttagaagagagcccactaattcaaggactcttactgtgggagcaactgctggttctatcacaatgaaacggctggtttgtgtgctcttggtgtgctcctctgcagtggcacagttgcataaagatcctaccctggatcaccactggcatctctggaagaaaacctatggcaaacaatacaaggaaaagaatgaagaagcagtacgacgtctcatctgggaaaagaatctaaagtttgtgatgcttcacaacctggagcattcaatgggaatgcactcatacgatctgggcatgaaccacctgggagacatgaccagtgaagaagtgatgtctttgatgagttccctgagagttcccagccagtggcagagaaatatcacatataagtcaaaccctaatcggatattgcctgattctgtggactggagagagaaagggtgtgttactgaagtgaaatatcaaggttcttgtggtgcttgctgggctttcagtgctgtgggggccctggaagcacagctgaagctgaaaacaggaaagctggtgtctctcagtgcccagaacctggtggattgctcaactgaaaaatatggaaacaaaggctgcaatggtggcttcatgacaacggctttccagtacatcattgataacaagggcatcgactcagacgcttcctatccctacaaagccatggatcagaaatgtcaatatgactcaaaatatcgtgctgccacatgttcaaagtacactgaacttccttatggcagagaagatgtcctgaaagaagctgtggccaataaaggcccagtgtctgttggtgtagatgcgcgtcatccttctttcttcctctacagaagtggtgtctactatgaaccatcctgtactcagaatgtgaatcatggtgtacttgtggttggctatggtgatcttaatgggaaagaatactggcttgtgaaaaacagctggggccacaactttggtgaagaaggatatattcggatggcaagaaataaaggaaatcattgtgggattgctagctttccctcttacccagaaatctagaggatctctcctttttataacaaatcaagaaatatgaagcactttctcttaacttaatttttcctgctgtatccagaagaaataattgtgtcatgattaatgtgtatttactgtactaattagaaaatatagtttgaggccgggcacggtggctcacgcctgtaatcccagtacttgggaggccaaggcaggcatatcaacttgaggccaggagttaaagagcagcctggctaacatggtgaaaccccatctctactaaaaatacaaaaaattagccgagcacggtggtgcatgcctgtaatcccagctacttgggaggctgaggcacgagattccttgaacccaagaggttgaggctatgttgagctgagatcacaccactgtactccagcctggatgacagagtggagactctgtttcaaaaaaacagaaaagaaaatatagtttgattcttcatttttttaaatttgcaaatctcaggataaagtttgctaagtaaattagtaatgtactatagatataactgtacaaaaattgttcaacctaaaacaatctgtaattgcttattgttttattgtatactctttgtctttttaagacccctaatagccttttgtaacttgatggcttaaaaatacttaataaatctgccatttcaaatttctatcattgccacataccattcttattcctaggcaactattaataatctatcctgagaatattaattgtggtattctggtgatggggtttagcaactttgatggaagaaaatattaggctataaatgtcctaaggactcagattgtatctttgtacagaagaggattcaaaacgccacgtgtagtggctcatgcctgtaatcccaacactttgggaggctgaagtaggaggatcgtcttgagcccaggagttcaagaccagcctggacaacatagtgagaccttgtctccacaaaaataaaaaagaaactatccaggagtggtggtgtgtgcctgtggtccctgctatgcagatgtctaagacaggaggatcacaagagcccaggaggttgagaatgcagtgagcttgtaattgcaccactgcactccagcctgggtgacagagcaagaccctgtcttaaaaaaagaggattcaacacatatttttatattatgttaaagtaaagaaatgcataaaagacaagcactttggaagaattattttaatgatcaacaatttaatgtattagtccaaattatttttacgtagtcatcaacaatttgaccagggcctttatttggcaaataactgagccaaccagaataaaataaccaatactccactgctcatatttttatctaattcagatggatcttccttacaactgctctagattagtagatgcatctaagcaggcagcaggaactttaaattttttaagttcatgtctatgacatgaacaatgtgtgggataatgtcattaatatatcctaaattaacctaaacgtatttcactaactctggctccttctccataaagcacattttaaggaacaagaattgctaaatataaaaacataaataataccataatacatggctatcatcaaaagtgtatagaatattatagtttaaaagtatttagttgattacttttcagttttgttttgttttttgagacggagtctcactctgttgcccaggctggagtgcagtggcaccatctcagttcactgcaacttctgcctcccgagttcaagcgattctcctgcctcagcctcccgagtagctggaattataggcgtgcaccaccacgcccagctaatttttgtatttttagtaaagacagggttttgccacattagccaggctggtctcaaactcctgacctcaggtgatccacccaccccagcctcccaaagtgctaagattacaggcgtgagccactgagcccagcctacttttcagtttttaacataatttttgttttatccacaacttttcaagtattgaaagtagaataaaaacatgggttcttagtctttagctatctgttaaagcctatgaatgccttcttaaaatcatgtttttaaatgcataaaatatataggattacaaaggaatctaattatatcgaaatacagttattaaaatgttaaaagataagtttgttatatattaatatgcatgcttctttataaatgcattaaataagagttaatagctatcctaaatttgaaatagtgataagcataatgaaaatagatgcaaaaaactaatgtgatatgaaaatatctgggtttttcttttgatgatgaagtattgctaatattaccgtggtttatgaactatgttcagaattgaagaaaatcctaactttcagttagaggttagtgacggggttcaggacaccctacacaaaatacagcactttgacatattgaatattttaagctgaaggcatttgaggaaattgcagaagcaggaaggtgactctgaccttctgcctgctgttctccccagaagcagccataaaacctgggaaggattttctgaccttcccctgaagtagatcataagactgtcatgtaagaggtgctctcctggcacccagagaaaaggagcatccttacctccaaaagcacagggacacaaagaggaatctaaacaaacaggcctctcagtttcccccagtttattacatttagcttgttcacactttgccctatgacatttctacatcactggctgctcttcatcaaacctactataaaaaacattcaagttcaactgtttctttgggcctttatttccttatggagcccctcgtgtcgtgtaaaacttatattaaataaatgtgcatgcttttctcttgctaatctctcttttgttatagagatctcagccctaaacctaggatggatagaaggaaacatatgttctcccctacattagtaaaaataaaaatggaattttttacccatacaaa

SEQ ID NO: 29459 - DNA, 3046 bp, Homo Sapiens
gttggaaacggcactgctgagtgaggttgaggggtgtctcggtatgtgcgccttggatctggtgtaggcgaggtcacgcctctcttcagacagcccgagccttcccggcctggcgcgtttagttcggaactgcgggacgccggtgggctagggcaaggtgtgtgccctcttcctgattctggagaaaaatgccggtccggaagcaagatacccagagagcattgcaccttttggaggaatatcgttcaaaactaagccaaactgaagacagacagctcagaagttccatagaacgggttattaacatatttcagagcaacctctttcaggctttaatagatattcaagaattttatgaagtgaccttactggataatccaaaatgtatagatcgttcaaagccgtctgaaccaattcaacctgtgaatacttgggagatttccagccttccaagctctactgtgacttcagagacactgccaagcagccttagccctagtgtagagaaatacaggtatcaggatgaagatacacctcctcaagagcatatttccccacaaatcacaaatgaagtgataggtccagaattggttcatgtctcagagaagaacttatcagagattgagaatgtccatggatttgtttctcattctcatatttcaccaataaagccaacagaagctgttcttccctctcctcccactgtccctgtgatccctgtcctgccagtccctgctgagaatactgtcatcctacccaccataccacaggcaaatcctcccccagtactggtcaacacagatagcttggaaacaccaacttacgttaatggcacagatgcagattatgaatatgaagaaatcacacttgaaaggggaaattcagggcttggtttcagcattgcaggaggtacggacaacccacacattggagatgactcaagtattttcattaccaaaattatcacagggggagcagccgcccaagatggaagattgcgggtcaatgactgtatattacaagtaaatgaagtagatgttcgtgatgtaacacatagcaaagcagttgaagcgttgaaagaagcagggtctattgtacgcttgtatgtaaaaagaaggaaaccagtgtcagaaaaaataatggaaataaagctcattaaaggtcctaaaggtcttgggtttagcattgctggaggtgttggaaatcagcatattcctggggataatagcatctatgtaaccaaaataattgaaggaggtgcagcacataaggatggcaaacttcagattggagataaacttttagcagtgaataacgtatgtttagaagaagttactcatgaagaagcagtaactgccttaaagaacacatctgattttgtttatttgaaagtggcaaaacccacaagtatgtatatgaatgatggctatgcaccacctgatatcaccaactcttcttctcagcctgttgataaccatgttagcccatcttccttcttgggccagacaccagcatctccagccagatactccccagtttctaaagcagtacttggagatgatgaaattacaagggaacctagaaaagttgttcttcatcgtggctcaacgggccttggtttcaacattgtaggaggagaagatggagaaggaatatttatttcctttatcttagccggaggacctgctgatctaagtggagagctcagaaaaggagatcgtattatatcggtaaacagtgttgacctcagagctgctagtcatgagcaggcagcagctgcattgaaaaatgctggccaggctgtcacaattgttgcacaatatcgacctgaagaatacagtcgttttgaagctaaaatacatgatttacgggagcagatgatgaatagtagtattagttcagggtcaggttctcttcgaactagccagaagcgatccctctatgtcagagccctttttgattatgacaagactaaagacagtgggcttcccagtcagggactgaacttcaaatttggagatatcctccatgttattaatgcttctgatgatgaatggtggcaagccaggcaggttacaccagatggtgagagcgatgaggtcggagtgattcccagtaaacgcagagttgagaagaaagaacgagcccgattaaaaacagtgaaattcaattctaaaacgagagataaagggcagtcattcaatgacaagcgtaaaaagaacctcttttcccgaaaattccccttctacaagaacaaggaccagagtgagcaggaaacaagtgatgctgaccagcatgtaacttctaatgccagcgatagtgaaagtagttaccgtggtcaagaagaatacgtcttatcttatgaaccagtgaatcaacaagaagttaattatactcgaccagtgatcatattgggacctatgaaagacaggataaatgatgacttgatctcagaatttcctgacaaatttggatcctgtgttcctcatacaactagaccaaaacgagattatgaggtagatggaagagattatcattttgtgacttcaagagagcagatggaaaaagatatccaggaacataaattcattgaagctggccagtataacaatcatctatatggaacaagtgttcagtctgtacgagaagtagcaggaaagggcaaacactgtatccttgatgtgtctggaaatgccataaagagattacagattgcacagctttaccctatctccatttttattaaacccaaatccatggaaaatatcatggaaatgaataagcgtctaacagaagaacaagccagaaaaacatttgagagagccatgaaactggaacaggagtttactgaacatttcacagctattgtacagggggatacgctggaagacatttacaaccaagtgaaacagatcatagaagaacaatctggttcttacatctgggttccggcaaaagaaaagctatgaaaactcatgtttctctgtttctcttttccacaattccattttctttggcatctctttgccctttcctctggaaaaaa

SEQ ID NO: 29460 - DNA, 8481 bp, Homo Sapiens
gagagacggcagcggccccggcctccctctccgccgcgcttcagcctcccgctccgccgcgctccagcctcgctctccgccgcccgcaccgccgcccgcgccctcaccagagcagccatggaggaggtggtgattgccggcatgtccgggaagctgccagagtcggagaacttgcaggagttctgggacaacctcatcggcggtgtggacatggtcacggacgatgaccgtcgctggaaggcggggctctacggcctgccccggcggtccggcaagctgaaggacctgtctaggtttgatgcctccttcttcggagtccaccccaagcaggcacacacgatggaccctcagctgcggctgctgctggaagtcacctatgaagccatcgtggacggaggcatcaacccagattcactccgaggaacacacactggcgtctgggtgggcgtgagcggctctgagacctcggaggccctgagccgagaccccgagacactcgtgggctacagcatggtgggctgccagcgagcgatgatggccaaccggctctccttcttcttcgacttcagagggcccagcatcgcactggacacagcctgctcctccagcctgatggccctgcagaacgcctaccaggccatccacagcgggcagtgccctgccgccatcgtggggggcatcaatgtcctgctgaagcccaacacctccgtgcagttcttgaggctggggatgctcagccccgagggcacctgcaaggccttcgacacagcggggaatgggtactgccgctcggagggtgtggtggccgtcctgctgaccaagaagtccctggcccggcgggtgtacgccaccatcctgaacgccggcaccaatacagatggcttcaaggagcaaggcgtgaccttcccctcaggggatatccaggagcagctcatccgctcgttgtaccagtcggccggagtggcccctgagtcatttgaatacatcgaagcccacggcacaggcaccaaggtgggcgacccccaggagctgaatggcatcacccgagccctgtgcgccacccgccaggagccgctgctcatcggctccaccaagtccaacatggggcacccggagccagcctcggggctggcagccctggccaaggtgctgctgtccctggagcacgggctctgggcccccaacctgcacttccatagccccaaccctgagatcccagcgctgttggatgggcggctgcaggtggtggaccagcccctgcccgtccgtggcggcaacgtgggcatcaactcctttggcttcgggggctccaacgtgcacatcatcctgaggcccaacacgcagccgccccccgcacccgccccacatgccaccctgccccgtctgctgcgggccagcggacgcacccctgaggccgtgcagaagctgctggagcagggcctccggcacagccaggacctggctttcctgagcatgctgaacgacatcgcggctgtccccgccaccgccatgcccttccgtggctacgctgtgctgggtggtgagcgcggtggcccagaggtgcagcaggtgcccgctggcgagcgcccgctctggttcatctgctctgggatgggcacacagtggcgcgggatggggctgagcctcatgcgcctggaccgcttccgagattccatcctacgctccgatgaggctgtgaagccattcggcctgaaggtgtcacagctgctgctgagcacagacgagagcacctttgatgacatcgtccattcgtttgtgagcctgactgccatccagataggcctcatagacctgctgagctgcatggggctgaggccagatggcatcgtcggccactccctgggggaggtggcctgtggctacgccgacggctgcctgtcccaggaggaggccgtcctcgctgcctactggaggggacagtgcatcaaagaagcccatctcccgccgggcgccatggcagccgtgggcttgtcctgggaggagtgtaaacagcgctgccccccgggcgtggtgcccgcctgccacaactccaaggacacagtcaccatctcgggacctcaggccccggtgtttgagttcgtggagcagctgaggaaggagggtgtgtttgccaaggaggtgcggaccggcggtatggccttccactcctacttcatggaggccatcgcacccccactgctgcaggagctcaagaaggtgatccgggagccgaagccacgttcagcccgctggctcagcacctctatccccgaggcccagtggcacagcagcctggcacgcacgtcctccgccgagtacaatgtcaacaacctggtgagccctgtgctgttccaggaggccctgtggcacgtgcctgagcacgcggtggtgctggagatcgcgccccacgccctgctgcaggctgtcctgaagcgtggcctgaagccgagctgcaccatcatccccctgatgaagaaggatcacagggacaacctggagttcttcctggccggcatcggcaggctgcacctctcaggcatcgacgccaaccccaatgccttgttcccacctgtggagttcccagctccccgaggaactcccctcatctccccactcatcaagtgggaccacagcctggcctgggacgtgccggccgccgaggacttccccaacggttcaggttccccctcagccgccatctacaacatcgacaccagctccgagtctcctgaccactacctggtggaccacaccctcgacggtcgcgtcctcttccccgccactggctacctgagcatagtgtggaagacgctggcccgcgccctgggcctgggcgtcgagcagctgcctgtggtgtttgaggatgtggtgctgcaccaggccaccatcctgcccaagactgggacagtgtccctggaggtacggctcctggaggcctcccgtgccttcgaggtgtcagagaacggcaacctggtagtgagtgggaaggtgtaccagtgggatgaccctgaccccaggctcttcgaccacccggaaagccccacccccaaccccacggagcccctcttcctggcccaggctgaagtttacaaggagctgcgtctgcgtggctacgactacggccctcatttccagggcatcctggaggccagcctggaaggtgactcggggaggctgctgtggaaggataactgggtgagcttcatggacaccatgctgcagatgtccatcctgggctcggccaagcacggcctgtacctgcccacccgtgtcaccgccatccacatcgaccctgccacccacaggcagaagctgtacacactgcaggacaaggcccaagtggctgacgtggtggtgagcaggtggctgagggtcacagtggccggaggcgtccacatctccgggctccacactgagtcggccccgcggcggcagcaggagcagcaggtgcccatcctggagaagttttgcttcactccccacacggaggaggggtgcctgtctgagcgcgctgccctgcaggaggagctgcaactgtgcaaggggctggtgcaggcactgcagaccaaggtgacccagcaggggctgaagatggtggtgcccggactggatggggcccagatcccccgggacccctcacagcaggaactgccccggctgttgtcggctgcctgcaggcttcagctcaacgggaacctgcagctggagctggcgcaggtgctggcccaggagaggcccaagctgccagaggaccctctgctcagcggcctcctggactccccggcactcaaggcctgcctggacactgccgtggagaacatgcccagcctgaagatgaaggtggtggaggtgctggctggccacggtcacctgtattcccgcatcccaggcctgctcagcccccatcccctgctgcagctgagctacacggccaccgaccgccacccccaggccctggaggctgcccaggccgagctgcagcagcacgacgttgcccagggccagtgggatcccgcagaccctgcccccagcgccctgggcagcgccgacctcctggtgtgcaactgtgctgtggctgccctcggggacccggcctcagctctcagcaacatggtggctgccctgagagaagggggctttctgctcctgcacacactgctccgggggcaccccctcggggacatcgtggccttcctcacctccactgagccgcagtatggccagggcatcctgagccaggacgcgtgggagagcctcttctccagggtgtcgctgcgcctggtgggcctgaagaagtccttctacggctccacgctcttcctgtgccgccggcccaccccgcaggacagccccatcttcctgccggtggacgataccagcttccgctgggtggagtctctgaagggcatcctggctgacgaagactcttcccggcctgtgtggctgaaggccatcaactgtgccacctcgggcgtggtgggcttggtgaactgtctccgccgagagcccggcgggaaccgcctccggtgtgtgctgctctccaacctcagcagcacctcccacgtcccggaggtggacccgggctccgcagaactgcagaaggtgttgcagggagacctggtgatgaacgtctaccgcgacggggcctggggggctttccgccacttcctgctggaggaggacaagcctgaggagccgacggcacatgcctttgtgagcaccctcacccggggggacctgtcctccatccgctgggtctgctcctcgctgcgccatgcccagcccacctgccctggcgcccagctctgcacggtctactacgcctccctcaacttccgcgacatcatgctggccactggcaagctgtcccctgatgccatcccagggaagtggacctcccaggacagcctgctaggtatggagttctcgggccgagacgccagcggcaagcgtgtgatgggactggtgcctgccaagggcctggccacctctgtcctgctgtcaccggacttcctctgggatgtgccttccaactggacgctggaggaggcggcctcggtgcctgtcgtctacagcacggcctactacgcgctggtggtgcgtgggcgggtgcgccccggggagacgctgctcatccactcgggctcgggcggcgtgggccaggccgccatcgccatcgccctcagtctgggctgccgcgtcttcaccaccgtggggtcggctgagaagcgggcgtacctccaggccaggttcccccagctcgacagcaccagcttcgccaactcccgggacacatccttcgagcagcatgtgctgtggcacacgggcgggaagggcgttgacctggtcttgaactccttggcggaagagaagctgcaggccagcgtgaggtgcttggctacgcacggtcgcttcctggaaattggcaaattcgacctttctcagaaccacccgctcggcatggctatcttcctgaagaacgtgacattccacggggtcctactggatgcgttcttcaacgagagcagtgctgactggcgggaggtgtgggcgcttgtgcaggccggcatccgggatggggtggtacggcccctcaagtgcacggtgttccatggggcccaggtggaggacgccttccgctacatggcccaagggaagcacattggcaaagtcgtcgtgcaggtgcttgcggaggagccggaggcagtgctgaagggggccaaacccaagctgatgtcggccatctccaagaccttctgcccggcccacaagagctacatcatcgctggtggtctgggtggcttcggcctggagttggcgcagtggctgatacagcgtggggtgcagaagctcgtgttgacttctcgctccgggatccggacaggctaccaggccaagcaggtccgccggtggaggcgccagggcgtacaggtgcaggtgtccaccagcaacatcagctcactggagggggcccggggcctcattgccgaggcggcgcagcttgggcccgtgggcggcgtcttcaacctggccgtggtcttgagagatggcttgctggagaaccagaccccagagttcttccaggacgtctgcaagcccaagtacagcggcaccctgaacctggacagggtgacccgagaggcgtgccctgagctggactactttgtggtcttctcctctgtgagctgcgggcgtggcaatgcgggacagagcaactacggctttgccaattccgccatggagcgtatctgtgagaaacgccggcacgaaggcctcccaggcctggccgtgcagtggggcgccatcggcgacgtgggcattttggtggagacgatgagcaccaacgacacgatcgtcagtggcacgctgccccagcgcatggcgtcctgcctggaggtgctggacctcttcctgaaccagccccacatggtcctgagcagctttgtgctggctgagaaggctgcggcctatagggacagggacagccagcgggacctggtggaggccgtggcacacatcctgggcatccgcgacttggctgctgtcaacctggacagctcactggcggacctgggcctggactcgctcatgagcgtggaggtgcgccagacgctggagcgtgagctcaacctggtgctgtccgtgcgcgaggtgcggcaactcacgctccggaaactgcaggagctgtcctcaaaggcggatgaggccagcgagctggcatgccccacgcccaaggaggatggtctggcccagcagcagactcagctgaacctgcgctccctgctggtgaacccggagggccccaccctgatgcggctcaactccgtgcagagctcggagcggcccctgttcctggtgcacccaatcgagggctccaccaccgtgttccacagcctggcctcccggctcagcatccccacctatggcctgcagtgcacccgagctgcgccccttgacagcatccacagcctggctgcctactacatcgactgcatcaggcaggtgcagcccgagggcccctaccgcgtggccggctactcctacggggcctgcgtggcctttgaaatgtgctcccagctgcaggcccagcagagcccagcccccacccacaacagcctcttcctgttcgacggctcgcccacctacgtactggcctacacccagagctaccgggcaaagctgaccccaggctgtgaggctgaggctgagacggaggccatatgcttcttcgtgcagcagttcacggacatggagcacaacagggtgctggaggcgctgctgccgctgaagggcctagaggagcgtgtggcagccgccgtggacctgatcatcaagagccaccagggcctggaccgccaggagctgagctttgcggcccggtccttctactacaagctgcgtgccgctgagcagtacacacccaaggccaagtaccatggcaacgtgatgctactgcgcgccaagacgggtggcgcctacggcgaggacctgggcgcggactacaacctctcccaggtatgcgacgggaaagtatccgtccacgtcatcgagggtgaccaccgcacgctgctggagggcagcggcctggagtccatcatcagcatcatccacagctccctggctgagccacgcgtgagcgtgcgggagggctaggcccgtgcccccgcctgccaccggaggtcactccaccatccccaccccaccccaccccacccccgccatgcaacgggattgaagggtcctgccggtgggaccctgtccggcccagtgccactgccccccgaggctgctagatgtaggtgttaggcatgtcccacccacccgccgcctcccacggcacctcggggacaccagagctgccgacttggagactcctggtctgtgaagagccggtggtgcccgtgcccgcaggaactgggctgggcctcgtgcgcccgtggggtctgcgcttggtctttctgtgcttggatttgcatatttattgcattgctggtagagacccccaggcctgtccaccctgccaagactcctcaggcagcgtgtgggtcccgcactctgcccccatttccccgatgtcccctgcgggcgcgggcagccacccaagcctgctggctgcggccccctctcggccaggcattggctcagcccgctgagtggggggtcgtgggccagtccccgaggagctgggcccctgcacaggcacacagggcccggccacacccagcggccccccgcacagccacccgtggggtgctgcccttatgcccggcgccgggcaccaactccatgtttggtgtttgtctgtgtttgtttttcaagaaatgattcaaattgctgcttggattttgaaatttactgtaactgtcagtgtacacgtctggaccccgtttcatttttacaccaatttggtaaaaatgctgctctcagcctcccacaattaaaccgcatgtgatctccaaaaaaaaaaaaaaaaaaaaaaaa

SEQ ID NO: 29461 - DNA, 3236 bp, Homo Sapiens
gaccgggcggcgtgggcgtgagaggcggggcggggccgcgctctgcttgccaatgtctttataggtcacccggaaggcacgcggaacctcggcgcggtgcttccagcagggtctctccgccactccagccccgcgcccctcgccgcggccctcgggcgtctgcgccgcagctgccgcccccgcctctttggagtctctcgcggcctcaaagcgcggcctgcgtcgcttccggcagttcccgaccgcgggcgatggctgccgctgggggcgcccggctgctgcgcgccgcttctgctgtcctcggcggcccggccggccggtggctgcaccacgctgggtcccgcgctggatccagcggcctgctgaggaaccgggggccgggcgggagcgcggaggcgagccggtcgctgagcgtgtcggcgcgggcccggagcagctcagaagataaaataacagtccactttataaaccgtgatggtgaaacattaacaaccaaaggaaaagttggtgattctctgctagatgttgtggttgaaaataatctagatattgatggctttggtgcatgtgagggaaccctggcttgttcaacctgtcacctcatctttgaagatcacatatatgagaagttagatgcaatcactgatgaggagaatgacatgctcgatctggcatatggactaacagacagatcacggttgggctgccaaatctgtttgacaaaatctatggacaatatgactgttcgagtgcctgaaacagtggctgatgccagacaatccattgatgtgggcaagacctcctgaactagaacaaataggaatattttcatggaattttacctatttttataattattatttcttaaagtgattaaatgagaacatggatgagtggacttcatattatgactagctttactattttaattcaccttgcataactactgaattttgtcattcttgaaagtatgcaatttttattttggttatattacaaaaatgtcaatcaaatattaaaaaatagttaatgtgatagaaaaaccttacatatttttttcttatgtttgtttagcgactttagcaaaatgttttcatataatctcatctgtttacctagaagataggttaaggaaatatattattattcctgtttgatgtgggtgaaggcagagatctaacctggcttgtttagggccataccactaattagaaaatctgtgctagaacctgtgtcttattcctataagctatgtgttcagactgaaactggagaaattatgactattttatttatagtagtagttaaatctgaatgtgtatggacaaaaatatttaattgctcagtaaactgcttaacttcaaagatagttattgaccttataaataaatatttcaaaattttgattcggaagactaagtctggacgtagacattataatgctatcaaagaagtttgatctctgttttgactaaactagaggaaaaatgattggatgtgtttattcttttctaagcagaatggtttaactttgtactctttgaaaaataatgctgatttataaatctctgcctataacagaatggaaaccttatgaatgaattgtgtttctctgtcctgagctggagaagggaatgagcaggctgacacgttgcacagccccaggtggcgccattctctcacgcaaggatggggctgcagggtgagcagcgtgggctgcagtgtgtcagtcccaggagtgagggagtggcaagcaccacagattaccacgtatgtgtggaagacattcgtactcttatctttactataaataaattcataaaagttaacaaaggggtacacagtatggtctttggaaatataataaaacatcaactaacttggactaattgtgaggaagagcagaacaaattagtagaaagaggttataagacaattgagttagcttcatgtgtattattgcagcttgatcatttatataaatatttgtctagtacaatgcttgacatacagcattgtgttatgcccattggggacacagaggtgaacaagacaaggaatgccatcagggaattcaccttttattaggaaaatataaaatatgtatgtatgtgcagataatttgcttgaactaaactgactagttctgctaaataagattttaaactaattcatatgtaaaaagtgattaggaagaacttgaagtatcatttgatgcttaataactattgagtagttttttttttttttttttggtggggggagcgggggacagggtcttactctgtcactcaggccagagtacaatagtatgatctcggctcactgcaacttctgcctcccagtttcaagggattctcgtgcctcagcctcccaggtagctggtactacaggcacggaccaccacgcctggctaatttttgtattttttctagggacagggttttaccacgttgcccaggctggtcttgaacttttgagctcgagtgatccacccacctcagcctcccaaaatgctgggattacagatgtgagccaccgtgcttggccataactattgaatgctttctatgtggagagtgcttgtcttaattttctgttgctataatagaataacacagactgggtaatttataaagaaaagagatttatttggatcatggttctggaggctgggaggtccaagagcatggtaccagcatctgcttggcatctggtgacagctttcttgctgcatcattacatggtggaagggcaagagaatgcgagtgagagcaagagggcaaaatgattatccttttatcaggagcccacttctgacataactaacccacacctgagataacggcattaatccattcatgaggtctctgctcttaaaggagatcacctcttaaaggacccacctttcaatgccattacactggcaatttaatttcaagatgagttttggaggggacattcaaaccatagcagtgctataattttaaagtacttcaaagccaatttattctcttaattagcttcattattcttgtctttgtgtgtggattacctaaactctccttccagagctactttaatgattatattcaaccaaagcactctaaaatttagagtataaattgtcttatatttcaaattagaaaagttcaaatgaagtttaattgtgttattttataaaaccttctaaaattattaaatggaggatataatctaaaaaaaaaaaaaaaaaa

SEQ ID NO: 29462 - DNA, 2861 bp, Homo Sapiens
aaatctgctgtgcatccagagagcaaagtgggatgatctgtcactacacctgcagcaccacgctcggaggacagctcctgcctgcagcttccagacccaggaagcctgaggggaaggaaggaagtacgggcgaaatcatcagattggcttcccagatttgggaatctgaagcgggcccacatcttccggccaacttccattgaacttcccagcactcgaaagggaccgaaatggagagcaaagaaccccagctcaaagggattgtgacaaggttattcagccagcagggatacttcctgcagatgcacccagatggtaccattgatgggaccaaggacgaaaacagcgactacactctcttcaatctaattcccgtgggcctgcgtgtagtggccatccaaggagtgaaggctagcctctatgtggccatgaatggtgaaggctatctctacagttcagatgttttcactccagaatgcaaattcaaggaatctgtgtttgaaaactactatgtgatctattcttccacactgtaccgccagcaagaatcaggccgagcttggtttctgggactcaataaagaaggtcaaattatgaaggggaacagagtgaagaaaaccaagccctcatcacattttgtaccgaaacctattgaagtgtgtatgtacagagaaccatcgctacatgaaattggagaaaaacaagggcgttcaaggaaaagttctggaacaccaaccatgaatggaggcaaagttgtgaatcaagattcaacatagctgagaactctccccttcttccctctctcatcccttccccttcccttccttcccatttacccatttccttccagtaaatccacccaaggagaggaaaataaaatgacaacgcaagacctagtggctaagattctgcactcaaaatcttcctttgtgtaggacaagaaaattgaaccaaagcttgcttgttgcaatgtggtagaaaattcacgtgcacaaagattagcacacttaaaagcaaaggaaaaaataaatcagaactccataaatattaaactaaactgtattgttattagtagaaggctaattgtaatgaagacattaataaagatgaaataaacttattactttaaaggaaaggatttggagaattgaactcacaaactgatgttatatactcaatagcttaaactcatgataatgctgcgatgtgtggttttgcttgattttgtattttatttgggcatctggaattgacacaccattacattctgtttgcaggattttttttgtaaccatgaaattgaacatttccaaattataaactatgttaatacctataaaatatatagccaggaaccatttatcatcaagaaaagtgtaagaaattatttttgagatgtaatttaagattgttttatgtaaaaggaaaatcttgtatggcatcgaatagccttaatgaatttaattctttcacaaaaatgatttcaaattatcctagagtataacatttttatcaaagatattatttccggagttcttctttctttcttttttttttttttttagtaatttagcaaaaacattactgttctaatgctgaagtgacttttgccagtgccatgtccaggtggtgaggtataagttacttgctcttagcatttggtctgatttttttgctttgtggacacctttgagagtatccacaaagcaatgtctcaggtgtggacacctgagagcatgttttagaaagctttgtaccctgtcttgtggcaggaaagaaagaacaggggttttacataaggaaataagtcctaggaaattagtcaacgcaaattgcatttgcctttgtaccttaccacagtcttatattgttttttaaactctgccatgaaatttggagacatgactgtgaaattcctaacttactatcttacaaagccagtagctaatttgttgctctatgtatgatcctgttacaagtccagtttgcaattcatttgtttcctagaacacagaagggtaccagtaatacactaaatgttcaaggtgtgtagagaaataatatggaattagcagctatgactccaacagacaggattgtgtgagcagctgaaaggagcaaaaaagaactcagtgtaagagaaggcacatacatagttaagaatactaaagtatttttaaaaatcaaggaagaaataaatgttacacaatttgcattggaataaatagatctatttagtcctacaaatcaggagtggtgtagagacatccaaatttaaagaaaaaaaaacacaaaacagaatgttaaaaatgtatgcagatttatggatattatcaatgagaagacatagcatgtaacttctcctatatctctactgtccagcatgtattgttccaaatatgactccctaaaatatatacactttgcagaagctctaggccctcacctcaaaccttgccattggttgccgtatttcaaggtcaatatagtttccctcactttacacaatcattattcttcaatagtggaccatatccttcaccaggtatcctatttctgttatctagaggttagcagaaaatgaaatgaaggaatttccctaagcagttgggaagaacaaattgtatgcatgtaggcaaagattttgaagatacatttgcaagagatatttgtttaaccaaaatatttggaaagtaacaaataaagacatttaaattttctaaaaatggacttgctcttctaggaaaagaatacccctggggcaaaaatataactctagctgtatttcttcttgtcactcttgattcaacttgattataaatacacctgtcactaccagaaccaaaaaaaaaaaaaaaaaa

SEQ ID NO: 29463 - DNA, 1353 bp, Homo Sapiens
caggctattccggacgccagccctggaagctgagcctgacccagcaggtcccagcagcctggcagcccggccagcatgcagcagcagcctctgcccgggcctggcgcccccacaactgagccaaccaagcctccctacagctacatcgcccttattgctatggccatccagagctcaccggggcagcgggccaccctcagtggcatctaccgctacatcatgggccgattcgccttctaccgccacaaccggcccggctggcagaacagcatccgccacaacctgtcactcaacgagtgctttgtcaaggtgccccgcgatgaccgcaagccaggcaagggcagctactggacgctggaccctgactgccacgacatgtttgagcacggcagcttcctacgccgccgccgccgcttcacccggcagacaggtgctgagggcacccggggccccgccaaggcacgccgtggacccctcagggcgaccagccaggacccaggagtccccaacgccacgaccggcaggcagtgctcattcccaccagagctgccagatcccaagggcctaagctttgggggtctggtgggggccatgccagccagtatgtgcccagcaaccactgatggcaggcctcggccacccatggagcccaaagagatttccacgcccaagcctgcatgcccaggggagctccccgtggccacctcatcttcctcatgcccagcgtttggctttcctgccggcttctcagaggctgagagttttaataaggcccctacgcccgtcttgtccccggaatcaggcatcgggagcagctaccagtgtcggctgcaggcactgaatttttgcatgggggctgacccaggccttgagcacctcttggcctcagcagccccctcccctgcaccacccacccctccaggctcactccgggccccactgcccctgccaactgaccacaaggaaccctgggttgcaggtggcttccctgtccagggaggctccggctacccattggggctgaccccctgcctataccggacgccaggaatgttcttctttgagtaaaggcagcctcacctcgggcagtccctgcaggtccctcaccctccgggctgagcctggctctaggacctgaagaactctcgaaggacccagccctggtgagccaaggacaaccacacagaaagccaggattgaagcggtgctcagccaggcccctggggcctccggacaaacttgggggtgaggggaagcagggcctcttgggatttactctgtggctctcagggccaataaagccatgtgatgatgagggaaaaaaaaaaaaaaaaaaaaaaaaaaaaaaaaaaa

SEQ ID NO: 29464 - DNA, 2749 bp, Homo Sapiens
  misc_feature (631)..(631): n is a, c, g, or t
gcttggtgctgcatctcaatccctgtggccccaggagcagctgcggcaggaacatgtatggatttatcaacacctgtctgcaatctcttgtgatagagaaatttggtgaagaaacatgggaaaaattgaaaacttctgcagaagtacaagatgccttcatgacctacacaatgtatgatgacgtcatcaccattaagctcatccaagaggcctgcaacattctgggtgtctccatggaagccatcctgaaactctttggagaatactttcaattctgaagatgtctggctatgacaggatgctacggacactgggaggaaatctcatggagtttattgaaaacctggatgccctccacagttacctggcactctcttatcaggagatgaatgcaccatcgtttcgtgtggagagaggagcagatgggaaaatgtttctccattactactcggatagaagtggtctgtgccacattgtaccaggtatcattgaggctgtggccaaagacttctttgatattgatgtaatcatggacattcttgacatgaatgaagaagtggagaggacagggaagaaggagcatgttgtgtttctgattgtacagaaggctcacaggaagatgagaaagacnaagccaaaaaggttacaagacagtcagggcatggagagagaccaagaggccctccaggcagctttcctcaagatgaaggagaaatatttgaatgtctctgcttgtcctgtgaaaaaatcccactgggatgttgtgagaagcatagtcatgtttggaaaagggcatctcatgaacacctttgagccaatttatcctgagagactctggattgaagagaagacattctgcaacgcttttcctttccacattgtattcgatgaatcactacaggtgaagcaagccagagtgaacattcagaagtacgtaccaggactccaaacccagaatattcaactggatgagtatttctccatcattcatcctcaagttaccttcaacattttcagcatccgcagatttatcaacagtcaatttgtcctgaagacacgaagagaaatgatgcctgtagcatggcaaagtcggactacactcaaacttcaaggccagatgatctggatggagtccatgtggtgcatggtgtacctgtgctctccgaagctccgcagcctgcaagagctggaagaactcaatatgcatctttctgacatcgcccccaacgacaccaccagggatctcatcctcctgaaccagcagcggctggctgagatagagctgtccaaccagctggaaaggaagaaggaggagctacaggtcctctccaagcacttggccattgaaaagaagaaaacagagaccttactttatgccatgctgcccaaacacgtggccaaccagctgagggagggcaaaaaggtggctgcaggagaatttaaaagctgcacgattcttttcagcgatgtagtgacatttactaacatctgtactgcctgtgaacctatacaaatagtgaacgtgctgaattccatgtactccaagtttgacagattaaccagtgtgcacgcagtctataaagtagaaacaataggagatgcttatatggtggtaggaggtgtaccagtgcctattggaaaccatgctcaaagagtggctaattttgccttggggatgagaatttctgcaaaggaagtgacgaatcctgttactggagaacccatccagctcagagtggggatccatactggaccagtcttagcagatgttgtaggagacaagatgccacggtactgcttgtttggtgacactgtgaacacagcttctaggatggaaagtcatgggcttcccaacaaagtgcacctcagtcccacagcctacagagccttgaaaaatcaagggtttaaaatcattgagaggggtgaaattgaagtgaaaggtaaagggagaatgaccacatactttttgatccagaacttgaatgccacagaggatgagatcatggggagatctaaaaccccagttgatcacaaggggtcaacacagaaagcatccttgcccaccaccaagctccagggctcagttcaaccatcttgccctgaacactcttctcttgcatcctggttattatgacgttctttgagctgggccgatagatccagctgaagagttctacatacattagtcttcaaggttcttctctgggcgtttcccatgcagctctctggtagctggggaatgatttgtaatgagtacatgaaacacgttaaatgtccttcagcctccctaccacgacatccaacagctggaacttccatccagtccttcacatgatgggcacctgtgggaaacctgccaggggcagccgatgttcagaggcatccaaaaaaagtctcccacttcggcagccatgaagcccactcatgcaaccgtcctcacttttccttcctctcacggttttttgcagaagcaagtgctcagggaaatgaagacaggagaactgctgccgtcatgagctatgccgacagtcagcagctgatccccgacagaaacgcagcagatgcagacgctcctgatgaaatcatccctgtggggagtgcagggccagatggggactccatggagacagccgaccggcgacagccttcagctccgacaaagacacatcaccttgcaaatgacactttgccgtctggtttctgtgttttgttgtaacaggttaaatgaacccctgggcttaattttccc

SEQ ID NO: 29465 - DNA, 1518 bp, Homo Sapiens
cagagagaagaagaaatatttccaaatataccaggctgatctttcgtagtttctcagtcttgctgtctgttgttgtttgaaatctgtttcccacgagactctgggaagatggaggtgcagggcttgggtaacagctgccttcctcagggctgggtacctgctctccgagtctgtgtctccaggctgtgtgctcagacttgaccatgtttgggcatggaggcttgccccagatggggaccaaaagctgcttccctggagacgggcggggaggccaaacttcctgctgaagctctgtggcctcttttggggtgggggcgggggtccaggcagaaagaaactgtctgctgctcaagacccacaggacgccgggaagactaaatgatcactgcccccagtgaatatggtgaagaagctggtgatggcccagaagcggggagagacacgagccctttgcctgggtgtaaccatggtggtgtgtgccgtcatcacctactacatcctggtcacgactgtgctgcccctctaccagaaaagcgtgtggacccaggaatccaagtgccacctgattgagaccaacatcagggaccaggaggagctgaagggcaagaaggtgccccagtacccatgcctgtgggtcaacgtgtcagctgccggcaggtgggctgtgctgtaccacacggaggacactcgggaccagaaccagcagtgctcctacatcccaggcagcgtggacaattaccagacggcccgggccgacgtggagaaggtcagagccaaattccaagagcagcaggtcttctactgcttctccgcacctcgggggaacgaaaccagcgtcctattccagcgcctctacgggccccaggccctcctcttctccctcttctggcccaccttcctgctgaccggtggcctcctcattatcgccatggtgaagagcaaccagtacctgtccatcctggcggcccagaagtagagccatccatccatgccataccacttgtcagggcacaggggactggctgggcccccagggctgctccccacttgcagcacaatgccttctccacctgccctcccactcttccagtccaatccacgctgtcttctgttgcaggactaacctttgagaaatccttttgtgaagtcattgcctgctcaagaatgtacagtggctccccaatgccttggaggccataaggccagccagttctagctctctattacctgtccccactcaactgactcatacctgtttccggctgcatcactatgtgccccacagagaacgatgatcgtcacctctgtgcctgagttctccctgttgtctcaaagcggtacccatcctcccccagaagctgtccccagcgagcctcccttctttgtttgaattctctaataagagcaacagcagctcccatttctagaacacatttacagtattactattttctaggatataaagtgccatatatatttttaattccaatattaataaatgtatgccaaacaacaata

SEQ ID NO: 29466 - DNA, 1823 bp, Homo Sapiens
gggacagtcctggcccactgcactgggaatctaggatgggggccttggccagagccctgccgtccatactgctggcattgctgcttacgtccaccccagaggctctgggtgccaaccccggcttggtcgccaggatcaccgacaagggactgcagtatgcggcccaggaggggctattggctctgcagagtgagctgctcaggatcacgctgcctgacttcaccggggacttgaggatcccccacgtcggccgtgggcgctatgagttccacagcctgaacatccacagctgtgagctgcttcactctgcgctgaggcctgtccctggccagggcctgagtctcagcatctccgactcctccatccgggtccagggcaggtggaaggtgcgcaagtcattcttcaaactacagggctcctttgatgtcagtgtcaagggcatcagcatttcggtcaacctcctgttgggcagcgagtcctccgggaggcccacagttactgcctccagctgcagcagtgacatcgctgacgtggaggtggacatgtcgggagacttggggtggctgttgaacctcttccacaaccagattgagtccaagttccagaaagtactggagagcaggatttgcgaaatgatccagaaatcggtgtcctccgatctacagccttatctccaaactctgccagttacaacagagattgacagtttcgccgacattgattatagcttagtggaagcccctcgggcaacagcccagatgctggaggtgatgtttaagggtgaaatctttcatcgtaaccaccgttctccagttaccctccttgctgcagtcatgagccttcctgaggaacacaacaaaatggtctactttgccatctcggattatgtcttcaacacggccagcctggtttatcatgaggaaggatatctgaacttctccatcacagatgacatgataccgcctgactctaatatccgactgaccaccaagtccttccgacccttcgtcccacggttagccaggctctaccccaacatgaacctggaactccagggatcagtgccctctgctccgctcctgaacttcagccctgggaatctgtctgtggacccctatatggagatagatgcctttgtgctcctgcccagctccagcaaggagcctgtcttccggctcagtgtggccactaatgtgtccgccaccttgaccttcaataccagcaagatcactgggttcctgaagccaggaaaggtaaaagtggaactgaaagaatccaaagttggactattcaatgcagagctgttggaagcgctcctcaactattacatccttaacaccttctaccccaagttcaatgataagttggccgaaggcttcccccttcctctgctgaagcgtgttcagctctacgaccttgggctgcagatccataaggacttcctgttcttgggtgccaatgtccaatacatgagagtttgaggacaagaaagatgaagcttggaggtcacagctggatctgcttgttgcatttccagctgtgcagcacgtctcagagattcttgaagaatgaagacatttctgctctcagctccgggggtgaggtgtgcctggcctctgcctccaccctcctcctcttcaccaggtgcatgcatgccctctctgagtctggactttgcttcccctccaggagggaccaccctccctgactggcctgggatatctttacaagcaggcactgtatttttttattcgccatctgatccccatgcctagcagagtgctggcacttagtaggtcctcaataaatatttattaaatgat

SEQ ID NO: 29467 - DNA, 7488 bp, Homo Sapiens
atgagtgtgaaagaggcaggcagctcgggccgccgggagcaggcggcctaccacctgcacatctacccccagctgtccaccaccgagagccaggcctcgtgccgcgtgactgccaccaaggacagcaccacctcggacgtcatcaaggacgccattgccagcctgcggctggacggcaccaaatgttatgtgctggtggaggtcaaagagtcgggaggcgaggaatgggtgctggacgccaacgactcgcctgtgcaccgggtgctgctatggccccggcgggcacaggacgagcaccctcaggaggatggctactacttcctgctgcaggagcgcaacgcagatggaaccatcaagtacgtgcatatgcagctggtggcgcaggccacagccacccggcgcctagtggagcgtggcctcctgccacggcagcaggcggactttgatgacctgtgtaacctccccgagctaaccgagggcaacctcctgaagaacctcaagcaccgcttcctgcaacaaaagatctacacgtacgcggggagcatcctggtggccatcaacccctttaagttcctgcccatctacaaccccaagtacgtgaagatgtatgagaaccagcagctgggcaagctggagccacacgtcttcgcgctggccgacgtggcctactacaccatgctcaggaagcgcgtgaaccagtgcatcgtgatctcgggtgagagcggctccggcaagacccagagcaccaacttcctcatccactgcctcaccgccctcagccagaagggctacgccagcggcgtcgagaggaccatcctgggtgctggccctgtgctggaggcttttggaaatgccaagacagcccacaacaacaactccagccggtttgggaaattcatccaagtcagctacctagagagtggcatcgtgagaggagctgtcgtcgagaaatatctgcttgaaaagtctcgcctggtgtctcaggagaaggatgagaggaactaccatgtgttttattatttgttacttggggtcagcgaggaagagcgccaagaatttcagctcaagcagcctgaagattatttctacctcaaccagcataacttgaagattgaagatggggaggacctgaagcatgactttgagaggctcaagcaggccatggagatggtgggcttcctccccgccaccaagaagcagatttttgccgtcctctcggccatcctgtacctgggcaacgtcacttataagaagagagctacaggccgagaggaagggttggaggtcgggccacccgaggtgctggacaccctgtcgcagcttctgaaggtgaagcgagaaatcttggtggaggttctgaccaaaagaaaaacggtgaccgtcaacgacaagcttatccttccctacagcctcagcgaggccatcactgcccgcgactccatggccaagtctctgtacagcgccctgttcgactggattgtgctgcggatcaaccacgcactcctcaacaagaaggacgtggaagaggcagtctcgtgcctgtccattggggtcctggacatcttcgggtttgaagacttcgagaggaacagctttgagcagttctgcatcaactacgccaatgagcagctgcagtattacttcaaccagcacatcttcaagctggagcaggaggaatatcagggcgaggggatcacgtggcacaacatcggctacacagacaatgtcggctgcatccatctcatcagcaagaaacccacgggcctcttctacctgctggacgaggagagcaacttcccccacgccacgagccagaccctgctggccaagttcaaacagcaacatgaggacaataagtacttcctgggcaccccggtcatggagccagctttcatcatccagcacttcgcagggaaggtgaaatatcagatcaaggacttccgggagaagaacatggactacatgcggccagacatcgtggccctgctgcggggcagtgacagctcctacgtgcgggagctcatcggcatggaccccgtggccgtgttccgctgggccgtgctccgggctgctatccgggccatggcagtgcttcgggaggccggacgcctgcgggccgagagggccgaaaaggctgcaggtatgagcagccctggtgcccaaagtcacccagaagagctgccaagaggagccagcaccccttcggaaaaactttaccgcgatttgcataaccaaatgatcaagagcatcaaaggattgccctggcagggcgaggacccccgtagccttctccagtccctcagtcggctccagaaaccccgcgccttcatcctgaaaagtaaaggtatcaaacaaaagcagatcattccaaagaacctactggactccaagtccctgaaactcatcatcagcatgactctgcacgaccgcaccaccaagtccctactgcacctgcacaagaagaaaaagccaccaagcatcagcgcccagttccagacatcccttaacaagctcttggaggcactggggaaggcggagcccttctttatccgctgcatccgttccaatgctgaaaagaaagagctgtgctttgacgacgagctggtcctgcagcagctgcgctacaccggcatgctggagaccgtgcgcatccggaggtcagggtacagcgccaagtacacgttccaggatttcaccgagcagttccaggtgctcctgcccaaggatgcccagccctgcagggaggtcatctccaccctcctggagaaaatgaagatagacaagaggaactaccagatcgggaagaccaaggtcttcctgaaggagacggagcggcaagccctgcaggagacgctgcaccgggaggtggtgcggaaaatcctgctgctgcagagctggttccggatggtgctggagcgtcggcacttcctgcagatgaagcgggccgccgtcaccatccaggcctgctggcggtcctaccgggtccggagggcgctggagaggacgcaggctgccgtgtacctccaggcctcatggaggggctactggcagcggaagctctaccggcaccagaaacagagcatcatccgcctgcagagcctgtgtcgggggcacctgcagcgcaagagcttcagccagatgatctcggagaagcagaaggcagaagagaaggagagggaagccctggaagccgcaagagcaggtgctgaggagggcggacagggtcaggcggctggagggcagcaggtagctgagcaggggccggagccagcggaggatggcgggcacctggcatcggagcctgaggtgcagccaagtgacaggtcccccctagagcactcctcacctgagaaggaggccccaagcccagagaagactctcccaccccagaaaaccgtggcggctgaaagtcacgagaaagtccccagcagccgggagaagcgtgagtcgcgtcggcaaagagggctggagcacgtcaagttccagaacaaacacatccagtcctgcaaggaggagagtgccctcagagaaccttccagaagggtcacccaggagcaaggggtgagtctcctggaagacaaaaaggagagcagagaagatgaaacccttctagtcgtagagacggaggctgagaacacatctcaaaagcagcccacagagcaaccccaggccatggcagttggcaaggtctctgaagaaactgagaagacgctgcccagtgggagccccaggcctggccagttggagcggccgaccagcctggccctggacagcagggtcagcccaccggcccctggcagcgcccccgagacccccgaggacaagagcaaaccatgtggcagcccaagggttcaggaaaagcccgacagccccggaggctccacgcagatccagcggtacctggacgccgagcggctggccagcgccgtggaactgtggcggggcaagaagctggtggccgccgccagccctagtgccatgctcagccagtccctggacctcagcgacagacaccgggccacaggggccgccctcacgcccacagaggagaggcgcacctccttctccacgagcgacgtctccaagctcctcccgtccctggccaaggctcagcctgcagcagaaaccacggacggagagcgaagtgcgaaaaagccagctgtccagaagaagaagccaggcgacgcatcctccctcccagacgcagggctgtccccgggctctcaggtcgactctaaatccacgtttaagaggctttttctgcataaaaccaaggataaaaaatacagcctggagggcgcagaggagctggagaatgcagtgtccgggcacgtggtgctggaagccaccaccatgaagaagggcctggaagccccctccggacagcagcatcgccacgctgcaggtgagaagcgcaccaaggaaccaggaggcaaagggaagaagaaccgaaatgtcaagattgggaagatcacagtgtcagagaagtggcgggaatcggtgttccgccagatcaccaacgccaatgagctcaagtacctggacgagttcctgctcaacaagataaatgacctccgttcccagaagacgcccattgagagcttgtttatcgaagccaccgagaagttcaggagcaacatcaaaacgatgtactctgtcccgaacgggaagatccacgtgggctacaaggatctgatggagaactaccagatcgtcgtcagcaacctggccactgagcgtggccagaaggacaccaacctggtcctcaacctcttccagtcactgctagatgagttcacccgtggctacaccaagaacgacttcgagccagtgaagcagagcaaagctcagaagaagaagcggaagcaggagcgtgctgtccaggagcacaacgggcacgtgttcgccagctaccaggttagcatcccgcagtcgtgcgagcagtgcctctcctatatctggctcatggacaaggccctgctctgcagcgtgtgcaagatgacctgccacaagaagtgcgtgcacaagattcagagccactgctcctacacctacgggaggaagggcgagccaggcgttgagcctggccacttcggcgtgtgcgtagacagcctgaccagcgacaaggcctcggtgcccatcgtgctggagaagctcctggaacacgtggagatgcacggcctgtacaccgagggcctctaccgcaagtcgggtgctgccaaccgcactcgggagctccggcaggcgctgcagacagaccccgcagcagtcaagctggagaacttccccatccacgccatcacaggggtgctgaagcagtggctgcgggagctgcccgagcccctcatgaccttcgcacagtacggcgacttcctccgagccgtcgagctgccggagaagcaggagcagctggctgccatctatgccgtcctggagcaccttccagaagccaaccacaactccctggagagactcatcttccaccttgtcaaggtggccctgctcgaggatgtcaaccgcatgtcacctggggcgctggccattatcttcgcaccctgcctcctgcgctgccctgacaactcggacccgctgaccagcatgaaggacgtcctcaagatcaccacgtgcgtggagatgctgatcaaggagcagatgaggaaatacaaagtgaagatggaggagatcagccaactggaggctgcagagagtatcgccttccgcaggctttcgctcctgcgacaaaatgctccatggcctctcaaactggggttttcgtctccctatgagggggtcctgaacaagagccccaagacccgggacatccaggaggaggagctggaggtgctgctggaggaggaggcagccggcggcgatgaggaccgggaaaaggagattctcattgaacggatccagtccatcaaggaggagaaggaggacatcacctaccggctgccggagctggacccaaggggctcggacgaggagaacctggactcggagacgtcggccagcaccgagagcctgctggaggagcgggccgggcggggggcctcggaagggccccctgcgcctgctctcccttgccccggcgcgcccaccccgagccccctccccaccgtggccgcccctccacgacgaaggccgtcgtccttcgtaacggtcagagtgaagaccccccggcggacccccatcatgcccacggccaacatcaagctcccaccaggcctgccctcccacctgcctcgctgggcaccgggtgcccgggaggcggctgccccagtgcggcgccgggagccacctgcccgccgcccggaccagatacattccgtgtacatcacgcccggggcagacctgccagtgcagggcgccctggagcccctagaagaggatggccagccacctggggccaagcggaggtactcggatcccccaacgtactgcctgccccccgcctcgggccagaccaatggctgagagccacagctgacaaagtctgcatgtccgaggacggcccctgcactggagctgggcgccagagctgcagagctagtgttcggccctcagagaaggatccagaatcaaaagctcaagagtgacgtgaggtgggcaccggccccaagtgcagagtcaaggcagggagaggccggctggagccaggccccctcgcacgcagcccccaaatcatggacgcacctgtggggagcaccacatctccacctgcggcctcacatctccccactcccctttttgtacgtttaactgtttctttgtacgtggtttacgtaactttaaactgtaacagccttaatggaagaccaaatggttttttatatgtgtatgtacaaagttttctattaacgctgcccgtctcccttataacctggacgtgagctgtcagagcagaagccactaggccactgcgcgtctgaggctcagaccctgctgtggttggcttggggtggccaatgggctgggaccctccatgagagttttggacacttgggtcacctgacccgtgcctctctgacacatgtctccggggggcagccacctggccaatgtgcatttttgcacatgctggaaccttccatgggggtctgggctattggctggagccaggacatgagtcaggggcaccatggacctcacgtgccagggagacttgaatgtggctgtcactcttccggacgccaagggctgcaggaggctgcttttggcactacccaccccgtgtgacagaataggagccagcgactcaggactgctcacgggtcaggagggcaacgcctgaagtcagacctccctataggtcaacagggacaacctggggatctctggagcagggccctcctctctcaggcttggcccactcccccagacacctggacacgtggccacaaatctgggacaaggggcccccgcacagcatgaaataaaaagtgcctgagaagtgtgtgcaaaaaaaaaaaaaaaaaaaaaaaaaaaaaa

SEQ ID NO: 29468 - DNA, 4121 bp, Homo Sapiens
ctgcgcctcgggggtcggcgtccaggctcggagcgcggcacggagacggcggcagcgctggactaggtggcaggccctgcatcatggaaactctttctaatgcaagtggtacttttgccatacgccttttaaagatactgtgtcaagataacccttcgcacaacgtgttctgttctcctgtgagcatctcctctgccctggccatggttctcctaggggcaaagggaaacaccgcaacccagatggcccaggcactgtctttaaacacagaggaagacattcatcgggctttccagtcgcttctcactgaagtgaacaaggctggcacacagtacctgctgagaacggccaacaggctctttggagagaaaacttgtcagttcctctcaacgtttaaggaatcctgtcttcaattctaccatgctgagctgaaggagctttcctttatcagagctgcagaagagtccaggaaacacatcaacacctgggtctcaaaaaagaccgaaggtaaaattgaagagttgttgccgggtagctcaattgatgcagaaaccaggctggttcttgtcaatgccatctacttcaaaggaaagtggaatgaaccgtttgacgaaacatacacaagggaaatgccctttaaaataaaccaggaggagcaaaggccagtgcagatgatgtatcaggaggccacgtttaagctcgcccacgtgggcgaggtgcgcgcgcagctgctggagctgccctacgccaggaaggagctgagcctgctggtgctgctgcctgacgacggcgtggagctcagcacggtggaaaaaagtctcacttttgagaaactcacagcctggaccaagccagactgtatgaagagtactgaggttgaagttctccttccaaaatttaaactacaagaggattatgacatggaatctgtgcttcggcatttgggaattgttgatgccttccaacagggcaaggctgacttgtcggcaatgtcagcggagagagacctgtgtctgtccaagttcgtgcacaagagttttgtggaggtgaatgaagaaggcaccgaggcagcggcagcgtcgagctgctttgtagttgcagagtgctgcatggaatctggccccaggttctgtgctgaccaccctttccttttcttcatcaggcacaacagagccaacagcattctgttctgtggcaggttctcatcgccataaagggtgcacttaccgtgcactcggccatttccctcttcctgtgtccccagatccccactacagctccaagaggatgggcctagaaagccaagtgcaaagatgagggcagattccttacctgtctgccctcatgatttgccagcatgaattcatgatgctccacactcgcttatgctacttaatcagaatcttgagaaaatagaccataatgattccctgttgtattaaaattgcagtccaaatcccataggatggcaagcaaagttcttctagaattccacatgcaattcactctggcgaccctgtgctttcctgacactgcgaatacattccttaacccgctgcctcagtggtaataaatggtgctagatattgctactattttatagatttcctggtgcttagccttataaaaaaggttgtaaaatgtacatttatattttatcttttttttttttttttttctgagacgcagtctggctctctgtcgcccaggctggagtgcagtggctcgatctctgctcactgcaagctccgcctcccgggttcacgccattctcctgcctcagcctcccgagtagctgggactacaggcgcccgccaccacgcccggctaattttttgtatttttagtagagacggggtttcaccgtgttagccaggatggtgtcgatctcctgacctcgtgatccacccgcctcggcctcccaaagtgctgggattacaggcttgagccaccgcgcccggctatattttatcttttatctttttctttgacatttaccaatcaccaagcatgcaccaaacactgctttaggcactggggacacaaaggggacagagccatcctcctttgacacctggtcttcagttctgtgcccaacgtatatagttttgacaatgaccaggttggactgtttaatgtctttcaacttaccacgtaatcctcttgtagggatcacatctttctttatgatattgtatttctctacctctaacagtaaaaattccattcaacccttaaagctcacttcaaattcttctttgagaagtttttcctttctccgcaaccagatgtacatatttgaactctctttgtacttggagggcacttctttcgtggtagttcttttatttttattaatctctgtatccttagatagtcctccaacaaccaaaggttgggactctgtcttacatatctgggtgcccctcatagtgcagtaataagtaagttgattatatacgagctatgtaacttatattttttaatggttggatatcactgagtttttttttttaagaatttttttattgaggtaaacttcacataacataaaattaactattttaaagtgagaagttcagtgccacttagtattgttaacaatgttgcataaccaccacctttatttaaagttccaaaaaaaatgttctcctctaaaaggaaaccccatcccattaagcagatactctccattccttccttcctccagcccccagcaaccaccaatctgctttctgtctctatggttttatctattcttgctattttatataaatcgaattgtatgagaccttttgtgtctggcttctttcacttagtacaagtttttgagatttatttacatagtagcatgtatcaacacttcatttttatggccaaataaaattgtattatgtgtttatagcacaatttatttatccactcattcattgatggactttgggttgtttctgacttttggctattgggaatagtgctgctatgaatgtttgtgtacctgtatttgtttgaatgcctattttgcattctcttgggtatatatctaggagtggaactgctgggtcatatgttaattctatgtttagctttttgaggaacagacaaactgttttccacagcagttgaaccattccacattcccaccagcaatgtatgagaattccaatttctgtccacttcctcaccaacacttattattttccttttcctttttttaaaaaaaataagttatggccatcttagtgggtgtgaagtggtatctcattgtgttttttatttgcatttcctatgtaatgagctagaaactaaagtacaaactagatgggacatccagtccctttgatagataatgctgagtaaaaaatgagatgaaagacatttgtttgtttttagaacatgagtgacagtttgttaaaaagctttagaggaggaatgaaaacaaagtgaagtacacttagaaaagggccaagtggacatcttggatgtcaagtgcctagttcagtatcttttttttttttttttttttttttgagacagtgcctcactctgtcacccaggctggagtgtagtggcatgatctgggctcactgcaacctcctcctcctggattcaagcaattctcttgcttcagcctcccaagtagctgagactacaagcacccaccaccacacccggctaattttgtatttttcagtagagacggggtttcgccacattggccgtgttggtcttgaactcctggcctcaagcaatccgcctacctcagcctcccaaagtgctaggattacaggcataagccactgagcccagccctagttcagtatcttttatgtaaattataaacatctgcaacattatgtatcatatgcagatacttattgcatttcttttattagtggtgaaagtgttctatgcatttattggctcttgaatttcctcatctatgaattgtcattcacacacctacttttctgcttcgtttttacatatgtctttgcctattaaagatattatccctctgttttatattttctctcattcttgtattgccttttaaattttgttatgatgtttcattaataaacagtgttttgttttcctctataaaaaaaaaaaaaaaa

SEQ ID NO: 29469 - DNA, 2381 bp, Homo Sapiens
gcccgtcggtccccgcggcggcggcggctgcccagtgacagcggcggcggtgccaggtcggccgtggtagcgtagggttgcgcggcccggaaacgcagagccggccaaagagcggcgcgacgtgagccggggccgtgcgcgaagagacctcgcgggcgcggagcgaaaggccggcgtgagtgagcgcggagacagtggccgccggcggcccaacccgtctatcccttcggccgccgccggcatgagccacatccagatcccgccggggctcacggagctgctgcagggctacacggtggaggtgctgcgacagcagccgcctgacctcgtcgaattcgcagtggagtacttcacccgcctgcgcgaggcccgcgccccagcctcagtcctgcccgccgccaccccacgccagagcctgggccaccccccgccagaacccggcccggaccgtgtcgccgacgccaaaggggacagcgagtcggaggaggacgaggacttggaagttccagttcctagcagatttaatagacgagtatcagtctgtgctgagacctataaccctgatgaggaagaggaagatacagatccaagggtgattcatcctaaaactgatgaacagagatgcagacttcaggaagcttgcaaagatattctccttttcaaaaatcttgatcaggaacagctttctcaagttctcgatgccatgtttgaaaggatagtcaaagctgatgagcatgtcattgaccaaggagatgatggagacaacttttatgtcatagaacggggaacttatgacattttagtaacaaaagataatcaaacccgctctgttggtcaatatgacaaccgtggcagttttggagaactagctctgatgtacaacaccccgagagctgctaccattgttgctacctcagaaggctccctttggggactggaccgggtgacttttagaagaatcatagtgaaaaataatgcaaagaagaggaagatgtttgaatcatttattgagtctgtgcccctccttaaatcactagaggtgtcagaacgaatgaagattgtggatgtaataggagagaagatctataaggatggagaacgcataatcactcagggtgaaaaggctgatagcttttacatcatagagtctggcgaagtgagcatcttgattagaagcaggactaaatcaaacaaggatggtgggaaccaggaggtcgagattgcccgctgccataaggggcagtactttggagagcttgccctggtcaccaacaaacccagagctgcctcagcttatgcagttggagatgtcaaatgcttagttatggatgtacaagcattcgagaggcttctggggccctgcatggacatcatgaagaggaacatctcacactatgaggaacagctggtgaagatgtttggctccagcgtggatctgggcaacctcgggcagtaggtgtgccacaccccagagccttcttagtgtgacaccaaaaccttctggtcagccacagaacacatacagaaaacagacatgacagaactgttcctgccgttgccgccactgctgccattgctgtggttatgggcatttagaaaacttgaaagtcagcactaaaggatgggcagaggttcaacccacacctccactttgcttctgaaggcccattcattagaccacttgtaaagattactccaacccagtttttatatctttggttcaaaacggcatgtctctccaacaatttaagtgcctgatacaaagtccaaagtataaacatgctcctttcctctcttgctgctactcttgcttttggaagttaccacagggtctgcagaaacctgttgtataactgtagacactctctaatggttctcaaaggaggaaatgtagccttcagtctcctcatttgtcctttgaggaagtccacatttgttcacagttgcagcctttggttttacagtgggaaatggtggtggatgatatggacatatgtagcccagtggcattgtactttctgctgacagctgcacacattacagctgtctccaaacccacagtgatgcttagggaaagaccctgctcaggacccagcaggtcagcaccccagagcagactgataggtccgtgggacccatgttagagcagaaaatttgggctcagcacattttactgttagtagagagccaggaaacgttttctgggttggggattttgtgggattttttaatttttttagtaggttttgtttaacctctgtgcagtttgtatgaatgaattgctatacatttataaggagccagggtctggagggttgctatcactttgtccagcccaaataccttcctgggcaactcctaccatttgtttgcagttgcct

SEQ ID NO: 29470 - DNA, 3540 bp, Homo Sapiens
ccgcggcgccgatcccggctgaggcgcagcggcgagaggtcgcgggcagggccatggccccggggggccgctagcgcggaccggcccaacgggagccgctccgtgccgccgccgccgcccgggcgcccaggccccgccgctgcggaagaggtttctagagagtggagcctgcttcctgggccctaggcccctcccacaatgcttgtcgccggtcttcttctctgggcttccctactgaccggggcctggccatccttccccacccaggaccacctcccggccacgccccgggtccggctctcattcaaagagctgaaggccacaggcaccgcccacttcttcaacttcctgctcaacacaaccgactaccgaatcttgctcaaggacgaggaccacgaccgcatgtacgtgggcagcaaggactacgtgctgtccctggacctgcacgacatcaaccgcgagcccctcattatacactgggcagcctccccacagcgcatcgaggaatgcgtgctctcaggcaaggatgtcaacggcgagtgtgggaacttcgtcaggctcatccagccctggaaccgaacacacctgtatgtgtgcgggacaggtgcctacaaccccatgtgcacctatgtgaaccgcggacgccgcgcccaggccacaccatggacccagactcaggcggtcagaggccgcggcagcagagccacggatggtgccctccgcccgatgcccacagccccacgccaggattacatcttctacctggagcctgagcgactcgagtcagggaagggcaagtgtccgtacgatcccaagctggacacagcatcggccctcatcaatgaggagctctatgctggtgtgtacatcgattttatgggcactgatgcagccatcttccgcacacttggaaagcagacagccatgcgcacggatcagtacaactcccggtggctgaacgacccgtcgttcatccatgctgagctcattcctgacagtgcggagcgcaatgatgataagctttacttcttcttccgtgagcggtcggcagaggcgccgcagagccccgcggtgtacgcccgcatcgggcgcatttgcctgaacgatgacggtggtcactgttgcctggtcaacaagtggagcacattcctgaaggcgcggctcgtctgctctgtcccgggcgaggatggcattgagactcactttgatgagctccaggacgtgtttgtccagcagacccaggacgtgaggaaccctgtcatttacgctgtctttacctcctctggctccgtgttccgaggctctgccgtgtgtgtctactccatggctgatattcgcatggtcttcaacgggccctttgcccacaaagaggggcccaactaccagtggatgcccttctcagggaagatgccctacccacggccgggcacgtgccctggtggaaccttcacgccatctatgaagtccaccaaggattatcctgatgaggtgatcaacttcatgcgcagccacccactcatgtaccaggccgtgtaccctctgcagcggcggcccctggtagtccgcacaggtgctccctaccgccttaccactattgccgtggaccaggtggatgcagccgacgggcgctatgaggtgcttttcctgggcacagaccgcgggacagtgcagaaggtcattgtgctgcccaaggatgaccaggagatggaggagctcatgctggaggaggtggaggtcttcaaggatccagcacccgtcaagaccatgaccatctcttctaagaggcaacaactctacgtggcgtcagccgtgggtgtcacacacctgagcctgcaccgctgccaggcgtatggggctgcctgtgctgactgctgccttgcccgggacccttactgtgcctgggatggccaggcctgctcccgctatacagcatcctccaagaggcggagccgccggcaggacgtccggcacggaaaccccatcaggcagtgccgtgggttcaactccaatgccaacaagaatgccgtggagtctgtgcagtatggcgtggccggcagcgcagccttccttgagtgccagccccgctcgccccaagccactgttaagtggctgttccagcgagatcctggtgaccggcgccgagagattcgtgcagaggaccgcttcctgcgcacagagcagggcttgttgctccgtgcactgcagctcagcgatcgtggcctctactcctgcacagccactgagaacaactttaagcacgtcgtcacacgagtgcagctgcatgtactgggccgggacgccgtccatgctgccctcttcccaccactgtccatgagcgccccgccacccccaggcgcaggccccccaacgcctccttaccaggagttagcccagctgctggcccagccagaagtgggcctcatccaccagtactgccagggttactggcgccatgtgccccccagccccagggaggctccaggggcaccccggtctcctgagccccaggaccagaaaaagccccggaaccgccggcaccaccctccggacacatgaggccagctgcctgtgcctgccatgggccagcctagcccttgtcccttttaatataaaagatatatatatatatatatatatatatataaaatatctatattctatacacaccctgcccctgcaaagacagtatttattggtgggttgaatatagcctgcctcagtggcagcatcctccaaaacttagacccatgctggtcagagacggcagaaaacagagcctgcctaaccaggcccagccagttggtggggccaggccaggaccacacagtccccagactcagctggaagtctacctgctggacagcctccgccaagatctacaggacaaagggagggagcaagccctactcggatggggcacggactgtccaccttttctgatgtgtgttgtcagcctgtgctgtggcatagacatggatgcgaggaccactttggagactggggtggcctcaagagcacacagagaagggaagaaggggccatcacaggatgccagcccctgcctgggttgggggcactcagccacgaccagccccttcctgggtatttattctctatttattggggataggagaagaggcatcctgcctgggtgggacagccccttcagccccttctcccctccccgcctggccagggcagggccaccccactctacctccttagctttccctgtgccactttgactcagaggctgggagcatagcagaggggccaggcccaggcagagctgacgggaggccccagctctgaggggagggggtccgtggtagaggcctggggccggtagaggctccccagggctcccttatgtccaccacttcaggggatgggtgtggatgtaattagctctggggggcagttgggtagatgggtgggggctcctggtggccttctgctgcccaggccacagccgcctttgggttccatcttgctaataaacactggctctgggactagaaaaaaaaaaaaaaaaaaaaa

SEQ ID NO: 29471 - DNA, 5911 bp, Homo Sapiens; identical to SEQ ID NO: 28854

SEQ ID NO: 29472 - DNA, 1214 bp, Homo Sapiens
gtctacaccccctcctcacacgcacttcacctgggtcgggattctcaggtcatgaacggtcccagccacctccgggcagggcgggtgaggacggggacggggcgtgtccaactggctgtgggctcttgaaacccgagcatggcacagcacggggcgatgggcgcgtttcgggccctgtgcggcctggcgctgctgtgcgcgctcagcctgggtcagcgccccaccgggggtcccgggtgcggccctgggcgcctcctgcttgggacgggaacggacgcgcgctgctgccgggttcacacgacgcgctgctgccgcgattacccgggcgaggagtgctgttccgagtgggactgcatgtgtgtccagcctgaattccactgcggagacccttgctgcacgacctgccggcaccacccttgtcccccaggccagggggtacagtcccaggggaaattcagttttggcttccagtgtatcgactgtgcctcggggaccttctccgggggccacgaaggccactgcaaaccttggacagactgcacccagttcgggtttctcactgtgttccctgggaacaagacccacaacgctgtgtgcgtcccagggtccccgccggcagagccgcttgggtggctgaccgtcgtcctcctggccgtggccgcctgcgtcctcctcctgacctcggcccagcttggactgcacatctggcagctgaggagtcagtgcatgtggccccgagagacccagctgctgctggaggtgccgccgtcgaccgaagacgccagaagctgccagttccccgaggaagagcggggcgagcgatcggcagaggagaaggggcggctgggagacctgtgggtgtgagcctggccgtcctccggggccaccgaccgcagccagcccctccccaggagctccccaggccgcaggggctctgcgttctgctctgggccgggccctgctcccctggcagcagaagtgggtgcaggaaggtggcagtgaccagcgccctggaccatgcagttcggcggccgcggctgggccctgcaggagggagagagagacacagtcatggcccccttcctcccttgctggccctgatggggtggggtcttaggacgggaggctgtgtccgtgggtgtgcagtgcccagcacgggacccggctgcaggggaccttcaataaacacttgtccagtgaaaaaaaaaaaaaaa

SEQ ID NO: 29473 - DNA, 4609 bp, Homo Sapiens
gggaccatgtaccgggacccggaggcggccagcccaggggcgccctcgcgcgacgtcctgctggtctctgccatcatcaccgtcagccttagcgtcactgtcgtcctctgcggcctctgccactggtgtcagcgcaaactgggcaaacgctacaagaattccttggagacggtgggcacgccagactcagggcgtgggcgcagtgagaagaaggctatcaagttgcctgcaggagggaaggcggtgaacacagcccccgtgccaggccagacaccccacgatgagtccgaccgccggaccgagccacgttcctccgtctcagacctcgtcaactccctcaccagcgagatgctcatgctctccccaggctccgaggaggatgaggcccacgagggttgcagccgagagaacctgggccggatccagttcagtgtcggctacaacttccaggagtccacgctcaccgtgaagatcatgaaggcccaggagctgccggccaaggacttcagcggcaccagcgaccccttcgtcaagatttacctgctgcccgacaagaagcacaagctggagaccaaggtgaagcggaagaacctgaacccccactggaacgagaccttcctctttgaaggttttccctatgagaaggtggtgcagaggatcctctacctccaagtcctggactatgaccgcttcagccgcaacgaccccattggggaggtgtccatcccccttaacaaggtggacctgacccagatgcagaccttctggaaggatctgaagccatgcagcgatgggagtgggagccgaggggagctgctcttgtctctctgctacaacccctctgccaactccatcatcgtgaacatcatcaaagcccggaacctcaaagccatggacatcgggggcacatcagacccctacgtgaaggtatggctgatgtacaaggacaagcgggtggagaagaagaagacggtgacgatgaagaggaacctgaaccccatcttcaatgagtccttcgccttcgatatccccacggagaagctgagggagacgaccatcatcatcactgtcatggacaaggacaagctcagccgcaatgacgtcatcggcaagatctacctgtcctggaagagcgggccaggggaggtgaagcactggaaggacatgattgcccgtccccggcagcccgtggcccagtggcaccagctgaaggcctgagtggggccaagggaggcccagggggccgagggcccaggtccccatcatgccctcaccactttatgcacaacgcccggcctgagccccctgccatagggaggggaggaccctgagggctcagccagggaggggtcccaggactcaactgggccccgtttctaggaagtaccagccccatcccccacagtccagctccggggaaggggctctgggaggcattttcctgctttgccccttttcttcctgacttactaatactaaagaagttgggggagctcgagagccagacggccagacaggcagacccctccagaggcccgccaggtgggcatggtcccccattttctttaaggcagcacctggagtggagagaggccactccctctccagcccccgatgtggacccggggaggggaggctgaggcgtttggccccggcctggccaggagaggcccatccccagggcagtttcaggtgccggctgggccctgaatgtcgaggatagtatatagcccgctcctgggtcctggagctgtggccctttgtactcgtgttgtgtccattgtgtgtgtgcgtggggacagaggcctggaaatgcggaggactatacagagaaggcaggttttgtgaaggccaggcagggttggaggccgggggtgtgagaggagaggcccatagggctgagtggggtcgggtgaggcagaggtcagaaacagaagagctgcagttgctggagctgggctgagaactgggctgcctcctgccatccccccgtctcctccccttctccccttggtgcccccctctgctcagaatctgaagtagttccctcctcagcaatttcatctcttgaacactgactcacaccttttaggcacctactgtgtgcatagcattccaccaggactcatctcccttccttctcagggggtcccgagccccgactagctttgccctaactccttcatcaaaagaccccccgccagcttcccacacctcatacgcagccacatctgccctattctccatgctttccagcttgcctgcccttcctcatctctccctgcctgtgcagacctccacccttctttcctccacccctccatcccccaatgcttgtagaccttccattcattccgtctcatcgtgcgtggtctctgatcgtccatcacctgaccttctccaggactgtcttctcacccttccccactccctggtccccgggagcagctccttctgcccgactcactcacagtgcagggaaaggaggcagggaaaagaccaggattctgtgagttctgaggttgccacacacaaagaagctgtggtttctctgcctcggccactgatgagactaaaactggcttccccttggagacggcagatttcaggctgatccctgcttaagccctctcatccccacgctggtcctggtattgatacaagacccagctggtgacaaagcctccaatcctgggggtccacgagcctgggcctgacattcccagaactaccgccaggtggcgccaggcccccacagtctgtggccgtggtcttagcccccagttccactctggatgggcctgtgacaccccaaagagaagaaggggactctggatagggtccccacatccagggcgtggggagaccattggcatttgggaaccattttccttcgaacggcttccccttgagctgagcattctgcttgctgcagtagacgggtcgccttttgcccataccgaaattttctgaaattaaatcgcacacccccaccatttcctctccctgggatctggaggaacatcatacatagtaggtgaatcgttttgtagagtgaagaatgctaatgtaaagcaaatagtcacccacgttccttgtaaatccaaatgtttctatattgtagctttgcttaaaatggggtcggccccaactgcatcctcctctttggcgggctggggagcggcccccagccgggacgggagggcagcgaccccgaggcctcgtggacgtgggagagagtgtggtgggaagtcttgagcggaggaggggatctgcccttctccactcctctcttggatccgcctcggtttcctgtccccccaccacccgcctgccccgcggaagaccgcccagtgagccagcccccaccttccaggcgccttcgccctggggatccaaccaacttgtatcgagtgggcggggcaacggctccccatttttcccgagccccgcccacagagctcttagccaatcctatgcagagagcatctcctggcaggggtctcttcccaaccagaccccacccaggcacattagcgaccaggcttgggcttccccagcgccccaccaccaccacgtgcaggtggagctctgggatgctatgttggggcggcaagcggtgggccgagggccgggtaggctagcacgggaggtaagggtggtatgggatggggcgggggcggtctagggcaataggagagcagagaatgggggaacttgagggtggggggagggcaccggagccttgccaccatcccaggactttgggcaagtcacccgcactccctgggcctcggtttccccatctgtaaaatgatggtaataatacttcacctacctcataggggaggttgtgaggccaccatcacctgacctgggggtcaaggcaggaggactccgaaggtgctacccgtgagcaaagtgtaattaccgaatcctgactgcaaggcccacctgcccctcccccacagagcctccagagctagctgaggccaacgcaggcccatccgtctcttcactctgtcgcaggccctttcatgggcttcgtctgccatctttgtgggtgccctagacttagtccttatcttgtcctggtttcctttcttgtgaccatctccccatgaaagtgctgtacaaattccacccgccccaggacccccgcacctgccctctggcaccagatgccagggaagggacagaggaaaacagccacaaacaagccaggggggctccccggagccccaggggtggggattggtggccactgtttgtatgttcttgagtgcaagtgttttataaaaaataaaacaaaaacccaccatcacaaaaaaaaaaattttgcagcgaagagaaatgaagaaaaactgaagaaaaaaaaaaaacaggaaaaaaagaaccatacaaaatttttccaccacacataccctctaagccagcaagatttcctctttgcaaaatcatatttttgtgggaatgggccctgctttttgtggcaaggcctgttctgattaataaaggatcgtgaaaaagtaaaaaaaaaaaaaaaaaaaaaaaaaaaaaaaaaaaaaaaaaaaaaaaaaaaaaaaaaaaaaaaaaaaaaaaaaaaaaa

SEQ ID NO: 29474 - DNA, 1702 bp, Homo Sapiens
tgggaacagacagatcctttgttctgaggctcactcatctcccgagccccgagccgtctcccagcctcagacggctctgcgggctgcatctgtgcagcctggcagcggcggcgctgcgctgtgacattttcacagcccttcttgcagaggcatgtgtgctagggatgccgaaatgccgagagcgccggcaggactagcttccgggccgcgctttgtgtgctgggctgcagtgtggcgcgggcgaggaagctggtagggcggttgtcgcaagctccagctgcagcctccgcctacgtgagaagactagaaagcgggcgcaggaccaggcctgcgttgtttgcagagaggccgtggctacaaaatggaagtgcttttgcgacctgggctccattttaggaattcttgcccgattttaaccacttgaacgcggaagtggctttcctattctcttccaagccagcctttaattttaaacgctgtaattaacagttcacaggggtcaaattcctttattccggaacattccactttgagagggatctgtcctctttggtcccctgcgttttcaaatatttgaggaaaggtgtcgcctctttttctgtggaaagaggaagctcatgagcgcgaaacagcaggggacggagggcgagaagggctttctcaggttgcgggtcggagggcagaagcacagttcccagtacagagacccggacaggtggctgtttctcacgctcactttggattgctccctacggcttcctccgcagccatgtctgacaaacctggtatggctgagatcgagaaattcgataagtcgaaactgaagaagacagaaacgcaagagaagaatccattgtcttccaaagaaactatcgaacaggagaggcaagcaggcgaatcttaaacaggcatgtgccaccaatatctactgtacattctacaagcattgctttcttattttacttcttttacttgtttaacttggttagatgcaaacacgttggatgagtttgaaaggactatgctgcccttttgacatcaaagacctgctgacaatggaggccacgcctgcttctcccatcgcctgtctggctggcagggaaggaaaatagcttgaatgttggtgaaagacttagcggagtgggagggcagtgaaatctagagtaaaaccaagttgggccaagtgtcctgcagaatctaaaatgaagtttaatcagcgtgccatttttgttgttgtttgaaagattttaatttttggaatgcacagtttttatttaaaaaagacatttttaaaccactgcttgtgagattgcttgttgattggaaagagtgttttattcaccatttaaacgtttgcaaagtggcgtgccccttggcctcacaggcaaagaataacttaaaagctgacgatttgaataaattatgttacagtatgaaatatgttttacctggatatgtaaaataccttctttattctagctaattgggagatgattttttttggctaattgagattacctttagattatgttttcaaaactggcttatactgtaatctacaactaataagcactaatttagagttcagctatattgttgcatgtagtgagaagggacttaattacaaacttaagacgtaagtgtgcaataaagtaagctaagaagaaaaaaaaaaaaaaaaaaaaaaaaaaaaaaaaaaaaa

SEQ ID NO: 29475 - DNA, 2633 bp, Homo Sapiens
gatttcccggggaggtcccttctgggcccccggcggaggtgggagagagtcaggcaggagccgaggccggggagccctcttcgtcagctggtgctcactgcgccgcgccagcgccagccgggactcacccgcagctccatgcttgtgcccggttcgactcgtccatcctccaagaagaggcagcccatgaggctcccagtccccactgagtgccaccctgaaggatgtcccagctctcctccaccctgaagcgctacacagaatcggcccgctacacagatgcccactatgccaagtcgggctatggtgcctacaccccgtcctcctatggggccaatctggctgcctccttactggagaaggagaaacttggtttcaagccggtccccaccagcagcttcctcacccgtccccgtacctatggcccctcctccctcctggactatgaccggggccgccccctgctgagacccgacatcactgggggtggtaagcgggcagagagccagacccggggtactgagcggcctttaggcagtggcctcagcgggggcagcggattcccttatggagtgaccaacaactgcctcagctacctgcccatcaatgcctatgaccagggggtgaccctaacccagaagctggacagccaatcagacctggcccgggatttctccagcctccggacctcagatagctaccggatagaccccaggaacctgggccgcagccccatgctggcccggacgcgcaaggagctctgcaccctgcaggggctctaccagacagccagctgccctgaatacctggtcgactacctggagaactatggtcgcaagggcagtgcatctcaggtgccctcccaggcccctccctcacgagtccctgaaatcatcagcccaacctaccgacccattggccgctacacgctgtgggagacgggaaagggtcaggcccctgggcccagccgctccagctccccgggaagagacggcatgaattctaagagtgcccagggtctggctggtcttcgaaaccttgggaacacgtgcttcatgaactcaattctgcagtgcctgagcaacactcgggagttgagagattactgcctccagaggctctacatgcgggacctgcaccacggcagcaatgcacacacagccctcgtggaagagtttgcaaaactaattcagaccatatggacttcatcccccaatgatgtggtgagcccatctgagttcaagacccagatccagagatacgcaccgcgctttgttggctataatcagcaggatgctcaggagttccttcgctttcttctggatgggctccataacgaggtgaaccgagtgacactgagacctaagtccaaccctgagaacctcgatcatcttcctgatgacgagaaaggccgacagatgtggagaaaatatctagaacgggaagacagtaggatcggggatctctttgttgggcagctaaagggctcgctgacgtgtacagattgtggttactgttctacggtcttcgaccccttctgggacctctcactgcccattgctaagcgaggttatcctgaggtgacattaatggactgcatgaggctcttcaccaaagaggatgtgcttgatggagatgaaaagccaacatgctgtcgctgccgaggcagaaaacggtgtataaagaagttctccatccagaggttcccaaagatcttggtgctccgtctgaagcggttctcagaatccaggatccgaaccagcaagctcacaacatttgtgaacttccccctaagagacctggacttaagagaatttgcctcagaaaacaccaaccatgctgtttacaacctgtacgctgtgtccaatcactccggaaccaccatgggtggccactatacagcctactgtcgcagtccagggacaggagaatggcacactttcaacgactccagcgtcactcccatgtcctccagccaagtgcgcaccagcgacgcctacctgctcttctacgaactggccagcccgccctcccgaatgtagcgccaggagccacgtcccttctcccttccccgtggtggccccgctccctaaattttttaaaaagacaaaaacaaaacaacaacaacaacacacaaacctgacaagagaaaaacaaacctgaagctgccgagcaggagtggatgcagcctgatcagggtctggagcaaggagccgggctttcctgagctgtggcccggcagggaagatcgcctggacgtggagccagcatcgccccgtgccctcggcgtttgcatttgtaaacttgtggtcttcctatgtgtcagaaacaactgtgtcttgggggggaagaccctcgctgcgccgcttcccgccgcagcgcccgcgcctccgaggggacagcgccctctggagctcgctgggagcatcaccgcctggacgcccgcgccgcggaggagccggcgcccatctccacccgcacggctcgccggtccagagccatgagccaagagccctcttcacgctgctaactccaggggacagacgaagggacatctttggaaaacgctggttttggtttttaaaaagcccaacttttttttttaatttccataactaaagtgttcagactgg

SEQ ID NO: 29476 - DNA, 2215 bp, Homo Sapiens
ttccccggctctagcaggccggcttctctgtccaatgcccacccggagctgggaggaggagtctgcgtaatgtgcgtgtgaagagactgggggagctggccggggctcacggtgtttgacccgtcggtcgtgcgtgagaggaaagggaaggaggaggtcccgaatagcggtcgccgaaatgttccggtgtggaggcctggcggcgggtgctttgaagcagaagctggtgcccttggtgcggaccgtgtgcgtccgaagcccgaggcagaggaaccggctcccaggcaacttgttccagcgatggcatgttcctctagaactccagatgacaagacaaatggctagctctggtgcatcagggggcaaaatcgataattctgtgttagtccttattgtgggcttatcaacagtaggagctggtgcctatgcctacaagactatgaaagaggatgaaaaaagatacaatgaaagaatttcagggttagggctgacaccagaacagaaacagaaaaaggccgcgttatctgcttcagaaggagaggaagttcctcaagacaaggcgccaagtcatgttcctttcctgctaattggtggaggcacagctgcttttgctgcagccagatccatccgggctcgggatcctggggccagggtactgattgtatctgaagatcctgagctgccgtacatgcgacctcctctttcaaaagaactgtggttttcagatgacccaaatgtcacaaagacactgcgattcaaacagtggaatggaaaagagagaagcatatatttccagccaccttctttctatgtctctgctcaggacctgcctcatattgagaatggtggtgtggctgtcctcactgggaagaaggtagtacagctggatgtgagagacaacatggtgaaacttaatgatggctctcaaataacctatgaaaagtgcttgattgcaacaggaggtactccaagaagtctgtctgccattgatagggctggagcagaggtgaagagtagaacaacgcttttcagaaagattggagactttagaagcttggagaagatttcacgggaagtcaaatcaattacgattatcggtgggggcttccttggtagcgaactggcctgtgctcttggcagaaaggctcgagccttgggcacagaagtgattcaactcttccccgagaaaggaaatatgggaaagatcctccccgaatacctcagcaactggaccatggaaaaagtcagacgagagggggttaaggtgatgcccaatgctattgtgcaatccgttggagtcagcagtggcaagttacttatcaagctgaaagacggcaggaaggtagaaactgaccacatagtggcagctgtgggcctggagcccaatgttgagttggccaagactggtggcctggaaatagactcagattttggtggcttccgggtaaatgcagagctacaagcacgctctaacatctgggtggcaggagatgctgcatgcttctacgatataaagttgggaaggaggcgggtagagcaccatgatcacgctgttgtgagtggaagattggctggagaaaatatgactggagctgctaagccgtactggcatcagtcaatgttctggagtgatttgggccccgatgttggctatgaagctattggtcttgtggacagtagtttgcccacagttggtgtttttgcaaaagcaactgcacaagacaaccccaaatctgccacagagcagtcaggaactggtatccgatcagagagtgagacagagtccgaggcctcagaaattactattcctcccagcaccccggcagttccacaggctcccgtccagggggaggactacggcaaaggtgtcatcttctacctcagggacaaagtggtcgtggggattgtgctatggaacatctttaaccgaatgccaatagcaaggaagatcattaaggacggtgagcagcatgaagatctcaatgaagtagccaaactattcaacattcatgaagactgaagccccacagtggaattggcaaacccactgcagcccctgagaggaggtcgaatgggtaaaggagcatttttttattcagcagactttctctgtgtatgagtgtgaatgatcaagtcctttgtgaatattttcaactatgtaggtaaattcttaatgttcacatagtgaaataaattctgattcttctaaattaaa

SEQ ID NO: 29477 - DNA, 2459 bp, Homo Sapiens
tccttcactgaggagccagagggaatcaattccccaagctgggttgaggagaacaggagatggagaaagcaagtggaagacagtccattgctctgtccacagtggagactggcacagtgaacccggggctggagctcatggaaaaagaagtagagcctgagggaagcaagaggactgacgcacaaggacacagcctgggggatggactgggcccttccacttaccagaggaggagtcggtggcctttcagcaaagcaagaagtttctgcaaaacacacgccagattgttcaagaagatcctgttgggcctgttgtgtttggcctatgctgcctatctcctggcagcttgcatcttgaatttccagagggcactggccttgtttgtcatcacctgcttggtgatctttgtcctggttcactcgtttttgaaaaagctcctgggcaaaaaattaacaagatgtctgaagccctttgaaaactcccgcctgaggctttggacgaaatgggtgtttgcaggagtctccttggttggccttatactgtggttggctttagacacagcccaaaggccagagcagctgatcccctttgcaggaatctgcatgttcatccttatcctctttgcctgctccaaacaccacagcgcagtgtcctggaggacagtgttttcgggcctaggtcttcaatttgtctttgggatcttggtcatcagaactgatcttggatatactgtatttcagtggctgggagagcaggtccagattttcctgaactacactgtggccggctccagttttgtctttggggatacactggtcaaggatgtctttgcttttcaggccttaccaatcatcattttctttggatgtgtggtgtccattctctactacctgggcctggtgcaatgggtagttcagaaggtcgcctggtttttacaaatcactatgggcaccactgctacagagaccctggctgtggcaggaaacatctttgtgggtatgacagaggcacctctgctcatccgtccctaccttggggacatgacactctctgaaatccatgcggtgatgactggagggtttgccaccatttctggcactgtgctgggagccttcatagcctttggggttgatgcatcatccctgatttctgcctctgtgatggccgccccttgtgctctcgcctcatcaaagctagcgtatccggaagtggaggagtccaagttcaagagtgaggagggggtaaagctgccccgtgggaaggagaggaatgtcctggaagctgccagcaacggagccgtagatgccataggccttgctactaatgtagcagccaacctgattgcctttttggctgtgttggccttcatcaatgctgccctctcctggctgggggaattggtggacatacaggggctcactttccaggtcatctgctcctatctcctaaggcccatggttttcatgatgggtgtagagtggacagactgtccaatggtggctgagatggtgggaatcaagttcttcataaatgagtttgtggcttatcagcaactgtctcaatacaagaacaaacgtctctctggaatggaggagtggattgagggagagaaacagtggatttctgtgagagctgaaatcattacaacattttcactctgtggatttgccaatcttagttccataggaatcacacttggaggcttgacatcaatagtacctcaccggaagagtgacttgtccaaggttgtggtcagggccctcttcacaggggcctgtgtatcccttatcagtgcctgtatggcaggaatcctctatgtccccaggggagctgaagctgactgtgtctccttcccaaacacaagtttcaccaatagaacctatgagacctacatgtgctgcagagggctctttcagagtacttctctgaatggcaccaaccctccttctttttctggtccctgggaagataaggagttcagtgctatggcccttactaactgctgtggattctacaacaataccgtctgtgcctaaggctgcttgatctatttctataacagttttgatcttaaaagctttgtgattgcaaaggtgtttatgtactcagggtgcccacaactcactcaccaagatgtttaacagtaagtaacagtaaatgtaaaagattcattttgggccgggctcagtggctcacgcctgtaatcccagcgctttgggaggccgaggcgggcggatcgcagggtcaggagatcgagaccatcctggctaacacggtgaaaccccgtctctactaaaggtacaaaaaattggccgggagtggtgtcgggcgactgtagtcccagctactcgcgagactgaggcaggagaatggcgtgaatccgggaggcggagcttgcagcgagccgggatcgcgccactgtactccagcctgggtgacagagcgagactctgtctcag

SEQ ID NO: 29478 - DNA, 3082 bp, Homo Sapiens
ttccgctccaggaaggcgaggtcggatctgagatatctcccagggaggttcacttccccggaactctgccttttcccagaaggaggaggggaaaaatgaccaagttccaggaggcagtgacattcaaggatgtggctgtggccttcactgaggaggagctggggctgctggactctgcccagaggaagctgtaccgagatgtgatgctggagaactttaggaacctggtttcagtgggacatcagtccttcaaaccagatatgatatcccagttggagagggaagaaaagctttggatgaaggagcttcaaacccaaagaggtaagcattcaggagacaggaatcaaaatgagatggcaactcttcacaaagcaggattaaggtgcttttcactgggagagctttcatgctggcaaatcaagagacacattgcgagcaaattagccagaagtcaagactccacgataaatattgaaggaaagagctctcagttccccaagcaccatgattccccctgtcaagtgggagcaggagaatctattcaagcttctgtggatgacaactgtctagtgaatcacataggggatcattccagtatcattgaaaatcaagaatttccaactgggaaagttccgaattcttggagtaaaatatatctgaatgagacacagaattatcagagaagttgtaagcagactcagatgaaaaacaaactatgtatatttgctccatatgttgacattttcagttgtatttcacaccaccatgatgataatatagtgcacaaaagagataaagttcatagcaatagtgattgtggtaaagataccctaaaggtatcacctcttacccagcgtagtattcacacaggacagaaaacctaccagggtaatgaatgtgaagaagccttcaatgatagctccagtcttgaacttcataaacaggtacacttgggaaagaagtctccagcgtgtagtacacatgagaaggacaccagttatagctcaggtattcctgttcaacaaagtgttcgtactgggaaaaaacgctattggtgtcatgaatgtggtaaaggtttcagtcagagctcaaatctgcaaactcatcagagagtccacacaggggagaaaccctatacatgccacgagtgtggtaagagctttaatcagagctcacatctttatgctcatttgcctattcacacaggagagaaaccctatagatgtgacagttgtgggaagggcttcagtcgtagcacagatcttaacattcattgcagagttcacactggagagaaaccttataaatgtgaggtgtgtgggaagggcttcactcagagatcacatcttcaggcccatgaaagaattcacactggagagaaaccatataaatgtggggattgtggtaaacgctttagttgtagctcaaatcttcatacccatcagagagtccacactgaagaaaaaccatacaaatgtgatgagtgtggtaagtgctttagtttgagctttaatcttcatagtcatcaacgagtccacacaggagaaaaaccatataaatgtgaagagtgtggtaagggttttagttcagcctcaagtttccagagccatcagagggtccatacaggagagaaaccatttcgatgcaacgtgtgtgggaaaggcttcagtcagagttcatactttcaagcacatcagagagtccacactggagaaaaaccatacaaatgtgaagtgtgtgggaagcgcttcaattggagcttgaatcttcacaatcatcagagagtccacaccggagagaaaccctacaaatgtgaagagtgtggtaagggtttcagtcaggcttcaaatcttcaagcccatcagagcgtccacactggggaaaaaccattcaagtgtgatgcatgtcagaagcgattcagtcaggcctcacaccttcaagcccatcagagagtccacaccggagagaaaccatataaatgtgacacttgtggtaagcccttcagccagaggtcaaatcttcaagtccatcagataattcacactggagagaaaccatttaaatgtgaggaatgtgggaaagaattcagttggagtgctggtctcagtgcccatcagagggtccacacaggagagaaaccctatacgtgtcagcagtgtgggaagggcttcagtcaggcctcacattttcacacacaccagagagtccacactggagagaggccttacatatgtgatgtctgttgtaagggcttcagtcagaggtcacatctcatctaccatcagagagtccacactggagggaatctgtagaaatgagaggtgtggttcagccttcagttagagctcacatctttgtctccgttgggaagtccatgctgatgattgtgaaaagttcctttaaaactagagcttcaaagaatcttgacaggaaagaagtctctcaaatgctgtgttttagacttggttaggacatgaattctttacaaacgtcatatttcacagatgcgagaaaactttgttctgtaaatatgatcagtgtttatatcagagtaccaggtgtcccggttctcaagatgtaacacagcagaaaagtcttgtcggagtctgcacaggagagaggccttcctttaacaaaagtatgattgacagaaaaaatggatgtcaactaaaatgtaacctctatgtaaggaggtgtttttcaccactctatctctaccatgtagaattgtgcttggctcataatagggcccagcaattactgaagaaagtgaagaaaatacctataattaggacaaatacttgaaaattctagtctgttttctactctaaatttatattaatttatattcaaaaggaatcctgcaagtagccttaataacgttagtttcagtaagtactgaaaagtatataatactgccatccatactaacacaaatttggaaaaaagacatgaatggctcccatccttcagccttagttctttgtacagtgtatcatcagttgtgtacagtatgatttttagtgtcagtttatagactgaacaatactgtttttatctaatgtgaccctgcaatttacat

SEQ ID NO: 29479 - DNA, 3240 bp, Homo Sapiens; identical to SEQ ID NO: 23916

SEQ ID NO: 29480 - DNA, 3703 bp, Homo Sapiens
acggatataagattgcgtgggttctgcctaaagctgaattcccagcgctttggcttctctgagttggggttgtgtataggggtcttcgaacagttccggaaccagccagcagcctttaattcttgggcggaccacggccggttctgtgttcttggctaagatgagcagccaccataccacctttccttttgaccctgagcggcgagtccggagtacgctgaagaaggtctttgggtttgactcttttaagacgcctttacaggagagtgcgaccatggctgtagtaaaaggtaacaaggacgtctttgtgtgcatgcccacaggggcaggaaaatccctatgctatcagctccctgctctgttggccaaaggcatcaccattgtagtctctcctctcattgctttgattcaggaccaagtggaccacttgctaaccctaaaggtacgagtaagttccctgaactcgaagctctctgcacaggaaaggaaggagctgcttgctgacctggagcgagaaaagccccagaccaagattctgtacatcaccccagagatggcagcttcatcctccttccagcccaccctgaactccctggtgtcccgccacctgctgtcttacttggtggtggatgaagctcattgtgtttcccaatgggggcatgactttcgtcctgactacttgcgtctgggtgccctgcgctcccgcctgggacatgccccttgtgtggctctgaccgccacagccaccccacaggtccaagaggacgtgtttgctgccctgcacctgaagaaaccagttgccatcttcaagactccctgcttccgggccaacctcttctatgatgtgcaattcaaggaactgatttctgatccctatgggaacctgaaggacttctgccttaaggctcttggacaggaggctgataaagggttatctggctgcggcattgtgtactgcaggactagagaggcttgtgaacagctggccatagagctcagctgcaggggtgtgaacgccaaggcttaccatgcagggctgaaggcctctgaaagaacgctggtgcagaacgactggatggaggagaaggtccctgtaattgttgcaaccattagttttgggatgggagtggataaagccaatgtcaggtttgtcgcccattggaatattgccaagtctatggctgggtactaccaggagtctggccgggctggcagggatgggaagccttcctggtgccgtctctattactccaggaatgaccgggaccaagtcagcttcctgatcaggaaggaagtagcaaaactccaggaaaagagaggaaacaaagcatctgataaagccactatcatggcctttgatgccctggtgaccttctgtgaagaactggggtgccgccatgccgccattgccaagtacttcggggatgcgctgcctgcctgcgccaaaggctgcgaccactgccagaaccccacggccgtgcggaggcggctggaggccttggagcgcagcagcagctggagcaagacctgcatcgggccctcccaggggaacggctttgaccccgagctgtacgagggaggccgcaagggctacggggacttcagcaggtatgacgaaggttctggaggcagcggggatgaaggcagagatgaggcccacaagcgggagtggaacctcttctatcagaagcagatgcagctgcgcaagggcaaagaccccaagatagaagaatttgtacccccagatgagaactgtcccctgaaagaggcttctagcaggaggatccccaggctgactgtgaaggcacgggagcactgcctgcggcttctggaggaggcgctgagcagcaaccgccagtcaacacgtaccgctgatgaagctgacctccgggccaaggccgtggagctggaacatgagacattccggaacgccaaggtggccaacctctacaaggccagcgtgctgaagaaggtggccgatatccacagagcctccaaggatgggcagccctatgacatgggaggcagtgccaagagctgcagtgcccaagctgagcccccggagcccaatgagtatgacattccaccagcctcccatgtgtactcgctcaaacccaagcgggtgggagctggtttccccaaaggctcctgcccgttccagacggccacggaactgatggagacgactcggatcagggagcaagccccccagcccgagcggggaggcgagcacgagcccccgagccggccctgtggcctcctggatgaggatgggagtgagcccctccctgggcccagaggggaggtccctggaggcagcgctcactatggggggccctcccctgagaagaaggcaaaaagttcctctgggggcagctcccttgccaagggccgggctagcaagaaacagcagctcctagccacagcggcccacaaggattctcagagcatcgcccgcttcttctgccgaagggtggaaagcccagctctgctggcatcagccccagaggcagaaggtgcctgcccctcctgtgagggggttcagggacccccgatggccccagagaagtacacaggggaggaagatggagccgggggacattcgcctgcccctccccagactgaggagtgcctcagggagaggccaagcacctgcccgcccagagaccagggcacccctgaagtccagcccacccctgcaaaggacacatggaagggcaagcggcctcgatcccagcaggagaacccagagagccagcctcagaagaggccacgcccctcagccaagccctccgtcgtagctgaggtcaagggcagcgtctcggccagcgaacagggcaccttgaatcccacggctcaagaccccttccagctctccgctcctggcgtctccttgaaggaggctgcaaatgttgtggtcaagtgcctcacccctttctacaaggagggcaagtttgcttccaaggagttgtttaaaggctttgcccgccacctctcacacttgctgactcagaagacctctcctggaaggagcgtgaaagaagaggcccagaacctcatcaggcacttcttccatggccgggcccggtgcgagagcgaagctgactggcatggcctgtgtggcccccagagatgaccaactgctggctgggcagggcccgcgtcctcccccagattctagcatgggtcatcctgggcctcacctgctgatgccagggccatcgtcttttctcagtccttctcctttccaaccatacttggctttggggatgaccccagacaccccctgaatccaggtcagaggtcagcccacctttctttctgcttgcaaagcctatagacccttctcagagcggtcctcatggctgggttttctgggacacatgtcgaggacagaaggtggagggtggtggagctgctgctggaagaaggggaaggaagagtggcccctccccgagttctaagtcaggatgaggcccacctgtccaaggtatcggaacctacccaggggaccctcagatcctccacccactcccccatccattacgatgccagcttccagccttgcccaggtcagagctgtggcagaggagaggcagccaggccctgttcctgctcagctcctgctcaggaaggccaggcctgacagatgtttgggagaggaataaagttgtgttgttgtggggcatgcaggcgtgcacac

SEQ ID NO: 29481 - DNA, 3627 bp, Homo Sapiens
atggagcggctgcgggacgtgcgggagcggctgcaggcgtgggagcgcgcgttccgacggcagcgcgggcggcgaccgagccaggacgacgtggaggcggcgccggaggagacccgcgcgctctaccgggagtaccgcactctgaagcgtaccacgggccaggccggcggcgggctccgcagctccgagtcgctccccgcggcggccgaagaggcgccagagccccgctgctgggggccccatctgaatcgggctgcgaccaagagtccacagcctacgccagggcggagccgccagggctcggtgccggactacgggcagcggctcaaggccaatctgaaaggcaccctgcaggccggaccagccctgggccgcagaccgtggcctctaggaagagcctcatctaaggcatccaccccaaagcccccaggtacagggcctgtcccctcctttgcagaaaaagtcagtgatgagcctccacagctccctgagccccagccaaggccaggccggctccagcatctgcaggcatccctgagccagcggctgggctccctagatcctggctggttacagcgatgtcacagtgaggtcccagattttctgggggcccccaaagcctgcaggcctgatctaggctcagaggaatcacaacttctgatccctggtgagtcggctgtccttggtcctggtgctggctcccagggcccagaggcttcagccttccaagaagtcagcatccgtgtggggagcccccagcccagcagcagtggaggcgagaagcggagatggaacgaggagccctgggagagccccgcacaggtccagcaggagagcagccaagctggacccccatcggagggggctggggctgtagcagttgaggaagaccctccaggggaacctgtacaggcacagccacctcagccctgcagcagcccatcgaaccccaggtaccacggactcagcccctccagtcaagctagggctgggaaggctgagggcacagcccccctgcacatcttccctcggctggcccgccatgacaggggcaattacgtacggctcaacatgaagcagaaacactacgtgcggggccgggcactccgtagcaggctcctccgcaagcaggcatggaagcagaagtggcggaagaaaggggagtgttttgggggtggtggtgccacagtcacaaccaaggagtcttgtttcctgaacgagcagttcgatcactgggcagcccagtgtccccggccagcaagtgaggaagacacagatgctgttgggcctgagccactggttccttcaccacaacctgtacctgaggtgcccagcctggaccccaccgtgctgccactctactccctggggccctcagggcagttggcagagacgccggctgaggtgttccaggccctggagcagctggggcaccaagcctttcgccctgggcaggagcgtgcagtcatgcggatcctgtctggcatctccacgctgctggtgctgcctacaggtgccggcaagtccctgtgctaccagctcccagcgctgctctacagccggcgcagcccctgcctcacgttggtcgtctctcccctgctgtcactcatggatgaccaggtgtctggcctgccaccgtgtctcaaggcggcctgcatacactcgggcatgaccaggaagcaacgggaatctgtcctgcagaagattcgggcagcccaggtacacgtgctgatgctgacacctgaggcactggtgggggcgggaggcctccctccagccgcacagctgcctccagttgcttttgcctgcattgatgaggcccactgcctctcccagtggtcccacaacttccggccctgctacctgcgcgtctgcaaggtgcttcgggagcgcatgggcgtgcactgcttcctgggcctcacagccacagccacacgccgcactgccagtgacgtggcacagcacctggctgtggctgaagagcctgacctccacgggccagccccagttcccaccaacctgcacctttccgtgtccatggacagggacacagaccaggcactgttgacgctgctgcaaggcaaacgttttcaaaacctcgattccattatcatttactgcaaccggcgcgaggacacagagcggatcgctgcgctcctccgaacctgcctgcacgcagcctgggtcccagggtctggaggtcgtgcccccaaaaccacagccgaggcctaccacgcgggcatgtgcagccgggaacggcggcgggtacagcgagccttcatgcagggccagttgcgggtggtggtggccacggtggcctttgggatggggctggaccggccagatgtgcgggctgtgctgcatctggggctgcccccaagcttcgagagctacgtgcaggccgtgggccgggccgggcgtgacgggcagcctgcccactgccacctcttcctgcagccccagggcgaagacctgcgagagctgcgcagacatgtgcacgccgacagcacggacttcctggctgtgaagaggctggtacagcgcgtgttcccagcctgcacctgcacctgcaccaggccgccctcggagcaggaaggggccgtgggtggggagaggcctgtgcccaagtacccccctcaagaggctgagcagcttagccaccaagcagccccaggacccagaagggtctgcatgggccatgagcgggcactcccaatacagcttaccgtacaggctttggacatgccggaggaggccatcgagactttgctgtgctacctggagctgcacccacaccactggctggagctgctggcgaccacctatacccattgccgtctgaactgccctgggggccctgcccagctccaggccctggcccacaggtgtccccctttggctgtgtgcttggcccagcagctgcctgaggacccagggcaaggcagcagctccgtggagtttgacatggtcaagctggtggactccatgggctgggagctggcctctgtgcggcgggctctctgccagctgcagtgggaccacgagcccaggacaggtgtgcggcgtgggacaggggtgcttgtggagttcagtgagctggccttccaccttcgcagcccgggggacctgaccgctgaggagaaggaccagatatgtgacttcctctatggccgtgtgcaggcccgggagcgccaggccctggcccgtctgcgcagaaccttccaggcctttcacagcgtagccttccccagctgcgggccctgcctggagcagcaggatgaggagcgcagcaccaggctcaaggacctgctcggccgctactttgaggaagaggaagggcaggagccgggaggcatggaggacgcacagggccccgagccagggcaggccagactccaggattgggaggaccaggtccgctgcgacatccgccagttcctgtccctgaggccagaggagaagttctccagcagggctgtggcccgcatcttccacggcatcggaagcccctgctacccggcccaggtgtacgggcaggaccgacgcttctggagaaaatacctgcacctgagcttccatgccctggtgggcctggccacggaagagctcctgcaggtggcccgctga

SEQ ID NO: 29482 - DNA, 2404 bp, Homo Sapiens
cgaggaacgagtgacagccggacagtccgccgggcggtgatccggggccgctcccgggcgcgccctcggctccaggtcctacccggagccgctgccatgggagagccagccttgggcgctggggaccagccgccgcgcccgcctcggagtcgcggcccgagtcccggcgccagcagccagcccgctgcgtccccttcccgggctgcagggctgcctccgccgcgccgccggcccggattgtgcctgtgatgagccgcagcccgcagcgagctctgcccccgggcgcgctccctcggctgctccaggctgcgcctgcagccgcgccgcgtgccctgctcccgcagtggccccggcgcccaggacgccgctggcccgcgtcccctctcggaatgaaggtgttccgtaggaaggcgctggtgttgtgcgcgggctatgcactgctgctggtgctcactatgctcaacctcctggactacaagtggcacaaggagccgctgcagcagtgcaaccccgatgggccgctgggtgccgcagcgggggcagccggaggcagctgggggcgcccagggccgcctccggccgggccgccccgtgctcatgcccgtttggacctccgcactccttaccgccctcccgctgccgccgtcggggcggctcctgcagccgcggcagggatggcgggggttgcggcccctccaggcaatggcactcggggcaccgggggcgtcggggacaagcggcagctggtgtacgtgttcaccacgtggcgctctggctcgtcgttcttcggcgagctattcaaccagaatcccgaggtgttctttctctacgagccagtgtggcatgtatggcaaaaactgtatccgggggacgccgtttccctgcagggggcagcgcgggacatgctgagcgctctttaccgctgcgacctctctgtcttccagttgtatagccccgcgggcagcggggggcgcaacctcaccacgctgggcatcttcggcgcagccaccaacaaggtggtgtgctcgtcaccactctgccccgcctaccgcaaggaggtcgtggggttggtggacgaccgcgtgtgcaagaagtgcccgccacagcgcctggcgcgtttcgaggaggagtgccgcaagtaccgcacactagtcataaagggtgtgcgcgtcttcgacgtggcggtcttggcgccactgctgcgagacccggccctggacctcaaggtcatccacttggtgcgtgatccccgcgcggtggcgagttcacggatccgctcgcgccacggcctcatccgtgagagcctacaggtggtgcgcagccgagacccgcgagctcaccgcatgcccttcttggaggccgcgggccacaagcttggcgccaagaaggagggcgtgggcggccccgcagactaccacgctctgggcgctatggaggtcatctgcaatagtatggctaagacgctgcagacagccctgcagccccctgactggctgcagggccactacctggtggtgcggtacgaggacctggtgggagaccccgtcaagacactacggagagtgtacgattttgtgggactgttggtgagccccgaaatggagcagtttgccctgaacatgaccagtggctcgggctcctcctccaagcctttcgtggtatctgcacgcaatgccacgcaggccgccaatgcctggcggaccgccctcaccttccagcagatcaaacaggtggaggagttttgctaccagcccatggccgtcctgggctatgagcgggtcaacagccctgaggaggtcaaagacctcagcaagaccctgcttcggaagccccgtctctaaaaggggttcccaggagacctgattccctgtggtgatacctataaagaggatcgtagtgtgtttaaataaacacagtccagactcaaacggaggaagcccacatattctattatagatatataaataatcacacacacacttgctgtcaatgttttgagtcagtgcatttcaaggaacagccacaaaatacacacccctaagaaaaggcaagacttgaacgttctgaccaggtgcccctcttcttctttgccttctcttgtcctctttctcctatttcttaccctgtcctccacctgccttccattttgaagtgggatgttaatgaaatcaagttccagtaacccaaatcttgtttacaaaatattcgtggtatctgtgaacatgttaagagtaatttggatgtgggggtgggggtggagaaaggggaagtggtccagaaacaaaaagccccattgggcatgataagccgaggaggcattcttctaaagcagacttttgtgtaaaaagcaaaggttacatgtgagtattaataaagaagataataaataaaaaaaaaaaaaaaa

SEQ ID NO: 29483 - DNA, 3412 bp, Homo Sapiens
agttttgctccgaaagacttaccgaggagggagcttgcggtgcgttctgggaaagttgctgggccagctcctttgtttccagtctgagcgttgcgttcggtttcccgagggtcttctgaggcaccgcggctgcgggcttctgagttcccggctctccgcagggaagcctcctcttcgtacctcgttttttggctcgtggggggtcctcccaccgctggccgacgcagccagcatgtccggggtgcgcgcagtgcggatcagcatcgaatcggcctgcgagaagcaggtccatgaggtgggcctggatggcaccgagacgtacctgcccccgctgtccatgtcgcagaatctggcgcgtctggcccagcggatagacttcagccagggttcgggctccgaggaggaggaggcggcggggaccgagggcgacgcgcaggagtggccgggcgccgggtccagcgcagaccaggacgacgaggaaggagtggtaaaatttcagccttccctttggccttgggactcagtgaggaacaatttgagaagtgccctgacagagatgtgtgttctctatgatgttctcagtattgttagggataaaaaatttatgactcttgatcctgtctctcaggatgcacttcctccaaaacagaatcctcagacgttgcaattgatatctaaaaagaagtcacttgctggagcagcacaaatcttattgaagggggcagaaagactgactaaatcagttaccgaaaaccaagaaaacaagctacaaagagacttcaattctgagcttttgcgattacggcaacactggaaacttcgaaaagttggagataaaattctcggagatctgagctacagaagtgcaggatctctctttcctcatcatggtacatttgaagtaataaagaatacagatctcgatctggataaaaagatacctgaagattactgtcctcttgatgtccaaattcctagtgatttagaggggtctgcatatatcaaggtttcaatacaaaaacaggctccagatataggtgacctcggcacagttaacctcttcaaacgacctttgcccaaatccaaaccaggttccccacattggcagacaaaattagaagcggcacagaatgttctcttatgtaaagaaatttttgcacagctctctcgggaagctgttcaaattaaatcacaagtccctcacattgtggtgaaaaaccagattatctctcagccctttccgagcttgcagttatctatttctttgtgccattcctcaaatgataagaaatcccaaaaatttgctactgagaagcaatgtccggaggaccacctttatgtcctagagcataatttgcatctactgattagagagtttcataaacagaccttgagttccatcatgatgcctcatccagcaagtgcaccttttggccacaagagaatgagactttcgggtcctcaagcttttgataaaaatgaaattaattcattacagtccagtgaagggcttctggaaaaaataattaaacaagcaaagcatatttttctaaggagtagagctgctgcaaccattgacagcttagcaagccgaattgaggatcctcagatacaggctcattggtcaaatatcaatgatgtttatgaatctagtgtgaaagttttaatcacatcacaaggctatgaacaaatatgcaagtccattcaactgcaattgaatattggagttgagcagattcgagttgtacatagagatggaagagtaattacactgtcttatcaggagcaggagctacaggattttcttctgtctcagatgtcacagcaccaggtacatgcagttcagcaactcgccaaggttatgggctggcaagtactgagcttcagtaatcatgtgggacttggacctatagagagcattggtaatgcatctgccatcacggtggcctccccaagtggtgactatgctatttcagttcgtaatggacctgaaagtggcagcaagattatggttcagtttcctcgtaaccaatgtaaagaccttccaaaaagtgatgttttacaagataacaaatggagtcatcttcgtgggccattcaaagaagttcagtggaataaaatggaaggtcgaaattttgtttataaaatggagctgcttatgtctgcacttagcccttgtctactatgattttttccagatgtttcctaaagaagtttccagaaactttgacttgaaatgtttgcagatcaactataagcacaaagaagagataacttccaaaagagtgctgtttttaaaaataataattaggaaatgtttatttagcactttcaaacttttcactttataaatgacaagtgctttgaaatgcagaagtttatgtacagttgtatatacagtatgacaagatgtaaaataatatgtttttcatgcagtttaaaatattactaacttaagggtttctatgtgctttttaaaatattccttctttgatgttgacatcaaataaagtatgtggtttaaaaaaatctccaaatacctttttttccccccaaatactttctaaactttttttttttgagatggtatctcactctgtagcccagtctggagtgcagtggtgtgatcatggttcactgcagtcttgacctcccaggcttaggtgatccttctgtctcagccttccgagtagctgggaccacaggcatgcacaaccacgcctggctaatttttgtattttttataaagacagggtttttccatgttgcccaggctggtttcgaactcggctcaagtgatctacctgcctctgcctcccaaagtgctaggattacaggcgtgagccaccatgcccagcctactctaaattattgataacctcttcctccagttgtctcctttaagctttcctgggtctaacctacataggtaatttaagaacatcctcagaaaggacagctgaaggcaataggaggcagattatctctttagggcgtcctcaagtttttttggtctgttctcccacttgattgacctcaccagttgagacacctagtgtatggctcatgcccagccttccacctgggattctccagcctccacccagcagccctggattgctttctccaattaaggcctttccatcagctctctgctttttcaaagcgaaaaaactaatggattagtgggttatcttttccaaggaacaggtttgcacttcttggaaaaagtgcctaaagtgtgcccattaatatgaggatagatttaggctcataagccttttggtaacactgaaagtagtatcatataggcaagctctccttataagtaaggctttcaatttttaaaacagacatcctgctttaacaatttgtaagatgactgtgcagtaataaaagtcctttgtatttc

SEQ ID NO: 29484 - DNA, 1404 bp, Homo Sapiens
gagctgctgtggcggcggcaacatggcggacgtgataaatgtcagtgtgaacctggaggccttttcccaggccattagtgccatccaggcgctgcgctccagcgtgagcagggtgttcgactgcctgaaggatgggatgcggaacaaggagacgctggagggccgggagaaggcctttattgcgcacttccaggacaacttacattcggtcaaccgggacctcaatgagctggaacgtctgagcaatctggtaggcaagccatctgagaaccatcctcttcataacagtgggctgttaagcctggatcctgtgcaggacaaaactcctctctatagtcaactccttcaagcatataagtggtcaaacaagttgcagtaccatgcaggactagcatctggccttttaaatcagcagtcattgaagcgttccgctaatcagatgggagtatctgccaaacgtagaccaaaggctcagcccacaactcttgtcctaccacctcaatatgttgatgatgtgatcagccgcattgacaggatgtttcctgaaatgtccatccacttatccagacccaatggaacatcagcaatgcttctggtgaccttgggaaaggtgttgaaagtgatcgtcgtcatgcggagcctgttcattgatcgaacaatagtaaagggatataacgagaatgtctacacagaagatggcaagcttgatatatggtccaaatccaactatcaagtattccagaaggtgacagaccatgccaccactgccctgctccactatcagctgccccagatgccggatgtcgtggtccgatccttcatgacctggttaagaagttacataaagctgttccaggccccgtgccagcgctgcgggaagtttctgcaggacggccttcccccgacatggagggatttccgaaccctcgaagccttccatgacacctgccggcagtagcccccacgctggccccagcctcagaccccacccagcaccttcccagacacgcaggaagcccacagaaggctcagctggttcctcactgcccagatgtgtacagctgctcctccctttcataaagcagcgccatgtgtgcagaggccactcttgaagagcagactccctctgtggctgatgggactaattattcccactagccagcggactgaaggcaaagaagacctttctagaacctggtagaaggaagctgtgcagcatgctcctcgtccatgtgtgtcggcagtgctggtgtctgtcgtctccgcgagctgttactggaatgagcccttgtgttcatgggtatcgtcatgcggggttcttgtgttttgtggggcttgggttttggtaacttatttttataagcaataaaccttttgtatcctgaaaaaaaaaaaaaaaaaaaa

SEQ ID NO: 29485 - DNA, 4228 bp, Homo Sapiens
tggagcggcggctgcgcttcggcttcgagcccagctctcctggccccaacgcgggcttagcctcccgccttggctcgggcaggcgcccgtcgacccttcggcccctttcgcccgccctggagctgggggcagggtgccagtggaagcgtggggcttggctctgtgattcattcattctccgccgacgggagcctcagacccgctgtgctctgaagagaggagggaagagggggcagccgcgaatgaagggccgggcaccagccgggctccattgtgctcggcggcggggggcgggaaggggctgagggaggtgggatcgggtcccctcctccagctctccggcgtgcgctgcgcccccagcctgctgccagcctggaaatggctccgtttattctcttcgggagaatgaatcgatcctgcctagccttctcttcgtcctccccacctcttctctgctccgagtcttaggaggagaaacatttaaaaagacagattccaatgtggagtgccgtgcaggttgcgagctgccgggtttgcacttcgaggagattttcctgtgtagtttttttcctaatgtgagcgcagggaagccgtggcattactgcttttgggatttttattcacgtgcacgtcgcgtttggttgctcgctccacccccggagacctggtgtggtggagaaatttgaacccgcagccttagctccgaaaaggccgagttacctggctctccctgagtgtcgaggaggacatgagtgaaatgaccagcgaactcattttttataggactcggtgaagccggattctgcatttccctacttgtagactcattttgtggaatagagttgatcgctgtctcctccgcaaagcattttaactcgaataagcaaatgccgcctctgtttgaacgttttggtatttacaagagagaaatcattttacctaagagaactaattgaattggcagcatccttgaaatacctccggacaaggatctgggggtgggggtggaaaagcaactgcgaaatagcagacggagaaattcctttggaagttattccgtagcataagagctgaaacttcagagcaagttttcattgggcaaaatgggggaacaacctatcttcagcactcgagctcatgtcttccaaattgacccaaacacaaagaagaactgggtacccaccagcaagcatgcagttactgtgtcttatttctatgacagcacaagaaatgtgtataggataatcagtttagatggctcaaaggcaataataaatagtaccatcaccccaaacatgacatttactaaaacatctcagaagtttggccagtgggctgatagccgggcaaacaccgtttatggattgggattctcctctgagcatcatctttcgaaatttgcagaaaagtttcaggaatttaaagaagctgctcgactagcaaaggaaaaatcacaagagaagatggaacttaccagtacaccttcacaggaatccgcaggcggggatcttcagtctcctttaacaccggaaagtatcaacgggacagatgatgaaagaacacctgatgtgacacagaactcagagccaagggctgaaccaactcagaatgcattgccattttcacatagttcagcaatcagcaaacattgggaggctgaactggctaccctcaaaggaaataatgccaaactcactgcagccctgctggagtccactgccaatgtgaaacaatggaaacagcaacttgctgcctatcaagaggaagcagaacgtctgcacaagcgggtgactgaacttgaatgtgttagtagccaagcaaatgcagtacatactcataagacagaattaaatcagacaatacaagaactggaagagacactgaaactgaaggaagaggaaatagaaaggttaaaacaagaaattgataatgccagagaactacaagaacagagggattctttgactcagaaactacaggaagtagaaattcggaacaaagacctggagggacaactgtctgacttagagcaacgtctggagaaaagtcagaatgaacaagaagcttttcgcaataacctgaagacactcttagaaattctggatggaaagatatttgaactaacagaattacgagataacttggccaagctactagaatgcagctaaggaaagtgaaatttcagtgccaattaattaaaagatacactgtctctcttcataggactgtttaggctctgcatcaagattgcacaaaaaaaaaaaaaaaaaaattgaatatcactcctccaggaggaggatcttttgaaattggaattgtatatttcactgtaaattttagaatccagcttgtagctagttggggaaaaaagatgaaaaacttgaactacaaattacctccatgtatattattggccatagttaactagaaagttataaatagacacttaatgcaatcttttttcctgatattagccaatgggagaattaacaatgtctaggtcacatcccctttttgtgttcaacacagtgaagattatctgctttttaaattaatttatttacgatatctagagctgtgttttgtgcaaaaacttagtgatgaaagcctgtcttttgttgtaatctgaataatttctcaggatatttttgcactgctgagaagcagtgccattaccaattaattcttgccaggagtgagagagagctgtatctttaattgaaatatactataactgggtgtatagagttcttcccttttttgtgctggaagatatttcactctggtgactactctggtacactctggtgttctctaatcttgtctgttgtatagtttacttttccatattgattccatgtatttatgagaagatattgtctcccattttattacacattttaaagccaactaacgaaggcagctgagtccctcagaaatttttctttttaagtttctaataaatttgacacacagtactgaaatacagcagcccgtcattgacaggctggtctagcaatgttaagtatatttacagaatatgcagttacatttatttatatattttgcaagaaatcttttctgaatgatcaatgcatttcaatttacgaataataatggttattggggaactgtttattatagataattttaaggtgtatagctattttaaagggggtccatttacatcaaacagctgatcagaggactctatctaaattgtgatcgtggcagatagagatggagtcatgtactctatctggctctacacatcaatcacatcttgattcaaacctcacaaggcaatattctgaattgttaactaggtatttcaaaacaggaattaaattcaataggctcttctcagtgaacaggttttaatgttgttttgatgtaattttaaaagacttttagcaaacatgcatttctttatatgatatatttcttttacgaagctattttaaaagtaagccaagtgctgtctagtctgcttataaagtaggaattgcatcagagtacatatattcttgctgtacaatgcctgtgatgttgaggagggttcttttttaaagtgtatgcttgagtaactgactctatggagtctataaatgcactgacttcttgtttgtaccccaaaatgatcgaattgttaagtacaaaattaagctaattaaccaatttgtaaccattttttcactcataaacagctactcaatactagacaattttgttttttatgtatgtgtatgtacgtaaatacatacatattaatttacattagagtgaaaaataaatggtttgtttctgaagttagtttcttaagtgagttttcaggtgtctctgaaaaatttataacaatcatgtattatatgtgctgtaacatcatgtacgttacctccatctattttaggatattttcctcacctatatattatagggagaataatttagatacacatgctcagagctgagatatttctctgataaatcaggtaacaaaatgtatttgattgatggaattttgaagtaaatgtgtttttatccatcagtttctgagtaacaaagagcaccaagttttaatttaaataggagatttaacactagggatcagggagtttagtatgaagagttaaaaaaatttaaaaaacagtgtaagctgttgaaatggcaagtgaattattttaatgatgtaataaaatatttttaaattttgaaaaaaaaaaaaaaa

SEQ ID NO: 29486 - DNA, 2853 bp, Homo Sapiens; identical to SEQ ID NO: 23896

SEQ ID NO: 29487 - DNA, 3537 bp, Homo Sapiens
ggagcgcagtcgctccgcgatggactcgccggtcccggcctctatgttcgcccccgagcccagctccccgggggcggccagggccgcggcggccgccgcccgactccacggcggctttgactcggactgcagcgaggacggcgaggcgctcaacggcgagccagagctggacctcaccagcaagctggttctagtgagccctacatcagagcagtatgacagcctacttcggcagatgtgggagaggatggacgagggatgcggagagaccatatatgtcattgggcagggatcagatgggactgagtatgggctgagtgaagctgacatggaggcctcctacgccacagtgaagagcatggcggaacagatagaggccgatgtcatccttctgcgggaacggcaagaagctgggggccgcgtgcgtgattacctggtccggaaacgagtaggagacaatgacttcctggaggtcagggtagcagtggtgggcaacgtggatgctggcaaaagcacgcttctgggggtcctgacacatggggagctggacaatggccgaggctttgcccgccagaaactcttccgccacaaacatgaaattgaatctggtcgcaccagcagtgtgggcaacgacattctgggctttgacagtgaaggcaatgtagtgaacaagcctgacagccacggcggcagcctggagtggaccaagatctgtgagaagtccacgaaagtcattaccttcatcgacttggctggtcatgagaagtacctgaaaaccactgtcttcggcatgacaggccatctgcctgacttctgcatgctcatggtgggcagcaatgctggcatcgtggggatgaccaaagaacacctgggcttggcactggcactcaatgtacctgtctttgtggtagtcaccaagattgacatgtgtcctgccaacatcctgcaagaaaccctgaagctgttacagcgcctgctgaagtcaccaggctgccggaagatccccgtgctggtgcagagcaaagatgatgtgattgtcacagcctccaacttcagctctgaaaggatgtgcccgatattccagatctccaacgttacaggcgagaacctagatctgctgaagatgttcctcaacctcctctccccccgcaccagctacagggaggaggagcctgctgagtttcagattgatgacacctactccgtcccgggtgtggggacagtggtttcggggacaacactgagaggcctgatcaagctgaatgacacgctgctgctgggcccagaccccttgggtaacttcctgtccattgctgtcaaatccatccatcgcaagcgcatgcctgtcaaggaggtgcggggtggccagacagcatcctttgcgctgaagaagatcaagcgctcgtccatccggaagggcatggtgatggtttccccacgtttgaatccccaagcctcctgggagtttgaggccgagattctcgtcctccaccaccccaccacaattagcccgcgctaccaggccatggtgcactgtgggagcatcaggcagacagccaccattctgagcatggacaaggactgtctgcgcactggggacaaggccactgtacacttccgcttcatcaagacccctgagtacctgcacatagaccagcggctggtgttccgggaaggccgcaccaaggctgtcggcaccatcaccaagctcctccagaccaccaacaactccccaatgaactccaagccgcagcagattaaaatgcagtcgacgaaaaagggccccctgacgaaacgagacgaggggggcccgtctggtgggccagcagtaggagcacccccacctggagatgaagcctcctctgtaggggcagggcaaccagctgcgtccagcaatctccagcctcagcctaagcccagcagtggaggccggcgacgagggggccagcgccacaaggtgaagtcccagggggcctgtgtgactcctgccagcggctgctgaaccttcccctggcccaccctcaccacccaaggggtcatcatctctggccaccactccaccagatgggcagagcagctatgaccgccacccagccctcccgctcaggccacagccggagcctccgcattgcccccacccccattttccaggggggttgtaatttataagctgacgaaggtagccagacttccggaggactgaccatctctcactgtcctccccaccttcttcctcactcacacattttttgtacatctgggcccttagtttttattctgtttattatatgtctctgtctctctctattgtgtgtgtgtgtgtgtgtgtgtgtgtgtgtgtgtgtgtggtgcaggagtgccacccccagggccctgtcaacctctcttttctcctccatggctgtctgcctgcgtatctgtctctgagaatcctcggggcggtcaggggatgtcaggaggggaaggagccgccctccctatcttgctgctcctcttggcactcaggggcaccttccatggagccagaccgggtggaggggcttctgggatttggtgtctgctgctgccagagcaggaacccccagtctaggacttgggcattttaacagggagaaagtagtggcttcccttttctctctctcctcctttttccctttaagcccacagattcaggtcatgccaaaagctctctggttgtaacctggagacatgtggaggggaatggcgatgggattataggactctccccatctcgggccctgaccctgacccttgccaccaacccaaagacagctggtgggtttccccttggagacaatcctgcgtttgcctgggccggccctggctgccctcagctttcgctgatctgcccggcctggagcctcccatcaccccgcttcttgttgggcctcaggcactggttaccagaagggggtctgggtctgctcaggatcatgttttgtagcacctcctgttggaggggtggagggatgttcccctgagccaggctgagactagaaccccatcttccctgagccaggctgagactagaaccccatcttccccaccacgccacccctgtggctgctacaggagcacagtagtgaaggcctgagctccaggtttgaaagacccaactggagcgtggggcgggcaggcaggggttagtgaaaggacacttccagggttaggacagagcatttagccttctggaagaacccctgcctggggtgggactgtgcaggccagagaaggtggcatgggcctgaacccacctggactgacttctgcactgaagccacagatggagggtaggctggtgggtgggggtggttcgttctctagccggggcagacacccagctggctgggtccttcctcagccttgcctcctcctgtccccaaccctttcctttcctcctgcttgcggactgctggtcccctctccttccctccttccagctgtttctagttaccacctacccctggccgtggactgatcagaccagcattcaaaataaaagtttgttccaagttg

SEQ ID NO: 29488 - DNA, 5451 bp, Homo Sapiens
gtagggagccagcccctgggcgcggcctgcagggtaccggcaaccgcccgggtaagcgggggcaggacaaggccggagcctgtgtccgcccggcagccgcccgcagctgcagagagtcccgctgcgtctccgccgcgtgcgccctcctcgaccagcagacccgcgctgcgctccgccgctgacatgtgtgccgctcagatgccgcccctggcgcacatcttccgagggacgttcgtccactccacctggacctgccccatggaggtgctgcgggatcacctcctcggcgtgagcgacagcggcaaaatagtgtttttagaagaagcatctcaacaggaaaaactggccaaagaatggtgcttcaagccgtgtgaaataagagaactgagccaccatgagttcttcatgcctgggctggttgatacacacatccatgcctctcagtattcctttgctggaagtagcatagacctgccactcttggagtggctgaccaagtacacatttcctgcagaacacagattccagaacatcgactttgcagaagaagtatataccagagttgtcaggagaacactaaagaatggaacaaccacagcttgttactttgcaacaattcacactgactcatctctgctccttgccgacattacagataaatttggacagcgggcatttgtgggcaaagtttgcatggatttgaatgacacttttccagaatacaaggagaccactgaggaatcgatcaaggaaactgagagatttgtgtcagaaatgctccaaaagaactattctagagtgaagcccatagtgacaccacgtttttccctctcctgctctgagactttgatgggtgaactgggcaacattgctaaaacccgtgatttgcacattcagagccatataagtgaaaatcgtgatgaagttgaagctgtgaaaaacttataccccagttataaaaactacacatctgtgtatgataaaaacaatcttttgacaaataagacagtgatggcacacggctgctacctctctgcagaagaactgaacgtattccatgaacgaggagcatccatcgcacactgtcccaattctaatttatcgctcagcagtggatttctaaatgtgctagaagtcctgaaacatgaagtcaagatagggctgggtacagacgtggctggtggctattcatattccatgcttgatgcaatcagaagagcagtgatggtttccaatatccttttaattaataaggtaaatgagaaaagcctcaccctcaaagaagtcttcagactagctactcttggaggaagccaagccctggggctggatggtgagattggaaactttgaagtgggcaaggaatttgatgccatcctgatcaaccccaaagcatccgactctcccattgacctgttttatggggacttttttggtgatatttctgaggctgttatccagaagttcctctatctaggagatgatcgaaatattgaagaggtttatgtgggcggaaagcaggtggttccgttttccagctcagtgtaagaccctcgggcgtctacaaagttctcctgggattagcgtggttctgcatctcccttgtgcccaggtggagttagaaagtcaaaaaatagtaccttgttcttgggatgactatccctttctgtgtctagttacagtattcacttgacaaatagttcgaaggaagttgcactaattctcaactctggttgagagggttcataaatttcatgaaaatatctccctttggagctgctcagacttactttaagctcaaacagaagggaatgctattactggtggtgttcctacggtaagacttaagcaaagcctttttcatatttgaaaatgtggaaagaaaagatgttcctaaaaggttagatattttgagctaataattgcaaaaattagaagactgaaaatggacccatgagagtatatttttatgagggagcaaaagttagactgagaacaaacgttagaaaatcacttcagattgtgtttgaaaattatatactgagcatactaatttaaaaagagaacttgttgaaatttaaaacgtgtttctaggttgaccttgtgttttagaaatttgcacttaatggaatttgcatttcagagatgtgttagtgttgtgctttgccttctttggcgatgaatgtcagaaattgaatgccacatgctttcataatatagttttgtgcttcaaagtgtttgacagaagttgggtattaaagatttaaagtctcttaggaatattattcatgtaactccatggcataaatagttgtatttttgtgtactttaaaatcaacttataactgtgagatgttattgcttccattttattagaagagaaacaaattccatgctttatggaatttatgtagactggagtcttcgtgaactggggcaaatgctggcatccaggagccgccaatactaacaggacaggttccattgccatggcctattccacccaaacaatatgttgtagtttctggaaattccatactcagatatcagtctgctagaactttaaaatgaaggacaaatcctgttaaagaaatattgttaaaaatctttaaaccctgtgtattgaaagcactctattttctaattttatccagttttctgtttaactccttataatgtttaggatattaaaattttaggataatgaagagtacataatgtcctacttaatatttatgttaataggacttaattcttactagacatctaggaacattacaaagcaaagactatttttatgcttccataacctagaattaaaaccaaattatgaccttatgataaatctttaagtattggtgtgaatgttatttaaattctatatttttcttatttaattacaaatactataaatgagcaaggaaaaggaatagactttcttaatatattataacactcattcctagagcttaggggtgactctttaatattaccttatagtagaaactttatgtaatatagctaactccgtatttacagaacaaaaaaacacagttccccctcctgtagtataaattttattttcacatacttagctaatttagcagtaattggcccagttttttccctaatagaaatacttttagatttgattatgtatacatgacacctaaagagggaacaaaagttagttttatttttttaataaacaacagagtttgttttgtgagataagtatcttagtaaacccaatttccagtcttagtctgtatttccaatatttctaattcctgagccacgtcaaagatgccttgccaaatttctccccatttctctacggggctagcaaaaatcttcagctttatccctcaacccctgccaaaggaacttgattacatggtgtctaaccaaatgagcaggcttaggaatttagatgagatgtgtaagattcacttacaggcagtagctgcttctagcatttgcaagatcctacacttttaccttctttaagggtgtacattttgatgttgaacatcagttttcatgtagacttaggactcatgtgcagtaaatataaataagtgtagcatcagaagcagtaggaatggccgtatacaaccatcctgttaaacatttaaatttagctctgatagtgtgttaagacctgaatatctttcctagtaaaaataggatgtgttgaaatatttatatgtactttgatctctccacatcacttataacttatgtgttttatttctccaagtgcggtgttcctgaatgttatgtatgcttttttttctgtaccacaggcattatctatacctggggccagattttctgcactttgaaatgttgcctttgcctaatgtaggttgactttctgaattgtggagaggcacttttccaagccaatcttatttgtcactttttgttttaatatcttgctctctgacaggaaagaaacaattcacttaccagcctcctcaccccatcctccaccatttccttaatgttccatggtattttcaacggaatacactttgaaaggtaaaaacaattcaaaagtatcgattatcataaattcacaaaatatttttgcaaccagaacacaaaagcaggctagtcagctaaggtaaatttcattttcaaacgagagggaaacatgggaagtaaaagattaggatgtgaaaggttgtcctaaacagaccaaggagactgttccctaatttattctcttggctggttctctcattgaattatcagaccccaagaggagatattggaacaggctcccttcatgccaagggtctttctaagttaatactgtgagcattgagcccccattaaaactcttttttacttcagaaagaattttacaggttaaagggaaagaaatggtgggaaactctccccgtaatgcttagccaactttaaagtgtacccttcaatatccccattggcaactgcagctgagatcttagagaggaaatataaccggtgtgagatctagcaatgcattttgaatcttcactccctaccaggctcttcctatttttaatctcttcacctcagaactagacatatggagagctttaaaggcaagctggaaggcacattgtatcaattctaccttgtgctatacgtaggagagatccaaaatttggatgcttctggagactcttagacatcttttcattgttgtccatttttaaagttgatgattgctggaaacattcacacgcttaaaagcaatggtgtgagttattaatgggtaaactaagaagtgttataggcaatgacttgaaatggtttttaaattgtatggattgttaagaattgttgaaaaaaaattttttttttttggacagcttcaaggagatgttagcaatttcagatatactagccagtttaggtatgactttggaagtgcagaaacagaaggatactgttagaaaatcctaacattggtctccgtgcatgtgttcacacctggtctcactgcctttccttcccacagacctgagtgtgaaagactgagagttgaggagttactttgtggatcttgtccaaatttagtgaaatgtggaagtcaaccagaccaatgatggaattaaatgtaaattccaagagggctttcacagtccacagggttcaaatgacttgggtaacagaagttattcttagcttacctgttatgtgacagtgatttacctgtccatttccaacccaaaagcctgtcagaaagcattctttagagaaaaccactttacatttgttgttaaactcctgatcgctactcttaagaatatacatgtatgtattcataggaacattttttctcaatatttgtatgattcgcttactgttattgtgctgagtgagctcctgtgtgcttcagacaaaaataaatgagactttgtgtttacgttaaaaaaaaaaaaaaaaaaaaaa

SEQ ID NO: 29489 - DNA, 4200 bp, Homo Sapiens
gactctcgcctgacttcctaatttgctacttatccccagcgttggtcccggcgaggatatgctgagatttatggcactgttggctgcatttttggagaacagcaagcagcttcttttcagataatcccaccgtttctggcatgtcagatatggattatcctttacaaggacctggtttgctgtccgtacccaaccttccagagatcagttccatccgaagagttcctctcccacctgaacttgttgagcagtttggacatatgcagtgtaattgcatgatgggtgtgttccctcctatcagcagagcttggctcacaattgacagtgatatattcatgtggaactatgaggatggaggagaccttgcctattttgatggacttagtgagactattcttgctgtggggcttgtgaagccaaaagcaggcatctttcaacctcatgtgcgacacctcctggttttggcgacccctgtagacatagtaattcttggactcagctatgctaatttgcaaacaggttctggagttcttaatgatagtttgtctggtggaatgcagttgcttccagatcctttatattctcttcctactgataatacttaccttttaacaataacttccactgataatggcagaattttcttggctggaaaggatggctgtttatatgaagtagcctaccaggctgaagcagggtggtttagccaaagatgtaggaaaataaaccactcaaagagctcactttctttccttgttccttccttgctacaattcacgttctcagaagatgatcctattcttcaaattgcaattgataattctagaaatattttatatacacgatctgagaaaggagtaatacaggtgtatgatttgggacaagatggacaaggaatgagcagagttgcctctgtgtcacagaatgccattgtctctgctgctggtaacattgctaggaccatcgatcgttctgtttttaaaccaattgtccaaatagcagtgattgaaaattctgaatcactggactgtcagttattggctgtcacacatgcaggtgttaggttatattttagcacttgtccattcagacagccattagcacggcctaatacactgacgctggttcatgtccgcttacctcctggattctcagcatcttcaaccgtggaaaagccttcaaaagtacatagagctctttatagtaaaggtattctattgatggcagcctcagaaaatgaggataatgatattttatggtgtgtcaaccatgatacttttcctttccaaaagccaatgatggaaacccagatgacagctggtgttgatggtcattcctgggctctttctgcgatagatgaattgaaagtagataaaataattacacctttaaacaaggatcatattccaataactgattcaccagttgttgtacagcagcacatgttacctccgaagaaatttgttctcctctcagcacaggggagccttatgtttcataaacttagacctgtagatcaactgaggcatctacttgtgagtaatgtgggaggagatggagaagagattgaaagattctttaaattacatcaggaagaccaggcttgtgcaacttgccttattcttgcttgctccactgctgcctgtgatagagaagtatctgcctgggctactcgggctttctttaggtatggtggtgaagcacagatgagatttccaaccactcttccgcctccaagtaatgttggtcccatcttggggtctcctgtctattctagttctcctgttcctagtggtagtccctatccaaatccatcctttttgggaacaccgtctcatggtatacagcctcctgccatgtcaactccagtgtgtgctctgggaaacccagcaactcaggccacaaatatgagttgtgtgactggaccagagattgtgtactctggaaaacacaatggtatttgcatttacttttctcggatcatgggaaacatttgggatgcaagcttagttgtggagagaatattcaagagtggcaacagagagatcactgcaattgaaagtagtgttccctgccaactgctagagtcagtgctacaagaactaaagggtttgcaggaatttctagacagaaactcccagtttgcaggaggaccattaggaaatccaaatactactgctaaagtgcagcagaggctgataggattcatgcgtcctgaaaacggaaatccccagcaaatgcaacaggaactgcagaggaagtttcatgaggctcaactaagtgaaaagatttcacttcaggcaattcagcagttggttcgaaaatcatatcaggctctggctttatggaaacttctttgtgaacatcaattcactatcattgtggcagaacttcagaaggaacttcaagagcagctgaagatcaccacctttaaagatcttgtaatcagggacaaagaactcacaggggcattaattgcttctcttatcaactgctacatcagagataatgccgctgttgatggcattagtttacatttacaggatatctgcccacttctatatagcactgatgatgcaatttgttctaaggcaaatgagcttctccagcgttcccgacaagttcaaaataagactgaaaaagaaagaatgttaagggaatcattaaaggaatatcaaaaaattagcaatcaagtggacctttccaatgtttgtgctcagtatagacaagtgagattttatgagggtgtggtggaactttctcttacggctgcagagaaaaaagatcctcaaggtcttgggcttcatttctataaacatggagaaccagaagaagacatagttggacttcaggccttccaagaaagattaaacagttacaaatgcattacagacacacttcaagaactggtaaatcaaagtaaggccgctcctcagtctcccagtgtacccaaaaaacctggtcctccagtgttgtcatctgatccaaatatgctgagtaatgaagaagcaggacatcattttgaacaaatgcttaaattgtcacagcgatccaaggatgagctctttagtattgccctttataattggctaatacaagtcgaccttgcagataagctgctacaggttgcttctccatttctggagccacatctagtccgaatggccaaagttgatcaaaacagagttcgttatatggatttactctggcggtattacgagaagaacagaagtttcagtaatgctgctcgtgtactgtccagactggctgacatgcatagcacagaaatttcacttcagcagcgactagagtacattgctcgagccattcttagtgccaaaagttccactgccatttcatcaatagctgccgatggtgaatttcttcatgaattagaagaaaaaatggaggttgctaggatccaacttcagatacaggagacactacaaaggcagtattcccatcattcttctgtacaggatgcagtttctcagctggattctgagctgatggacataactaagctttatggggaatttgctgacccatttaaacttgcagagtgcaaacttgcaataattcattgtgccggttattcagaccctatattggtgcagacactttggcaagatatcatagagaaagaattgagtgacagtgtgacattgagctcctcggatagaatgcatgctcttagtctcaagattgttctccttggcaaaatttatgctggcacaccacgcttctttcctttagattttattgtacagtttttagaacagcaggtttgtactttgaactgggatgtgggcttcgtaatacagacaatgaatgaaattggagtaccattacctagactactagaagtttatgatcagttgttcaaatcacgggatccattctggaacagaatgaagaagccactgcaccttttggattgtatacatgtattattgataagatatgttgagaatcccagccaagttttaaattgtgaaaggagaagatttacaaatctctgcctggatgctgtttgtggttaccttgttgagctccagtctatgagctcgtcagtagcagtacaagccatcactgggaattttaaatctcttcaagctaaattagaacggcttcattaattactgtgatatactttcatccgttttatgatctgtaaaataaaaactcagctgggtccag

SEQ ID NO: 29490 - DNA, 3891 bp, Homo Sapiens
gcgcactctggggaaagcggagctgcaccccgccccgtattgctgctcagctcctcagctgtgcgtgcgagggacgtcgggggtggcgccgcagcagttgcccctggtaacgggggaggcagcaggaggaggaggaggaggagggactcggcgggaggatgggcttgctctcaattttgcgcaagttgaaaagtgcaccagaccaggaggtgagaatacttctcctgggcttggataatgctggcaagaccactcttctgaagcagcttgcatctgaagacatcagccacatcacacctacacagggtttcaacatcaaaagtgtacaatcacaaggttttaaactgaatgtatgggacattggtggacagaggaaaatcagaccatactggaagaattattttgaaaataccgatattcttatatatgtaatcgacagtgcagacagaaaaagatttgaagagacgggtcaggaactagcggaattactggaggaagaaaaactaagttgtgtgccagtgctcatctttgctaataagcaggatttgctcacagcagcccctgcctctgaaattgcagaaggactgaacctgcataccatccgcgaccgagtctggcagatccagtcttgctcagctctcacaggagagggcgttcaggatggcatgaactgggtctgcaaaaatgtcaatgcaaagaagaaataaaatctagacgaatggagatgcaggagctgcgggagccgaattcggtcctgaaaaacactaatttgctgctttctgaccaaatgtttttccatctgtgtacagctccagctgtttgaagagagggaacaacacggtttagaaagaatccccattccagcagtagatttaactgatctctgaggttcagtatcatttttcaaataaaggaattatattatttcctctgcataattgaaatagtattaaatgtctcaaagcacatgattagaaaatgagatcttttaaatgagcaagagattgcattgcagtttagacaattccagtgggcttttttttcctctcaaaaaaaaaaaaagaaaaagaaaaagaggaagaagcagctttgctgagttcatttatttactgacccgtcccttgcattccctccatggttttgaaaccacagacagtgtttgctggtgctgtcagtgatttttaccgtcactagcccagccaggcttcagtctgtccgacaggaagctgctgggtgggggtggggggagaaaaggcagataattaaaccatctcatcgtcttgcaggtcggagactacgtatgtaatcctcactctttggacagaaaaaaaaaaaaaagtctttcttgcagacaagtcactacagaaacataccccatcccacccacccctgcctctgccccagccagccacacagagaagcaaattcttatgacttttgactgtaatgacatctggaatgtaaggagaggtgggaggtttaattccagaaaaattacaaggtccttaaaaagctctcacatcgagggctcaggctagcgtaaacaggctttctccagctcagtggagcagtgagcagccgactctgagattagctggcttctccacggccgtcctatagacaggatttctaaagctcaaagaattctgtgtttaaacgatcacaataggccgctgctatcagattttagaaataaatgcagctttaccatgaacctgctccactgagaaaagccaggcagatcgatttttagatcaatttttacagtgctggcaacttggtggtgtgggatgctcctggatggagagggtttgctgctggggaggacatgggtgtgtgtgtgactgcaggggtcgtgtccaaggaatcaagagtcaccccagctgctgggctcctctgcctctctgcagcagaatgtccgtcctctgttgattgattggagaggaatagcagaacatttctcctgcccctcgttgcaaaacgagcttgtttccctgaacctcagaaatcctcagcttcaaacatggggaaacaggccagagcattgcccggctcctgaattaaactctgttctggtgcctgagctcaggggttttcagagaatgaataagagactgtccagtgactggtgggtccctgggggccagctgccttctcatcctgggaggtggcccttcccaagcccatcagggcgtgtgagcagactgaaggggccgctgcagcccctggccctcaatacccagctgcttctggctaagagtgcagcagagactgaggcatagccagcttcaaaagcgatctgacatgaaagtcattaacaaagccagccgtgaaaaggtgccccagagttgctgtggacagacctgtaaggacttgcaaaacaaaagaaagtgaggggtttttttaacctcagagctagctgctctctgcagcctcctccactggcttctctggctcacccaagctctcccttacagaggcaacacagaattataaggaatcagaaatcccccttctaccaggctgcaaatgtggctctagcacttgcaaattgttttttcttccgaatagttcagcagggacaagttatctgaggggcaaaatgcctgcttggaggtctgcaattttggaacactgcagtatggaactttggcattggagggtctgtaaaatatttttgttcttttaccaccaacttaggggactgttttaaagagccatcccaaggcctctcctagcaggcagaagccactcctctgataacggcctctgtaaatgttctgatttgctctcagctgcagagacacagagacactgcagatgtcacacgctttcatcttccctttgagcccttttgaaccctcctggggctctggggtagatgagagaagcctgaaaaaggcagagtttgaaagctcccatttaaaaacaaaatactttttaaagccctcttgcctcttccctgcccactcctgccccctgaccagaagacagaatttgaagctggaaagggaagaccccttttcccctcctcctgtccccagtgagtcttagcgagacttttgccctgcgcacaattgcatctgaatgtgcgggggagagggctgggggccggagggcaggcaaggcctggggggtgctcgtgatatgtgctcaagccagttgtgggaaaaactcgagtcctcccctcctcccgacctaccccgtgtggctgcttttggctggattccctgcacccagtgcaacacaccctttccccttcactctcccttggttactatggaaacaagggtgtcattgatgtgggctgagctggggaacatgtcggtgcacagctgaaagtcagcgattatgccggcggttagaaatgtgccagggttaaaggagtccgcagctcccacggctgctgggaggacatggtcctgcccccttccttcctccctccctccgtctccacttctctctccttgcttttgacaaatttctttattcccctctggactaaagtagtggctatttttgtgccactctgcgccccaccctcactgttggccgctccttatccggcctggcctggagggtgacaccatgtcaccctcaccaggactcgtctctccattcccgtcagagtttgctttgatttccctttcctttccttctcggggaccagttcttacttccttttatttttagctctgcactccatgtggtttcagggttcagtctgatccatcaaaaggttctttttttataatcccttttgaaaatgataatcaaaggaagagatgtggtgtttggtcatgtggaaaactcaatgtataatttagacgtctgtcaaaaatccgacaaataaaatttagctggaacgaaaaaaaaaaaaaaaaaaaaaaa

SEQ ID NO: 29491 - DNA, 6267 bp, Homo Sapiens
cttccatgtgtgaaagctacttggcatgaatgcctgggccgtaccaagtgtcaccgcagcaagagggggagtcagaagaaaaacagatcagaccaagcagacaataggcccctaaagtgttccccctaagttgctttgatgttgtcctggtgtcttgataccaggaggccagggattgcgggaaaagggtcttttttgtcttcattcactttcccccctcagtttctgaaatgattctccagaatttctcctcataaaaaaggactgaatgtgggcccagttggcgtcattctgctttgacctaaacattcccatctgattgggtggcagagatcatttttggaaagttcttccgtgtcccgatgtagaagaaatagcaaattggacatattgaaagacaagggtcatctttgagaagggggttcctggactcctcacctccaggatgagcactgcagtgtcgtgacccttggggttttgtatgccctggagatgcgagattttcctctggcagcaggaggcacgcacccagagaatgctggagctgcaaggggaaaggacccacttccacagcagagaaaaacaaagaggaaaaaggcatacaggcagcgagcgctaagggacgcacccagcaagcagtgggccagtgccactgcccccagcagctgtttctgctgcaacccgagaggaactcggtgagcctgtcccgtttgtgactgcaagctcaggatttcaatcaatgcattccagtaaccctaaagtgaggagctctccatcaggaaacacacagagtagccctaagtcaaagcaggaggtgatggtccgtccccctacagtgatgtccccatctggaaacccccagctggattccaaattctccaatcagggtaaacaggggggctcagccagccaatcccagccatccccctgtgactccaagagtgggggccatacccctaaagcactccctggcccaggtgggagcatggggctgaagaatggggctggaaatggtgccaagggcaaggggaaaagggagcgaagtatttccgccgactcctttgatcagagagatcctgggactccaaacgatgactctgacattaaagaatgtaattctgctgaccacataaagtcccaggattcccagcacacaccacactcgatgaccccatcaaatgctacagcccccaggtcttctaccccctcccatggccaaactactgccacagagcccacacctgctcagaagactccagccaaagtggtgtacgtgttttctactgagatggccaataaagctgcagaagctgttttgaagggccaggttgaaactatcgtctctttccacatccagaacatttctaacaacaagacagagagaagcacagcgcctctgaacacacagatatctgcccttcggaatgatccgaaacctctcccacaacagcccccagttccggccaaccaggaccagaattcttcccagaataccagactgcagccaactccacccattccggcaccagcacccaagcctgccgcacccccacgtcccctggaccgggagagtcctggggtagaaaacaaactgattccttctgtaggaagtcctgccagctccactccactgcccccagatggtactgggcccaactcaactcccaacaatagggcagtgacccctgtctcccaggggagcaatagctcttcagcagatcccaaagcccctccgcctccaccagtgtccagtggcgagccccccacactgggagagaatcccgatggcttatctcaggagcagctggagcaccgggagcgctccttacaaactctcagagatatccagcgcatgctttttcctgatgagaaagaattcacaggagcacaaagtgggggaccgcagcagaatcctggggtattagatgggcctcagaaaaaaccagaagggccaatacaggccatgatggcccaatcccaaagcctaggtaagggacctgggccccggacagacgtgggagctccatttggccctcaaggacatagagatgtacccttttctccagatgaaatggttccaccttctatgaactcccagtctgggaccataggacccgaccaccttgaccatatgactcccgagcagatagcgtggctgaaactgcagcaggagttttatgaagagaagaggaggaagccggaacaagtggttgtccagcagtgttccctccaggacatgatggtccatcagcacgggcctcggggagtggtccgaggacccccccctccataccagatgacccctagtgaaggctgggcacctgggggtacagagccattttctgatggtatcaacatgccacattctctgcccccgaggggcatggctccccaccccaacatgccagggagccagatgcgcctccctggatttgcaggcatgataaactctgaaatggaagggccgaatgtccccaaccctgcatctagaccaggtctttctggagtcagttggccagatgatgtgccaaaaatcccagatggtcgaaattttcctcctggccggggcattttcagcggccctggccgaggggaacgcttcccaaacccccaaggattgtctgaagagatgtttcagcagcagctggcagagaaacagctgggtctccccccagggatggccatggaaggcatcaggcccagcatggagatgaacaggatgattccaggctcccagcgccacatggagcctgggaataaccccattttccctcgaataccagttgagggccctctgagtccttctaggggtgactttccaaaaggaattcccccacagatgggccctggtcgggaacttgagtttgggatggttcctagtgggatgaagggagatgtcaatctaaatgtcaacatgggatccaactctcagatgatacctcagaagatgagagaggctggggcgggccctgaggagatgctgaaattacgcccaggtggctcagacatgctgcctgctcagcagaagatggtgccactgccatttggtgagcacccccagcaggagtatggcatgggccccagaccattccttcccatgtctcagggtccaggcagcaacagtggcttgcggaatctcagagaaccaattgggcccgaccagaggactaacagccggctcagtcatatgccaccactacctctcaacccttccagtaaccccaccagcctcaacacagctcctccagttcagcgcggcctggggcggaagcccttggatatatctgtggcaggcagccaggtgcattccccaggcattaaccctctgaagtctcccacgatgcaccaagtccagtcaccaatgctgggctcgccctcggggaacctcaagtccccccagactccatcgcagctggcaggcatgctggcgggcccagctgctgctgcttccattaagtccccccctgttttggggtctgctgctgcttcacctgtccacctcaagtctccatcacttcctgccccgtcacctggatggacctcttctccaaaacctccccttcagagtcctgggatccctccaaaccataaagcacccctcaccatggcctccccagccatgctgggaaatgtagagtcaggtggccccccacctcctacagccagccagcctgcctctgtgaatatccctggaagtcttccctctagtacaccttataccatgcctccagagccaaccctttcccagaacccactctctattatgatgtctcgaatgtccaagtttgcaatgcccagttccaccccgttataccatgatgctatcaagactgtggccagctcagatgacgactcccctccagctcgttctcccaacttgccatcaatgaataatatgccaggaatgggcattaatacacagaatcctcgaatttcaggtccaaaccccgtggttccgatgccaaccctcagcccaatgggaatgacccagccactttctcactccaatcagatgccctctccaaatgccgtgggacccaacatacctcctcatggggtcccaatggggcctggcttgatgtcacacaatcctatcatggggcatgggtcccaagagccaccgatggtacctcaaggacggatgggcttcccccagggcttccctccagtacagtctcccccacagcaggttccattccctcacaatggccccagtggggggcagggcagcttcccaggagggatgggtttcccaggagaaggcccccttggccgccccagcaacctgccccaaagttcagcagatgcagcactttgcaagcctggaggccccgggggtcctgactccttcactgtcctggggaacagcatgccttcggtgtttacagacccagatctgcaggaggtcatccgacctggagccaccggaatacctgagtttgatctatcccgcattattccatctgagaagcccagccagacgctgcaatatttccctcgaggggaagttccaggccgtaaacagccccagggtcctggacctgggttttcacacatgcaggggatgatgggcgaacaagcccccagaatgggactagcattacctggcatgggaggtccagggccagtgggaactccggacatccctcttggtacagctccatccatgccaggccacaaccccatgagaccaccagcctttctccaacaaggcatgatgggacctcaccatcggatgatgtcaccagcacaatctacaatgcccggccagcccaccctgatgagcaatccagctgctgccgtgggcatgattcctggcaaggatcgggggcctgccgggctctacacccaccctgggcctgtgggctctccaggcatgatgatgtccatgcagggcatgatgggacccaacagaacatcatgatccccccacagatgaggccccggggcatggctgctgacgtgggcatgggtggatttagccaaggacctggcaacccaggaaacatgatgttttaagctgctaagatgggatgtgccgatccttgtcaaaatgagattccaggtcctgagagctgctttgagggagttccaggagtacttactattggtcatgcaataggagaacagagacccgagggctgctttgggggaggggggaactcgagaatgtatggatttacctgaaaacaaattattcatttaatcaacaggtgtgttttttttaagatttattttttaaaaattatttttgtggacttgggtatcaatgatggcacctacttttgggaatctgtagctgtgctttgagaattgccatcggtcatgtgttgcaccgttctctgtatgtttacgtcctttggactggcttctcccaggattcttttctgtttttgtttttttgatttgggctttatttttttctgtgtactgtactatattgtaaaagggattttagcagagactttagtctttggggcaagaggagaacaggaatgctgggctgtttactttaggtggagaatccatcttcagacctttggactattttctttcaactgcagtgtatagaaaaaccaaactacgacctcagagcagagtattaatgaaaagcacaaaaaaaggaactaagttcagcgaggggtggggggaggggggagatttttcttttgaaaaataatgactcttaggacatttgtttttaagttcaagtgctcttcagcactgtcttgtctcccaatataccaacccactggcacattttctctgtttctctctccgattttgctctgtctcctcagttaagtgtttccttcctttgtgccccccgctggtgaccctctgcttccctctctctttccctttggcagctgcaatacacagtgttattttggggaaataaatctagcaaagcctcgccttccatgccgagcgtcctcttggctctgagagggaaagtctgtcctgggatgcttctctgtcttttttccccctaagtctttctctttcccatcatacccttccctgccccaccttgttttctgttccccttttattaggaattcccaagtgaattttattaatgtgggagtggaacagatgctaaaagctatccaggattttgtttctgtttgttttaaattttgtggttccttccctttcctccccctcccatgcgtaagacgttctgtgtaacctccattaaatttggtacaaaaccactcgccagagctgtggtgtcagaaaaataaaatatattgtttctta

SEQ ID NO: 29492 - DNA, 3631 bp, Homo Sapiens
gcggccgctgcagagattggaatccgcctgccgggcttggcgaaggagaagggaggaggcaggagcgaggagggaggagggccaagggcgggcaggaaggcttaggctcggcgcgtccgtccgcgcgcggcgaagatcgcacggcccgatcgaggggcgaccgggtcggggccgctgcacgccaagggcgaaggccgattcgggccccacttcgccccggcggctcgccgcgcccacccgctccgcgccgagggctggaggatgcgttccctggggtccggacttatgaaaatatgcatcagtttaatactgtcttggaattcatgagatggaagcataggtcaaagctgtttggagaaaatcagaagtacagttttatctagccacatcttggaggagtcgtaagaaagcagtgggagttgaagtcattgtcaagtgcttgcgatcttttacaagaaaatctcactgaatgatagtcatttaaattggtgaagtagcaagaccaattattaaaggtgacagtacacaggaaacattacaattgaacaatgcctcagctatacatttacatcagattattgggagcctatttgttcatcatttctcgtgttcaaggacagaatctggatagtatgcttcatggcactgggatgaaatcagactccgaccagaaaaagtcagaaaatggagtaaccttagcaccagaggataccttgccttttttaaagtgctattgctcagggcactgtccagatgatgctattaataacacatgcataactaatggacattgctttgccatcatagaagaagatgaccagggagaaaccacattagcttcagggtgtatgaaatatgaaggatctgattttcagtgcaaagattctccaaaagcccagctacgccggacaatagaatgttgtcggaccaatttatgtaaccagtatttgcaacccacactgccccctgttgtcataggtccgttttttgatggcagcattcgatggctggttttgctcatttctatggctgtctgcataattgctatgatcatcttctccagctgcttttgttacaaacattattgcaagagcatctcaagcagacgtcgttacaatcgtgatttggaacaggatgaagcatttattccagttggagaatcactaaaagaccttattgaccagtcacaaagttctggtagtgggtctggactacctttattggttcagcgaactattgccaaacagattcagatggtccggcaagttggtaaaggccgatatggagaagtatggatgggcaaatggcgtggcgaaaaagtggcggtgaaagtattctttaccactgaagaagccagctggtttcgagaaacagaaatctaccaaactgtgctaatgcgccatgaaaacatacttggtttcatagcggcagacattaaaggtacaggttcctggactcagctctatttgattactgattaccatgaaaatggatctctctatgacttcctgaaatgtgctacactggacaccagagccctgcttaaattggcttattcagctgcctgtggtctgtgccacctgcacacagaaatttatggcacccaaggaaagcccgcaattgctcatcgagacctaaagagcaaaaacatcctcatcaagaaaaatgggagttgctgcattgctgacctgggccttgctgttaaattcaacagtgacacaaatgaagttgatgtgcccttgaataccagggtgggcaccaaacgctacatggctcccgaagtgctggacgaaagcctgaacaaaaaccacttccagccctacatcatggctgacatctacagcttcggcctaatcatttgggagatggctcgtcgttgtatcacaggagggatcgtggaagaataccaattgccatattacaacatggtaccgagtgatccgtcatacgaagatatgcgtgaggttgtgtgtgtcaaacgtttgcggccaattgtgtctaatcggtggaacagtgatgaatgtctacgagcagttttgaagctaatgtcagaatgctgggcccacaatccagcctccagactcacagcattgagaattaagaagacgcttgccaagatggttgaatcccaagatgtaaaaatctgatggttaaaccatcggaggagaaactctagactgcaagaactgtttttacccatggcatgggtggaattagagtggaataaggatgttaacttggttctcagactctttcttcactacgtgttcacaggctgctaatattaaacctttcagtactcttattaggatacaagctgggaacttctaaacacttcattctttatatatggacagctttattttaaatgtggtttttgatgcctttttttaagtgggtttttatgaactgcatcaagacttcaatcctgattagtgtctccagtcaagctctgggtactgaattgcctgttcataaaacggtgctttctgtgaaagccttaagaagataaatgagcgcagcagagatggagaaatagactttgccttttacctgagacattcagttcgtttgtattctacctttgtaaaacagcctatagatgatgatgtgtttgggatactgcttattttatgatagtttgtcctgtgtccttagtgatgtgtgtgtgtctccatgcacatgcacgccgggattcctctgctgccatttgaattagaagaaaataatttatatgcatgcacaggaagatattggtggccggtggttttgtgctttaaaaatgcaatatctgaccaagattcgccaatctcatacaagccatttactttgcaagtgagatagcttccccaccagctttattttttaacatgaaagctgatgccaaggccaaaagaagtttaaagcatctgtaaatttggactgttttccttcaaccaccattttttttgtggttattatttttgtcacggaaagcatcctctccaaagttggagcttctattgccatgaaccatgcttacaaagaaagcacttcttattgaagtgaattcctgcatttgatagcaatgtaagtgcctataaccatgttctatattctttattctcagtaacttttaaaagggaagttatttatattttgtgtataatgtgctttatttgcaaatcacccactcctttacaaccatactttatatatgtacatacattcatactgtagaaaccagctcatgtgtacctcatatcccatccttaagagaagaaatgttataaagtagaactaaatataaattttcagaattaatgcattcaaagtaatatatcaaatccaggactttgttaacttcaggtaaaaacttcattagggtaatatcatctcaattttttcaaatgaaaggattctctaattagaaatttatatgtcagagctgttataaatttatcaactgtcaaatatgttctggacagctaaatcatttgagatttttggttttttgatttctattccctaacttgtgaagacaatgaaaaatcaggcagaaatatttagtatctagtcagtatctgtagctacactgtataactgttcttcaataaaatggttcatattttatagaaaaaaaaaaaaaaaa

SEQ ID NO: 29493 - DNA, 8085 bp, Homo Sapiens
ctcagctccctgtggtgggggatggcagaggcttcccgctccccgcagctggtttgcacagcctcccgactgtgccgtggtgtctccttccctaaagtgggacagtcgtttctgtgtcctgctggcctctgaggaacagacgtgtgtgagaggccttcagggcctgatggctggggtggtgacagtgcctggagaatgggtggggactggaggggccaggtggctaaccactctcctcttccatggcagcggagctggagttcgcccaaatcatcatcatcgtcgtggtggtcacggtgatggtggtggtcatcgtctgcctgctgaaccactacaaagtctccacgcggtccttcatcaaccgcccgaaccagagccggaggcgggaggacgggctgccgcaggaagggtgcctgtggccttcagacagcgccgcaccgcggctgggcgcctcggagatcatgcatgccccgcggtccagggacaggttcacagcgccgtccttcatccagagggatcgcttcagccgcttccagcccacctacccctatgtgcagcacgagattgatcttcctcccaccatctccctgtccgacggtgaagagccacctccttaccaggggccctgcaccctgcagctccgggaccctgaacagcagatggaactcaaccgagagtccgtgagggccccacccaaccgaaccatatttgacagtgatttaatagacattgctatgtatagcgggggtccatgcccacccagcagcaactcgggcatcagtgcaagcacctgcagcagtaacgggaggatggaggggccaccccccacatacagcgaggtgatgggccaccacccaggcgcctctttcctccatcaccagcgcagcaacgcacacaggggcagcagactgcagtttcagcagaacaatgcagagagcacaatagtacccatcaaaggcaaagataggaagcctgggaacctggtctgattccttccaacgtgcacttcagctggagaaagaaaccaagaagggaagcggccgctgggcccctcctgcgcacagtgttgttcagtttcacatggtacaaataagtaaaaccaaatgagcaaacacggtctttgtttctgattccttttaggggaattgcatgcaaactagactgaaatgatacaaacttccatctggtctgaccgcaaacagtgtttatttggggacaggggttgggatgggggtgtgggcaggggaaaacagagaacgggatgctttgaagataccatgaaataaaacccacagaggtatttgatgtatttaattgtgaaaggagactttgcagataaatgaggccagaatggcatgttttataattaactgaataaagaaggaagcattattatatattattgtggggaagaaccagccagttcgctttttctcctaaggtgtggaacttttattttgttttaaaaatatgaatcaaaattcctgtgttgtgtgccaaggtataaagtggagaagttagatgagtgcaaggagctcctttgtgttgtgatgatgtgttttaaaagttgcactatcttaatgttgaaaatatttacaagggaactgttttacgtgaagttctgtatgttgtcttttcacctgtggattgtaatcaggcccaaggaatatcctggagtggtccccagaagcatccaagaaaagatatttggggacgtagcctaacattttaccaacttacgtaaatcaaaaaagtcattattgttgcaggagtttgcatcaaatagcagtgcatcgctgaagcttttggagacttttggatggaagataagatagggaagattaagttccagcatttctgacttgttattttgagttactctgctactcttaggctgcatagtttatgagaaaatgaacacatgcatttatggatccagtatcatgcagtgctgccctcatcctccagcagtgcaatttcttcagtaatttagatttttttcactatagcatgaaatatattcaaatacataccttattttatgcaataaattgtttaaaatgcaaggtggttattctgcatactgttgaaatatgtgactcctcagtatattcccattgcctctccccctttcctcgacagcttagttcagttctgcagggctgctcagttcacaggaggctcccagcagccaccccacatccagcctacacagaacttcgtgtgggagtggtgtgggtggtggtttcttatgctttggaagcccctagaaataatgacggaagaatgccatgttgctgatcgtggtaataagccattgtgggttattgtatgtcactagtattagcatagcattcttaaaggaatgcagtgttcaaaacctacccaaattcccgcaggattttaccaaacccttccccaggccagttttgtactgaaggcaagaactggacagtcagagaacagtggagggggcaagtgactgaagagcaccgggtaaaaagcacaacatgcagttaaaatgcaactagaaaactaattttaaatattgttagttttaatattcctgatatttacaaatattcattcttatatacaatgaaaaaaataactttcttctgcagatgtaagcactggcttttataagagcagcagccaacacgtttagcagacactgcgcgtggagaagggcttatctgcagtacactctgccatgtggagggtgggcctctgtggcctcttcacataacaagatgagctggaatgatgattccatgactcccacctatgcagccttaaagccaaatccgcgtgtgtgtgtttgtgtctgtctgtgggtctcgaaggtgatccgtcggtgcggtggctctgtgctgtaactggagagactgttccaaaccccaagagttgtctgatcctagtctgttcccttctgcttcttacctctgtagataggtcactggtttttgtttgtttgttttgaggattggaatttccattacattcatcctttgcacacagtaacatccacagaactagtccaactcttaaaaggagagaggaaaaacacaggcaccagttgtcagctcatgcttacaacctgtgtggaagtatatacagttgagagtcacagtggaggttctgagactggattcagtcttgttccagtgacagttggaaggcctctgctggagagacaccagctctcagggcagagattggcttggggccagaaggaccctccccaaccctggagacaccctgaaggttcactggctctccagattagcctctcttcctctgtcaggcaaagatgaggagcccgtgttcccatcgggccctgctggcagggacttgcagtggattcttggtcaggtgtgcccacagatgcggaggcgaggtgagtgattccatcatttcagttctcacctgcagttttggtgaagcaggagatgcaccccacagctctagctctcaaatggcttcacagtccttacttctctacctgcctcaagaaggggctcagagcagagacttgtgaattccttagtaactgtgagtatatgaatgtgttgcacatgtccacagtattggcgagataattacataattcagatacctttaatcatctttcaagaaagaggctcctcccattcaaccaccctagagaactgcctttgttaaatagttatttaaagactcatacatatcaaaccatgactttgaaaggtcttcgaggctggggctctgtaatgaattagtttaaaagccaaggtcataacatgaattgatggtcaatttcccttcagcagaaggaaaaggtgatttagatcagtagctcttttgaaggttgtggctgacctgttcataccgtgtcgcctcatggctagtgtggcgttgaaagagtagcgactgggaagatacaacttacacagtggggcctattgttctttcaagaaccctttttttagcttatagaacccatgggtccagtttagtaacgagtgatttaggcaatcaatgataggtttataatcttagattattccagcaaagtgtggattgcattgttaggaagaacatttggtgggaatgaacactcctgggcataccgctgacttttgtcccttgttcccggtgtaggagacccaaggcatcttgaatcccatctataagaacacaatcttccagcatacgtttgctttttcagaaactctagcattctctttaaatactgacgcaatccttaatggaaaagagatttcatgaagcaaattatgtatttcaatagttcttctatttttagtgtccaaaatttactaatacagaagcttgacaagcatgtcctcaccctccccaccacataaacacatggacacacacccaagccacaagaaatcccaagagagcagaagcgaatttttaaaagatttatcgtgaggactgcatttccattcactaattttggctcaaacttatgaggcaggaaataggggccaacagtaaatgggggaggcctcctgacaccagcagaggaattttgtacccaggcgaggacttcttgaacttctgcgtatctccgtttgatctctttcacctttatttcatcttcataagaatgagaaaggctcaaaaggaagcacttttagaaatcttctctgacctagaagaatccatccaaatccctgccttcctctctgaaccaacagttcccttctctgacaggggccatcctctatcttccatccagcggctcttctttttaggaaggctctggtgcagagcacttcaaatatgtcctcaggccagatactgattgctagtagagagacacccggcacccagtccgaagccctccctcaaaggaccggctcatggcgttggtcactggcaggctcagagacattctgctgtgggcgcagggagcccggccccccatgcagccatgactggatgcgcccccatctcgggggcttgctgcactgcttgtttattgaattttgctacttagaatggcaacattaactttgtgtaccattcattttttaaaaattttccaaagctcggcagtgtatgaaagaaaaaactgggaaagatacttggtttctgttaacttttgtgttgcttgcttaagtgattaaagccagtgcttggagccaagccttcatgccacgaacatgctccacagcctgccctttgctctcctgctcacactgaccaagaatgccgcgtgcttggcctactgaggtgaaaggacaattgaatgacaggtgggcaaagggagaacttccccttcttggtgcgaggaaagtcacaaatttaaaaatgttgcttccagcccagatcctaaatgctagttctcagcagctgcgtggcttaccgttcgccatttccaccaccgccagctgccagcaccgctacagatcacagagatgtgaacagacaatggaaagcactcttagccttgcagtggtctacattttttaggaaccaatatttcagcattctttattacccggcacgctgtgtcctttgcagagttcaagtttatgttactgccagggtcagacagtcatttgctgctgctgctgctgctgctgcttctcgaactggatgcattaggaagctgctgtctgagtgtaggaatgtcttgctaagaaagcaatgtcttccttcatccttttctttcttccctctgcgtgtccttgtttttgtgtaatgcgggagagggttagagctatagagattatatatacactatccgtgcacattatatatatgtagatatacccctatcatgtcagagatctgcatgtcagtttttcagcaactaaggtgcctcatgttctgagttcagcagatataggaaccaagccgccccctcctgcacttgatgctcccacctttgttgtgcctcacttaaaatggtgcttttttcagttgtctgtcttttcttatgtttttatttgtaaggtgctgtatataagttgaatatattatgcacatatcctacccaatgggtagaacaaaaagttgttaatactgtaatataatgtatagatgataccaattttaacagaaatggcatagaatttgtgaatgcctatgtgctttgtcctcttttgtaaggaaatttgcaaatggatgcatacagattaaagtctatgtagtttattttcctattaaatatcaatattataacacaagagaaagaagtgtgaacaaacaagcaacagtttatgaccagcgtatatatagcaatggaaagttgcatctttgctgtgaaaacactttaaagaaaatactttttaaaaaatcccacagctttttggttgccactagacgcttcttattttaatcattttagtaatgctcagctggaccagtgttagttatatttgagtcagaaaaatgttgtttttcaacttgctttataatctcctgcatctatctcctgctgtagcatcacgaaggtgtcaggcaacagtgaaaagtgcacatttttgttgttgcagaaactgtgtcagaggaataagtaaatcagcctgcagcagaagactttgttcagctccagaggcatctgtgaccgtctgtgtccaagtctctctgtgcctttttcttttacaaactgaagctgtggagccaatgaagtaacagtagagattgtagggaaagaatacctcaggaaaaacaaatacacttacaagaagaccctgttcttagaaaatgtgtttagttatgggttagcactagaagagacttggctgtcagccagccaagtgaaggacctctcatccattcccattcatgtcccatcataatacggacccaaaaagcaaactcggttttgccatcagttagaaattacgttttggattgtatattgttacatctctcttccagcttagtttttagtgtctgattgtgacctctgcatttatcttcaaataccctaattttaaaacaaaagaacaagaaaagtttataacaccatgttcactaaaaccacggttgaatcttgggtgtgggcatcctttcgagtgttgtccataagagcagttcgtggaattttgcccatctgacccatattatcagcttattctgccaccagagtagagtctaataaattccaaagtttttatttgctccatggtgtatgttctgactttgaaaatgtcagattctataatcatacccctaacatccaggaaacaaatgacagattatctttaaactgaaattgactctacaatgcaacccttaatgctgaatggattaaaaaagtcagcccttttagtatctgtttgaaagggccgtaaaaagttgacacttttgttgttgtggatcctgcgtgtctagacccacgtgttgtttccatcgtatactgtagggtgcaccccttgggattcatcattaagaactgaggctcactgttgtcagaaacaaagctcccaccccccaggttcaaccttgtgggagaactgttgagcatgagaatgttctagactcagaggtactaaaatttgttaccacatcattgcttcctttctacaggacgaattgaggcttaaactttactgttaatgatactggttcattttaatgtgcttgttggtatgttgctatttttcatttcatagctttcaaaaatcatgctaattgtatacttgtctagtttaaggctattttaaaatatgtacaatactattcacagcatttagttcgtttaatttttattataaagcaatctactaaaaaagtacaactgtatttgaacttttcaatagttgtttgtgagctatgataatcaaaagtcattaaagtcttttttaacaaacattcgtgcttacttttcaacataattcccagttatatacagaaaaagatttccacctgtcacgtatctgcctcttttacctgagcaatggtgtagttcttagacctaaggtctgtaattgcaatacttttaaagaaagatgttgctctaagtgctgtttgttagttatgaaatcagatttttctgcttgttcttaatgctgtggtcaaaccatagcacaaaatcattaaaaataatcagcggcatac

SEQ ID NO: 29494 - DNA, 7108 bp, Homo Sapiens
gcgcgcccgaggctcctacgctgccgcgcccggcttctctccagcgccccgcgccgttagccacgtggaccgactccggcgcgccgtcctcacgtggttccagtggagtttgcagtccttcccgcttctccgtactcgcccccgcctctgagctcccttcccatggcggccctagtgttggaggacgggtcggtcctgcggggccagccctttggggccgccgtgtcgactgccggggaagtggtgtttcaaaccggcatggtcggctaccccgaggccctcactgatccctcctacaaggcacagatcttagtgctcacctatcctctgatcggcaactatggcatccccccagatgaaatggatgagttcggtctctgcaagtggtttgaatcctcgggcatccacgtagcagcactggtagtgggagagtgctgtcctactcccagccactggagtgccacccgcaccctgcatgagtggctgcagcagcatggcatccctggcttgcaaggagtagacactcgggagctgaccaagaagttgcgggaacaggggtctctgctggggaagctggtccagaatggaacagaaccttcatccctgccattcttggaccccaatgcccgccccctggtaccagaggtctccattaagactccacgggtattcaatacagggggtgcccctcggatccttgctttggactgtggcctcaagtataatcagatccgatgcctctgccagcgtggggctgaggtcactgtggtaccctgggaccatgcactagacagccaagagtatgagggtctcttcttaagtaatgggcctggtgaccctgcctcctatcccagtgtcgtatccacactgagccgtgttttatctgagcctaatccccgacctgtctttgggatctgcctgggacaccagctattggccttagccattggggccaagacttacaagatgagatatgggaaccgaggccataaccagccctgcttgttggtgggctctgggcgctgctttctgacatcccagaaccatgggtttgctgtggagacagactcactgccagcagactgggctcctctcttcaccaacgccaatgatggttccaatgaaggcattgtgcacaacagcttgcctttcttcagtgtccagtttcacccagagcaccaagctggcccttcagatatggaactgcttttcgatatctttctggaaactgtgaaagaggccacagctgggaaccctgggggccagacagttagagagcggctgactgagcgcctctgtccccctgggattcccactcccggctctggacttccaccaccacgaaaggttctgatcctgggctcagggggcctctccattggccaagctggagaatttgactactcgggctctcaggcaattaaggccctgaaggaggaaaacatccagacgttgctgatcaaccccaatattgccacagtgcagacctcccaggggctggccgacaaggtctattttcttcccataacacctcattatgtaacccaggtgatacgtaatgaacgccccgatggtgtgttactgacttttgggggccagactgctctgaactgtggtgtggagctgaccaaggccggggtgctggctcggtatggggtccgggtcctgggcacaccagtggagaccattgagctgaccgaggatcgacgggcctttgctgccagaatggcagagatcggagagcatgtggccccgagcgaggcagcaaattctcttgaacaggcccaggcagccgctgaacggctggggtaccctgtgctagtgcgtgcagcctttgccctgggtggcctgggctctggctttgcctctaacagggaggagctctctgctctcgtggccccagcttttgcccataccagccaagtgctagtagacaagtctctgaagggatggaaggagattgagtacgaggtggtgagagacgcctatggcaactgtgtcacggtgtgtaacatggagaacttggacccactgggcatccacactggtgagtccatagtggtggcccctagccagacactgaatgacagggagtatcagctcctgaggcagacagctatcaaggtgacccagcacctgggaattgttggggagtgcaatgtgcagtatgccttgaaccctgagtctgagcagtattacatcattgaagtgaatgccaggctctctcgcagctctgccctggccagtaaggccacaggttatccactggcttatgtggcagccaagctagcattgggcatccctttgcctgagctcaggaactctgtgacagggggtacagcagcctttgaacccagcgtggattattgtgtggtgaagattcctcgatgggaccttagcaagttcctgcgagtcagcacaaagattgggagctgcatgaagagcgttggtgaagtcatgggcattgggcgttcatttgaggaggccttccagaaggccctgcgcatggtggatgagaactgtgtgggctttgatcacacagtgaaaccagtcagcgatatggagttggagactccaacagataagcggatttttgtggtggcagctgctttgtgggctggttattcagtggaccgcctgtatgagctcacacgcatcgaccgctggttcctgcaccgaatgaagcgtatcatcgcacatgcccagctgctagaacaacaccgtggacagcctttgccgccagacctgctgcaacaggccaagtgtcttggcttctcagacaaacagattgcccttgcagttctgagcacagagctggctgttcgcaagctgcgtcaggaactggggatctgtccagcagtgaaacagattgacacagttgcagctgagtggccagcccagacaaattacctatacctaacgtattggggcaccacccatgacctcacctttcgaacacctcatgtcctagtccttggctctggcgtctaccgtattggctctagcgttgaatttgactggtgtgctgtaggctgcatccagcagctccgaaagatgggatataagaccatcatggtgaactataacccagagacagtcagcaccgactatgacatgtgtgatcgactctactttgatgagatctcttttgaggtggtgatggacatctatgagctcgagaaccctgaaggtgtgatcctatccatgggtggacagctgcccaacaacatggccatggcgttgcatcggcagcagtgccgggtgctgggcacctcccctgaagccattgactcggctgagaaccgtttcaagttttcccggctccttgacaccattggtatcagccagcctcagtggagggagctcagtgacctcgagtctgctcgccaattctgccagaccgtggggtacccctgtgtggtgcgcccctcctatgtgctgagcggtgctgctatgaatgtggcctacacggatggagacctggagcgcttcctgagcagcgcagcagccgtctccaaagagcatcccgtggtcatctccaagttcatccaggaggctaaggagattgacgtggatgccgtggcctctgatggtgtggtggcagccatcgccatctctgagcatgtggagaatgcaggtgtgcattcaggtgatgcgacgctggtgacccccccacaagatatcactgccaaaaccctggagcggatcaaagccattgtgcatgctgtgggccaggagctacaggtcacaggacccttcaatctgcagctcattgccaaggatgaccagctgaaagttattgaatgcaacgtacgtgtctctcgctccttccccttcgtttccaagacactgggtgtggacctagtagccttggccacgcgggtcatcatgggggaagaagtggaacctgtggggctaatgactggttctggagtcgtgggagtaaaggtgcctcagttctccttctcccgcttggcgggtgctgacgtggtgttgggtgtggaaatgaccagtactggggaggtggccggctttggggagagccgctgtgaggcatacctcaaggccatgctaagcactggctttaagatccccaagaagaatatcctgctgaccattggcagctataagaacaaaagcgagctgctcccaactgtgcggctactggagagcctgggctacagcctctatgccagtctcggcacagctgacttctacactgagcatggcgtcaaggtaacagctgtggactggcactttgaggaggctgtggatggtgagtgcccaccacagcggagcatcctggagcagctagctgagaaaaactttgagctggtgattaacctgtcaatgcgtggagctgggggccggcgtctctcttcctttgtcaccaagggctaccgcacccgacgcttggccgctgacttctccgtgcccctaatcatcgatatcaagtgcaccaaactctttgtggaggccctaggccagatcgggccagcccctcctttgaaggtgcatgttgactgtatgacctcccaaaagcttgtgcgactgccgggattgattgatgtccatgtgcacctgcgggaaccaggtgggacacataaggaggactttgcttcaggcacagccgctgccctggctgggggtatcaccatggtgtgtgccatgcctaatacccggccccccatcattgacgcccctgctctggccctggcccagaagctggcagaggctggcgcccggtgcgactttgcgctattccttggggcctcgtctgaaaatgcaggaaccttgggcaccgtggccgggtctgcagccgggctgaagctttacctcaatgagaccttctctgagctgcggctggacagcgtggtccagtggatggagcatttcgagacatggccctcccacctccccattgtggctcacgcagagcagcaaaccgtggctgctgtcctcatggtggctcagctcactcagcgctcagtgcacatatgtcacgtggcacggaaggaggagatcctgctaattaaagctgcaaaggcacggggcttgccagtgacctgcgaggtggctccccaccacctgttcctaagccatgatgacctggagcgcctggggcctgggaagggggaggtccggcctgagcttggctcccgccaggatgtggaagccctgtgggagaacatggctgtcatcgactgctttgcctcagaccatgctccccataccttggaggagaagtgtgggtccaggcccccacctgggttcccagggttagagaccatgctgccactactcctgacggctgtaagcgagggccggctcagcctggacgacctgctgcagcgattgcaccacaatcctcggcgcatctttcacctgcccccgcaggaggacacctatgtggaggtggatctggagcatgagtggacaattcccagccacatgcccttctccaaggcccactggacaccttttgaagggcagaaagtgaagggcaccgtccgccgtgtggtcctgcgaggggaggttgcctatatcgatgggcaggttctggtacccccgggctatggacaggatgtacggaagtggccacagggggctgttcctcagctcccaccctcagcccctgccactagtgagatgaccacgacacctgaaagaccccgccgtggcatcccagggcttcctgatggccgcttccatctgccgccccgaatccatcgagcctccgacccaggtttgccagctgaggagccaaaggagaagtcctctcggaaggtagccgagccagagctgatgggaacccctgatggcacctgctaccctccaccaccagtaccgagacaggcatctccccagaacctggggacccctggcttgctgcacccccagacctcacccctgctgcactcattagtgggccaacatatcctgtccgtccagcagttcaccaaggatcagatgtctcacctgttcaatgtggcacacacactgcgtatgatggtgcagaaggagcggagcctcgacatcctgaaggggaaggtcatggcctccatgttctatgaagtgagcacacggaccagcagctcctttgcagcagccatggcccggctgggaggtgctgtgctcagcttctcggaagccacatcgtccgtccagaagggcgaatccctggctgactccgtgcagaccatgagctgctatgccgacgtcgtcgtgctccggcacccccagcctggagcagtggagctggccgccaagcactgccggaggccagtgatcaatgctggggatggggtcggagagcaccccacccaggccctgctggacatcttcaccatccgtgaggagctgggaactgtcaatggcatgacgatcacgatggtgggtgacctgaagcacggacgcacagtacattccctggcctgcctgctcacccagtatcgtgtcagcctgcgctacgtggcacctcccagcctgcgcatgccacccactgtgcgggccttcgtggcctcccgcggcaccaagcaggaggaattcgagagcattgaggaggcgctgcctgacactgatgtgctctacatgactcgaatccagaaggaacgatttggctctacccaggagtacgaagcttgctttggtcagttcatcctcactccccacatcatgacccgggccaagaagaagatggtggtgatgcacccgatgccccgtgtcaacgagataagcgtggaagtggactcggatccccgcgcagcctacttccgccaggctgagaacggcatgtacatccgcatggctctgttagccaccgtgctgggccgtttctagggcctggcttcctcagcctcttctctttaggcccagctgctgggcaaggaattccagtgcctcctacgggggcagcacacttagatattcctggacatccagatagctcacatgtgctgaccacacttcaggctctggactggagctctctggcatgggggtggggcctcagatgctggggcccagtctgccccatcttcattcctgcaccttaaacctgtacagtcatttttctactgacttaataaacagccgagctgtcccttga

SEQ ID NO: 29495 - DNA, 3177 bp, Homo Sapiens
tgcaaacgttcccaaatcttcccagtcggcttgcagagactccttgctcccaggagataaccagaagctgcatcttattgacagatggtcatcacattggtgagctggagtcatcagattgtggggcccggagtgaggctgaagggagtggatcagagcactgcctgagagtcacctctactttcctgctaccgctgcctgtgagctgaaggggctgaaccatacactcctttttctacaaccagcttgcattttttctgcccacaatgagcggggaatcaatgaatttcagcgatgttttcgactccagtgaagattattttgtgtcagtcaatacttcatattactcagttgattctgagatgttactgtgctccttgcaggaggtcaggcagttctccaggctatttgtaccgattgcctactccttgatctgtgtctttggcctcctggggaatattctggtggtgatcacctttgctttttataagaaggccaggtctatgacagacgtctatctcttgaacatggccattgcagacatcctctttgttcttactctcccattctgggcagtgagtcatgccaccggtgcgtgggttttcagcaatgccacgtgcaagttgctaaaaggcatctatgccatcaactttaactgcgggatgctgctcctgacttgcattagcatggaccggtacatcgccattgtacaggcgactaagtcattccggctccgatccagaacactaccgcgcagcaaaatcatctgccttgttgtgtgggggctgtcagtcatcatctccagctcaacttttgtcttcaaccaaaaatacaacacccaaggcagcgatgtctgtgaacccaagtaccagactgtctcggagcccatcaggtggaagctgctgatgttggggcttgagctactctttggtttctttatccctttgatgttcatgatattttgttacacgttcattgtcaaaaccttggtgcaagctcagaattctaaaaggcacaaagccatccgtgtaatcatagctgtggtgcttgtgtttctggcttgtcagattcctcataacatggtcctgcttgtgacggctgcaaatttgggtaaaatgaaccgatcctgccagagcgaaaagctaattggctatacgaaaactgtcacagaagtcctggctttcctgcactgctgcctgaaccctgtgctctacgcttttattgggcagaagttcagaaactactttctgaagatcttgaaggacctgtggtgtgtgagaaggaagtacaagtcctcaggcttctcctgtgccgggaggtactcagaaaacatttctcggcagaccagtgagaccgcagataacgacaatgcgtcgtccttcactatgtgatagaaagctgagtctccctaaggcatgtgtgaaacatactcatagatgttatgcaaaaaaaagtctatggccaggtatgcatggaaaatgtgggaattaagcaaaatcaagcaagcctctctcctgcgggacttaacgtgctcatgggctgtgtgatctcttcagggtggggtggtctctgataggtagcattttccagcactttgcaaggaatgttttgtagctctagggtatatatccgcctggcatttcacaaaacagcctttgggaaatgctgaattaaagtgaattgttgacaaatgtaaacattttcagaaatattcatgaagcggtcacagatcacagtgtcttttggttacagcacaaaatgatggcagtggtttgaaaaactaaaacagaaaaaaaaatggaagccaacacatcactcattttaggcaaatgtttaaacatttttatctatcagaatgtttattgttgctggttataagcagcaggattggccggctagtgtttcctctcatttccctttgatacagtcaacaagcctgaccctgtaaaatggaggtggaaagacaagctcaagtgttcacaacctggaagtgcttcgggaagaaggggacaatggcagaacaggtgttggtgacaattgtcaccaattggataaagcagctcaggttgtagtgggccattaggaaactgtcggtttgctttgatttccctgggagctgttctctgtcgtgagtgtctcttgtctaaacgtccattaagctgagagtgctatgaagacaggatctagaataatcttgctcacagctgtgctctgagtgcctagcggagttccagcaaacaaaatggactcaagagagatttgattaatgaatcgtaatgaagttggggtttattgtacagtttaaaatgttagatgtttttaattttttaaataaatggaatactttttttttttttttaaagaaagcaactttactgagacaatgtagaaagaagttttgttccgtttctttaatgtggttgaagagcaatgtgtggctgaagacttttgttatgaggagctgcagattagctaggggacagctggaattatgctggcttctgataattattttaaaggggtctgaaatttgtgatggaatcagattttaacagctctcttcaatgacatagaaagttcatggaactcatgtttttaaagggctatgtaaatatatgaacattagaaaaatagcaacttgtgttacaaaaatacaaacacatgttaggaaggtactgtcatgggctaggcatggtggctcacacctgtaatcccagcattttgggaagctaagatgggtggatcacttgaggtcaggagtttgagaccagcctggccaacatggcgaaacccctctctactaaaaatacaaaaatttgccaggcgtggtggcgggtgcctgtaatcccagctacttgggaggctgaggcaagagaatcgcttgaacccaggaggcagaggttgcagtgagccgagatcgtgccattgcactccagcctgggtgacaaagcgagactccatctcaaaaaaaaaaaaaaaaaaaaaggaaagaactgtcatgtaaacataccgacatgtttaaacctgacaatggtgttatttgaaactttatattgttcttgtaagctttaactatatctctctttaaaatgcaaaataatgtcttaagattcaaagtctgtatttttaaagcatggctttggctttgcaaaataaaaaatgtgttttgtacatgaa

SEQ ID NO: 29496 - DNA, 11554 bp, Homo Sapiens
ccacaccgagcaccagcttctccgacgccgggaagccgctgtcgccgccgctacctctccctgttgccgccgcctcagatctcttcatgccgctgtaagctcggaggccaaggatgcggagtaggcttcccccagcgcttgccgccctgggcgcggccctgctcctgtcttccattgaggcagaagttgacccaccttcagacttgaattttaaaattatagatgaaaatactgttcatatgtcatgggcaaaaccagttgatccaattgtgggttacagaataacggtggaccctacaacggatgggcctactaaagaatttaccctttcagctagtaccactgaaactttattgtcagaacttgtacctgaaacagagtatgtggtgacaataacttcatatgatgaagtagaagaaagtgtaccagttataggacaactaacaattcaaacaggtagttcgacaaagccagtggagaagaaacctggaaaaaccgagatacaaaaatgctctgtcagtgcctggactgatttggttttcctcgtggatggctcttggagtgtgggaagaaataatttcaagtacattttagacttcattgctgctcttgtgtctgcttttgacattggggaagagaagacaagagttggagttgttcaatacagctctgataccaggactgaatttaacttaaatcagtactaccaaagggatgaacttcttgctgcaataaaaaaaattccatataaaggtggcaacacaatgacaggggatgccattgattatttagttaaaaatactttcacggaatctgctggggcaagagttggctttcctaaagtggcaattattattacggatggaaaatcccaggatgaagtggaaattccagcaagagagcttcgtaatgttggagttgaagttttctccttgggcattaaagctgcagatgcaaaagaactcaaacaaattgcctccacaccttcactgaaccatgttttcaatgtggccaactttgatgcaattgtggatattcagaatgagatcatctcccaggtgtgctcaggtgttgatgaacaacttggtgaattggttagtggagaagaagttgttgagcctccttcaaatttgattgccatggaagtctcttcaaaatatgttaagctaaattggaatccatctcctagtccagtgactggctacaaagtcatcctcacaccaatgactgcaggaagccgacagcacgctctgagtgtggggcctcagacaaccacgctcagtgttcgcgacctctcagcagacacagaataccagatcagtgtttccgccatgaagggaatgacatccagtgaacccatttcaataatggagaagactcagccaatgaaagttcaagtggaatgctcacgtggtgtggatataaaagccgatattgtgtttttggttgatggctcctatagcattgggattgcaaactttgttaaagttagagcctttttggaagttcttgtaaaaagttttgaaatttcaccaaatagggtccagattagtcttgtgcaatacagccgggatcctcatactgagttcactttgaaaaaattcaccaaagttgaagatataattgaagcaataaacaccttcccttacagaggaggatctacaaatactggcaaagcaatgacttatgtcagagagaaaatatttgtgcctagcaagggatcaagaagcaatgtgccaaaggtcatgattcttatcacggatgggaaatcatcagatgctttcagagatcctgcgataaaactgaggaattcagatgttgaaatctttgcagttggtgtgaaggatgccgttcgctcagaattggaagctattgcctctcctcctgcagagacccatgtgttcacagtggaagattttgatgcttttcagaggatatcttttgaactcacacagtctatctgccttagaattgagcaagaattggcagctataaagaagaaagcttacgtccctccaaaggatcttagtttttcagaagtgacttcttatggtttcaaaaccaactggtctccagctggagaaaatgttttttcatatcacatcacctacaaggaagcggctggggatgatgaggtcactgtggtggagccagcatcgagcaccagtgttgttctcagcagcctgaagccagagaccttgtatttggtcaatgtgactgcggagtatgaggatggcttcagcattcccttagctggagaggagaccaccgaagaagtaaaaggagcacctcgaaacctaaaggtgacagatgagactacagatagtttcaaaattacttggactcaagctccagggagagttttaagatatcgaattatatatagaccagttgctggtggagagagcagagaagttaccaccccacccaatcagaggaggagaacactggagaacttgattccagacacgaaatatgaagtatctgtaattcctgaatatttctcaggacctggtactccattaactggaaatgcagccactgaagaagttagagggaatccaagagacttaagagtttctgaccctacgacgtctactatgaaattatcttggagtggggcaccaggaaaagtgaaacagtatctcgtcacatataccccagtggcagggggtgaaactcaagaggtcactgtgaggggagatacaaccaatacggtgctgcagggattgaaggaagggacacaatacgccttatctgtgacagccttgtatgcgtctggggctggagacgccctctttggtgaaggaacaacacttgaagaacgtggttctcctcaagatttagttactaaagacatcactgacacatcaattggggcttattggacatctgctccaggaatggttcgcggttacagggtctcatggaaatcactttatgatgatgttgacactggagagaaaaatctgcctgaagatgcaattcatacgatgatagaaaatctgcagccagagaccaaatacagaatttcagtatttgccacttacagcagtggagaaggagaacctttgactggagatgccacaactgaattatctcaagattccaaaaccctgaaagtagatgaagaaacagaaaacacaatgagagttacatggaaaccagcaccagggaaagtcgtcaactaccgtgttgtctatcgccctcatgggagagggaagcaaatggttgctaaggtgccccccacagtcacttcgacagtgttaaagcgacttcagccacagaccacatatgacatcacagttcttcctatttacaagatgggagaaggaaagcttaggcaaggatcaggaacaacagcttctcggtttaagtctcctagaaacctcaaaacatctgacccaaccatgtcaagcttccgagtgacttgggagcctgcccctggggaagtgaagggttataaagtcacattccaccctacgggggatgacagaagactgggggagttagtggttggaccctatgacaacacagttgttttggaggaacttagggctggtaccacctataaagtaaatgtttttggaatgtttgatggaggagaaagctcaccacttgttggacaagaaatgacaaccctttccgacacaactgttatgccaattttatcttctgggatggagtgtctcaccagagctgaggcagacattgtgttgctggtggatggatcatggagcatcggccgggcaaattttagaaccgtgaggagtttcatttctcgtattgtggaagtctttgacattggccccaaaagagtacaaattgctcttgctcagtatagtggggatcccagaacagagtggcagttaaatgcacacagagacaagaagagcttgttgcaagctgtggcaaacttgccgtacaaaggaggcaatactctcacaggcatggctttgaatttcattcgccaacagaacttcaggacccaagctggcatgagacctcgagctcgaaaaattggtgtgctcattactgatggaaaatcacaagacgatgttgaagcaccttcaaagaaactcaaggatgagggagtggagctgtttgctattggtattaaaaatgctgatgaagtcgaattaaagatgattgcaactgatcctgatgatacccatgcatacaatgtggcagattttgagtcactctccaggatagtggatgatctcaccattaatttgtgtaacagtgtcaaaggtccaggtgatttggaagcaccttctaacttagttatttctgagcgaacccatcgttcttttagagtgagctggacaccaccttctgacagtgtggatcgatataaggtggaatactatccagtttctggagggaaacgtcaagaattttatgtgagtcgaatggaaactagcacagtgctgaaagatctgaaacctgaaactgaatatgttgtcaatgtgtattctgtggtagaagatgaatatagtgagcctctgaaggggacagaaaaaaccttgccagtgcctgtagtcagcctgaatatttatgatgttggccctaccaccatgcatgtgcagtggcagcctgtgggaggagctactggctacatcttgtcatacaaacctgttaaggacacagagccaacaagacccaaagaggtgcgtttggggccaacagtgaatgacatgcagctgactgaccttgttcccaacacggagtatgcagtcacagtccaggctgtcctgcacgacctcactagtgaacctgtcactgttcgggaagtcaccttgcctttacccagacctcaggatctgaaactcagagatgtgactcacagcactatgaatgtcttttgggaacctgtgcctggaaaagtgcgtaaatatattgttcgatacaaaacaccagaagaggatgtcaaagaggtagaggtggacagatcagagaccagcacttccctcaaagacctcttctcacagaccttgtacacagtcagcgtttctgcagtacatgacgagggggagtctcctccagtgactgctcaagaaactacccgacccgtgccagccccaacaaacttaaagattactgaagtaacatcagagggtttcagagggacttgggatcatggagcttcagatgtgtctctctacagaataacttgggcaccttttggaagctcagataagatggagaccatcttaaatggagatgaaaacactttggtgttcgaaaacctgaaccccaacaccatctatgaagtttccattactgccatctatcctgatgagtcagaaagtgatgacctgattggcagtgagcgcactctgcctatcttaacaacacaagctcccaaaagtggcccacgaaaccttcaagtgtacaatgcaacatctaacagcctgactgttaagtgggatcctgctagtggtcgtgtgcagaaatataggatcacttatcagccttccacaggggaaggcaatgagcaaacgaccacaataggaggacggcagaacagtgtggtcctgcagaaactgaagccagacactccttacactatcaccgtatcctctctgtatcctgatggtgaaggaggtcggatgacgggaagaggcaagaccaaacctctaaacactgtaaggaacctgagagtgtatgacccttctaccagcaccttgaatgtccgctgggaccatgcagagggaaatcctcgtcagtacaagctcttctatgcaccagcagcaggtggtccagaggaactggtaccaatccccgggaataccaattatgccattcttaggaatctgcagccagatacctcatacactgtgactgtagttcccgtttatactgaaggtgatgggggacgcacatcagatactggaaggacattgatgagaggactggcaagaaatgtccaagtatacaatcctacacctaacagcctcgatgttcgctgggaccctgctccaggacctgtgctgcaatatcgcgttgtgtattctcctgtggatggcacaagaccctcagaatctatagtagtgccaggaaacacgcgcatggtgcatctggagcggctgattccggacacactctattccgtgaaccttgtggctctgtactcggatggagagggaaatcccagccctgcccagggccgaacgctaccacgcagtggaccaaggaacctgagagtctttggtgaaacaaccaatagcctctcggtagcctgggatcatgctgatgggccagttcagcagtacaggatcatctattctcccactgttggtgatccaattgatgaatataccacagtcccaggcagaagaaacaatgtaatactgcagcccctgcaacctgacactccatataaaattactgttattgctgtttatgaagatggagatggtggccatctaacaggaaatggaagaactgtgggactccttcctcctcagaacatacacatctctgacgaatggtatacaagattcagggtgtcctgggatccttcaccttctccagttcttggatataaaatagtatataagccagtgggttccaatgagcccatggaagcctttgttggagaaatgacatcatataccttacacaatctcaatcccagcaccacctacgatgtgaatgtttatgctcaatatgattctggactcagtgtccccttgacagatcaaggcactacattatatttaaatgtaacagatctgaaaacttaccagattgggtgggatacattctgtgtcaaatggtcacctcaccgggcagccacctcctacaggctaaaactaagccctgcagatggaacaaggggacaagaaattacagtgcgtggatcagaaaccagtcactgcttcactggcctttcaccagacactgattatggtgtcactgtttttgtgcagacaccaaatctcgagggaccaggagtctctgttaaagaacataccactgtgaaaccaacagaagcccctacagagccacccacacctcctccccctcccaccattccaccagcccgggatgtatgcaaaggggccaaggcagatattgtgttcttgactgatgcctcctggagcattggggacgataattttaacaaagttgtaaaattcatcttcaatactgtgggaggctttgatgaaatcagtcctgctgggattcaggtttcatttgtgcaatacagcgatgaggtcaagtctgagttcaagctgaacacgtacaatgacaaggccctagcccttggggccctccagaatattaggtacagaggaggaaacacaagaacaggcaaggccctcacgtttatcaaggagaaagtcttgacttgggagagcggcatgaggaagaatgtccctaaggtgttggttgtggtcacggacggtcggtcccaggatgaggtcaagaaggcggctttggtcatccagcagtcagggttcagtgtctttgtagttggtgtggctgatgtcgactacaatgagcttgccaacattgccagcaaaccaagtgaacggcacgtgttcattgtggacgactttgaatcttttgagaagatcgaagacaatcttattacatttgtttgtgaaactgccacttcaagttgtcctctcatttatttggatggctacacctcaccaggttttaaaatgcttgaagcatacaacctgacagaaaagaattttgcttctgtacaaggagtatctttggagtcagggtctttccccagctactcagcatacaggattcagaagaatgcgtttgtgaatcagcctacagcagacctacacccaaatggactccctccttcatacacgattatattattattcagacttctcccagaaactcccagtgacccttttgcaatttggcaaatcacagacagagactacaaaccacaagttggagtgattgcagatccttctagcaagacgttatcattctttaacaaggatacaagaggcgaggtgcaaactgttacatttgacacagaagaagtaaagacattattttatggaagttttcacaaggttcatattgtagtgacctcaaaaagtgttaagatttacattgactgctatgaaattatagaaaaagacatcaaggaagctggaaatataacaactgatggttatgaaattcttggaaaactccttaaaggggaaaggaaatcagccgcattccaaatccagagttttgacattgtctgcagtccagtgtggaccagtagagacagatgctgtgatattccctctaggagagatgagggaaaatgccctgcttttccaaattcttgcacatgtacacaggacagcgttggacctccaggacctccaggccctgcaggaggacctggtgctaaaggtcccagaggtgaaagaggtatcagtggggcaattgggccccctggtcctcgtggagacataggtcctccaggcccccagggtcctccaggccctcagggacccaatggactctctattccgggagagcaaggtcgccaagggatgaaaggtgatgctggagagccaggacttccaggccgaacaggaaccccaggattacctggcccaccaggaccaatgggacctccaggagacagaggcttcactggaaaagacagtgcaatgggacccaggggcccaccagggcggccgggaagcccaggctccccaggagtcacaggaccaagtgggaagccaggaaaacctggagatcatggcagaccaggtccatctgggttgaaaggagaaaaaggtgataggggagacattgcttcccagaacatgatgcgagcagttgcaagacaagtctgtgaacaattgataagtggtcagatgaacagattcaatcagatgctgaatcagattccaaatgattaccagtccagtcgcaaccagccaggcccgccgggtccaccgggacctcctggtagcgcaggagccagaggagaacctgggcctggggggcggccaggcttcccgggcacaccagggatgcagggaccccctggggaacgaggtttgccaggagagaaaggtgaaaggggtactggatcttcaggacctcgggggctgcctgggcccccaggtccacaaggagaatccagaacaggtccaccagggtccacaggttcaagaggtccccctggcccccctggccgtcctggaaactcaggtatccagggccccccaggtcctcctggatactgtgattcttctcagtgtgccagcatcccatacaacgggcaaagctatccaggttccggctaacacattttctaagtcgccagtgctgcttacagtttgaatacatgaaaatcctgtttctgagatgtttgcgcacgtgcttattaggaaatgagtctgtatggaaatctcaccacagataatggttaacgaaccgggtcgacatcacaaaggagggtggagactctttttactaacttgaatgagacaaaagcagtggtgtcagtttataatcctgatgcatttcagtaataatgtagaaaaacattattttaaaaaagttccaacacacagccatgaggagccatgaggagcctcagttttgaaagaggtgcataataaaactactaaccagaggagtctatgccattttaagaaaaacaattaacctggttaaagagaaatgtcttatgtaaataataaactaattgtggcttgtaaatgatttgtatgtgatcctgtcgactaaaatcacttaacaattctacaataagcttctgcatcaaagcctgccgcttgctctatgccggaataacaccaaatggaatctcctcatctcttgcttgttagcgatgtgtctgattcagggcatctgtctttttgttacttttttgtccgtgtcctctcatttgggttttgtaactgcaattttcaaaccaaagtttaaaatcaccttttcttcctgttttgctgtagtcactggtgttcctcacccaccagctgtaactcagtttgtgtgaggtacagccacagaagatgtcatgtactgtatattacctggtgatagttgcttttcaccccccgagttcagtttctaggagccaatgaaacttcccctcacctcctcatctttccaagttgttctttgaattgaggagtttgaaggcataaacagttacttggggatttgcgaaaatcctacttagttactgcgtttacagttctttggcccagtctctgacccttcccaagtatttgtgcaatgattgtgtttactgctggatttttgaaggtttttttttttaagaaagtgccatttcattatttgattatcaccaaattatctggaaataattgggacattgtaacttatctatttatagttatgagattaagactggagtgccatcaccgcgggtgatgatttagcttttgctgtgtgtgtgtgtgtgtgtgtgccttccaaatcatgccataattgtaatgttgaatcggacagagccttacgtgcccgagggcggggcctacctgcctgagcgcgagcccttcatcgtgccggtggagcccgagcggacagcggaatacgaggactacggcgcagacgagcctgcagaggagcctcctgagccccaccggcgctggcggcgcgccctgccccacggacccgggcagtgaaccagagatcacgcgccgcgccgcgaggcttgggggaggtgttgaaattctcatttacaggtcagatagagcagtgtacgtcttttctgaggtgtttcttccagcgttgctcatccaggagtaccctttctgattgtagagaaccttgtttctgcaggaagcctagctccaagcacgcagtctgtagacatttttgcctttgcccttgaaatgcttgcaaaatactttgttaacaaaagctgcaaagagagaacatgccgtgtgcctttagttagcacagcgggcagcctcagtgaaactcttaggttaagcagttaagtcctggaacccagagctgctgtgtatttcgagcgggcagtttatcttttgctatacttattttcaattcaattacaccacgattcaaataattcccctcctaaaaccaaaaaggagggaaacgtcaactccattgcaattacttatcttcctcttctatctctgttatacgccggggcatagaatgctcgtatacatctctttaacaaccacaaaccttaagccatgtagatgaagttagtgcatcaacgggatacagttccatattgccttaaacctccttgttttagacacactaacatttataccaaattgcagattattctgcagagagggaattgcatgtttgtgttgtatatttagtatgaacttttttcagaatataatatttcttagttatcaaaagtagttggaaaacatttgcaagactatgaacatagaattgctgcttttatattttaactgcagattgtgaatttcactgccttatattatttatttctgaaacaaaagaggcatttttcaataaaactactgaaaatttgaaaaaaaaaaaaaaa

SEQ ID NO: 29497 - DNA, 5064 bp, Homo Sapiens
gagaaggggaccttcaggtccaggcaaagggggaacttctgtcgtgggaacgaaaaagaaagaggatttacagggtggggggacagaggggcagcaggaaccagaagggagacagtggcggtcgcaccggggccgatccgagagttccccttagagaacggagctcacgggcggggaggcctcacctgctagtaggacgcagaaagacagaaggcgaaggagaccccctgccgtagccatcttgcctctctgctgagcggaagcccccgttcggctcctgtctgttagcggcctctctaggctaccactgacaccgtctctgtggcccggagcctaagagaccggaagttcgtgtttccaggcgcttccggaaaccgcgggagagggtcgctgacgtggaggcgtccgaagggcagcagggtgtgtcggggctcggattaagacatcggagtcggagacctgagagatgttaaccaaattcgagaccaagagcgcgcgggtcaaagggctcagctttcaccccaaaagaccttggatcctgactagtttacataatggggtcatccagttatgggactatcggatgtgcactctcattgacaagtttgatgaacatgatggtccagtgcgaggcattgacttccataagcagcagccactgttcgtctctggaggagatgactataagattaaggtttggaattacaagcttcggcgctgtcttttcacattgcttgggcacttagattatattcgcaccacgttttttcatcatgaatatccctggattctgagtgcctccgatgatcagaccatccgagtgtggaattggcaatctagaacctgtgtttgtgtgttaacagggcacaaccattatgtgatgtgtgctcagttccaccccacagaagacttggtagtatcagccagcctggaccagactgtgcgcgtttgggatatttctggtctgaggaaaaaaaacctgtcccctggtgcggtggaatcggatgtgagaggaataactggggttgatctatttggaactacagatgcagtggtgaagcatgtactagagggtcacgatcgtggagtaaactgggctgccttccaccccactatgccccttattgtatctggggcagatgatcgtcaagtgaagatctggcgcatgaatgaatcaaaggcatgggaggttgatacctgccggggccattacaacaatgtatcttgtgccgtcttccaccctcgccaagagttgatcctcagcaattctgaggacaagagtattcgagtctgggatatgtctaagcggactggggttcagactttccgcagagaccatgatcgtttctgggtcctagctgctcaccctaaccttaacctctttgcagcaggccatgatggtggtatgattgtgtttaagctggaacgggaacggccagcctatgctgttcatggcaatatgctacactatgtcaaggaccgattcttacgacagctggatttcaacagctccaaagatgtagctgtgatgcagttgcggagtggttccaagtttccagtattcaatatgtcatacaatccagcagaaaatgcagtcctgctttgtacaagagctagcaatctagagaatagtacctatgacctgtacaccatccctaaagatgctgactcccagaatcctgatgcgcctgaagggaaacgatcctcaggcctgacagccgtttgggtcgctcgaaatcggtttgctgtcctagatcggatgcattcgcttctgatcaagaatctgaagaatgagatcaccaaaaaggtacaggtgcccaactgtgatgagatcttctatgctggcacaggcaatctcctgcttcgagatgcggactctatcacactctttgacgtacagcagaagcggactctggcatctgtgaagatttctaaagtgaaatacgttatctggtcagcagacatgtcacatgtagcactactagccaaacacgccattgtgatctgtaaccgcaaactggatgctttatgtaacattcatgagaacattcgtgtcaagagtggggcctgggatgagagtggggtatttatctataccacaagcaaccacatcaaatatgctgtcaccactggggaccacgggatcattcgaactctggatttacccatctatgtcacacgggtgaagggcaacaatgtatactgcctagacagggagtgtcgtccccgggtactcaccattgatcccactgagttcaaattcaagctggccctgatcaacagaaaatatgatgaggtactgcacatggtgaggaatgccaaactagttggccagtctattattgcttatctccagaagaagggctatcctgaagtggcactgcattttgtcaaggatgagaaaactcgctttagtctggcactggagtgtggaaacattgagattgctctggaagcagccaaagcactggatgacaagaactgctgggaaaagctgggagaagtggccctgctgcaggggaaccaccagattgtggaaatgtgctatcagcgtaccaaaaactttgacaaagtttccttcctgtatcttatcactggcaacttagaaaaacttcgcaagatgatgaagattgctgagatcagaaaggacatgagtggccactatcagaatgccctatacctgggtgatgtgtcagagcgtgtgcggatcctgaagaactgtggacagaagtccctggcctatctcacagctgctacccatggcttagatgaagaagctgagagcctaaaggagacatttgacccagagaaggagacaatcccagacattgaccctaatgccaagctgctccagccacctgcacctatcatgccattggataccaattggcctttattgactgtatccaaaggattttttgaaggcaccattgccagcaaagggaagggaggagcactggctgctgacattgacattgacactgttggtacagagggctggggagaggatgcagagctgcagttggatgaagatgggtttgtggaggctacagaaggtttgggggatgatgctcttggcaagggacaggaagaaggaggtggctgggatgtagaagaagatctggagctccctcctgagctggatatatcccctggggcagctggtggggctgaagatggtttctttgtgcccccaaccaagggaacaagtccaactcagatctggtgtaataactctcagcttccagttgatcacatcctggcaggctctttcgaaacagccatgcggctccttcatgaccaagtaggggtaatccagtttggcccctacaagcaactgttcctacagacatacgcccgaggccgcacaacctatcaggctctgccctgcctaccctccatgtatggctatcctaatcgcaactggaaggatgcagggctgaagaatggtgtaccagctgtgggcctgaagcttaatgacctcatccaacggttgcagctgtgctaccagctcaccacagttggcaaatttgaggaggctgtggaaaaattccgttccatccttctcagtgtgccacttcttgttgtggacaataaacaagagattgcagaggcccagcagctcatcaccatttgccgtgagtacattgtgggtttgtccgtggagacagaaaggaagaagctgcccaaagagactctagaacagcagaagcgcatctgtgagatggcagcctatttcacccactcaaacctgcagcctgtgcacatgatcctggtgctgcgtacagccctcaatctgttcttcaagctcaagaacttcaagacagctgccacctttgctcggcgcctactagaactcgggcccaagcctgaggtggcccaacagacccgaaaaatcctgtctgcctgtgagaagaatcccacagatgcctaccagctcaattatgacatgcacaacccctttgacatttgtgctgcatcatatcggcccatctaccgtggaaagccagtagaaaagtgtccactcagtggggcctgctattcccctgagttcaaaggtcaaatctgcagggtcaccacagtgacagagattggcaaagatgtgattggtttaaggatcagtcctctgcagtttcgctaaggccccctttgtgtgcatgggtcagtcaccatatgttccccccagagaatgtgtctatatcctccttctaacagcaccttccccctgcagctactcttcagatctggctctctgtaccctaaaacctagtatctttttctcttctatggaaaatccgaaggtctaaacttgacttttttgaggtcttctcaacttgactacagttgtgctcataattgtccttgcctttccagcttaattattttaaggaacaaatgaaaactctgggctgggtggagtggctcatacctgtaatcccagcactttgggaggctacggtgggcagatcatctgaggccaggagttcgagacctgcctggccaacatggcaacaccccgtctctaataaaaatataaaaattagcctggcatggtagcatgcgcctatagtcccagctgctcaggaggctgaggcatgagaatcgcttgaacctaggaggtggaggttgcattcaactgagatcataccacttcattccagcctgggtgacagagcaagactctgtctcaaaaaaaaaaaaaaaaaaaaaaaaaaaaaaaaaaggaaaactctgtgatggacatttgtttagtaaatcccttcagtatttatccctcctttccccacagcagctttctttcctgtcaactagaaaggagcaggatgtaataaatacattttggtgtgactaggccacaccaactcttaatcatctcccattttccttagacatttaaatttcaaggcaggtaccctctgtgtactcagaaatttgaagaagttatttggttttccaaaatgcacactgcgggttattgatttgttctttacaactattgttctcatatttctcacactaaataaatctctatgagagcttcttgaaaaaaaaaaaaaaaaagcg

SEQ ID NO: 29498 - DNA, 3187 bp, Homo Sapiens
cgcccggagtcggagccgggagcgctagcggcagccggatcgcagcctgcggggcccgccgcagccatgggcaaccgcggcatggaagatctcatcccgctggtcaaccggctgcaagacgccttctctgccatcggccagaacgcggacctcgacctgccgcagatcgctgtggtgggcggccagagcgccggcaagagctcggtgctcgagaatttcgtaggcagggacttcttgcctcgaggatctggcattgtcacccgacgtcccctggtcttgcagctggtcaatgcaaccacagaatatgccgagttcctgcactgcaagggaaagaaattcaccgacttcgaggaggtgcgccttgagatcgaggccgagaccgacagggtcaccggcaccaacaagggcatctcgccggtgcctatcaacctccgcgtctactcgccgcacgtgctgaacctgaccctggtggacctgcccggaatgaccaaggtcccggtgggggaccaacctcccgacatcgagttccagatccgagacatgcttatgcagtttgtcaccaaggagaactgcctcatcctggccgtgtcccccgccaactctgacctggccaattctgacgccctcaaggtcgccaaggaggtggacccccagggccagcgcaccatcggggtcatcaccaagctggacctgatggacgagggcacagatgcccgtgatgtgctggagaacaagctgctccccctgcgcagaggctacattggagtggtgaaccggagccagaaggacattgatggcaagaaggacattaccgccgccttggctgctgaacgaaagttcttcctctcccatccatcttatcgccacttggctgaccgtatgggcacgccctacctgcagaaggtcctcaatcagcaactgacgaaccacatccgggacacactgccggggctgcggaacaagctgcagagccagctactgtccattgagaaggaggtggaggaatacaagaacttccgccctgatgacccagctcgcaagaccaaggccctgctgcagatggtccagcagtttgccgtagactttgagaagcgcattgagggctcaggagatcagatcgacacctacgaactgtcagggggagcccgcattaaccgaatcttccacgagcgcttccctttcgagctggtcaagatggagtttgatgagaaggaactccgaagggagatcagctatgctatcaagaatatccatggcattagaacggggctgtttaccccagacatggcctttgagaccattgtgaaaaagcaggtgaagaagatccgagaaccgtgtctcaagtgtgtggacatggttatctcggagctaatcagcaccgttagacagtgcaccaagaagctccagcagtacccgcggctacgggaggagatggagcgcatcgtgaccacccacatccgggagcgcgagggccgcactaaggagcaggtcatgcttctcatcgatatcgagctggcttacatgaacaccaaccatgaggacttcataggctttgccaatgctcagcagaggagcaaccagatgaacaagaagaagacttcagggaaccaggatgagattctggtcatccgcaagggctggctgactatcaataatattggcatcatgaaagggggctccaaggagtactggtttgtgctgactgctgagaatctgtcctggtacaaggatgatgaggagaaagagaagaaatacatgctgtctgtggacaacctcaagctgcgggacgtggagaagggctttatgtcgagcaagcatatctttgccctctttaacacggagcagaggaatgtctacaaggattatcggcagctggagctagcctgtgagacacaggaggaggtggacagctggaaggcctccttcctgagggctggcgtgtaccctgagcgtgttggggacaaagagaaagccagcgagaccgaggagaatggctccgacagcttcatgcattccatggacccacagctggaacggcaagtggagaccatccggaatcttgtggactcatacatggccattgtcaacaagaccgtgagggacctcatgcccaagaccatcatgcacctcatgattaacaataccaaggagttcatcttctcggagctgctggccaacctgtactcgtgtggggaccagaacacgctgatggaggagtcggcggagcaggcacagcggcgcgacgagatgctgcgcatgtaccacgcactgaaggaggcgctcagcatcatcggcaacatcaacacgaccaccgtcagcacgcccatgcccccgcccgtggacgactcctggctgcaggtgcagagcgtaccggccggacgcaggtcgcccacgtccagccccacgccgcagcgccgagcccccgccgtgcccccagcccggcccgggtcgcggggccctgctcctgggcctccgcctgctgggtccgccctggggggggcgccccccgtgccctccaggccgggggcttcccctgaccctttcggccctccccctcaggtgccctcgcgccccaaccgcgccccgcccggggtccccagccgatcgggtcaggcaagtccatcccgtcctgagagccccaggccccccttcgacctctaaacagatccctcctcttctcggagacctccctttccaagcctgcctggacggctgttctgtgacttgacagtggctcccccagccccaaagccagcccccttcatctgtgacttaatctgttgtagtggtgagctgatacattcaggtgtgaccgttggtgaaaacttgtgccccttctgtggtatgcccttgccctgttctataaatatctataaatactcatatatatacacacctacacatggccaaccgcctcgcctctagcgctgggaatcagtcactgtgctatccttgtggagtcttgtggcccaactaccagagaacgctgtcccccgacatcccactccaaagtgtgccacctccagtgagcctccttgtcatgcccggcctgtggacagccagcccccgccatccctcccaccccctaccaagcatgggggtgctgtgcaggcagccgtgtggcctgacagtttctaccagtcctgctgtccctcggctgagaataaaacccatttctggatgatgg

SEQ ID NO: 29499 - DNA, 3046 bp, Homo Sapiens
agtcacgtgacatgaggagaggtgggcgggtacctggaggaagctcgcggcgtcggtggcggtggcgcgcggcggccgctgagaccggggctttgagtcgcaccccgcggcccgccccccgccgccaccctcgcagatccgtgctttttcccctttgcttctctcccgtactgggtcagtcctgtccgcgctcgcgcgtcggtttgcgggtgtgcgcaggcgcggcaggggccattagccctttgggtgggcggtggagcccgggagcgcgcgggcgagaccatggcgggtagcagcactgggggcggtggggttggggagacgaaggtgatttaccacctggatgaggaagagactccctacctggtgaagatccctgtccccgccgagcgcatcaccctcggcgatttcaagagcgtcctgcagcggcccgcgggcgccaagtactttttcaagtctatggatcaggatttcggggtggtgaaggaagaaatttcagatgacaacgcccgcctcccctgcttcaacggaagggtggtatcctggctggtgtcctcagataatccccaacccgagatggcccctccagtccatgagcctcgggcagaactggcgcctccagccccacctttacctcctttgccacccgagaggaccagcggcattggggactcaaggcctccatccttccaccctaatgtgtccagcagccatgagaatctggagcctgagacagaaaccgagtcagtagtgtcactgaggcgggagcggcctcgcaggagagacagcagtgagcatggcgctgggggccacaggactggtggcccctcaaggctggagcgccacctggccggatacgagagctcctctaccctcatgaccagcgagctggagagtaccagcctgggggactcggacgaggaggacaccatgagcaggttcagcagctccacggagcagagcagtgcctcccgcctccttaagcgccaccggcggcgaaggaagcagaggccaccccgcctggagaggacgtcatccttcagcagcgtcacagattccacaatgtctctcaatatcatcacagtcacgctaaacatggagaagtacaacttcctgggtatctccattgttggccagagcaatgagcggggagacggaggcatctacattggctccatcatgaagggtggggctgtggcggccgacgggcgcattgagccaggggacatgcttttgcaggtgaatgacatgaactttgagaacatgagcaacgatgacgctgtgcgggtgctgagggacattgtgcacaagcctggccccattgtgctgactgtggccaagtgctgggatccctctcctcaggcctatttcactctcccccgaaatgagcccatccagccaattgaccctgctgcctgggtgtcccattccgcggctctgactggcaccttcccagcctatccaggttcctcctccatgagcaccattacatctggatcgtctttgcctgatggctgtgaaggccggggtctctccgtccatacggacatggcatcggtgaccaaggccatggcagctccagagtctggactggaagtccgggaccgcatgtggctcaagatcaccatccctaatgcctttctgggctcggatgtggttgactggctctaccatcacgtggagggctttcctgagcggcgggaggcccgcaagtatgccagcgggctgctcaaagcaggcctgatccgacacaccgtcaacaagatcaccttctctgagcagtgctattacgtcttcggagacctcagtggtggctgtgagagctacctagtcaacctgtctctcaatgacaacgatggctccagtggggcttcagaccaggataccctggctcctctgcctggggccaccccctggcccctgctgcccactttctcctaccaataccctgccccacacccctacagcccgcagcctccaccctaccatgagctttcatcttacacctatggtgggggcagtgccagcagccagcatagtgagggcagccggagcagtgggtcgacacggagtgatgggggggcagggcgcacggggaggcccgaggagcgggcccccgagtccaagtccggcagtggcagtgagtctgagccctccagccgagggggcagccttcggcggggtggggaagcaagtgggactagcgatgggggccctcctccatccagaggctcaactgggggtgcccctaatctccgagcccacccagggctccatccctatggaccgccccctggcatggccctcccctacaaccccatgatggtggtcatgatgcccccacctccacctccagtccctccagcagtgcagcctccgggggcccctccagtcagagacctgggctctgtgcccccagaactgacagccagccgccaaagcttccacatggccatgggcaatcccagcgagttctttgtggatgttatgtagcccactgtggggccaggctgggccgggcgctcctggtgtgtgactgggtgtcctggccgtcatgtgcttgctcttacagtgcctgggctcagcctaccagctgctgccatacaggagattgtggccactgtgactctcaccagcagtgcctggttcctcccccttccctcaggggtagacaagggacctttgattatttttagctttgtttttttataagcctttttgggggttaaaatagagtttcttacatttttgggacttttttaataggcatttcctcttttatatgaagaattcccatccattgggccccttctaaccccagaatgtgacctcctcctccagttacccacagccctgccctttgcagggttgggggtggtcagcggtaccccggggttaggcatcctagacagcagcctgaggaagctgggagatttgggccatgtagctgcctttgttactctatttattttagtcacttgtataaaacaccaaataaagcaatagaggcaaactcaaaaaaaaaaaaaaaaaaaaaaaaaaaaaa

SEQ ID NO: 29500 - DNA, 3097 bp, Homo Sapiens
cccccgagggacatgagagaagaggagcggcgctcaggttattccaggatctttggagacccgaggaaagccgtgttgaccaaaagcaagacaaatgactcacagagaaaaaagatggcagaaccaagggcaactaaagccgtcaggttctgaacagctggtagatgggctggcttactgaaggacatgattcagactgtcccggacccagcagctcatatcaaggaagccttatcagttgtgagtgaggaccagtcgttgtttgagtgtgcctacggaacgccacacctggctaagacagagatgaccgcgtcctcctccagcgactatggacagacttccaagatgagcccacgcgtccctcagcaggattggctgtctcaacccccagccagggtcaccatcaaaatggaatgtaaccctagccaggtgaatggctcaaggaactctcctgatgaatgcagtgtggccaaaggcgggaagatggtgggcagcccagacaccgttgggatgaactacggcagctacatggaggagaagcacatgccacccccaaacatgaccacgaacgagcgcagagttatcgtgccagcagatcctacgctatggagtacagaccatgtgcggcagtggctggagtgggcggtgaaagaatatggccttccagacgtcaacatcttgttattccagaacatcgatgggaaggaactgtgcaagatgaccaaggacgacttccagaggctcacccccagctacaacgccgacatccttctctcacatctccactacctcagagagactcctcttccacatttgacttcagatgatgttgataaagccttacaaaactctccacggttaatgcatgctagaaacacagatttaccatatgagccccccaggagatcagcctggaccggtcacggccaccccacgccccagtcgaaagctgctcaaccatctccttccacagtgcccaaaactgaagaccagcgtcctcagttagatccttatcagattcttggaccaacaagtagccgccttgcaaatccaggcagtggccagatccagctttggcagttcctcctggagctcctgtcggacagctccaactccagctgcatcacctgggaaggcaccaacggggagttcaagatgacggatcccgacgaggtggcccggcgctggggagagcggaagagcaaacccaacatgaactacgataagctcagccgcgccctccgttactactatgacaagaacatcatgaccaaggtccatgggaagcgctacgcctacaagttcgacttccacgggatcgcccaggccctccagccccaccccccggagtcatctctgtacaagtacccctcagacctcccgtacatgggctcctatcacgcccacccacagaagatgaactttgtggcgccccaccctccagccctccccgtgacatcttccagtttttttgctgccccaaacccatactggaattcaccaactgggggtatataccccaacactaggctccccaccagccatatgccttctcatctgggcacttactactaaagacctggcggaggcttttcccatcagcgtgcattcaccagcccatcgccacaaactctatcggagaacatgaatcaaaagtgcctcaagaggaatgaaaaaagctttactggggctggggaaggaagccggggaagagatccaaagactcttgggagggagttactgaagtcttactacagaaatgaggaggatgctaaaaatgtcacgaatatggacatatcatctgtggactgaccttgtaaaagacagtgtatgtagaagcatgaagtcttaaggacaaagtgccaaagaaagtggtcttaagaaatgtataaactttagagtagagtttggaatcccactaatgcaaactgggatgaaactaaagcaatagaaacaacacagttttgacctaacataccgtttataatgccattttaaggaaaactacctgtatttaaaaatagaaacatatcaaaaacaagagaaaagacacgagagagactgtggcccatcaacagacgttgatatgcaactgcatggcatgtgctgttttggttgaaatcaaatacattccgtttgatggacagctgtcagctttctcaaactgtgaagatgacccaaagtttccaactcctttacagtattaccgggactatgaactaaaaggtgggactgaggatgtgtatagagtgagcgtgtgattgtagacagaggggtgaagaaggaggaggaagaggcagagaaggaggagaccaggctgggaaagaaacttctcaagcaatgaagactggactcaggacatttggggactgtgtacaatgagttatggagactcgagggttcatgcagtcagtgttataccaaacccagtgttaggagaaaggacacagcgtaatggagaaagggaagtagtagaattcagaaacaaaaatgcgcatctctttctttgtttgtcaaatgaaaattttaactggaattgtctgatatttaagagaaacattcaggacctcatcattatgtgggggctttgttctccacagggtcaggtaagagatggccttcttggctgccacaatcagaaatcacgcaggcattttgggtaggcggcctccagttttcctttgagtcgcgaacgctgtgcgtttgtcagaatgaagtatacaagtcaatgtttttccccctttttatataataattatataacttatgcatttatacactacgagttgatctcggccagccaaagacacacgacaaaagagacaatcgatataatgtggccttgaattttaactctgtatgcttaatgtttacaatatgaagttattagttcttagaatgcagaatgtatgtaataaaataagcttggcctagcatggcaaatcagatttatacaggagtctgcatttgcactttttttagtgactaaagttgcttaatgaaaacatgtgctgaatgttgtggattttgtgttataatttactttgtccaggaacttgtgcaagggagagccaaggaaataggatgtttggcaccc

SEQ ID NO: 29501 - DNA, 2695 bp, Homo Sapiens
caaataaaagcgatggcgattgggctgccgcgtttggcgctcggtccggtcgcgtccgacacccggtgggactcagaaggcagtggagccccggcggcggcggcggcggcgcgcgggggcgacgcgcgggaacaacgcgagtcggcgcgcgggacgaagaataatcatgggccagactgggaagaaatctgagaagggaccagtttgttggcggaagcgtgtaaaatcagagtacatgcgactgagacagctcaagaggttcagacgagctgatgaagtaaagagtatgtttagttccaatcgtcagaaaattttggaaagaacggaaatcttaaaccaagaatggaaacagcgaaggatacagcctgtgcacatcctgacttctgtgagctcattgcgcgggactagggagtgttcggtgaccagtgacttggattttccaacacaagtcatcccattaaagactctgaatgcagttgcttcagtacccataatgtattcttggtctcccctacagcagaattttatggtggaagatgaaactgttttacataacattccttatatgggagatgaagttttagatcaggatggtactttcattgaagaactaataaaaaattatgatgggaaagtacacggggatagagaatgtgggtttataaatgatgaaatttttgtggagttggtgaatgcccttggtcaatataatgatgatgacgatgatgatgatggagacgatcctgaagaaagagaagaaaagcagaaagatctggaggatcaccgagatgataaagaaagccgcccacctcggaaatttccttctgataaaatttttgaagccatttcctcaatgtttccagataagggcacagcagaagaactaaaggaaaaatataaagaactcaccgaacagcagctcccaggcgcacttcctcctgaatgtacccccaacatagatggaccaaatgctaaatctgttcagagagagcaaagcttacactcctttcatacgcttttctgtaggcgatgttttaaatatgactgcttcctacatcgtaagtgcaattattcttttcatgcaacacccaacacttataagcggaagaacacagaaacagctctagacaacaaaccttgtggaccacagtgttaccagcatttggagggagcaaaggagtttgctgctgctctcaccgctgagcggataaagaccccaccaaaacgtccaggaggccgcagaagaggacggcttcccaataacagtagcaggcccagcacccccaccattaatgtgctggaatcaaaggatacagacagtgatagggaagcagggactgaaacggggggagagaacaatgataaagaagaagaagagaagaaagatgaaacttcgagctcctctgaagcaaattctcggtgtcaaacaccaataaagatgaagccaaatattgaacctcctgagaatgtggagtggagtggtgctgaagcctcaatgtttagagtcctcattggcacttactatgacaatttctgtgccattgctaggttaattgggaccaaaacatgtagacaggtgtatgagtttagagtcaaagaatctagcatcatagctccagctcccgctgaggatgtggatactcctccaaggaaaaagaagaggaaacaccggttgtgggctgcacactgcagaaagatacagctgaaaaaggacggctcctctaaccatgtttacaactatcaaccctgtgatcatccacggcagccttgtgacagttcgtgcccttgtgtgatagcacaaaatttttgtgaaaagttttgtcaatgtagttcagagtgtcaaaaccgctttccgggatgccgctgcaaagcacagtgcaacaccaagcagtgcccgtgctacctggctgtccgagagtgtgaccctgacctctgtcttacttgtggagccgctgaccattgggacagtaaaaatgtgtcctgcaagaactgcagtattcagcggggctccaaaaagcatctattgctggcaccatctgacgtggcaggctgggggatttttatcaaagatcctgtgcagaaaaatgaattcatctcagaatactgtggagagattatttctcaagatgaagctgacagaagagggaaagtgtatgataaatacatgtgcagctttctgttcaacttgaacaatgattttgtggtggatgcaacccgcaagggtaacaaaattcgttttgcaaatcattcggtaaatccaaactgctatgcaaaagttatgatggttaacggtgatcacaggataggtatttttgccaagagagccatccagactggcgaagagctgttttttgattacagatacagccaggctgatgccctgaagtatgtcggcatcgaaagagaaatggaaatcccttgacatctgctacctcctcccccctcctctgaaacagctgccttagcttcaggaacctcgagtactgtgggcaatttagaaaaagaacatgcagtttgaaattctgaatttgcaaagtactgtaagaataatttatagtaatgagtttaaaaatcaactttttattgccttctcaccagctgcaaagtgttttgtaccagtgaatttttgcaataatgcagtatggtacatttttcaactttgaataaagaatacttgaacttgtcaaaaaaaaaa

SEQ ID NO: 29502 - DNA, 5043 bp, Homo Sapiens; identical to SEQ ID NO: 22748

SEQ ID NO: 29503 - DNA, 10884 bp, Homo Sapiens
cgccccccctgcgcccgcccctcccccttcgctttccttctccccccgcctcggctccgacatgaggggccggcggggcaggccgcccaagcagcccgcggctcccgctgcggagcgctgcgccccggccccgccgccaccgccgccgccgcccacgtccggacccatcggggggctccgctcgcggcaccgcggcagcagccggggcaggtgggccgccgcccaggctgaggtggcgcccaagacgcggctgagctcgcccagggggggcagcagtagccggaggaagccgccgccgccgccgccggccccccccagcaccagcgccccgggccggggggggcgaggaggcgggggcggcaggacggggggcgggggcggcggcggccacctggcccggaccaccgcggcccggagggccgtcaacaaagtggtgtacgatgaccacgagagcgaggaggaggaggaagaggaggacatggtctccgaggaggaggaggaggaggacggcgacgccgaggagacccaggattctgaggacgacgaggaggatgagatggaagaggacgacgatgactccgattatccggaggagatggaagacgacgacgacgacgccagttactgcacggaaagcagcttcaggagccatagtacctacagcagcactccaggtaggcgaaaaccaagagtacatcggcctcgttctcctatattggaagaaaaagacatcccgccccttgaatttcccaagtcctctgaggatttaatggtgcctaatgagcatataatgaatgtcattgccatttacgaggtactgcggaactttggcactgttttgagattatctccttttcgctttgaggacttttgtgcagctctggtgagccaagagcagtgcacactcatggcagagatgcatgttgtgcttttgaaagcagttctgcgtgaagaagacacttccaatactacctttggacctgctgatctgaaagatagcgttaattccacactgtatttcatagatgggatgacgtggccagaggtgctgcgggtgtactgtgagagtgataaggagtaccatcacgttcttccttaccaagaggcagaggactacccatatggaccagtagagaacaagatcaaagttctacagtttctagtcgatcagtttcttacaacaaatattgctcgagaggaattgatgtctgaaggggtgatacagtatgatgaccattgtagggtttgtcacaaacttggggatttgctttgctgtgagacatgttcagcagtataccatttggaatgtgtgaagccacctcttgaggaggtgccagaggacgagtggcagtgtgaagtctgtgtagcacacaaggtgcctggtgtgactgactgtgttgctgaaatccaaaaaaataaaccatatattcgacatgaacctattggatatgatagaagtcggaggaaatactggttcttgaaccgaagactcataatagaagaagatacagaaaatgaaaatgaaaagaaaatttggtattacagcacaaaggtccaacttgcagaattaattgactgtctagacaaagattattgggaagcagaactctgcaaaattctagaagaaatgcgtgaagaaatccaccgacacatggacataactgaagacctgaccaataaggctcggggcagtaacaaatcctttctggcggcagctaatgaagaaattttggaatccataagagccaaaaagggagacattgataatgttaaaagcccagaagaaacagaaaaagacaagaatgagactgagaatgactctaaagatgctgagaaaaacagagaagaatttgaagaccagtcccttgaaaaagacagtgacgacaaaacaccagatgatgaccctgagcaaggaaaatctgaggagccaacagaagttggggataaaggtaactctgtgtcagcaaatcttggcgacaacacaacaaatgcaacttcagaagagactagtccctctgaagggaggagccctgtggggtgtctctcagaaacccccgatagcagcaacatggcagagaagaaggtggcatctgagctcccccaggatgtgccagaagaacctaacaagacatgtgagagcagtaacactagtgctaccactacctccatccagcctaatctggaaaacagtaacagcagcagtgaactaaattcttcccagagtgaatctgctaaggcagctgatgatcctgaaaatggagaaagagaatctcatacacctgtctctattcaggaagagatagtaggtgatttcaaatcggagaagtccaacggggagctaagtgaatctcctggagctggaaaaggagcatctggctcaactcgaatcatcaccagattgcggaatccagatagcaaacttagtcagctgaagagccagcaggtggcagccgctgcacatgaagcaaataaattatttaaggagggcaaagaggtactggtagttaactctcaaggagaaatttcacggttgagcaccaaaaaggaagtgatcatgaaaggaaatatcaacaattattttaaattgggtcaagaagggaagtatcgcgtctaccacaatcaatactccaccaattcatttgctttgaataagcaccagcacagagaagaccatgataagagaaggcatcttgcacataagttctgtctgactccagcaggagagttcaaatggaacggttctgtccatgggtccaaagttcttaccatatctactctgagactgactatcacccaattagaaaacaacatcccttcatcctttcttcatcccaactgggcatcacatagggcaaattggatcaaggcagttcagatgtgtagcaaacccagagaatttgcattggctttagccattttggagtgtgcagttaaaccagttgtgatgctaccaatatggcgagaatctttaggacataccaggttacaccggatgacatcaattgaaagagaagaaaaggagaaagtcaaaaaaaaagagaagaaacaggaagaagaagaaacgatgcagcaagcgacatgggtaaaatacacatttccagttaagcatcaggtttggaaacaaaaaggtgaagagtacagagtgacaggatatggtggttggagctggattagtaaaactcatgtttataggtttgttcctaaattgccaggcaatactaatgtgaattacagaaagtcgttagaaggaaccaaaaataatatggatgaaaatatggatgagtcagataaaagaaaatgttcacgaagtccaaaaaaaataaaaatagagcctgattctgaaaaagatgaggtaaaaggttcagatgctgcaaaaggagcagaccaaaatgaaatggatatctcaaagattactgagaagaaggaccaagatgtgaaggagctcttagattctgacagtgataaaccctgcaaggaagaaccaatggaagtagacgatgacatgaaaacagagtcacatgtaaattgtcaggagagttctcaagtagatgtggtcaatgttagtgagggttttcatctaaggactagttacaaaaagaaaacaaaatcatccaaactagatggacttcttgaaaggagaattaaacagtttacactggaagaaaaacagcgactcgaaaaaatcaagttggagggtggaattaagggtataggaaagacttctacaaattcttcaaaaaatctctctgaatcaccagtaataacgaaagcaaaagaagggtgtcagagtgactcgatgagacaagaacagagcccaaatgcaaataatgatcaacctgaggacttgattcagggatgttcagaaagtgattcctcagttcttagaatgagtgatcctagtcataccacaaacaaactttatccaaaagatcgagtgttagatgatgtctccattcggagcccagaaacaaaatgtccgaaacaaaattccattgaaaatgacatagaagaaaaagtctctgaccttgccagtagaggccaggaacccagtaagagtaaaacaaaaggaaatgattttttcatcgatgactctaaactagccagtgcagatgatattggtactttgatctgtaagaacaaaaaaccgctcatacaggaggaaagtgacaccattgtttcttcttccaagagtgctttacattcatcagtgcctaaaagtaccaatgacagagatgccacacctctgtcaagagcaatggactttgaaggaaaactgggatgtgactctgaatctaatagcactttggaaaatagttctgataccgtgtctattcaggatagcagtgaagaagatatgattgttcagaatagcaatgaaagcatttctgaacagttcagaactcgagaacaagatgttgaagtcttggagccgttaaagtgtgagttggtttctggtgagtccactggaaactgtgaggacaggctgccggtcaaggggactgaagcaaatggtaaaaaaccaagtcagcagaagaaattagaggagagaccagttaataaatgtagtgatcaaataaagctaaaaaataccactgacaaaaagaataatgaaaatcgagagtctgaaaagaaaggacagagaacaagtacatttcaaataaatggaaaagataataaacccaaaatatatttgaaaggtgaatgcttgaaagaaatttctgagagtagagtagtaagtggtaatgttgaaccaaaggttaataatataaataaaataatccctgagaatgatattaaatcattgactgttaaagaatctgctataaggccattcattaatggtgatgtcatcatggaagattttaatgaaagaaacagctccgaaacaaaatcgcatttgctgagttcttcagatgctgaaggtaactaccgagatagccttgagaccctgccatcaaccaaagagtctgacagtacacagacgaccacaccctcagcatcttgtccagaaagcaattcagttaatcaggtagaagatatggaaatagaaacctcagaagttaagaaagttacttcatcacctattacttctgaagaggaatctaatctcagtaatgactttattgatgaaaatggtctgcccatcaacaaaaatgaaaatgtcaatggagaatctaaaagaaaaaccgtcatcacagaagtcaccacgatgacctccacagtggccacagaatcaaaaactgtgatcaaggtagaaaaaggcgataagcaaactgtggtttcttccacagaaaattgtgcaaaatccactgtcacaaccaccactacaacagtgaccaagctttccacaccctccacaggcggcagtgtggacatcatctctgtaaaggagcagagcaaaaccgtggtcaccacgacagtgacagactccctgaccaccacgggaggcacactggttacatctatgactgtgagcaaagagtattccacacgagacaaagtgaaactgatgaaattttcaagaccaaagaagactcgttcaggtacagctctgccatcctatagaaaatttgttaccaagagcagcaagaagagcatttttgttttgcctaatgatgacttaaaaaagttggcccgaaaaggaggaatccgagaggtcccttattttaattacaatgcaaaacctgctttggatatatggccatatccttctcctagaccgacctttggcatcacttggaggtatagacttcagacagtaaagtccttagctggagtgagcctgatgttacggttactgtgggcaagtttgagatgggatgatatggcggccaaggctcctccaggaggagggactacacggacagaaacatccgaaactgaaatcacaacaacagaaataattaagaggagagatgttggtccttatggcattcgatctgaatattgtatcaggaaaatcatttgtcccattggagttccagaaacaccaaaagaaacgcctacacctcagaggaaaggccttcgatcaagtgcactgcggccaaagagaccagaaacgcccaagcaaactggccctgttattattgaaacctgggtagcagaagaagaactggaattgtgggagatcagggcatttgctgagagagtggagaaagaaaaggcacaagcagttgagcaacaggctaagaaacgactggagcagcagaagccgacagtgattgcaacttccactacttccccaacaagcagtacaaccagcaccatctctccagcacagaaggttatggtggcccccataagtggctcagttacaactggaaccaaaatggtactaactactaaagttggatctccagctacagtaacattccaacaaaacaagaactttcatcaaacctttgctacatgggttaagcaaggccagtcaaattcaggcgttgttcaagtacagcagaaagtcctgggtatcattccatcaagtacaggtaccagtcagcaaacctttacttcattccagcccaggacagcaacagtcacaattaggcccaatacctcaggctctggaggaaccacaagcaattcacaagtaatcacagggcctcagattcgccctggtatgaccgtgattagaacaccactccaacagtcaacactaggaaaggcaattattcgaacacctgtgatggtacagccaggtgctcctcagcaagtgatgactcaaatcatcagggggcagcctgtctccactgcagtctccgcccctaacacggtttcctcaacacctgggcagaaaagcttaacttcagcaacgtccacttcaaatatacagtcttcagcctcacaaccccctcgcccccaacaaggacaagtgaagctcaccatggctcaacttactcagttaacacagggccacggtggcaatcaaggtttgacagtagtaattcaaggacaaggtcaaactactggacagttgcagttgatacctcaaggggtgactgtactcccaggcccaggccagcagctaatgcaagctgcaatgccaaatggtactgttcagcgattcctctttaccccattggcaacaacagccaccacagccagcaccaccaccaccactgtttccacgacagcagcaggtacaggtgaacaaaggcagagtaaactgtcaccccagatgcaggtacatcaagacaaaaccctgccaccagctcagtcatcaagtgtgggtccagcagaagcccagccacagactgctcagccttcagctcagccccagccccaaacccagccccagtccccagctcagcctgaagttcagactcagcctgaagttcagacccaaacaactgtttcatcccatgtcccttctgaagcacaacccacccacgcacagtcatccaagccccaagttgcagcacagtctcagcctcaaagtaatgtccaaggacagtctcctgttcgtgtccaaagtccatcacagactcgaatacgtccatcaactccatcccaactgtctcctggacaacaatcccaggttcagactacaacctcacaaccgattccaattcaaccacatacatctcttcagataccttcccaaggccagccacagtcacaaccccaggtggtgatgaagcataatgctgtaatagaacatttaaaacagaaaaagagcatgactccagctgaaagagaagagaatcaaagaatgattgtctgtaaccaggtgatgaagtatattttggataagatagataaagaagaaaaacaggcagcaaaaaaacggaagcgtgaagagagtgtggagcagaaacgtagcaagcagaatgccactaagctgtcagctctgctcttcaagcacaaagagcagctcagagccgagatcctgaagaagagagcactcctggacaaggatctgcaaattgaagtgcaggaagagctgaagagagacctgaaaattaagaaagaaaaagacctgatgcagttggctcaggccacagcagtagctgcaccctgccccccagtgacaccagctcctccagcccctccagcccctccaccttcacctccccctccacctgctgtgcaacacacaggccttctgtccacgcccaccttacctgctgcttcccagaagaggaagcgggaagaggaaaaagactccagctcaaagtccaagaaaaagaaaatgatctctactacctcaaaggaaactaagaaggacacaaagctttactgtatctgtaaaacgccttatgatgaatctaaattttatattggctgtgatcggtgtcagaattggtaccatgggcgctgcgttggcatcttgcaaagtgaggcagagctcattgatgagtatgtctgtccacagtgccagtcaacagaggatgccatgacagtgctcacgccactaacagagaaggattatgaggggttgaagagggtgctccgttccttacaggcccataagatggcctggcctttccttgaaccagtagaccctaatgatgcaccagattattatggtgttattaaggaacctatggaccttgccaccatggaagaaagagtacaaagacgatattatgaaaagctgacggaatttgtggcagatatgaccaaaatttttgataactgtcgttactacaatccaagtgactccccattttaccagtgtgcagaagttctcgaatcattctttgtacagaaattgaaaggcttcaaagctagcaggtctcataacaacaaactgcagtctacagcttcttaaagttcagcgtgttaacctaacataaaacacagcaagaatctggttgtctgaactattttaaattaaggagccagatgtttttagtcaggctatcctgacaagacttgacctaaacttcgtttttattggtcataacagtccaattatattcttggccaattttgtccaacggacaagaaaaaagcaaagtcaacgacaccattatcttgtcaagatcagatggttttactattgtggcagaagcgagaaaactttgtttattgaaaaaaaaagaaaaagaaagcaagaaaaaaagatactatggggtcaagtgtaactccatggaaatgccacgtctgctcttcagtgaagaagctggtttagagtctcacagaaaacttttgactgtatttatttattgttgcaaaaaagacgcttttttattgctgccctcatttgtcagctaattattttttcttataaaatccagccccggttacatataatcatctgtatcttatcatgattcctgtaggtaaaagtacaagacgacctctagatgtcttttctttctatgaaaggagctgctatgtacacatgtgcacacacacacaactgggaatcaacaatgagtttattgttcatggtagattaaaattaagcttgcataaaggttgggctaagtggtcctggactacagactctgttgccttgaatataacagtacaatttgtcaattactctgcaccaggctaaaatgagtaaaatctatttgaaggtatcttgtttgtaaacatttgtcagattctaatttttttcttttgtattaaaattcaactatggatgtatatgaaacaaaataaatggagataatttttctcccacagacagaggtgtctttgaatgtgcgctaatgattatctgtaagcctttgtggggagggaggcctgcaaggtcatgaaaggcagaagagtctaattgtgcctggatttctccaggacagcagtggcccctcgttttatcattcccagtccattgtcatcacgtcagagaaaaatcttcaggggtgctaatcctgttgcatcagttgatcatactaacgagaacggtaatgcgacaagatacacattgccttcatctgtacattctgtgataccaggcaaattaccaattacacacagctacttatattttatgaagggcattttttagatgacctcatcctctgtgttatttgttgattgggtttgttttctgtttgttggtttgtttgtttcttccacgtaaggaaaagtagtgtaaacagtagcgagaaaatggaaaccacagaggaagatgtattttgcatgtttttcctttcagtgttcttacacgttgtatcactgcattgtggtaatagcttctataaaatctgccatagttggattatgcagctttgcaaaaatttttactagattttgcactaactcatattagctttgtcctaccaacttctggaatttatctaattattgtttttcaaagtttctttccttttaatgtttccctgctatgcaaaacctttcccagacctcagtttcttaaaagaaagatgttgctacagttcccgattctttcttattacaggctcaggtgtacaggttattctgggttaattttatctaatgaagcccattcctttttgtacataaagatgtcacttaaacttatgcttacaaactaaagactaatcgctcaatatgaaaacatgaaaaaatttttgcttaaagtattaagatggaagtagttaaatatgggttattttgtccttttacttttttaaaaaatgttacatattgtatgcactgtgctgatgcaagaattctacattttaatgaattataaaattattctgcatctcatcacgtcacagtatttctgtactatttattcatatatataaatatatatgggcttaatcatttaaaatttgttgcagcaagaactttcctacctgtaggcaatagattgctatgtttttaacaaattgtggcaaattctaaacagcaattcttttgtacgtaataggacatttcatcctagaaaaataaagtaatgtttttgacattgaaaaaaaaaaaaaaaaaaaaaaa

SEQ ID NO: 29504 - DNA, 2788 bp, Homo Sapiens
aagaacgcccccaaaatctgtttctaattttacagaaatcttttgaaacttggcacggtattcaaaagtccgtggaaagaaaaaaaccttgtcctggcttcagcttccaactacaaagacagacttggtccttttcaacggttttcacagatccagtgacccacgctctgaagacagaattagctaactttcaaaaacatctggaaaaatgaagacttgggtaaaaatcgtatttggagttgccacctctgctgtgcttgccttattggtgatgtgcattgtcttacgcccttcaagagttcataactctgaagaaaatacaatgagagcactcacactgaaggatattttaaatggaacattttcttataaaacattttttccaaactggatttcaggacaagaatatcttcatcaatctgcagataacaatatagtactttataatattgaaacaggacaatcatataccattttgagtaatagaaccatgaaaagtgtgaatgcttcaaattacggcttatcacctgatcggcaatttgtatatctagaaagtgattattcaaagctttggagatactcttacacagcaacatattacatctatgaccttagcaatggagaatttgtaagaggaaatgagcttcctcgtccaattcagtatttatgctggtcgcctgttgggagtaaattagcatatgtctatcaaaacaatatctatttgaaacaaagaccaggagatccaccttttcaaataacatttaatggaagagaaaataaaatatttaatggaatcccagactgggtttatgaagaggaaatgcttgctacaaaatatgctctctggtggtctcctaatggaaaatttttggcatatgcggaatttaatgatacggatataccagttattgcctattcctattatggcgatgaacaatatcctagaacaataaatattccatacccaaaggctggagctaagaatcccgttgttcggatatttattatcgataccacttaccctgcgtatgtaggtccccaggaagtgcctgttccagcaatgatagcctcaagtgattattatttcagttggctcacgtgggttactgatgaacgagtatgtttgcagtggctaaaaagagtccagaatgtttcggtcctgtctatatgtgacttcagggaagactggcagacatgggattgtccaaagacccaggagcatatagaagaaagcagaactggatgggctggtggattctttgtttcaacaccagttttcagctatgatgccatttcgtactacaaaatatttagtgacaaggatggctacaaacatattcactatatcaaagacactgtggaaaatgctattcaaattacaagtggcaagtgggaggccataaatatattcagagtaacacaggattcactgttttattctagcaatgaatttgaagaataccctggaagaagaaacatctacagaattagcattggaagctatcctccaagcaagaagtgtgttacttgccatctaaggaaagaaaggtgccaatattacacagcaagtttcagcgactacgccaagtactatgcacttgtctgctacggcccaggcatccccatttccacccttcatgatggacgcactgatcaagaaattaaaatcctggaagaaaacaaggaattggaaaatgctttgaaaaatatccagctgcctaaagaggaaattaagaaacttgaagtagatgaaattactttatggtacaagatgattcttcctcctcaatttgacagatcaaagaagtatcccttgctaattcaagtgtatggtggtccctgcagtcagagtgtaaggtctgtatttgctgttaattggatatcttatcttgcaagtaaggaagggatggtcattgccttggtggatggtcgaggaacagctttccaaggtgacaaactcctctatgcagtgtatcgaaagctgggtgtttatgaagttgaagaccagattacagctgtcagaaaattcatagaaatgggtttcattgatgaaaaaagaatagccatatggggctggtcctatggaggatacgtttcatcactggcccttgcatctggaactggtcttttcaaatgtggtatagcagtggctccagtctccagctgggaatattacgcgtctgtctacacagagagattcatgggtctcccaacaaaggatgataatcttgagcactataagaattcaactgtgatggcaagagcagaatatttcagaaatgtagactatcttctcatccacggaacagcagatgataatgtgcactttcaaaactcagcacagattgctaaagctctggttaatgcacaagtggatttccaggcaatgtggtactctgaccagaaccacggcttatccggcctgtccacgaaccacttatacacccacatgacccacttcctaaagcagtgtttctctttgtcagactaaaaacgatgcagatgcaagcctgtatcagaatctgaaaaccttatataaacccctcagacagtttgcttattttattttttatgttgtaaaatgctagtataaacaaacaaattaatgttgttctaaaggctgttaaaaaaaagatgaggactcagaagttcaagctaaatattgtttacattttctggtactctgtgaaagaagagaaaagggagtcatgcattttgctttggacacagtgttttatcacctgttcatttgaagaaaaataataaagtcagaagttcaaaaaaaaaa

SEQ ID NO: 29505 - DNA, 4291 bp, Homo Sapiens
cagggctccttcccgcccgccgccgccgagacccaggctgaagctggggaggacggtggagcccggcccaggccgttctcctgcccccgcggctggagcatcgtctgggactactggctgaaggcgagccccgcagcccaagcgcagcgcacacgcgcgcccccggccaccgccgttctctcttccctcccctcctctcccctcccctctcctccgcccccggcctcggctgcggcgggaggaagaacgcttcccaaccagccaggagagcccagatctattcccattcggggagaaagaagagaccccgcacttggatccgaccgacttctcgccccggggccacggaagtggctcgccgtccaccggagagtccccgccgagcgtagccctccaaccctcgcccaaccgcagccgcatagacagcgctccccagcgggcccccggccccgccgagcccactccccgcgcggggccggggccggggccggcgatgcctggcacggcagcggcggtggccgcggctgctgctgctgctactgccaccgctgccacggctgctggcccgggcccgggctgggggcttgagtctctgcagtggggctgagcccgcagtcccgccccccgatcctgaggccgctgctccgccgggcgccgggcctcctccgcccgcgcctccgccccaggagctggagccaagcggggagctcgggccccgcgcccaggcccggaccatgcatggccaccgagccccggggggcgccgggccttcggagcccgaacacccggccacgaacccgccgggcgccgctccgccggcctgtgccgactcggaccctggagcctcggaacccggactgctggcgcgcaggggctcaggttcggctcttggcggcccactggatccccagtttgtcggaccctcggacaccagcctgggcgctgctccaggccaccgggtcttgccctgcggtcccagtccacagcaccaccgggccctgcgcttctcttaccacctggagggctcgcagcctcggcctgggctgcaccagggaaaccggatcctggttaaaagtttgtcccttgaccctggccaaagcctagagcctcatccagaaggtccccagcggcttcgctcagacccaggtcccccgactgaaacccctagccagcgtccttcaccactgaagcgggcaccgggcccgaagccacaggtgcccccaaagcccagctacctgcagatgccccggatgccccccccactggagcccatcccccctccaccatcacgcccactgcctgccgacccccgagtggccaagggcctggctcccagggcagaggccagccccagttctgcagcagtatcctcactgattgagaagtttgaaagagagcctgtgattgtcgcctcggatagaccagtccctggccccagcccaggtcccccagagccagtcatgttgccacagccaacctcgcagccaccagtgccccagctccccgagggtgaggcctcccgctgcctgtttctgctggctcctgggccccgggacggtgagaaggtgcccaaccgggacagcggcattgatagcatcagctcgccatccaacagcgaggagacctgcttcgtcagtgatgacgggccccccagccacagcctctgccctgggccccctgccctggctagtgtgcctgttgccttggccgacccccaccggcctggctcccaagaggttgacagtgacctggaggaggaggacgacgaggaggaggaggaagagaaggacagagaaatcccagtgcccctgatggagagacaggagtctgtggagttgactgtgcagcaaaaggtgtttcacattgccaatgagctcctgcaaactgagaaggcctacgtttccaggctccatctcctggatcaggtgttctgtgcccggctgctggaagaagctcggaaccgcagttccttcccggccgacgttgtccacggcatcttctctaacatctgctccatctattgcttccaccagcagttcctgctgcctgagctagagaagcgcatggaggaatgggaccgctatccacgcattggagacatcctgcagaaactggcccccttcctcaagatgtatggtgagtatgtgaagaactttgaccgggccgtggagctggtcaacacctggacagagcgctccacccagtttaaagtcatcatccatgaggtgcagaaggaggaagcctgtggcaacctgacattgcagcaccacatgctggagcctgtgcagcgcatcccccgctatgagcttcttctcaaggactatctgttaaagctgccccatggctccccggacagcaaggatgcccaaaagtctctggagctgatcgccacagcagcagagcactcgaatgctgccatccgcaaaatggagcgaatgcataagctgctgaaggtatatgagctgttagggggcgaggaggacattgtcagccccaccaaagagctcataaaagaaggccacatccttaagctgtcagcaaagaatgggaccactcaagaccgatacctcatactattcaacgaccgcctcctttactgcgtgcccaggctgcggctccttggccagaagtttagcgtgcgggcacgcattgatgtagatggcatggagctaaaggagagctccaacctcaatctgcctcgaaccttcctggtgtcaggaaagcagcgctccctcgagctccaggccaggactgaggaggagaagaaagactgggtccaggccatcaactccaccctcctgaagcatgaacagacgctggagactttcaaactgttgaactcaacaaacagggaagatgaagacaccccacccaactctccaaacgtggatcttgggaagcgggcacctacgcccatccgggaaaaggaagtcaccatgtgcatgcgctgccaggagcccttcaattctatcaccaaacgcaggcaccactgcaaggcctgcgggcatgtggtttgtgggaagtgctccgagttccgggcccgcctcgtctatgacaacaaccgctccaaccgtgtgtgcactgattgctatgtggccttgcacggggtgcctgggagcagtccagcctgcagccagcatacaccccagcgccggaggtccatcctggagaaacaggcctcagtggctgcagagaacagcgtcatctgcagcttcctgcactacatggagaagggtggcaaaggatggcacaaggcatggttcgtggtccctgaaaatgaacccttggtgctgtatatctacggagcccctcaggatgtgaaagcccagcgcagcctgcccctcattggcttcgaggtgggaccgcccgaggcaggggagcggcctgacagaaggcatgtcttcaagatcacccagagccacctcagctggtacttcagccctgagacagaggaactacagcgacgctggatggctgtgcttggccgggcgggccgaggggacacgttctgcccggggcccacactgtctgaggacagggagatggaggaggcaccggtggctgctttaggagccactgctgaaccccccgaatccccccagacccgagacaagacctagagggtttgggacaaactgggagcccccaccccacactctagttgcccatgtctgattgggggctctagccccttccctcccagctcagtcaatacttgaactcccatcacgggcactttcaatcccgaatgctgggtcttgggttttttaattcatcttttcacaaaacgtgggcttttaaaaaatatattcctacagtgatgtcaatttttattaatccctgtccccagggagggtgggagccgttgccagtcctacctgaattaggtcgtttttctccctcatccctcaataccctaccacagatcctgcctccacccagttccccacaaagcaccagaggtaggagacctggattcaagtgccagctctgccactgaccctggggccccgacccagccctgcctcctcagccagtgtcttcacacgtacaactccacgtggggtggcaactagacctctcctgcctctcccatggcttacagcttctacccggccccaaggctacccagtattttatcgtccagacccatggcagggccagcgggcaggacagggaaacaggggggaggacaatggatactcagttttttgtgtttttttgtgtgtttttttttttttaagaaaaatacagtttatttcaggcttacagtaaaaaaaaaaaaaaaaaa

SEQ ID NO: 29506 - DNA, 2487 bp, Homo Sapiens
actcagccctggcctcgccgagctctgttcttagactctcacccgtcccgcacgttcctggtcgcctggcgttctgattcgcccgcccgggccccgccaccccctcctcagctgacggggcaaaagctgctccgagaggagaaggtcaagtcctccgcccgggccgggccgagcggagcccagggagcgcagcatccgcgcggctaccgcggcggcgcaggagttataaagtcggcgcgcgagactccgccgccacccggcagccccggcgcagctccggcagccgcagtcgcagcgcccccagcgtggcgccccccggccgggcctgccgcccgggacccgggctggggcgcagagggagcccggagcccggcgcccccatgcgccgccccgccgccgccgcgccacagctatgaccctgagcactgagatgtccgatgcctctggcctcgccgaggaaacagacatcgacgtggtgggggagggcgaggacgaagaagacgaggaagaggaggacgacgacgagggcggcggtggcgggccccggctggctgtccccgcgcagcggcggcggcggcggcgctcgtacgccggggaggacgagctggaggatctggaggaggaggaggacgacgatgacatcctgctggccccgcctgctgggggctccccggcgcccccgggcccggccccggcggcgggggcaggagccggtgggggcggcggcggcggcggcgcgggcggcggcgggagcgcgggtagcggcgccaagaacccgctggtgaagccgccctactcgtatatcgcgctcatcactatggccatcctgcagagccccaagaagcggctgacgctgagcgagatctgtgagttcatcagcggccgcttcccctactaccgggagaagttccccgcctggcagaacagcatccgccacaacctctcgctcaacgactgcttcgtcaagatcccccgcgagcccggcaacccgggcaagggcaactactggacgctggacccggagtccgccgacatgttcgacaacggcagcttcctgcgccggaggaagcgcttcaagcggcagccgctgctcccacccaacgccgcggccgccgagtctctgctgctgcgcggcgcgggagccgcagggggcgcgggcgacccggcagccgccgccgcgctcttcccgcccgcgcccccgccgcccccgcatgcctacggctacggcccctacggctgcggctacggcctgcagctgccgccttacgcgccgccctcggccctcttcgccgccgcagcggccgccgccgccgccgccgccttccacccgcactcgcccccgccgcccccgccaccgcacggcgcggccgccgagctggcccggaccgccttcggctaccggccgcacccgctcggcgccgccctacccggccccctgccggcctccgcggccaaggcgggcggcccgggcgcctcagcgctggcgcgctcgcccttctccatcgagagcatcatcgggggcagcttgggcccggccgccgctgccgccgccgccgcgcaggccgccgccgccgctcaggcctcgccctcgccctcgccggtggcggcgccgccagctcccggatccagcggaggaggctgcgcggcgcaggcggccgtgggcccggcggccgcgctcacccgatccctcgtggccgccgcggccgccgccgcctcctcagtctcctcgtccgccgccttggggactctgcaccaagggactgccctgtccagtgtcgagaactttactgctaggatttccaattgttaataacgctatgttagcgcgctcgaggaagaaggtaggaatcccggctccttttctcgtcttggtggttcggtgttttgttcgctcctccaggcgcggcccctctcgacctcgcgcgcccattttcgccgctgcgaattctcggacaaaactgtcaacagcccgggcgcgccttttggctctgcgggtccctctatttatgcaaagccgacctatgctacagccccccaacccccgacctggggtagggaggaagagggtgccggggaagggagtccgccctgtccaggcactagaggctcccttgacgtttggcagatgaaaaacaactaagcctttttgaggtgtagagattctcaggtccaggcgttaaaaaataatggtcaaaagaataatacaaaaatagtaaaggtcttgaagaatgccagcgaagcaattcttttttatttgaggacacttgtctggtgtactttttcatgaaaaggaaaaatggttaacatgtttacacaagaaaaaaagtcaaaattatcatttatttcaacctgtgttttgtatcataacagacgtgtggatttttttgtacttactgcgtattctttacaaggagtattgtaaattttactggcaattattattgtactattctaaatgtaagatttttacactttttcagaaataaa

SEQ ID NO: 29507 - DNA, 2653 bp, Homo Sapiens
ctcaaaaggggccggatttccttctcctggaggcagatgttgcctctctctctcgctcggattggttcagtgcactctagaaacactgctgtggtggagaaactggaccccaggtctggagcgaattccagcctgcagggctgataagcgaggcattagtgagattgagagagactttaccccgccgtggtggttggagggcgcgcagtagagcagcagcacaggcgcgggtcccgggaggccggctctgctcgcgccgagatgtggaatctccttcacgaaaccgactcggctgtggccaccgcgcgccgcccgcgctggctgtgcgctggggcgctggtgctggcgggtggcttctttctcctcggcttcctcttcgggtggtttataaaatcctccaatgaagctactaacattactccaaagcataatatgaaagcatttttggatgaattgaaagctgagaacatcaagaagttcttatataattttacacagataccacatttagcaggaacagaacaaaactttcagcttgcaaagcaaattcaatcccagtggaaagaatttggcctggattctgttgagctagcacattatgatgtcctgttgtcctacccaaataagactcatcccaactacatctcaataattaatgaagatggaaatgagattttcaacacatcattatttgaaccacctcctccaggatatgaaaatgtttcggatattgtaccacctttcagtgctttctctcctcaaggaatgccagagggcgatctagtgtatgttaactatgcacgaactgaagacttctttaaattggaacgggacatgaaaatcaattgctctgggaaaattgtaattgccagatatgggaaagttttcagaggaaataaggttaaaaatgcccagctggcaggggccaaaggagtcattctctactccgaccctgctgactactttgctcctggggtgaagtcctatccagatggttggaatcttcctggaggtggtgtccagcgtggaaatatcctaaatctgaatggtgcaggagaccctctcacaccaggttacccagcaaatgaatatgcttataggcgtggaattgcagaggctgttggtcttccaagtattcctgttcatccaattggatactatgatgcacagaagctcctagaaaaaatgggtggctcagcaccaccagatagcagctggagaggaagtctcaaagtgccctacaatgttggacctggctttactggaaacttttctacacaaaaagtcaagatgcacatccactctaccaatgaagtgacaagaatttacaatgtgataggtactctcagaggagcagtggaaccagacagatatgtcattctgggaggtcaccgggactcatgggtgtttggtggtattgaccctcagagtggagcagctgttgttcatgaaattgtgaggagctttggaacactgaaaaaggaagggtggagacctagaagaacaattttgtttgcaagctgggatgcagaagaatttggtcttcttggttctactgagtgggcagaggagaattcaagactccttcaagagcgtggcgtggcttatattaatgctgactcatctatagaaggaaactacactctgagagttgattgtacaccgctgatgtacagcttggtacacaacctaacaaaagagctgaaaagccctgatgaaggctttgaaggcaaatctctttatgaaagttggactaaaaaaagtccttccccagagttcagtggcatgcccaggataagcaaattgggatctggaaatgattttgaggtgttcttccaacgacttggaattgcttcaggcagagcacggtatactaaaaattgggaaacaaacaaattcagcggctatccactgtatcacagtgtctatgaaacatatgagttggtggaaaagttttatgatccaatgtttaaatatcacctcactgtggcccaggttcgaggagggatggtgtttgagctagccaattccatagtgctcccttttgattgtcgagattatgctgtagttttaagaaagtatgctgacaaaatctacagtatttctatgaaacatccacaggaaatgaagacatacagtgtatcatttgattcacttttttctgcagtaaagaattttacagaaattgcttccaagttcagtgagagactccaggactttgacaaaagcaacccaatagtattaagaatgatgaatgatcaactcatgtttctggaaagagcatttattgatccattagggttaccagacaggcctttttataggcatgtcatctatgctccaagcagccacaacaagtatgcaggggagtcattcccaggaatttatgatgctctgtttgatattgaaagcaaagtggacccttccaaggcctggggagaagtgaagagacagatttatgttgcagccttcacagtgcaggcagctgcagagactttgagtgaagtagcctaagaggattctttagagaatccgtattgaatttgtgtggtatgtcactcagaaagaatcgtaatgggtatattgataaattttaaaattggtatatttgaaataaagttgaatattatatataaaaaaaaaaaaaaaaaaa

SEQ ID NO: 29508 - DNA, 3874 bp, Homo Sapiens
atggctcacctaaagcgactagtaaaattacacattaaaagacattaccataaaaagttctggaagcttggtgcagtaatttttttctttataatagttttggttttaatgcaaagagaagtaagtgttcaatattccaaagaggaatcaaggatggaaaggaacatgaaaaacaaaaacaagatgttggatttaatgctagaagctgtaaacaatattaaggatgccatgccaaaaatgcaaataggagcacctgtcaggcaaaacattgatgctggtgagagaccttgtttgcaaggatattatacagcagcagaattgaagcctgtccttgaccgtccacctcaggattcaaatgcacctggtgcttctggtaaagcattcaagacaaccaatttaagtgttgaagagcaaaaggaaaaggaacgtggggaagctaaacactgctttaatgctttcgcaagtgacaggatttctttgcaccgagatcttggaccagacactcgacctcctgaatgtattgaacaaaaatttaagcgctgccctcccctgcccaccaccagtgtcataatagtttttcataatgaagcgtggtccacgttgcttagaactgtccacagtgtgctctattcttcacctgcaatactgctgaaggaaatcattttggtggatgatgctagtgtagatgagtacttacatgataaactagatgaatatgtaaaacaattttctatagtaaaaatagtcagacaaagagaaagaaaaggtctgatcactgctcggttgctaggagcaacagtcgcaacagctgaaacgctcacatttttagatgctcactgtgagtgtttctatggttggctagaacctctgttggccagaatagctgagaactacacggctgtcgtaagtccagatattgcatccatagatctgaacacgtttgaattcaacaaaccttctccttatggaagtaaccataaccgtggaaattttgactggagtctttcatttggctgggagtcgcttcctgatcatgagaagcaaagaaggaaagatgaaacctacccaattaaaacacccacttttgcaggaggacttttttccatatcaaaagaatattttgagtatattggaagctatgatgaagaaatggaaatctggggaggtgaaaatatagaaatgtctttcagagtatggcaatgtggtgggcagttggagattatgccttgctctgttgttggacatgtttttcgcagcaaaagccctcatagctttccaaaaggcactcaggtgattgctagaaaccaagttcgccttgcagaagtctggatggatgaatacaaggaaatattttataggagaaatacagatgcagcaaaaattgttaaacaaaaagcatttggtgatctttcaaaaagatttgaaataaaacaccgtcttcggtgtaaaaattttacatggtatctgaacaacatttatccagaggtgtatgtgccagaccttaatcctgttatatctggatacattaaaagcgttggtcagcctctatgtctggatgttggagaaaacaatcaaggaggcaaaccattaattatgtatacatgtcatggacttgggggaaaccagtactttgaatactctgctcaacatgaaattcggcacaacatccagaaggaattatgtcttcatgctgctcaaggtctcgttcagctgaaggcatgtacctacaaaggtcacaagacagttgtcactggagagcagatatgggagatccagaaggatcaacttctatacaatccattcttaaaaatgtgcctttcagcaaatggagagcatccaagtttagtgtcatgcaacccatcagatccactccaaaaatggatacttagccaaaatgattaagtgttccttaaaattaagttgaaaaaggaaatattctttctcataaaactgtgactaggcatacactgtagtttttgaaaattatgcaaaagcagctaaatgtaacttattccaagtgcatttttcttatttatatctttatgtagcactactacagaaattctgcaagtttctgtttcaaagcacaataactagtaataccaaagactatttcaaaatgtccagatgtaggggaagagatgtttacagtatgatgaaaataattttccaagtaaagtgatgtttgtgtgttttgtacacttagggatatatatatatagctacattcacacactcacaatttaaaatatttcccctagttttttggggggataggaagaaagatttgttactgtatttttttaactacataaaaatagatcaataaatgtcagcattggcctctgtgtacaaaccaagagcttttacagatccagaatttattagtttaaaatgcaggtgaacttttttttgcgtttggtttacttgtctgtcaaatgtttccttaaacatgaaactgaataaggagaagagtatttttaacacttaaatttcttggcaaattttaaaacattttttagtctgtaatacactccacttgaagcacttaagtcttccttaaatgacttttcttaagtaatgatactgtgtgttttcccaaagcacttttaaaaaaatttttataaattactatctgttgaaaaggtgtccttttcctttcttctagtattttttttcttaccaaaattcactaatcttgaatgtttgtgatattaaatttcaaatgcagaatacttgactcatttaaagctaaattttgttactgattcaattataattgtaatggatttttgactttgtaatggattcttttcatcaaaaagccttattattttttatctatgtggaaaacacaataaaaaatcctcaacactattgtaatcatttggttaagtgcttattcctcttttgggtaaaatctgtaattgataataggtgggggaaaatgaattttgtatgctgaatttctaagcgcctattgtttgtaaaaccatcagatatttcttatggcacaaaaaatgaggaatagcaaaattcctgtgttcaatatttagaaaattttgtattaatttctgataaagttccttaagcatctgatagaatgatgttttaaaaaaatttgacgcttgcttaggagatttaccactttttttttttgtttttcgtcattttatatttagatctcctgtattcttgttcccgaagtaaaatacgatcggtttcatattttaaatctggcagagcctcagctgtacgaaaaagagcatatactggttattgaccctatcttctcattgtttgtttgtaagtttgaatttgtattaaaaagcctgcattctgagctggacatggtggctcagcttctaatcccagcactttggtaggcaaaggtgggaggatcatttgagctcaggagttccagaccagcctgggcaacatagcaaaatctcatctctacaaaaagtaaaaattaaaaaatgaaattaaaaataaaattacctaggtgtggtggcacgcatctgtagttccagctatacaggaaggtgaggcagaagcattgcttgagcttgggagatcgaggctacagtgagctatgattacaccactgcacttcagtctgtgtgactgagcaagactctttcaaaaaaaaaaaaaagcctacattctccagttgattatttccaactaatgtgtattatgtgcctaattttctatcagaagttgtattaagcccgttttcacactgctgttaaagacatacctgagactgggtaatttataaagaaaaataggttcaatggacccacaggtccgcgtggctggggaagcttcacaatcatggcggaaggtgaaagcatgtcttacgtggaag

SEQ ID NO: 29509 - DNA, 2376 bp, Homo Sapiens
cggatgagggtcagggctgcgcggacccctatcccgcctgcgtcctcccggcaagcccagcgggagcgcccgctcggctgggtccccgcctccagcgcgccggggccgcccagaccctgggctcagcctcgcgccccggtgcccacctgaggaggcggcggtcccggcctcgcgtcccggatgggacggcgcgggagcaatgccagtggccccgagcgccccgggccacgcgcggggccggccagccgctctcgcgccctccccgccccctccgcgccttgcctcgccgcccgcgcgccccacccaccggccgctcctcccctctccccaccctcctcctccgccccctcccctcccccgccgcctcgcagatagctcggccgcgcgtctcagccgccggggccccgagcgcaggcggcgaggccaccacacctgcagagcgctcgggctgcctaggcggcacctcgcctcccgccgcgcaaaccccttctccccacgcgccgagtctcccatgacgcccgagccccccggccggcgacaatgaccacttccctgcaagatgggcagagcgccgcgagcagggcggctgcccgggattcgccgctggccgcccaggtgtgtggcgctgcccaggggaggggcgacgcccacgacctggcgccggccccctggctgcacgcgcgagcgctcctgccccttccggacgggacccgcggctgtgctgcagacaggagaaaaaagaaagatcttgatgttccggaaatgccatctattccaaacccttttcctgagctatgctgttctccaattacatctgtgttgtcagcagacctatttcccaaagcaaattcaaggaaaaaacaggtgattaaagtatacagtgaagatgaaaccagcagggctttagatgtacccagtgacataacggctcgagatgtttgtcagctgttgatcctgaagaatcattacattgatgaccacagctggaccctttttgagcacctgcctcacataggtgtagaaagaacaatagaagaccacgaactggtgattgaagtgctatccaactgggggatagaagaagaaaacaaactatactttagaaaaaattatgccaaatatgagttctttaaaaacccaatgtatttttttccagagcatatggtatcttttgcaactgaaaccaatggtgaaatatcccccacacagattttgcagatgtttctgagttcaagcacatatcctgaaattcatggtttcttacatgcgaaagaacagggaaagaagtcttggaaaaaaatttacttttttctaagaagatctggtttatatttttctactaaaggaacatcaaaggaaccgcggcatttgcagtttttcagcgaatttggcaatagtgatatttatgtgtcactggcaggcaaaaaaaaacatggagcaccgactaactatggattctgctttaagcctaacaaagcgggagggccccgagacctgaaaatgctctgtgcagaagaagagcagagtaggacgtgctgggtgaccgcgattagattgcttaagtatggcatgcagctgtaccagaattatatgcatccatatcaaggtagaagtggctgcagttcacagagcatatcacctatgagaagtatatcagagaattccctggtagcaatggacttctcaggccagaaaagcagagttatagaaaatcccactgaagccctttcagttgcggttgaagaaggactcgcttggaggaaaaaaggatgtttacgcctgggcactcacggtagccccactgcctcttcacagagctctgccacaaacatggctatccaccggtcccagccatggtttcaccacaaaatttctagagatgaggctcagcgattgattattcagcaaggacttgtggatggagttttcttggtacgggatagtcagagtaaccccaaaactttcgtactgtcaatgagtcatggacaaaaaataaagcactttcaaattataccagtagaagatgacggtgaaatgttccacacactggatgatggccacacaagatttacagatctaatacagctggtggagttctatcaactcaataagggcgttcttccttgcaagttgaaacattattgtgctaggattgctctctagacaagccagaagtgacttattaaactattgaaggaaaaggactcaagaaaaataataaaagaccataaataagggcgaaaacattatcatgtgaaaagaatgtatttcacctgcaagttacaaaaaaatagtttgtgcattgcaaataagcaaagacttggattgactttacattcatcatttaaaattcattagttaaaattaaaccttagg

SEQ ID NO: 29510 - DNA, 3124 bp, Homo Sapiens
taagatccacatcagctcaactgcacttgcctcgcagaggcagcccgctcacttcccgcggaggcgctccccggcgccgcgctccgcggcagccgcctgcccccggcgctgcccccgcccgccgcgccgccgccgccgccgcgcacgccgcgccccgcagctctgggcttcctcttcgcccgggtggcgttgggcccgcgcgggcgctcgggtgactgcagctgctcagctcccctcccccgccccgcgccgcgcggccgcccgtcgcttcgcacagggctggatggttgtattgggcagggtggctccaggatgttaggaactgtgaagatggaagggcatgaaaccagcgactggaacagctactacgcagacacgcaggaggcctactcctccgtcccggtcagcaacatgaactcaggcctgggctccatgaactccatgaacacctacatgaccatgaacaccatgactacgagcggcaacatgaccccggcgtccttcaacatgtcctatgccaacccgggcctaggggccggcctgagtcccggcgcagtagccggcatgccggggggctcggcgggcgccatgaacagcatgactgcggccggcgtgacggccatgggtacggcgctgagcccgagcggcatgggcgccatgggtgcgcagcaggcggcctccatgaatggcctgggcccctacgcggccgccatgaacccgtgcatgagccccatggcgtacgcgccgtccaacctgggccgcagccgcgcgggcggcggcggcgacgccaagacgttcaagcgcagctacccgcacgccaagccgccctactcgtacatctcgctcatcaccatggccatccagcaggcgcccagcaagatgctcacgctgagcgagatctaccagtggatcatggacctcttcccctattaccggcagaaccagcagcgctggcagaactccatccgccactcgctgtccttcaatgactgcttcgtcaaggtggcacgctccccggacaagccgggcaagggctcctactggacgctgcacccggactccggcaacatgttcgagaacggctgctacttgcgccgccagaagcgcttcaagtgcgagaagcagccgggggccggcggcgggggcgggagcggaagcgggggcagcggcgccaagggcggccctgagagccgcaaggacccctctggcgcctctaaccccagcgccgactcgcccctccatcggggtgtgcacgggaagaccggccagctagagggcgcgccggcccccgggcccgccgccagcccccagactctggaccacagtggggcgacggcgacagggggcgcctcggagttgaagactccagcctcctcaactgcgccccccataagctccgggcccggggcgctggcctctgtgcccgcctctcacccggcacacggcttggcaccccacgagtcccagctgcacctgaaaggggacccccactactccttcaaccacccgttctccatcaacaacctcatgtcctcctcggagcagcagcataagctggacttcaaggcatacgaacaggcactgcaatactcgccttacggctctacgttgcccgccagcctgcctctaggcagcgcctcggtgaccaccaggagccccatcgagccctcagccctggagccggcgtactaccaaggtgtgtattccagacccgtcctaaacacttcctagctcccgggactggggggtttgtctggcatagccatgctggtagcaagagagaaaaaatcaacagcaaacaaaaccacacaaaccaaaccgtcaacagcataataaaatcccaacaactatttttatttcatttttcatgcacaacctttcccccagtgcaaaagactgttactttattattgtattcaaaattcattgtgtatattactacaaagacaaccccaaaccaatttttttcctgcgaagtttaatgatccacaagtgtatatatgaaattctcctccttccttgcccccctctctttcttccctctttcccctccagacattctagtttgtggagggttatttaaaaaaacaaaaaaggaagatggtcaagtttgtaaaatatttgtttgtgctttttccccctccttacctgaccccctacgagtttacaggtctgtggcaatactcttaaccataagaattgaaatggtgaagaaacaagtatacactagaggctcttaaaagtattgaaagacaatactgctgttatatagcaagacataaacagattataaacatcagagccatttgcttctcagtttacatttctgatacatgcagatagcagatgtctttaaatgaaatacatgtatattgtgtatggacttaattatgcacatgctcagatgtgtagacatcctccgtatatttacataacatatagaggtaatagataggtgatatacatgatacattctcaagagttgcttgaccgaaagttacaaggaccccaacccctttgtcctctctacccacagatggccctgggaatcaattcctcaggaattgccctcaagaactctgcttcttgctttgcagagtgccatggtcatgtcattctgaggtcacataacacataaaattagtttctatgagtgtataccatttaaagaatttttttttcagtaaaagggaatattacaatgttggaggagagataagttatagggagctggatttcaaaacgtggtccaagattcaaaaatcctattgatagtggccattttaatcattgccatcgtgtgcttgtttcatccagtgttatgcactttccacagttggacatggtgttagtatagccagacgggtttcattattatttctctttgctttctcaatgttaatttattgcatggtttattctttttctttacagctgaaattgctttaaatgatggttaaaattacaaattaaattgttaatttttatcaatgtgattgtaattaaaaatattttgatttaaataacaaaaataataccagattttaagccgtggaaaatgttcttgatcatttgcagttaaggactttaaataaatcaaatgttaacaaaaaaaaaaaaaaaa

SEQ ID NO: 29511 - DNA, 6193 bp, Homo Sapiens
tgcttaaaaaaacacaacaggattttcgaagaatcctttcttagaaaacaaacaaaaaaaccaaacaaaaacgtactttctccccactagtttacaccacaggaagcgagagagctgctgccactgctgctaccacaggaagacacagcagggagaagccctagtgcctctgccggctgcccaggacctggtatcggcccacagaccaagtcctccacagagggcgagccagggtggagaagagccagcccagtgacccaaacatccccgataaaacacccactgcttaagaggcaggctcggatggactatagctttgataccacagccgaagacccttgggttaggatttctgactgcatcaaaaacttatttagccccatcatgagtgagaaccatggccacatgcctctacagcccaatgccagcctgaatgaagaagaagggacacagggccacccagatgggaccccaccaaagctggacaccgccaatggcactcccaaagtttacaagtcagcagacagcagcactgtgaagaaaggtcctcctgtggctcccaagccagcctggtttcgccaaagcttgaaaggtttgaggaatcgtgcttcagacccaagagggctccctgatcctgccttgtccacccagccagcacctgcttccagggagcacctaggatcacacatccgggcctcctcctcctcctcctccatcaggcagagaatcagctcctttgaaacctttggctcctctcaactgcctgacaaaggagcccagagactgagcctccagccctcctctggggaggcagcaaaacctcttgggaagcatgaggaaggacggttttctggactcttggggcgaggggctgcacccactcttgtgccccagcagcctgagcaagtactgtcctcggggtcccctgcagcctccgaggccagagacccaggtgtgtctgagtcccctcccccagggcggcagcccaatcagaaaactctcccccctggcccggacccgctcctaaggctgctgtcaacacaggctgaggaatctcaaggcccagtgctcaagatgcctagccagcgagcacggagcttccccctgaccaggtcccagtcctgtgagacgaagctacttgacgaaaagaccagcaaactctattctatcagcagccaagtgtcatcggctgtcatgaaatccttgctgtgccttccatcttctatctcctgtgcccagactccctgcatccccaaggaaggggcatctccaacatcatcatccaacgaagactcagctgcaaatggttctgctgaaacatctgccttggacacggggttctcgctcaacctttcagagctgagagaatatacagagggtctcacggaagccaaggaagacgatgatggggaccacagttcccttcagtctggtcagtccgttatctccctgctgagctcagaagaattaaaaaaactcatcgaggaggtgaaggttctggatgaagcaacattaaagcaattagacggcatccatgtcaccatcttacacaaggaggaaggtgctggtcttgggttcagcttggcaggaggagcagatctagaaaacaaggtgattacggttcacagagtgtttccaaatgggctggcctcccaggaagggactattcagaagggcaatgaggttctttccatcaacggcaagtctctcaaggggaccacgcaccatgatgccttggccatcctccgccaagctcgagagcccaggcaagctgtgattgtcacaaggaagctgactccagaggccatgcccgacctcaactcctccactgactctgcagcctcagcctctgcagccagtgatgtttctgtagaatctacagcagaggccacagtctgcacggtgacactggagaagatgtcggcagggctgggcttcagcctggaaggagggaagggctccctacacggagacaagcctctcaccattaacaggattttcaaaggagcagcctcagaacaaagtgagacagtccagcctggagatgaaatcttgcagctgggtggcactgccatgcagggcctcacacggtttgaagcctggaacatcatcaaggcactgcctgatggacctgtcacgattgtcatcaggagaaaaagcctccagtccaaggaaaccacagctgctggagactcctaggcaggacatgctgaagccaaagccaataacacacagctaacacacagctcccataaccgctgattctcagggtctctgctgccgccccacccagatgggggaaagcacaggtgggcttcccagtggctgctgcccaggcccagaccttctaggacgccacccagcaaaaggttgttcctaaaataagggcagagtcacacgggggcagctgatacaaattgcagactgtgtaaaaagagagcttaatgataatattgtggtgccacaaataaaatggatttattagaatttcatatgacattcatgcctggcttcgcaaaatgtttcaagtactgtaactgtgtcatgattcacccccaaacagtgacatttatttttctcatgaatctgcaatgtgggcagagattggaatgggcagctcatctctgtcccacttggcatcagctggcgtcatgcaaagtcatgcaaaggctgggaccacgtgagatcattcactcatacatctggccgttgatgttggctgggaactcacctggggctgctggcctgaatgcttataggtggcctctccttgtggcctgggcctcctcacaacatggtgtctggattcccaggatgagcatcccaggatcgcaagagccatgtagaagctgcatcttgtttatacctttgccttggaagttgcatggcatcacctccaccatactccatcagttagagctgacacaaacctgcctgggtttaaggggagaggaaatattgctggggtcatttatgaaaaatacagtttgtcacatgaaacatttgcaaaattgtttttggttggattggagaagtaatcctagggaagggtggtggagccagtaaacagaggagtacaggtgaagcaccaagctcaaagcgtggacaggtgtgccgacagaaggaaccagcgtgtatatgagggtatcaaataaaattgctactacttacctaccacatgccaagcactgtgctcagggctaaacgggcattgcctttagtgatcacagcagcttctacggtgtatggttctgtgccaatgtattgataagagggcacacactgtgtacagtaaatggcttatccagctggtgagtgatgcggcagattgagttttcttctgtgattcggtggagactatcagcccaagatgctttaagtgcacaacattacagggaatgcctgagtgcctggccaaagggatatttggtttggccatctctggatgcctgattgccaagctcaggaccaggcaatgtgactttgcatcagcaacaaccagcatcccttgaccaggcctgggccagagtattggtctcctctcagcccctgatcctgtgaagtaaggatgtgggggaagacctggcaaggacacagatgaaacacaaacaatagtaattctcaggccatcatcagtggagccatgttaatgtaatctgatggcttctccagggtccacaggaagtgaagaatctgtttcccagcagtggactcaaaacccatctgggctcctaaccttcctgtaaacccctttagtggcttcattagagcaggcgttcagctcactgttctattcatctcaaggaataatgggcttagagcagtttctgtcctgctggttaacttgtttggcctattccattctggattttgtcaagcagtagacaagcaattagacaagaacttggaggcaccatttgtatccactttttagacttaatagaaacattgaagatgaacataatctaccaacgaaagacgtgattcaattcaacactcccttcccatgacccaggctgggcaaggaggccacgtgatgtggagggcacattccttgcctgcacaaactcaccatctgtgcacgcagtggccttccctaaaatcagggaattgttttaagtcttatcaagcagccaagggatgaaagagaaggtgggttttcatcaagactggaaggtggggacagggatgagcatggagctggccgtgggcctggggtaccaagagactccttgagagaccaggcaaagcaagtgattgggacagaggttatctgtcccaggttatctgggcatagatgcaggtgagcccatggccctcccagtacctcctgtctctggcctgttttagaaggttctctcctccccaaggagacacaacaactcctagggccactgaagatataactattgcccaggtttctggtctctaggctggggaagtcctctgggtaggaatcagcaagaagatcctaaaacaaaagctcatccatttgcgttccatgatgctgggatttacacttgaggcttagctttgctctgccaacttcttcagagctgacacaggatgaaggcaatgccatcctcaaacactgcaggcatcacagctaacaattgtgaagtcgtcttaactcaccataaaaaggaatccactcccaggcagccctacttctttgctttgcccagcattttactgattcatacattatctcacttgtgccaacactcaagaagcaggctacactgacactggtattcctgcctccatattttctttaaaagacaaatcaaagcagatatattaagtgactgttcaagagcacacttggcccaagtggcagagcttggactggatgcatgttttccagctcctcatccagggctctgaccagtttaacctgatgcagtcacgtggaggagcagtgcaggcacagtatgtcccataggcccagtgagatgcattcttggttggctggccttccacttggctacacagggatgtacaaggcgatcccatcttgataagaccaccacctcagagtatggagctcagagagggcaggcatgaagtttccttggctggtgcacctagaattggctgaactcatgagaagttgatatagaacagtgcttgccacagagcggggactcggtaagcacttaatgaatgaatgaattctaagtcaatccaagagtctgatgatttcttgaaaagggtgttagctaaaggatcttaggcatgactgtagaatttgtagttgcaatagaacagagaaagaggaagctttctgtctccttaacactgagctgtcatgttttaaagcttgctcacatcttggcacatttaagagacagtcaccccaggactcaaaaatagggaagtaacagtaacgcaggggaaacgttttctgtttggaggagcaaaggctgagaacactgtgaaaacattttgcgcgcacaatagtaacctgggtaaatgcagcgtgaagggattttagtcacacgtggtctttcttacaaggaaggtggtgggggtgcagatgaggttgctagagaatgttagaggatccctctctggattggagatagggaaagaaagttgcacggctgctgaggccccttctaggtggcaaggctgtgctccctggttctgatgatgtgcctgggtggacatggcccctgtgagtttgtacagtcttgcagcaggatctagaggggggatttccagccagggctgctagacggaggcctactcttccatctttcctgatggcaggatggcctggccagggcctggaagacagagacctcctgcctccgcctcagtaagacgacaaggaaaggcaaatgcccaagggaaagaaaaggaaggctcttctccccagagttccccatgcagacatgagtgcgtgctcagttcagaatcacttctgagaactcatccctaatgctgcagatttgggctggaacagattcacactgtctggtttcaccgaggacatgaaactccaccttgcggggataaagagagaaaaacaaattcatcaaatggaagacacattgaaagtgtttttccttaatgcttatcctgtttttaaaccattatttccaagttgacaccttttttaaggaaaaataaatattttgcggcattaaagccataaaaaaaaaaaaaaaaaaaaaaaaaaaaaaaa

SEQ ID NO: 29512 - DNA, 3233 bp, Homo Sapiens
ccgcgcgtgctcccgcccctcgccgccgctcgctcgctcgccggccggcggcctccgctcggccccctccctcagctccggtgcgcggcggccgacgacccgcgcggcctgggcctcggcccgcgccaccggcgcccgcgcggagcggcccgggggccctcacgcaggcccatggcggcggccgcggcggcgctctcgggcgcgggcacgccacccgcgggcggcggggccgggggcggcggggccgggggcggcgggtccccgccgggcggctgggccgtggcgcgcctggagggccgcgagttcgagtatctgatgaagaagcgctcggtgaccatcggccgcaactcgtcgcagggctcggtggacgtgagcatgggccactcgagcttcatctcccggcgccacctcgagatcttcacgcccccgggcggcggcggccatggcggggccgctccggagctgccgcccgcgcagcccaggcccgacgccggcggcgacttctacctgcgctgcttgggcaagaacggggtattcgtggacggcgtgttccagaggcgcggggcgccgccgctgcagctgccgcgcgtgtgcacattcaggttcccgagcacaaacatcaagataacgttcactgccctgtccagcgagaagagagagaagcaggaggcgtctgagtctccagtgaaggccgtacagccacacatctcgcccctgaccatcaacattccagacaccatggcccacctcatcagccctctgccctcccccacgggaaccatcagcgctgcaaactcctgcccctccagcccccggggagcggggtcttcagggtacaaggtgggccgagtgatgccatctgacctcaatttaatggctgacaactcacagcctgaaaatgaaaaggaagcttcaggtggagacagcccgaaggatgattcaaagccgccttactcctacgcgcagctgatagttcaggcgattacgatggctcccgacaaacagctcaccctgaacgggatttatacacacatcactaaaaattatccctactacaggactgcggacaagggctggcagaattcaattcgccacaatctctctctgaatcgttatttcatcaaagtgccgcgttcccaggaagaaccaggcaaaggctcgttctggaggatagacccagcctctgaaagcaaattaatagaacaggcttttaggaaacgacggcctaggggcgtgccctgctttagaacccctctgggaccgctctcttctaggagtgccccagcctctcccaatcacgcgggagtgctgtctgctcactctagtggcgcccagacccctgagagcctgtcgagggaaggttcgccggcccccctggagcctgagcctggcgctgcacagcccaaactcgctgtcatccaggaagcccggtttgcccagagcgccccagggtcacctctgtccagtcagccagtcttaatcaccgtccagcggcagctaccacaggccatcaagcctgtcacctacactgtggccaccccagtgaccacctcgacctcccagccacccgtcgtgcagacggttcacgtcgtccaccagatcccagcggtgtcggtcaccagtgtggccggactggccccagcgaacacgtacactgtctctggacaagctgtggtcaccccggcagccgtgctggcccctcctaaggcagaggcccaggagaatggagaccacagggaagtcaaagtgaaagtagagcctattcccgccattggccacgccacgctcggcactgccagccggatcattcagacggcacagaccaccccggtccagacggtgaccatagtacaacaggcacctctaggtcaacaccagctaccaataaaaactgtaacacaaaacggcactcacgtggcatcagtccccactgcggtccacggccaggtgaacaatgccgcggcgagtcctttgcacatgttggcaacacacgcatccgcatcggcctccctgcccacaaagcgccacaacggtgaccagccggagcagccggagctgaagcggatcaagacagaagacggcgagggcatcgtcattgccctgagcgtggacacgccaccggcagccgtaagggaaaagggtgtccagaactagcgaccgggagagcttttctttaacgatatcaactctgtggtgccaaaaggagacgcggcctcccgccagcactcgggggtgcagggccctgtggttggacttcacctctcagcactgaaaacccaaaacccagctggccttaacactccttaaagacagaagtcacacttgaacaaaacccacacacaacaaaacctgatttgggagacggtgtctccactgagcacctgctgggctgagcttctacctacgagtgaaactctgtcctcccgcgaggaccaggcatcgctgtgtgaggacggcacggccagcgcctgctgtgagtgggtctcccaagactaggcctcaggacgcggggggagccatccccgccgccctcacaggacccaccaggcagcggagacatgtggaattagagtattttgaggtgtcctttctttacaaaataatggggtcttgggcatttcacatcactccatttctactgagactttcagaatcacacaggccctttccgtggatttcatttggggcaaagaaacaacgtagttttgtttttgttttcagcctatggaatgatttccttttgtctgtcttgttcaagttcagacgaagctactctggcatctgcacatttccgtgttacagcagctgcctgatgaattttatccacctccatttcagcatgtggctcgcgtggacaggtggacggacgctgtggccgcatggaaccttgagaacccagggacgagccagtgccgggaaggaactgccgggactcaccgagctgcacttaactgttctctttctggctattttttgttgtttgtttctttgtgttgactttgtccctggcaaaattttccactctgagtaaaacaagtctcctaagtattgtgtatgtttaaaacgacagaaccatttctacttcatttggaaaaagattcagtcttttatcacaggcccttttgaaactcagatcccaggtctctccgtggtatgtttgtatttggggtgtccctccggctctaggcggcctctgacctgctgtctactccccaccttcggtgagcggccgc

SEQ ID NO: 29513 - DNA, 3677 bp, Homo Sapiens
cgcctgcccgcccgcccgctcgcccccggtccggactcctcctcctcctcttctcgccattgcagttggacccagcagcccggcgcgcaccgcgtggcttttgggggcagaccccggcgggctgtggcaggagggcggcggcggcggctgcggtcgaagaaggggacgccgacaagagttgaagtattgataacaccaaggaactctatcacaatttgaaaagataagcaaaagtttgatttccagacactacagaagaagtaaaaatgcgtccaatgcgaatttttgtgaatgatgaccgccatgtgatggcaaagcattcttccgtttatccaacacaagaggagctggaggcagtccagaacatggtgtcccacacggagcgggcgctcaaagctgtgtccgactggatagacgagcaggaaaagggtagcagcgagcaggcagagtccgataacatggatgtgcccccagaggacgacagtaaagaaggggctggggaacagaagacggagcacatgaccagaaccctgcggggagtgatgcgggtgggcctggtggcaaagggcctcctactcaagggggacttggatctggagctggtgctgctgtgtaaggagaagcccacaaccgccctcctggacaaggtggccgacaacctggccatccagcttgctgctgtaacagaagacaagtacgaaatactgcaatctgtcgacgatgctgcgattgtgataaaaaacacaaaagagcctccattgtccctgaccatccacctgacatcccctgttgtcagagaagaaatggagaaagtattagctggagaaacgctatcagtcaacgaccccccggacgttctggacaggcagaaatgccttgctgccttggcgtccctccgacacgccaagtggttccaggccagagccaacgggctgaagtcttgtgtcattgtgatccgggtcttgagggacctgtgcactcgcgtgcccacctggggtcccctccgaggctggcctctcgagctcctgtgtgagaaatccattggcacggccaacagaccgatgggtgctggcgaggccctgcggagagtgctggagtgcctggcgtcgggcatcgtgatgccagatggttctggcatttatgacccttgtgaaaaagaagccactgatgctattgggcatctagacagacagcaacgggaagatatcacacagagtgcgcagcacgcactgcggctcgctgccttcggccagctccataaagtcctaggcatggaccctctgccttccaagatgcccaagaaaccaaagaatgaaaacccagtggactacaccgttcagatcccaccaagcaccacctatgccattacgcccatgaaacgcccaatggaggaggacggggaggagaagtcgcccagcaaaaagaagaagaagattcagaagaaagaggagaaggcagagcccccccaggctatgaatgccctgatgcggttgaaccagctgaagccagggctgcagtacaagctggtgtcccagactgggcccgtccatgcccccatctttaccatgtctgtggaggttgatggcaattcattcgaggcctctgggccctccaaaaagacggccaagctgcacgtggccgttaaggtgttacaggacatgggcttgccgacgggtgctgaaggcagggactcgagcaagggggaggactcggctgaggagaccgaggcgaagccagcagtggtggcccctgccccagtggtagaagctgtctccacccctagtgcggcctttccctcagatgccactgccgagcaggggccgatcctgacaaagcacggcaagaacccagtcatggagctgaacgagaagaggcgtgggctcaagtacgagctcatctccgagaccgggggcagccacgacaagcgcttcgtcatggaggtcgaagtggatggacagaagttccaaggtgctggttccaacaaaaaggtggcgaaggcctacgctgctcttgctgccctagaaaagcttttccctgacacccctctcgcccttgatgccaacaaaaagaagagagccccagtacccgtcagagggggaccgaaatttgctgctaagccacataaccctggcttcggcatgggaggccccatgcacaacgaagtgcccccaccccccaaccttcgagggcggggaagaggcgggagcatccggggacgagggcgcgggcgaggatttggtggcgccaaccatggaggctacatgaatgccggtgctgggtatggaagctatgggtacggaggcaactcggcgacagcaggctacagtgactttttcacagactgctacggctatcatgattttgggtcttcctagagcgtctaaaagtattgcacacaaaatcaactttttactccaatttcctccaactccaaaacccaaagtgtccgtgctgtgtccctgtgcttcactgggtttctcaaccgtggcttttcaccgcagcttgtctgaaactcttagcctgcagaatttaagacaatggcagtttttatcgtgatttgcctttgaacttggtcctattgaagttcacaataagtggaaaacaattttttcagagaatgtatttttgtgcagaattgcacagaattctagagacagcgttgttcggcatcaaggcaaaagcccacctttgctttttatggaaagcattactttatttaaagagacagacaatgacgcattttaatctacctttgtcttaatttacagcaggttttgtatgaatttttaaccttttaacaaactcccaaatctggttgatgcctttgacagtgatgaaaacgatttcaccacatctgaatccagagaaaccggctttttttcttattgcgagcatgttaaaacgttgggaacatgtggggaattgtatattgcgctgaattaacttctcccgcctcttgtaatgctctggtgggttcttgtttgggaatgcgatattttgtggctggtttagctagagagtgaactctcaaaggtatcaaaactgtgcttccattattagtgcaagaaacagacaggctttaaggggtagatgacgtgaaattttgcaagtcttaattacagctgcagatgcatgggattctggatttttttgttgctttttagtttaatgggactttaaaagtaattgaggagaaagaaccgtgatgttccctgtttctccagtaaaggactggcttttgcttgggcagaggtggtgctgctgggtgtgcagctgccacagactccaaaggcgtagaagtttgtgccaacacacggagtcattctggctctctgctgaggcccctgttttctggcaggtgccctccttggaaactggttttggctctgatcagcggttctttttgcagcaaagcctgcatctgtgttgacttgcaagattttgcgtttattcaggcaaaaactggtcaaaatggttactacatgatttgttcccagaggtttgaaacattcagtgaaactttttaaaactttgattgcatgatgtattttttttttagaaagttattgtttgagaataatgtctttttataccaggaaaatagttatcctgaatgacgttgaaaactccccctcccctttatttttttttaatcaatacatgtgaaagtaacaagc

SEQ ID NO: 29514 - DNA, 3097 bp, Homo Sapiens
gacccgcgcgggatgtgaccccctgaccccctgcctggcctcccctgccccccagggggcccgcctttgcctgcttttgggggggggtggggaggggcgcgcggatcatggcattggagttcccgggcttgcagccgccgccgccgcctcgttcacgcaccccgagcgccccttcttcccagagcagcagcggagaaggcgaagcggccggcgggggcgaggcagatggggctcaaggcgcgcagggcggcgggggcggctggcggcggcggcgacgggggcggcggaggcggcggggcggctaacccagccggaggggacgcggcggcggccggcgacgaggagcggaaagtggggctggcgcccggcgacgtggagcaagtcaccttggcgctcggggccggagccgacaaagacgggaccctgctgctggagggcggcggccgcgacgaggggcagcggaggaccccgcagggcatcgggctcctggccaagaccccgctgagccgcccagtcaagagaaacaacgccaagtaccggcgcatccaaactttgatctacgacgccctggagagaccgcggggctgggcgctgctttaccacgcgttggtgttcctgattgtcctggggtgcttgattctggctgtcctgaccacattcaaggagtatgagactgtctcgggagactggcttctgttactggagacatttgctattttcatctttggagccgagtttgctttgaggatctgggctgctggatgttgctgccgatacaaaggctggcggggccgactgaagtttgccaggaagcccctgtgcatgttggacatctttgtgctgattgcctctgtgccagtggttgctgtgggaaaccaaggcaatgttctggccacctccctgcgaagcctgcgcttcctgcagatcctgcgcatgctgcggatggaccggagaggtggcacctggaagcttctgggctcagccatctgtgcccacagcaaagaactcatcacggcctggtacatcggtttcctgacactcatcctttcttcatttcttgtctacctggttgagaaagacgtcccagaggtggatgcacaaggagaggagatgaaagaggagtttgagacctatgcagatgccctgtggtggggcctgatcacactggccaccattggctatggagacaagacacccaaaacgtgggaaggccgtctgattgccgccaccttttccttaattggcgtctccttttttgcccttccagcgggcatcctggggtccgggctggccctcaaggtgcaggagcaacaccgtcagaagcactttgagaaaaggaggaagccagctgctgagctcattcaggctgcctggaggtattatgctaccaaccccaacaggattgacctggtggcgacatggagattttatgaatcagtcgtctcttttcctttcttcaggaaagaacagctggaggcagcatccagccaaaagctgggtctcttggatcgggttcgcctttctaatcctcgtggtagcaatactaaaggaaagctatttacccctctgaatgtagatgccatagaagaaagtccttctaaagaaccaaagcctgttggcttaaacaataaagagcgtttccgcacggccttccgcatgaaagcctacgctttctggcagagttctgaagatgccgggacaggtgaccccatggcggaagacaggggctatgggaatgacttccccatcgaagacatgatccccaccctgaaggccgccatccgagccgtcagaattctacaattccgtctctataaaaaaaaattcaaggagactttgaggccttacgatgtgaaggatgtgattgagcagtattctgccgggcatctcgacatgctttccaggataaagtaccttcagacgagaatagatatgattttcacccctggacctccctccacgccaaaacacaagaagtctcagaaagggtcagcattcaccttcccatcccagcaatctcccaggaatgaaccatatgtagccagaccatccacatcagaaatcgaagaccaaagcatgatggggaagtttgtaaaagttgaaagacaggttcaggacatggggaagaagctggacttcctcgtggatatgcacatgcaacacatggaacggttgcaggtgcaggtcacggagtattacccaaccaagggcacctcctcgccagctgaagcagagaagaaggaggacaacaggtattccgatttgaaaaccatcatctgcaactattctgagacaggccccccggaaccaccctacagcttccaccaggtgaccattgacaaagtcagcccctatgggttttttgcacatgaccctgtgaacctgccccgagggggacccagttctggaaaggttcaggcaactcctccttcctcagcaacaacgtatgtggagaggcccacggtcctgcctatcttgactcttctcgactcccgagtgagctgccactcccaggctgacctgcagggcccctactcggaccgaatctccccccggcagagacgtagcatcacgcgagacagtgacacacctctgtccctgatgtcggtcaaccacgaggagctggagaggtctccaagtggcttcagcatctcccaggacagagatgattatgtgttcggccccaatggggggtcgagctggatgagggagaagcggtacctcgccgagggtgagacggacacagacacggaccccttcacgcccagcggctccatgcctctgtcgtccacaggggatgggatttctgattcagtatggaccccttccaataagcccatttaaaagaggtcactggctgacccctccttgtaatgtagacagactttgtatagttcacttactcttacacccgacgcttaccagcggggacaccaatggctgcatcaaatgcatgcgtgtgcgtggtggccccacccaggcaggggcttcccacagcctcttcctccccatgtcaccacaacaaagtgcttccttttcagcatggtttgcatgactttacactatataaatggttccgctaatctcttctaggata

SEQ ID NO: 29515 - DNA, 4908 bp, Homo Sapiens
acctgcgtgcagtcggtcctccaggccacgcagcgcccgagagtaccagggagactccggcccctgtcggcgccaagcccctccgcccctcacagcgcccaggtccgcggccgggccttgattttttggcggggaccgtcatggcgtcgcagccaaattcgtctgcgaagaagaaagaggagaaggggaagaacatccaggtggtggtgagatgcagaccatttaatttggcagagcggaaagctagcgcccattcaatagtagaatgtgatcctgtacgaaaagaagttagtgtacgaactggaggattggctgacaagagctcaaggaaaacatacacttttgatatggtgtttggagcatctactaaacagattgatgtttaccgaagtgttgtttgtccaattctggatgaagttattatgggctataattgcactatctttgcgtatggccaaactggcactggaaaaacttttacaatggaaggtgaaaggtcacctaatgaagagtatacctgggaagaggatcccttggctggtataattccacgtacccttcatcaaatttttgagaaacttactgataatggtactgaattttcagtcaaagtgtctctgttggagatctataatgaagagctttttgatcttcttaatccatcatctgatgtttctgagagactacagatgtttgatgatccccgtaacaagagaggagtgataattaaaggtttagaagaaattacagtacacaacaaggatgaagtctatcaaattttagaaaagggggcagcaaaaaggacaactgcagctactctgatgaatgcatactctagtcgttcccactcagttttctctgttacaatacatatgaaagaaactacgattgatggagaagagcttgttaaaatcggaaagttgaacttggttgatcttgcaggaagtgaaaacattggccgttctggagctgttgataagagagctcgggaagctggaaatataaatcaatccctgttgactttgggaagggtcattactgcccttgtagaaagaacacctcatgttccttatcgagaatctaaactaactagaatcctccaggattctcttggagggcgtacaagaacatctataattgcaacaatttctcctgcatctctcaatcttgaggaaactctgagtacattggaatatgctcatagagcaaagaacatattgaataagcctgaagtgaatcagaaactcaccaaaaaagctcttattaaggagtatacggaggagatagaacgtttaaaacgagatcttgctgcagcccgtgagaaaaatggagtgtatatttctgaagaaaattttagagtcatgagtggaaaattaactgttcaagaagagcagattgtagaattgattgaaaaaattggtgctgttgaggaggagctgaatagggttacagagttgtttatggataataaaaatgaacttgaccagtgtaaatctgacctgcaaaataaaacacaagaacttgaaaccactcaaaaacatttgcaagaaactaaattacaacttgttaaagaagaatatatcacatcagctttggaaagtactgaggagaaacttcatgatgctgccagcaagctgcttaacacagttgaagaaactacaaaagatgtatctggtctccattccaaactggatcgtaagaaggcagttgaccaacacaatgcagaagctcaggatatttttggcaaaaacctgaatagtctgtttaataatatggaagaattaattaaggatggcagctcaaagcaaaaggccatgctagaagtacataagaccttatttggtaatctgctgtcttccagtgtctctgcattagataccattactacagtagcacttggatctctcacatctattccagaaaatgtgtctactcatgtttctcagatttttaatatgatactaaaagaacaatcattagcagcagaaagtaaaactgtactacaggaattgattaatgtactcaagactgatcttctaagttcactggaaatgattttatccccaactgtggtgtctatactgaaaatcaatagtcaactaaagcatattttcaagacttcattgacagtggccgataagatagaagatcaaaaaaaggaactagatggctttctcagtatactgtgtaacaatctacatgaactacaagaaaataccatttgttccttggttgagtcacaaaagcaatgtggaaacctaactgaagacctgaagacaataaagcagacccattcccaggaactttgcaagttaatgaatctttggacagagagattctgtgctttggaggaaaagtgtgaaaatatacagaaaccacttagtagtgtccaggaaaatatacagcagaaatctaaggatatagtcaacaaaatgacttttcacagtcaaaaattttgtgctgattctgatggcttctcacaggaactcagaaattttaaccaagaaggtacaaaattggttgaagaatctgtgaaacactctgataaactcaatggcaacctggaaaaaatatctcaagagactgaacagagatgtgaatctctgaacacaagaacagtttatttttctgaacagtgggtatcttccttaaatgaaagggaacaggaacttcacaacttattggaggttgtaagccaatgttgtgaggcttcaagttcagacatcactgagaaatcagatggacgtaaggcagctcatgagaaacagcataacatttttcttgatcagatgactattgatgaagataaattgatagcacaaaatctagaacttaatgaaaccataaaaattggtttgactaagcttaattgctttctggaacaggatctgaaactggatatcccaacaggtacgacaccacagaggaaaagttatttatacccatcaacactggtaagaactgaaccacgtgaacatctccttgatcagctgaaaaggaaacagcctgagctgttaatgatgctaaactgttcagaaaacaacaaagaagagacaattccggatgtggatgtagaagaggcagttctggggcagtatactgaagaacctctaagtcaagagccatctgtagatgctggtgtggattgttcatcaattggcggggttccatttttccagcataaaaaatcacatggaaaagacaaagaaaacagaggcattaacacactggagaggtctaaagtggaagaaactacagagcacttggttacaaagagcagattacctctgcgagcccagatcaacctttaattcacttgggggttggcaattttatttttaaagaaaacttaaaaataaaacctgaaaccccagaacttgagccttgtgtatagattttaaaagaatatatatatcagccgggcgcggtggctcatgcctgtaatcccagcactttgggaggctgaggcgggtggattgcttgagcccaggagtttgagaccagcctggccaacgtggcaaaacctcgtctctgttaaaaattagccgggcgtggtggcacactcctgtaatcccagctactggggaggctgaggcacgagaatcacttgaacccaggaagcggggttgcagtgagccaaaggtacaccactacactccagcctgggcaacagagcaagactcggtctcaaaaacaaaatttaaaaaagatataaggcagtactgtaaattcagttgaattttgatatctacccatttttctgtcatccctatagttcactttgtattaaattgggtttcatttgggatttgcaatgtaaatacgtatttctagttttcatataaagtagttcttttataacaaatgaaaagtatttttcttgtatattattaagtaatgaatatataagaactgtactcttctcagcttgagcttaacataggtaaatatcaccaacatctgtccttagaaaggaccatctcatgttttttttcttgctatgacttgtgtattttcttgcatcctccctagacttccctatttcgctttctcctcggctcactttctccctttttatttttcaccaaaccatttgtagagctacaaaacctatcctttcttattttcagtagtcagaattttatctagaaatcttttaacacctttttagtggttatttctaaaatcactgtcaacaataaatctaaccctagttgtatccctcctttaagtatttaaaacttgttgccccaaatgtgaaagcatttaattcctttaagaggcctaactcattcaccctgacagagttcacaaaaagcccactttagagtatacattgctattatgggagaccacccagacatctgactaatggctctgtgccacactccaagacctgtgccttttagagaagctcacaatgatttaaggactgtttgaaacttccaattatgtctataatttatattcttttgtttacatgatgaaactttttgttgttgcttgtttgtatataatacaatgtgtacatgtatctttttctcgattcaaatcttaacccttaggactctggtatttttgatctggcaaccatatttctggaagttgagatgtttcagcttgaagaaccaaaacagaaggaatatgtacaaagaataaattttctgctcacgatgagtttagtgtgtaaagtttagagacatctgactttgatagctaaattaaaccaaaccctattgaagaattgaatatatgctacttcaagaaactaaattgatctcgtagaattatcttaataaaataatggctataatttctctgcaaaatcagatgtcagcataagcgatggataatacctaataaactgccctcagtaaatccatggttaataaatgtggtttctacatt

SEQ ID NO: 29516 - DNA, 3376 bp, Homo Sapiens; identical to SEQ ID NO: 28832

SEQ ID NO: 29517 - DNA, 5550 bp, Homo Sapiens
ctccgccagcccgtgccaccgctgctaatgagagcagtcattaagtaaatgagacgtcgcctttagctggcttaggagttcgcacactaaggggagaagatatttaattgaaacccgcacgcaggcttccccacatgtgaccgctgtacgggaggcagctgccttccctctcctcccccagtccaccctgcaccccccatgtaaatttcatgattgctttccgtgatgtcattttgaaagaggacagacaatagctgtggggaaagaaaatgagttccgaggtgagctgttaaatcagaggtggacacacggaggcaaggccagcagctgcaggacctcaagacacctgggcagacactgcaagatgagcttagaaaatgaagacaagcgagctcgcacccgatccaaggccctgcgaggacccccagagaccacagctgcagacctcagctgccccaccccaggatgcacaggctcagggcacgtccggggcaagtactccaggcaccgaagtttacagagctgccccctggccaagaagaggaagctggagggcgctgaggctgagcacctggtgtccaagaggaagtcacaccccctgaagctggctctggacgagggctatggtgtggacagcgacggcagtgaggacactgaggtgaaggacgcctctgtttcggatgaatcggaaggaactctggagggggccgaggctgagacgtcaggacaggacgagattcatcgccccgagacagctgaaggaaggagccccgtcaagtcccattttggatccaaccccatcggcagcgccactgcctcctccaagggcagctacagcagctaccagggaatcatcgcaacttctctcctgaacttgggtcaaattgctgaagagaccctggtggaagaggacttgggccaggcggccaagccaggtcctggcattgtgcacctgcttcaggaggctgcagagggagctgccagcgaggagggtgaaaagggcctcttcatccagccagaggatgccgaggaggtcgtcgaagtcaccaccgagcgctcccaggacctgtgtccccagtccctggaggatgcagccagtgaggagtccagcaagcagaaaggcatcctgagtcacgaagaggaggacgaggaggaggaggaggaggaagaggaggaggaggaggatgaagaagaggaagaggaagaggaggaggaagaggaagaggaggaggaggaagaggaagaggaggaggaagaggaagaggaagaggaggaggaggaggcagctcctgatgtgatctttcaggaagacacctctcacacctctgcccagaaggcccctgagctccggggcccagaatcacccagtcccaagcctgagtactctgttattgtggaggtccgctcggatgatgacaaggacgaggacacccactcccggaagtcaacagtcactgacgagtcggagatgcaggacatgatgacccggggaaacctgggcctcctggagcaggccatcgccctgaaggctgaacaggtgcgcacagtctgcgagccgggctgcccgcctgccgagcagagccagctgggcctgggagagccagggaaggcagcaaagcccctggacactgtgcggaagagttactacagtaaagatccttcaagagctgagaagcgtgagatcaagtgtccaacaccaggctgtgatggcactggccacgttaccgggttgtaccctcaccaccgcagcctttctggctgtccccacaaggataggatccccccagagatcttagccatgcatgagaacgtgctgaagtgccccactcctggctgcacaggccagggtcacgtgaacagcaaccgcaacacgcacagaagtttgtctgggtgtcccattgctgccgccgaaaaattagccaaatcccatgagaagcagcagccgcagacaggagatccttccaagagtagctccaattccgatcggatcctcaggcccatgtgcttcgtgaagcagctcgaggtccctccatatgggagctaccggcccaacgtggcccccgccacacccagggccaacttggccaaggagctggagaagttctccaaggtcacctttgactacgcaagtttcgatgctcaggtttttggcaaacgcatgcttgccccaaagattcagaccagcgaaacctcacctaaagcctttcaatgctttgactactcgcaggacgccgaggctgcacacatggctgccactgccatcctgaacctctccacgcgctgctgggagatgcctgagaacctcagcacgaagccacaggacctccccagcaagtctgtggatatcgaggtagacgaaaatggaaccctggacttgagcatgcacaaacaccgcaaacgagaaaatgctttccccagcagcagcagctgcagcagcagccccggtgtgaagtctcccgacgcctcccagcgccacagcagcaccagcgcccccagcagctccatgacctctccccagtccagccaggcctcccgccaggacgagtgggaccggcccctggactacaccaagcctagccgcctgagagaggaggaacctgaggagtcagagccagcagcccattcttttgcttcttctgaagcagatgaccaggaagtgtcggaagagaattttgaggagcggaagtatccgggggaagtcaccctgaccaactttaagctgaagtttctctccaaggacataaagaaggagctgctcacctgtcccacccctggctgtgacggcagcggccacatcaccgggaactacgcctcccaccgcagcctctctggttgccctcttgctgacaagagcctcagaaacctcatggctgcccactctgctgacctcaagtgccccacgcccggctgtgacggctctggccacatcacagggaactacgcttcacaccggagcttgtccggctgccctcgtgcaaagaaaagtggagtcaaggtggcacccaccaaggacgacaaggaggaccccgagctgatgaagtgcccagttccaggctgtgtggggctcggtcacatcagcgggaaatacgcctctcacaggagcgcatccggctgcccactggccgcccgcaggcagaaggaagggtccctcaatggctcgtcattctcctggaagtccctgaagaatgaaggaccgacctgccccaccccgggctgtgacggctctggccacgccaatgggagtttcctcacccaccggagtttgtcaggctgtcccagagcaacctttgctggaaagaagggaaaactgtcaggggatgaggtcctcagtccaaagttcaagactagcgacgtgttggagaatgatgaggagatcaagcagctgaaccaggagatccgagacctgaacgagtccaactcggagatggaggctgccatggtgcagctgcagtcccagatctcctccatggagaagaacctgaagaacatcgaggaggagaacaagctcattgaggagcagaatgaagccctgtttctggagctgtccggcctgagccaggccctcatccaaagtctcgccaatatccgccttccgcacatggagccaatatgcgaacagaatttcgatgcctatgtgagcaccctcaccgacatgtactccaaccaggacccggagaacaaggacctcctggagagcatcaagcaggctgtgaggggcatccaggtctaggccgtgtggtacccagaagtgtcccagcccaccacaccgtttacctccctcgccctgccccgcaccgtggggatgcccaactcacagtgacttcccgtttggggcccggtgtggccgcgggcgggtttatccaaagggatggctggaaattggccgctcccacgaggctccctccaggcttggggccgtggtggccctatctgtgtgcataggggcactgaagaattacaaagtgatttatttttgttttctgaaagaaatctgaagagcagctcaaagtctccagtggaagctcatggacaaggttctcagggaagttttggagtttgcaaccacagtattcctttgtctgtcgaggctgggagggtagccgtgagcgtggtgggtgggtggtgtgagtggcatcttggcctggaggacacgcctggggcagcgtgtctgtgctcagtgagggccgatgaagaaagtgcgttttctgttttcatttaattcagttttgtgttaagggtggaacaaagctctgttctagagggaaagttaggaataggcctcccagaggatactccagacagttgacaagcatcgcagcccctgtcaggtcaaggaattttaacctgggagactcctgaaaatcagcctaatgtctgggggcagctggcgctgaggctgtgcagatgtgtatggccttgggtcacagctccctactggggctgcagcctttagaccctgggtctgggatccacgtctagggaccactctggcttctgtgcatccacccaggcccccgacccatcactgccacattctccgggtcatggccgagcttgacctctgcatccatggtgacggaggtggcaatgacatcatcaaggtcagagggtaaattcctaacaggagaccacaaaggtttcacttcttttagatccatccaatatgcgaaaaaagggtacattttaatttaatgtgttaaaaacacaatgtccctaccgtgtaaatagaatccaagtcaattgtgactgcaattccaagttagtatttaaaaatagagaaattgcacttcctggaaaaaattaaaaagtagttagtttaattattctgtaaattatttaattttgtcaagatgtaagtatttatattcacagcctcttatgttaacgtttgctatttatttaacatttttatttattaattttatactatttcaactagaccccacaccagggcaccctaagaggggaaaaaagtgaattcaaagcaaaaataactatttgactataatataggccacaaaaaatcttgatataactcctagttataattttgatgcaaccaagttattttttatatattttgttatttattcttttaataatggaatttttttaaaaagtattttgtaactgaggaattttgataatttggggattttgttttcccttggtctaatggagagaaagacattttggttttctttttccattttgggttccttttgtttcaggcacggataacagcaaatggaattctgtatttattattatttaagtgtagcgcagatgtgtgtgcttgggcgtgtttctcgtgtcgcgtttgcgtgtcggctcttgcggtggagtcctgttgctgtgagggagtgctggccgcaggcagcctcgagtcaccgccaggctcacaggctgtgccacccgtccctccgacagctccaatactgtgaccctccttcctcaggaagcgcgttgaacccacagcactccgtggtgtgtttgcagggtgatttcctaataaaagtccactctgactgtgaaaaaaaaaaaaaaaaa

SEQ ID NO: 29518 - DNA, 6133 bp, Homo Sapiens
tgcatgaagacaaaaggtcctgtgctcacctgggacccttctggacgttgccctgtgtacctcttcgactgcctgttcatctacgacgaaccccgggtattgaccccagacaacaatgccacttcatattggggacttcgtctgggattccaaggtgcattcattgcaaagttccttaaatattttctcactgcttcctactaaaggacggacagagcatttgttcttcagccacatactttccttccactggccagcattctcctctattagactagaactgtggataaacctcagaaaatggccacccagcagaaagcctctgacgagaggatctcccagtttgatcacaatttgctgccagagctgtctgctcttctgggcctagatgcagttcagttggcaaaggaactagaagaagaggagcagaaggagcgagcaaaaatgcagaaaggctacaactctcaaatgcgcagtgaagcaaaaaggttaaagacttttgtgacttatgagccgtacagctcatggataccacaggagatggcggccgctgggttttacttcactggggtaaaatctgggattcagtgcttctgctgtagcctaatcctctttggtgccggcctcacgagactccccatagaagaccacaagaggtttcatccagattgtgggttccttttgaacaaggatgttggtaacattgccaagtacgacataagggtgaagaatctgaagagcaggctgagaggaggtaaaatgaggtaccaagaagaggaggctagacttgcgtccttcaggaactggccattttatgtccaagggatatccccttgtgtgctctcagaggctggctttgtctttacaggtaaacaggacacggtacagtgtttttcctgtggtggatgtttaggaaattgggaagaaggagatgatccttggaaggaacatgccaaatggttccccaaatgtgaatttcttcggagtaagaaatcctcagaggaaattacccagtatattcaaagctacaagggatttgttgacataacgggagaacattttgtgaattcctgggtccagagagaattacctatggcatcagcttattgcaatgacagcatctttgcttacgaagaactacggctggactcttttaaggactggccccgggaatcagctgtgggagttgcagcactggccaaagcaggtcttttctacacaggtataaaggacatcgtccagtgcttttcctgtggagggtgtttagagaaatggcaggaaggtgatgacccattagacgatcacaccagatgttttcccaattgtccatttctccaaaatatgaagtcctctgcggaagtgactccagaccttcagagccgtggtgaactttgtgaattactggaaaccacaagtgaaagcaatcttgaagattcaatagcagttggtcctatagtgccagaaatggcacagggtgaagcccagtggtttcaagaggcaaagaatctgaatgagcagctgagagcagcttataccagcgccagtttccgccacatgtctttgcttgatatctcttccgatctggccacggaccacttgctgggctgtgatctgtctattgcttcaaaacacatcagcaaacctgtgcaagaacctctggtgctgcctgaggtctttggcaacttgaactctgtcatgtgtgtggagggtgaagctggaagtggaaagacggtcctcctgaagaaaatagcttttctgtgggcatctggatgctgtcccctgttaaacaggttccagctggttttctacctctcccttagttccaccagaccagacgaggggctggccagtatcatctgtgaccagctcctagagaaagaaggatctgttactgaaatgtgcatgaggaacattatccagcagttaaagaatcaggtcttattccttttagatgactacaaagaaatatgttcaatccctcaagtcataggaaaactgattcaaaaaaaccacttatcccggacctgcctattgattgctgtccgtacaaacagggccagggacatccgccgatacctagagaccattctagagatcaaagcatttcccttttataatactgtctgtatattacggaagctcttttcacataatatgactcgtctgcgaaagtttatggtttactttggaaagaaccaaagtttgcagaagatacagaaaactcctctctttgtggcggcgatctgtgctcattggtttcagtatccttttgacccatcctttgatgatgtggctgttttcaagtcctatatggaacgcctttccttaaggaacaaagcgacagctgaaattctcaaagcaactgtgtcctcctgtggtgagctggccttgaaagggtttttttcatgttgctttgagtttaatgatgatgatctcgcagaagcaggggttgatgaagatgaagatctaaccatgtgcttgatgagcaaatttacagcccagagactaagaccattctaccggtttttaagtcctgccttccaagaatttcttgcggggatgaggctgattgaactcctggattcagataggcaggaacatcaagatttgggactgtatcatttgaaacaaatcaactcacccatgatgactgtaagcgcctacaacaattttttgaactatgtctccagcctcccttcaacaaaagcagggcccaaaattgtgtctcatttgctccatttagtggataacaaagagtcattggagaatatatctgaaaatgatgactacttaaagcaccagccagaaatttcactgcagatgcagttacttaggggattgtggcaaatttgtccacaagcttacttttcaatggtttcagaacatttactggttcttgccctgaaaactgcttatcaaagcaacactgttgctgcgtgttctccatttgttttgcaattccttcaagggagaacactgactttgggtgcgcttaacttacagtactttttcgaccacccagaaagcttgtcattgttgaggagcatccacttcccaatacgaggaaataagacatcacccagagcacatttttcagttctggaaacatgttttgacaaatcacaggtgccaactatagatcaggactatgcttctgcctttgaacctatgaatgaatgggagcgaaatttagctgaaaaagaggataatgtaaagagctatatggatatgcagcgcagggcatcaccagaccttagtactggctattggaaactttctccaaagcagtacaagattccctgtctagaagtcgatgtgaatgatattgatgttgtaggccaggatatgcttgagattctaatgacagttttctcagcttcacagcgcatcgaactccatttaaaccacagcagaggctttatagaaagcatccgcccagctcttgagctgtctaaggcctctgtcaccaagtgctccataagcaagttggaactcagcgcagccgaacaggaactgcttctcaccctgccttccctggaatctcttgaagtctcagggacaatccagtcacaagaccaaatctttcctaatctggataagttcctgtgcctgaaagaactgtctgtggatctggagggcaatataaatgttttttcagtcattcctgaagaatttccaaacttccaccatatggagaaattattgatccaaatttcagctgagtatgatccttccaaactagtaaaattaattcaaaattctccaaaccttcatgttttccatctgaagtgtaacttcttttcggattttgggtctctcatgactatgcttgtttcctgtaagaaactcacagaaattaagttttcggattcattttttcaagccgtcccatttgttgccagtttgccaaattttatttctctgaagatattaaatcttgaaggccagcaatttcctgatgaggaaacatcagaaaaatttgcctacattttaggttctcttagtaacctggaagaattgatccttcctactggggatggaatttatcgagtggccaaactgatcatccagcagtgtcagcagcttcattgtctccgagtcctctcatttttcaagactttgaatgatgacagcgtggtggaaattgccaaagtagcaatcagtggaggtttccagaaacttgagaacctaaagctttcaatcaatcacaagattacagaggaaggatacagaaatttctttcaagcactggacaacatgccaaacttgcaggagttggacatctccaggcatttcacagagtgtatcaaagctcaggccacaacagtcaagtctttgagtcaatgtgtgttacgactaccaaggctcattagactgaacatgttaagttggctcttggatgcagatgatattgcattgcttaatgtcatgaaagaaagacatcctcaatctaagtacttaactattctccagaaatggatactgccgttctctccaatcattcagaaataaaagattcagctaaaaactgctgaatcaataatttgtcttggggcatattgaggatgtaaaaaaagttgttgattaatgctaaaaaccaaattatccaaaattattttattaaatattgcatacaaaagaaaatgtgtaaggcttgctaaaaaacaaaacaaaacaaaacacagtcctgcatactcaccaccaagctcaagaaataaatcatcaccaatacctttgaggtccctgagtaatccaccccagctaaaggcaaacccttcaatcaagtttatacagcaaaccctccattgtccatggtcaacagggaaggggttggggacaggtctgccaatctatctaaaagccacaatatggaagaagtattcaatttatataataaatggctaacttaacggttgaatcactttcatacatggatgaaacgggtttaacacaggatccacatgaatcttctgtgggccaagagatgttccttaatccttgtagaacctgttttctatattgaactagctttggtacagtagagttaacttactttccatttatccactgccaatataaagaggaaacaggggttagggaaaaatgacttcattccagaggcttctcagagttcaacatatgctataatttagaattttcttatgaatccactctacttgggtagaaaatattttatctctagtgattgcatattatttccatatcatagtatttcatagtattatatttgatatgagtgtctatatcaatgtcagtgtccagaatttcgttcctaccagttaagtagttttctgaacggccagaagaccattcgaaattcatgatactactataagttggtaaacaaccatacttttatcctcatttttattctcactaagaaaaaagtcaactcccctccccttgcccaagtatgaaatatagggacagtatgtatggtgtggtctcatttgtttagaaaaccacttatgactgggtgcggtggctcacacctgtaatcccagcactttgggaggctgaggcgggcgaatcatttgaggtgaggaattcgagaccagcctggccagcatggtgaaaccccatctctactaaaaatacaaaaattagccaggtgtggtggcacatgcctgtagtcccagccactagggcggctgagacgcaagacttgcttgaacccgggaggcagaggttgcagtgagccaagatggcgccactgcattccagcctgggcaacagagcaagaccctgtctgtctcaaaacaaaaaacaaaaccacttatattgctagctacattaagaatttctgaatatgttactgagcttgcttgtggtaaccatttataatatcagaaagtatatgtacaccaaaacatgttgaacatccatgttgtacaactgaaatataaataattttgtcaattatacctaaataaaactggaaaaaaatttctggaagtttatatctaaaaatgttaatagtgcgtacctctaggaagtgggcctggaagccattcttacttttcagtctctcccattctgtactgttttttgttttactttcgtgcctgcattatttttctatttaaaacaaaaataaatctagtttagcact

SEQ ID NO: 29519 - DNA, 3699 bp, Homo Sapiens
gctgccgccgcggcggccgctgctgctgctgcttctgccgccgctgccgccgccgctgcctggatatagtgcggcaagagcggagcttgcagtcactttgcgaggaggagcgcgcgggctgcgggcggctggggcaccgcgggagcggcggcggcggctctagcagaggcggccggggcagcgaaaggttctctctccagggctggacttaataactttgaaactgtccaccggtgtcacgtcctgaacatgagcctcctcctctccttctacctgctggggttgcttgtcagtagcgggcaagctcttcttcaagtgacaatttcacttagcaaagtagagcttagtgttggagaatctaaattcttcacatgtacagcgattggtgaacctgaaagtatagattggtataatcctcaaggagagaagataatttcaacacagagggtagtagtgcaaaaggaaggtgttaggtcacggttaaccatctacaatgcaaatatagaagatgcagggatatatcgttgtcaagcaacagatgccaaaggacaaacacaagaagctacagtagttttggaaatttaccaaaaactcactttcagagaagtggtatctccacaagaattcaaacaaggagaagatgcagaagtggtttgccgagttagcagttcacctgcacctgctgtcagctggttgtatcataatgaggaagtcaccactatttccgacaatcggttcgctatgttagcaaacaataacctgcagattctcaacatcaataaaagtgatgaaggtatatacagatgtgaaggaagagtggaggccaggggagaaattgacttccgtgatatcattgttattgttaatgtgccgccagcaatctcaatgcctcagaaatcttttaatgccacagcagagagaggagaagaaatgacattttcctgcagggcctcaggctctccagaacccgccatctcctggttcaggaatggcaagctcattgaagaaaatgagaagtacatattgaaagggagcaatacagaactcactgtcaggaacataatcaatagtgatggtggtccttatgtctgcagggccacaaataaggcaggagaagatgaaaagcaagctttcctccaagtctttgtacagcctcacataatacagcttaaaaatgaaactacatatgagaatggtcaagtcacactcgtatgtgatgcggaaggggagcctattccagaaatcacttggaaaagagctgtggatggcttcacgttcactgaaggcgataagagcctggacggccgtatcgaagtcaaagggcagcatggaagctcatcactgcatattaaagatgtgaagttgtcagattcagggagatatgactgtgaagctgcaagcagaattggagggcatcaaaagagcatgtaccttgatattgaatatgcccccaagtttatatcaaaccaaacaatttattactcttgggaaggaaatcctatcaatataagttgtgatgtgaaatcgaatccaccagcatcaattcactggagaagagataaattagtcttacctgctaaaaacacgaccaatttaaagacttatagtacaggaagaaagatgatattagagattgcacctacatctgacaatgactttggacgctataattgcacagccactaatcatataggaacaagatttcaagaatatattcttgctttggctgacgtgccatccagtccctatggagtgaagatcatagagctgtcgcagaccacggccaaggtttccttcaacaaaccggactcccatggaggtgtacctattcatcactatcaggtggatgtcaaagaagtagcgtcagaaatctggaaaattgtacgctcccatggagttcaaacaatggttgttttgaacaacctggaaccaaatacaacttatgaaatcagggttgcagctgtaaatggaaagggacaaggagactacagtaaaatagaaatcttccaaacattaccagttcgtgaaccaagtcctccatccatacatggacagccaagcagtggaaagagctttaaactcagcatcaccaaacaggacgatggaggggcccctattttggaatacattgtgaaatatagaagtaaagataaggaagaccaatggctagagaaaaaagtgcaaggaaataaagaccacatcattttggagcatctccagtggaccatggggtatgaagttcagattacagctgccaatagattgggatattctgaaccgacagtttatgaattcagcatgccaccaaagcccaacattattaaagacacgctgtttaatggtcttgggcttggagcagtaattggcctgggagttgctgcactgctgctaattcttgtggtaacagacgtcagctgcttctttattcggcaatgtgggttgctgatgtgcatcactaggagaatgtgtggaaagaaaagtggctccagtggcaaaagtaaagaactcgaagaaggaaaagctgcatacctgaaagatggatcaaaagaaccaatagtggagatgagaacagaggatgaaagagttactaatcacgaagatgggagcccagtaaatgagccaaatgaaaccacaccactgacagaacctgaaaaattgcctttaaaggaagaagatgggaaagaagctctaaatccagaaactatagaaattaaagtttctaacgacatcattcaatcaaaagaagacgacagcaaagcataacaacaatattacaggggcttgaacaacactacgaagagtatttggattgcgtgaccctatgaccaaaactattccattgaccttaatttcttgggaaacttctagcttggaatagcttgtacacatatacatatgatcaaatactcctgcccatgatccattcccttttgttattgttgttgttgttgctgttgttgttaattttgttaagaatttcaatatcaagactgactggcaccaacactttggtattcaatttgattctatgactgaagtactggaatttattatgtggctaaagtgctctatttattaagaactatatttaataccaccaacaaatataggggttaaggaaaaaaaacgtgagctacatgtgtaagaaggccctgcatgtgtatgagtcctattctgggcaaatagattcttaaagtggctttcaacttcaagatgaaggagcttaataatggttactcattttatcaggggaatttcagggaacgtaggcgtcaaagagccagttatctttagcagatattaaaaattgaaaactttggagaactcatttcaagttatgattcagtgcattttcaacattgatttttgatagactgaagtgccagatcaaaattgttacccatttgaaagaatattagttgtatataaaattagattagaaagactttctaaatctctatctctttatatatgtcctattcattcacaatggattatacaaaaaaaagtgtattgcaagtgaaataatattgatttctgccctcagcttcaaataaagtaaattgaaatgggaacaatatcaatatggtgtcttgatatatttataaatatgtgattatcatttatttttaaaataatttatcaaaaaacaagtctttagtgttcaaatacttcaaatcatatcctcagatatatttt

SEQ ID NO: 29520 - DNA, 6836 bp, Homo Sapiens
agacgtgaggcttgcagcaggccgaggaggaagaagaggggcagtgggagcagaggaggtggctcctgccccagtgagagctctgagggtccctgcctgaagagggacagggactggggcttggagaaggggctgtggaatgcagcccccttcactgctgctgctgctgctgctgctgctgctatgtgtctcagtggtcagacccagagggctgctgtgtgggagtttcccagaaccctgtgccaatggaggcacctgcctgagcctgtctctgggacaagggacctgccagtgtgcccctggcttcctgggtgagacgtgccagtttcctgacccctgccagaacgcccagctctgccaaaatggaggcagctgccaagccctgcttcccgctcccctagggctccccagctctccctctccattgacacccagcttcttgtgcacttgcctccctggcttcactggtgagagatgccaggccaagcttgaagacccttgtcctccctccttctgttccaaaaggggccgctgccacatccaggcctcgggccgcccacagtgctcctgcatgcctggatggacaggtgagcagtgccagcttcgggacttctgttcagccaacccatgtgttaatggaggggtgtgtctggccacgtacccccagatccagtgccactgcccaccgggcttcgagggccatgcctgtgaacgtgatgtcaacgagtgcttccaggacccaggaccctgccccaaaggcacctcctgccataacaccctgggctccttccagtgcctctgccctgtggggcaggagggtccacgttgtgagctgcgggcaggaccctgccctcctaggggctgttcgaatgggggcacctgccagctgatgccagagaaagactccacctttcacctctgcctctgtcccccaggtttcataggcccgggctgtgaggtgaatccagacaactgtgtcagccaccaatgtcagaatgggggcacttgccaggatgggctggacacctacacctgcctctgcccagaaacctggacaggctgggactgctccgaagatgtggatgagtgtgaggcccagggtccccctcactgcagaaacgggggcacctgccagaactctgctggtagctttcactgcgtgtgtgtgagtggctgggggggcacaagctgtgaggagaacctggatgactgtattgctgccacctgtgccccgggatccacctgcattgaccgggtgggctctttctcctgcctctgcccacctggacgcacaggactcctgtgccacttggaagacatgtgtctgagccagccgtgccatggggatgcccaatgcagcaccaaccccctcacaggctccacactctgcctgtgtcagcctggctattcggggcccacctgccaccaggacctggacgagtgtctgatggcccagcaaggcccaagtccctgtgaacatggcggttcctgcctcaacactcctggctccttcaactgcctctgtccacctggctacacaggctcccgttgtgaggctgatcacaatgagtgcctctcccagccctgccacccaggaagcacctgtctggacctacttgccaccttccactgcctctgcccgccaggcttagaagggcagctctgtgaggtggagaccaacgagtgtgcctcagctccctgcctgaaccacgcggattgccatgacctgctcaacggcttccagtgcatctgcctgcctggattctccggcacccgatgtgaggaggatatcgatgagtgcagaagctctccctgtgccaatggtgggcagtgccaggaccagcctggagccttccactgcaagtgtctcccaggctttgaagggccacgctgtcaaacagaggtggatgagtgcctgagtgacccatgtcccgttggagccagctgccttgatcttccaggagccttcttttgcctctgcccctctggtttcacaggccagctctgtgaggttcccctgtgtgctcccaacctgtgccagcccaagcagatatgtaaggaccagaaagacaaggccaactgcctctgtcctgatggaagccctggctgtgccccacctgaggacaactgcacctgccaccacgggcactgccagagatcctcatgtgtgtgtgacgtgggttggacggggccagagtgtgaggcagagctagggggctgcatctctgcaccctgtgcccatggggggacctgctacccccagccctctggctacaactgcacctgccctacaggctacacaggacccacctgtagtgaggagatgacagcttgtcactcagggccatgtctcaatggcggctcctgcaaccctagccctggaggctactactgcacctgccctccaagccacacagggccccagtgccaaaccagcactgactactgtgtgtctgccccgtgcttcaatgggggtacctgtgtgaacaggcctggcaccttctcctgcctctgtgccatgggcttccagggcccgcgctgtgagggaaagctccgccccagctgtgcagacagcccctgtaggaatagggcaacctgccaggacagccctcagggtccccgctgcctctgccccactggctacaccggaggcagctgccagactctgatggacttatgtgcccagaagccctgcccacgcaattcccactgcctccagactgggccctccttccactgcttgtgcctccagggatggaccgggcctctctgcaaccttccactgtcctcctgccagaaggctgcactgagccaaggcatagacgtctcttccctttgccacaatggaggcctctgtgtcgacagcggcccctcctatttctgccactgcccccctggattccaaggcagcctgtgccaggatcacgtgaacccatgtgagtccaggccttgccagaacggggccacctgcatggcccagcccagtgggtatctctgccagtgtgccccaggctacgatggacagaactgctcaaaggaactcgatgcttgtcagtcccaaccctgtcacaaccatggaacctgtactcccaaacctggaggcttccactgtgcctgccctccaggctttgtggggctacgctgtgagggagacgtggacgagtgtctggaccagccctgccaccccacaggcactgcagcctgccactctctggccaatgccttctactgccagtgtctgcctggacacacaggccagtggtgtgaggtggagatagacccctgccacagccaaccctgctttcatggagggacctgtgaggccacagcaggatcacccctgggtttcatctgccactgccccaagggttttgaaggccccacctgcagccacagggccccttcctgcggcttccatcactgccaccacggaggcctgtgtctgccctcccctaagccaggcttcccaccacgctgtgcctgcctcagtggctatgggggtcctgactgcctgaccccaccagctcctaaaggctgtggccctccctccccatgcctatacaatggcagctgctcagagaccacgggcttggggggcccaggctttcgatgctcctgccctcacagctctccagggccccggtgtcagaaacccggagccaaggggtgtgagggcagaagtggagatggggcctgcgatgctggctgcagtggcccgggaggaaactgggatggaggggactgctctctgggagtcccagacccctggaagggctgcccctcccactctcggtgctggcttctcttccgggacgggcagtgccacccacagtgtgactctgaagagtgtctgtttgatggctacgactgtgagacccctccagcctgcactccagcctatgaccagtactgccatgatcacttccacaacgggcactgtgagaaaggctgcaacactgcagagtgtggctgggatggaggtgactgcaggcctgaagatggggacccagagtgggggccctccctggccctgctggtggtactgagccccccagccctagaccagcagctgtttgccctggcccgggtgctgtccctgactctgagggtaggactctgggtaaggaaggatcgtgatggcagggacatggtgtacccctatcctggggcccgggctgaagaaaagctaggaggaactcgggaccccacctatcaggagagagcagcccctcaaacacagcccctgggcaaggagaccgactccctcagtgctgggtttgtggtggtcatgggtgtggatttgtcccgctgtggccctgaccacccggcatcccgctgtccctgggaccctgggcttctactccgcttccttgctgcgatggctgcagtgggagccctggagcccctgctgcctggaccactgctggctgtccaccctcatgcagggaccgcaccccctgccaaccagcttccctggcctgtgctgtgctccccagtggccggggtgattctcctggccctaggggctcttctcgtcctccagctcatccggcgtcgacgccgagagcatggagctctctggctgccccctggtttcactcgacggcctcggactcagtcagctccccaccgacgccggcccccactaggcgaggacagcattggtctcaaggcactgaagccaaaggcagaagttgatgaggatggagttgtgatgtgctcaggccctgaggagggagaggaggtgggccaggctgaagaaacaggcccaccctccacgtgccagctctggtctctgagtggtggctgtggggcgctccctcaggcagccatgctaactcctccccaggaatctgagatggaagcccctgacctggacacccgtggacctgatggggtgacacccctgatgtcagcagtttgctgtggggaagtacagtccgggaccttccaaggggcatggttgggatgtcctgagccctgggaacctctgctggatggaggggcctgtccccaggctcacaccgtgggcactggggagacccccctgcacctggctgcccgattctcccggccaaccgctgcccgccgcctccttgaggctggagccaaccccaaccagccagaccgggcagggcgcacaccccttcatgctgctgtggctgctgatgctcgggaggtctgccagcttctgctccgtagcagacaaactgcagtggacgctcgcacagaggacgggaccacacccttgatgctggctgccaggctggcggtggaagacctggttgaagaactgattgcagcccaagcagacgtgggggccagagataaatgggggaaaactgcgctgcactgggctgctgccgtgaacaacgcccgagccgcccgctcgcttctccaggccggagccgataaagatgcccaggacaacagggagcagacgccgctattcctggcggcgcgggaaggagcggtggaagtagcccagctactgctggggctgggggcagcccgagagctgcgggaccaggctgggctagcgccggcggacgtcgctcaccaacgtaaccactgggatctgctgacgctgctggaaggggctgggccaccagaggcccgtcacaaagccacgccgggccgcgaggctgggcccttcccgcgcgcacggacggtgtcagtaagcgtgcccccgcatgggggcggggctctgccgcgctgccggacgctgtcagccggagcaggccctcgtgggggcggagcttgtctgcaggctcggacttggtccgtagacttggctgcgcgggggggcggggcctattctcattgccggagcctctcgggagtaggagcaggaggaggcccgacccctcgcggccgtaggttttctgcaggcatgcgcgggcctcggcccaaccctgcgataatgcgaggaagatacggagtggctgccgggcgcggaggcagggtctcaacggatgactggccctgtgattgggtggccctgggagcttgcggttctgcctccaacattccgatcccgcctccttgccttactccgtccccggagcggggatcacctcaacttgactgtggtcccccagccctccaagaaatgcccataaaccaaggaggagagggtaaaaaatagaagaatacatggtagggaggaattccaaaaatgattacccattaaaaggcaggctggaaggccttcctggttttaagatggatcccccaaaatgaagggttgtgagtttagtttctctcctaaaatgaatgtatgcccaccagagcagacatcttccacgtggagaagctgcagctctggaaagagggtttaagatgctaggatgaggcaggcccagtcctcctccagaaaataagacaggccacaggagggcagagtggagtggaaatacccctaagttggaaccaagaattgcaggcatatgggatgtaagatgttctttcctatatatggtttccaaagggtgcccctatgatccattgtccccactgcccacaaatggctgacaaatatttattgggcacctactatgtgccaggcactgtgtaggtgctgaaaagtggccaagggccacccccgctgatgactccttgcattccctcccctcacaacaaagaactccactgtggggatgaagcgcttcttctagccactgctatcgctatttaagaaccctaaatctgtcacccataataaagctgatttgaagtgttaaaaaaaaaaaaaaaaaaaaaaaaaaaaaaaaaaaaaaaaaaaaaaaaaaaaaaaaaaaaaaaaaaaaaaaaaaaaaaaaaaaaaaaaaaaaaaa

SEQ ID NO: 29521 - DNA, 1159 bp, Homo Sapiens
ccacactcagtctggcctcggggcctttgcactggctgtgtcccctgcctgtgatgccattctcctctgcctggccaactcctacgtttattcaagtctggaccttgtcatcggctcctcaggaaggcactccgggacccccagatgggggcggttccctgtgactcctggcacggaggccaaccccttccttgttcaatggttccttgagggaccattcccatgtgattatcgaccattcggcaggcgttcaaagtcaaaggccccacactgagtcctggcccagcgccctgtgcccgttggctgctggagggacagacggggcgtgcggctgaccatcccgtgcccgcaggctgaggatgcagcgctggaaggcggcggccttggcctcagtgctctgcagctccgtgctgtccatctggatgtgtcgagagggcctgcttctcagccaccgcctcggacctgcgctggtccccctgcaccgcctgcctcgaaccctggacgcccggattgcccgcctggcccagtaccgtgcactcctgcagggggccccggatgcgatggagctgcgcgagctgacgccctgggctgggcggcccccaggtccgcgccgtcgggcggggccccggcggcggcgcgcgcgtgcgcggttgggggcgcggccttgcgggctgcgcgagctggaggtgcgcgtgagcgagctgggcctgggctacgcgtccgacgagacggtgctgttccgctactgcgcaggcgcctgcgaggctgccgcgcgcgtctacgacctcgggctgcgacgactgcgccagcggcggcgcctgcggcgggagcgggtgcgcgcgcagccctgctgccgcccgacggcctacgaggacgaggtgtccttcctggacgcgcacagccgctaccacacggtgcacgagctgtcggcgcgcgagtgcgcctgcgtgtgaccctacctcactcggccggcgcggcggccactccccccgcctcgacggcaccactggccggccccgcgaaagactgcgcgtgcgtagagcacgccggcgcggccccgggactctcgcgataactgtactgagataaagtgtggcaactcgaaaaaaaaaaaaaaaaaaaaaaaaaaaaaaaaaaaaaagaaaaaaaaaaaaaaaaa

SEQ ID NO: 29522 - DNA, 2824 bp, Homo Sapiens
gttttgaaagttgatggagcgaactgcttttccaaagactcttttgaaaaactttttaagtaggccattctgactttaacatttctctttgtcttaacattagacaaaaagtaaccttcctgaagaggacatgtgattggaagttgtcaattgttgaagcattggtaactccagtctctaacgttttagaaaatcataacaagcggttctctaccctgtaaaggtgaactactgagttcttcattatgtctgatggagattatgattacctcatcaagtttttagctttgggagactctggtgtagggaagaccagtgtactttaccaatatacagatggtaaatttaactccaaatttatcacaacagtgggcattgatttcagggaaaaaagagtggtgtacagagccagtgggccggatggagccactggcagaggccagagaatccacctgcagttatgggacacagcagggcaggagaggtttcgtagcttaacgacagcgttcttcagagatgctatgggttttcttctactttttgatctgacaaatgagcaaagtttcctcaatgtcagaaactggataagccagctacagatgcatgcatattgtgaaaacccagatatagtgctgtgtggaaacaagagtgatctggaggaccagagagtagtgaaagaggaggaagccatagcactcgcagagaaatatggaatcccctactttgaaactagtgctgccaatgggacaaacataagccaagcaattgagatgcttctggacctgataatgaagcgaatggaacggtgtgtggacaagtcctggattcctgaaggagtggtgcgatcaaatggtcatgcctctacggatcagttaagtgaagaaaaggagaaaggggcatgtggctgttgagaagtcaagtaagcgacatagtagttcaggtggcccatgcctgggatcttctctatgattgatacatggcacagtgagagattaatgggcattgtgtacaaattgcttctcaccatccccattagacctacgaataaagcatccggttctaaaattaatttgttgcagctttgtaaatatttctttaagattcagcctgagagttaggagaaatatttcagagccaaaagtgccttatacaaccttagcctattatagtaaatcattcaaggattcagaattttgcagtcacagaagagtgtatttattatgtagaatgaatgagggtactgtcacctgccttaatgtaggtaggcccagagtcttacatttaagatcttacatgcagttataaaaccgccacagtcttcaatccagatttgaagactcatgccataggtgacattctaaaataccattaaagccacttaaatgttaaataagaatatacatgcacatcagctcaatgtctttgagtattaattttatgtaagcattctatttaacatgaatataggacaaatcatggctatatctatagaccttggataaactggattgaccaattatacactcacggtgacttttttattggtgggaaggggattggggtggggcaggctggcttaatgtaatatgagcaaccaaagtgggacttctgtctccccgctatattcccattgctctgaatggttgattgaagggtcagggaactagattttatggctttagttcactgtgattgtacatttatacttggcctatgtgctggccgcacctgaacatagctggtgcttatgccgagttatttgcgatgagtaaatatttagtttctttttcttcatatttataatgttgatctggcatcctcaggctgcagctttattagcttataacttactcatctctatctttaccagcaggctctgtattgttgatatttgcaacttgttttgcttttccattggtggaattgaaataattagtttttaattacataagatgcctgtttgctatttggtggaagatagatgttcatattgaagcagtcacatttgtactgtagttcaataaaagaaaaatgaagtattctgtagcctatatttttcatagagctcatgagcatttactgtacttgctgggtcttgccaagatcatttattccgctgcattgccaaagtgtcttcataccaaattaaaggtggttttaatatatgtttcatggaagttgtttataaaattcaaaggtatttcatttaggtgaaaagtcttatttattaaagtggtttgaataaagtagatcaaaacttccagagatcttaatggctatataggaagaaatatcactcaccataatttaaataaagaataaaaatacttgtattttgtggtggcaaatgtttggtagaactgtaattagaaaaatacaagtatatttgcgtgatggttacactagaagcccagactttacgactacacaatatattcatgtatctaaactgtacttgtaccccctaaatttatttttaaaaaaggaaaaataaaagtatcatgaaaaaacctatttttttttccactgtccttccactactcccataacaaacttatccatggttggtaaaattttacatatttctatccttgaaatgaaggcttcttttaaattccaaagaagtcatggaggcctgtgcatttgaattgtatatgctagtgaggaaaagatttagacatttcaagagcagggttggccaggcgcggtggctcacacctgtaatcccagcactttgggaggccgaggagggcggatcacgaggtcaggagatcgagaccatcctggctaacacagtgaaaccccatctctactaaaaaaaaaa

SEQ ID NO: 29523 - DNA, 3106 bp, Homo Sapiens; identical to SEQ ID NO: 22691

SEQ ID NO: 29524 - DNA, 2515 bp, Homo Sapiens
agcagagaaggcggaagcagtggcgtccgcagctggggcttggcctgcgggcggccagcgaaggtggcgaaggctcccactggatccagagtttgccgtccaagcagcctcgtctcggcgcgcagtgtctgtgtccgtcctctaccagcgccttggctgagcggagtcgtgcggttggtgggggagccctgccctcctggttcggcctccccgcgcactagaacgagcaagtgataatcaagttactatgagtctgctaaactgtgaaaacagctgtggatccagccagtctgaaagtgactgctgtgtggccatggccagctcctgtagcgctgtaacaaaagatgatagtgtgggtggaactgccagcacggggaacctctccagctcatttatggaggagatccagggatatgatgtagagtttgacccacccctggaaagcaagtatgaatgccccatctgcttgatggcattacgagaagcagtgcaaacgccatgcggccataggttctgcaaagcctgcatcataaaatcaataagggatgcaggtcacaaatgtccagttgacaatgaaatactgctggaaaatcaactatttccagacaattttgcaaaacgtgagattctttctctgatggtgaaatgtccaaatgaaggttgtttgcacaagatggaactgagacatcttgaggatcatcaagcacattgtgagtttgctcttatggattgtccccaatgccagcgtcccttccaaaaattccatattaatattcacattctgaaggattgtccaaggagacaggtttcttgtgacaactgtgctgcatcaatggcatttgaagataaagagatccatgaccagaactgtcctttggcaaatgtcatctgtgaatactgcaatactatactcatcagagaacagatgcctaatcattatgatctagactgccctacagccccaattccatgcacattcagtacttttggttgccatgaaaagatgcagaggaatcacttggcacgccacctacaagagaacacccagtcacacatgagaatgttggcccaggctgttcatagtttgagcgttatacccgactctgggtatatctcagaggtccggaatttccaggaaactattcaccagttagagggtcgccttgtaagacaagaccatcaaatccgggagctgactgctaaaatggaaactcagagtatgtatgtaagtgagctcaaacgaaccattcgaacccttgaggacaaagttgctgaaatcgaagcacagcagtgcaatggaatttatatttggaagattggcaactttggaatgcatttgaaatgtcaagaagaggagaaacctgttgtgattcatagccctggattctacactggcaaacccgggtacaaactgtgcatgcgcttgcaccttcagttaccgactgctcagcgctgtgcaaactatatatccctttttgtccacacaatgcaaggagaatatgacagccacctcccttggcccttccagggtacaatacgccttacaattcttgatcagtctgaagcacctgtaaggcaaaaccacgaagagataatggatgccaaaccagagctgcttgctttccagcgacccacaatcccacggaacccaaaaggttttggctatgtaacttttatgcatctggaagccctaagacaaagaactttcattaaggatgacacattattagtgcgctgtgaggtctccacccgctttgacatgggtagccttcggagggagggttttcagccacgaagtactgatgcaggggtatagcttgccctcacttgctcaaaaacaactacctggagaaaacagtgcctttccttgccctgttctcaataacatgcaaacaaacaagccacgggaaatatgtaatatctactagtgagtgttgttagagaggtcacttactatttcttcctgttacaaatgatctgaggcagttttttcctgggaatccacacgttccatgctttttcagaaatgttaggcctgaagtgcctgtggcatgttgcagcagctattttgccagttagtatacctctttgttgtactttcttgggcttttgctctggtgtattttattgtcagaaagtccagactcaagagtactaaacttttaataataatggattttccttaaaacttcagtctttttgtagtattatatgtaatatattaaaagtgaaaatcactaccgccttgtgctagtgccctcgagaagagttattgctctagaaagttgagttctcatttttttaacctgttatagatttcagaggatttgaaccataatccttggaaaacttaagttctcattcaccccagtttttcctccaggttgttactaaggatattcagggatgagtttaaaccctaaatataaccttaattatttagtgtaaacatgtctgttgaataatacttgtttaagtgttaaaaaaaaaaaaaaaaagaaaaaaaaaaaaaaaa

SEQ ID NO: 29525 - DNA, 3408 bp, Homo Sapiens
cctttggacgcgcgcctcggttccgaacgcagcggacggcgcctcaggcagcgcggcggacagcccgtcctccggcgcgccgcgagcctcggaggaccctagcgacggtcgtggcgtaagaccggggggacgcggcggtagcggcggccgttgcgattgattgcgctggttgcctgcggcgtccacttccttggccgcccttgctacactggctgattgttgtgcagccggcgccatgtctgtgagcgagatcttcgtggagctgcagggctttttggctgccgagcaggacatccgagaggaaatcagaaaagttgtacagagtttagaacaaacagctcgagagattttaactctactgcaaggggtccatcagggtgctgggtttcaggacattccaaagaggtgtttgaaagctcgagaacattttggtacagtaaaaacacatctaacatctttgaagaccaaatttcctgctgaacagtattacagatttcatgagcactggaggtttgtgttgcagcgcttggtcttcttggcagcatttgttgtgtatttggaaacagaaacactagtgactcgagaagcagttacagaaattcttggcattgagccagatcgggagaaaggatttcatctggatgtagaagattatctctcaggagttctaattcttgccagtgaactgtcgaggctgtctgtcaacagcgtgactgctggagactactcccgacccctccacatctccaccttcatcaatgagctggattccggttttcgccttctcaacctgaaaaatgactccctgaggaagcgctacgacggattgaaatatgacgtgaagaaagtagaggaagtggtctatgatctctccatccggggctttaataaggagacggcagcagcttgtgttgaaaaataggaggctctccttgctcctggccttgctgacctcagcggttgccaggaaggggtgagcacagagtgcctcttacggtagttaggatgctcagttgctaaacactgcgctttattttcttaaccagttgtggtgtgagtatcagaattgaaacacttttttgggggtaaaaaatatagcctttacatggacagaattttttttgttgtttcagtgaatatgcctgtaattcagtgtatttcagttccgtcagaaagtgtaaatgttagtttcttggtaaagtccttttcttgcttaccttgactgttgatgtactgattgagaagttcattgtctcgtttgtgattcttccagatgtgatgcttgatattttctatatgcgagttagccatccacacccaggcatagcctggatacagtataaaaatagataattaaaaagatggttgccaagcaaggaaaacttattttatattttcccttccttattttaagcattgtgagtaaatcagatgttgaattcttttgccaagggaattatagctgcaggttctctctcactgccatcaaactgtaaaagattaaactgcgaagtcaagctcaacagattattttggaaagtttttgtattaagggatttagtaacatcattttgttttccaccaggcagggagtagggcttagtgttttaaaacacctctgctttctgatgttgccttaatattctgctattgcagcaattaaaaattgtcttcatgtacatttggaactaacacgtgatgtgatatattcctaaactatgaaacctttttcctagtagtcagctagatcatttgttctgggagtataaagccacccacgtaagttaataagcaaaatcctgactattatgttgttagagaaaaatgctttgctttgtctggaagaaagataaaatagtgaattataaataagtcaggccgggcgtggtggctcacacctgtaatcccagcacactgggaggccgaggcagggggactgcttgagctcaggagttcgagaccagcctgggcaacaaagtgagactccatctctatataaaaacaaaaaccacgaaagcacacacaaaataaatcagtgggatttggtaatgtgttttagagtaagaaatttcaggttgttggtgactatcccaacagtcatgttttaaatgtacagtttggggcaagtcatgtaaatactgttggtggtcttccccacacgccccaattttcaggtagtactaagagtatgtgccaggaaactcttgctattgaattgagatgattaaaatggtgacttaatccgtagttattttgcacccactgaaaggaaagtgctttccagaataatatgaagtatctaaaagtgtcaccttttcttgcctgatcaacaatttgggcttcctgtttgtacaaggggccatttggcatacctttcacagcttttatcaggccaagttaaaggctgactacattttttcatcatgaggaaagcagttgaaatgaggcatgagttactgtgcattgggattttagaacaattttcttgtgacagctctttttgtgaagttaggttcttaaaagtgcccatgatggtcacttaaaatgtgcagtaatagcactgccaggatcaagcatgaaaggcttttaaattagatcatcccacagacaatacgtttgataatagttttttcttttaacctctttaagtattgattctgcttgagaatattgaagtacttgccagaagttgtggatttcagttttaacaaatgctattaaagtggagaagcacactctggtcttggaattccatttgaggatttagaagtgtcatgtttataactattcagttgtgtttgttgctggcttgttgtaaagcaataaaatttttttggtctttttgtaagtgagtgtgctgctgtaagaaatctcccatgtgcataacaaattctgaatattttttgaggctaaagaagaccggggtgacaagcagatactgctgtgtaatggttacactaaccaaaagacaccagccactcagagttctatactgtaaagcgcagataacatttgtgtgttataccttgattggggaattaaaagtcatttaactgaagatgttgagaaacctgggctctggttttagtataccggaattacttttttccaattttagaaaatcaagcaggttagagaaaatagagatgaattaggggacactgtcttatggattcatttataagaagagaaccagccatatacacttggggagatttgccacatcttaaacttgaataatagtatgagtaatgcttaagggagtttaatagagaaggaaagctttggcagtgttttgagaacttaagtggctaaagagatgagacaaacatgcaggtcgctactggcatagtttcataattgtgtactcggaaattaaagtttgcttgtttcttggtctggattaaa

SEQ ID NO: 29526 - DNA, 2006 bp, Homo Sapiens
ccgggctggaaggcagggcatcagctatggaacaacctgggcaggatcccacctcagacgacgtcatggactcgttcctggaaaagttccagagccagccttaccgtggcggctttcatgaggaccagtgggagaaggaatttgaaaaggtccccctatttatgacgagagcgccatcagaaattgatcccagggagaatcctgacttggcttgtctccagtcaattatttttgatgaggagcgttctccagaagaacaggccaagacctataaagatgagggcaatgattactttaaagaaaaagactacaagaaagctgtaatttcatacactgaaggcttaaagaagaaatgtgcagatcctgatttgaatgctgtcctttataccaaccgggcagcagcacagtactatctgggcaattttcgttctgctctcaatgatgtgacagctgccagaaagctaaaaccctgccacctcaaagcaataataagaggtgccttatgccatctggaactgaaacactttgccgaggccgtgaactggtgtgatgagggactgcaaatagatgccaaagagaagaagcttctggaaatgagggctaaagcagacaagctgaagcgaattgaacagagggatgtgaggaaagccaacttgaaagaaaagaaggagaggaatcagaatgaggctttactccaggccatcaaggctaggaatatcaggctctcagaagctgcctgtgaggatgaagattcagcctcagaaggtctaggtgagcttttcctggatggactcagcactgagaacccccatggagccaggctgagtctagatggccagggcaggctgagctggcctgtgctctttctgtacccagagtatgcccagtcggacttcatctctgcttttcatgaggactccaggtttattgatcatctaatggtgatgtttggtgaaacaccctcttgggacctagagcaaaaatattgccctgataatttggaggtctactttgaggatgaggacagggcagaactataccgggtgcctgccaagagcaccttgctacaggttctacagcaccagaggtactttgtaaaagccctgacaccagcatttttggtctgtgtaggatcctctcctttttgcaagaattttctccgggggagaaaggtgtaccagatacgatgactaagccagggcccctggatctcctcccttaccctcctctgctgggaacctagcacacctgaatcagctggacatactgctggagtccagtgctttctttccgtcaccctggggatagtccttcctggcatcgtggtgggggaggagcctctggcttccctaaactgcagcctctctggctggtcttcactttcctcagttgatataaaactctgggtcttggccatgatgtccttggactccatcgctaaagggaccatctgctgcagttaccacagcaactgacctgagcggcaccctggtctgtggagatggactcaggatccagtgacatgattctgaacttttgtggagtttgacaccttagagaagctacccctcaaactgcacatctacacacaaacaaacaatgcataggattccaaggctttaaagctgagagaccctggcctcaagttatttcatgcgcacagagggaagccatgtggggttgctgaagatgccttgaggtgaaatgggggcaggaaagccacatcttgctctgcatttataaagaccgtacaaactgagatccttggtacccctaaaaagattgccaattttcttcatctttgccatatggaggactgtgacagactttggacagtggcctcttgagttcctctgcagttttgacatttaggattttgtgtcttttaaactggaaaatcttctagcatgttgggttgttacagagtatatttttgtctgcagctgtttgttgccccattcctaagaggagtttatccatcctgaaaaaaaaaaaaaaaaaaaaaa

SEQ ID NO: 29527 - DNA, 2771 bp, Homo Sapiens
ggccacaggccagcgccactctgccaggctcccggccatcgcccgcctggtgcgccgcccgccagctctttgcccgcgcggggccgcccgccgcgggctcagggcagaccatgcgcccgccaagtccgctgcccgcccgctggctatgcgtgctggcaggcgccctcgcctgggcccttgggccggcgggcggccaggcggccaggctgcaggaggagtgtgactatgtgcagatgatcgaggtgcagcacaagcagtgcctggaggaggcccagctggagaatgagacaataggctgcagcaagatgtgggacaacctcacctgctggccagccacccctcggggccaggtagttgtcttggcctgtcccctcatcttcaagctcttctcctccattcaaggccgcaatgtaagccgcagctgcaccgacgaaggctggacgcacctggagcctggcccgtaccccattgcctgtggtttggatgacaaggcagcgagtttggatgagcagcagaccatgttctacggttctgtgaagaccggctacaccattggctacggcctgtccctcgccacccttctggtcgccacagctatcctgagcctgttcaggaagctccactgcacgcggaactacatccacatgcacctcttcatatccttcatcctgagggctgccgctgtcttcatcaaagacttggccctcttcgacagcggggagtcggaccagtgctccgagggctcggtgggctgtaaggcagccatggtctttttccaatattgtgtcatggctaacttcttctggctgctggtggagggcctctacctgtacaccctgcttgccgtctccttcttctctgagcggaagtacttctgggggtacatactcatcggctggggggtacccagcacattcaccatggtgtggaccatcgccaggatccattttgaggattatgggtgctgggacaccatcaactcctcactgtggtggatcataaagggccccatcctcacctccatcttggtaaacttcatcctgtttatttgcatcatccgaatcctgcttcagaaactgcggcccccagatatcaggaagagtgacagcagtccatactcaaggctagccaggtccacactcctgctgatccccctgtttggagtacactacatcatgttcgccttctttccggacaattttaagcctgaagtgaagatggtctttgagctcgtcgtggggtctttccagggttttgtggtggctatcctctactgcttcctcaatggtgaggtgcaggcggagctgaggcggaagtggcggcgctggcacctgcagggcgtcctgggctggaaccccaaataccggcacccgtcgggaggcagcaacggcgccacgtgcagcacgcaggtttccatgctgacccgcgtcagcccaggtgcccgccgctcctccagcttccaagccgaagtctccctggtctgaccaccaggatcccaggggcccaaggcggcccctcccgccccttcccactcaccccggcagacgccggggacagaggcctgcccgggcgcggccagccccggccctgggctcggaggctgcccccggccccctggtctctggtccggacactcctagagaacgcagccctagagcctgcctggagcgtttctagcaagtgagagagatgggagctcctctcctggaggattgcaggtggaactcagtcattagactcctcctccaaaggccccctacgccaatcaagggcaaaaagtctacatactttcatcctgactctgccccctgctggctcttctgcccaattggaggaaagcaaccggtggatcctcaaacaacactggtgtgacctgagggcagaaaggttctgcccggggaaggtcaccagcaccaacaccacggtagtgcctgaaatttcaccattgctgtcaagttcctttgggttaagcattaccactcaggcatttgactgaagatgcagctcactaccctattctctctttacgcttagttatcagctttttaaagtgggttattctggagtttttgtttggagagcacacctatcttagtggttccccaccgaagtggactggcccctgggtcagtctggtgggaggacggtgcaacccaaggactgagggactctgaagcctctgggaaatgagaaggcagccaccagcgaatgctaggtctcggactaagcctacctgctctccaagtctcagtggcttcatctgtcaagtgggatctgtcacaccagccatacttatctctctgtgctgtggaagcaacaggaatcaagagctgccctccttgtccacccacctatgtgccaactgttgtaactaggctcagagatgtgcacccatgggctctgacagaaagcagatacctcaccctgctacacatacaggatttgaactcagatctgtctgataggaatgtgaaagcacggactcttactgctaacttttgtgtatcgtaaccagccagatcctcttggttatttgtttaccacttgtattattaatgccattatcctgaattccccttgccaccccaccctccctggcgtgtggctgaggaggcctccatctcatgtatcatctggataggagcctgctggtcacagcctcctctgtctgcccttcaccccagtggccactcagcttcctacccacacctctgccagaagatcccctcaggactgcaacaggcttgtgcaacaataaatgttggcttgga

SEQ ID NO: 29528 - DNA, 5482 bp, Homo Sapiens
attttaaaaaagatccggccatactatttttatcttgctttttcgttctgtcgcagtactgtttaatatgagtccagcgacggctctgtgactgttttcctctggtaaaatcgctcttgcgtcctcagcgtttatctcaggtgcggaaggtctcacaggtttggaaatagcgccggaaaaatcgatccgcggagtgagacggctcgtaccacactgcagggcccggaggtcaagatggtggctgtaaaactaggatccctgacgattgcttagcattaaggcccgacatggaaccggggtgtgacgagttcctgccgccaccggagtgcccggtttttgagcctagctgggctgaattccaagacccgcttggctacattgcgaaaataaggcccatagcagagaagtctggcatctgcaaaatccgcccacccgcggattggcagcctccttttgcagtagaagttgacaatttcagatttactcctcgcgtccaaaggctaaatgaactggaggcccaaactagagtgaaattgaactatttggatcagattgcaaaattctgggaaattcaaggctcctctttaaagattcccaatgtggagcggaagatcttggacctctacagccttagtaagattgtgattgaggaaggtggctatgaagccatctgcaaggatcgtcggtgggctcgagttgcccagcgtctccactacccaccaggcaaaaacattggctccctgctacgatcacattacgaacgcattatttacccctatgaaatgtttcagtctggagccaaccatgtgcaatgtaacacacacccgtttgacaatgaggtaaaagataaggaatacaagccccacagcatcccccttagacagtctgtgcagccttcaaagttcagcagctacagtcgacgggcaaaaaggctacagcctgatccagagcctacagaggaggacattgagaagcatccagagctaaagaagttacagatatatgggccaggtcccaaaatgatgggcttgggccttatggctaaggataaggataagactgtgcataagaaagtcacatgccccccaactgttacggtgaaggatgagcaaagtggaggtgggaacgtgtcatcaacattgctcaagcagcacttgagcctagagccctgcactaagacaaccatgcaacttcgaaagaatcacagcagtgcccagtttattgactcatatatttgccaagtatgctcccgtggggatgaagatgataagcttcttttctgtgatggctgtgatgacaattaccacatcttctgcttgttaccaccccttcctgaaatccccagaggcatctggaggtgcccaaaatgtatcttggcggagtgtaaacagcctcctgaagcttttggatttgaacaggctacccaggagtacagtttgcagagttttggtgaaatggctgattccttcaagtccgactacttcaacatgcctgtacatatggtgcctacagaacttgtagagaaggaattctggaggctggtgagcagcattgaggaagacgtgacagttgaatatggagctgatattcattccaaagaatttggcagtggctttcctgtcagcaatagcaaacaaaacttatctcctgaggagaaggagtatgcgaccagtggttggaacctgaatgtgatgccagtgctagatcagtctgttctctgtcacatcaatgcagacatctcaggcatgaaggtgccctggctgtacgtgggcatggttttctcagcattttgttggcatattgaggatcactggagttactctattaactatctgcattggggtgagccgaagacctggtatggtgtaccctccctggcagcagagcatttggaggaggtgatgaagatgctgacacctgagctgtttgatagccagcctgatctcctacaccagcttgtcactctcatgaatcccaacactttgatgtcccatggtgtgccagttgtccgcacaaaccagtgtgcaggggagtttgtcatcacttttcctcgtgcttaccacagtggttttaaccaaggctacaattttgctgaagctgtcaacttttgtactgctgactggctacctgctggacgccagtgcattgaacactaccgccggctccggcgctattgtgtcttctcccacgaggagctcatctgcaagatggctgccttcccagagacgttggatctcaatctagcagtagctgtgcacaaggagatgttcattatggttcaggaggagcgacgtctacgaaaggcccttttggagaagggcgtcacggaggctgagcgagaggcttttgagctgctcccagatgatgaacgccagtgcatcaagtgcaagaccacgtgcttcttgtcagccctggcctgctacgactgcccagatggccttgtatgcctttcccacatcaatgacctctgcaagtgctctagtagccgacagtacctccggtatcggtacaccttggatgagctccccaccatgctgcataaactgaagattcgggctgagtcttttgacacctgggccaacaaagtgcgagtggccttggaggtggaggatggccgtaaacgcagctttgaagagctaagggcactggagtctgaggctcgtgagaggaggtttcctaatagtgagctgcttcagcgactgaagaactgcctgagtgaggtggaggcttgtattgctcaagtcctggggctggtcagtggtcaggtggccaggatggacactccacagctgaccttgactgaactccgggtccttcttgagcagatgggcagcctgccctgtgccatgcatcagattggggatgtcaaggatgtcctggaacaggtggaggcctatcaagctgaggctcgtgaggctctggccacactgccctctagtccagggctattgcggtccctgttggagagggggcagcagctgggtgtagaggtgcctgaagcccatcagcttcagcagcaggtggagcaggcgcaatggctagatgaagtgaagcaggccctggccccttctgctcacaggggctctctggtcatcatgcaggggcttttggttatgggtgccaagatagcctccagcccttctgtggacaaggcccgggctgagctgcaagaactactgaccattgcagagcgctgggaagaaaaggctcatttctgcctggaggccaggcagaagcatccaccagccacattggaagccataattcgtgagacagaaaacatccctgttcacctgcctaacatccaggctctcaaagaagctctgactaaggcacaagcttggattgctgatgtggatgagatccagaatggtgaccactacccctgtctagatgacttggagggcctggtggctgtgggccgggacctgcctgtggggctggaagagctgagacagctagagctgcaggtattgacagcacattcctggagagagaaggcctccaagacctttctcaagaagaattcttgctacacactgcttgaggtgctttgcccgtgtgcagacgctggctcagacagcaccaagcgtagccggtggatggagaaggcgctggggttgtaccagtgtgacacagagctgctggggctgtctgcacaggacctcagagacccaggctctgtgattgtggccttcaaggaaggggaacagaaggagaaggagggtatcctgcagctgcgtcgcaccaactcagccaagcccagtccactggcaccatccctcatggcctcttctccgacttctatctgtgtgtgtgggcaggtgccagctggggtgggagttctgcagtgtgacctgtgtcaggactggttccatgggcagtgtgtgtcagtgccccatctcctcacctctccaaagcccagtctcacttcatctccactgctagcctggtgggaatgggacacaaaattcctgtgtccactgtgtatgcgctcacgacggccacgcctagagacaatcctagccttgctggttgccctgcagaggctgcccgtgcggctgcctgagggtgaggcccttcagtgtctcacagagagggccattggctggcaagaccgtgccagaaaggctctggcctctgaagatgtgactgctctgttgcgacagctggctgagcttcgccaacagctacaggccaaacccagaccagaggaggcctcagtctacacttcagccactgcctgtgaccctatcagagaaggcagtggcaacaatatttctaaggtccaagggctgctggagaatggagacagtgtgaccagtcctgagaacatggctccaggaaagggctctgacctggagctactgtcctcactgttgccgcagttgactggccctgtgttggagctgcctgaggcaatccgggctcccctggaggagctcatgatggaaggggacctgcttgaggtgaccctggatgagaaccacagcatctggcagctgctgcaggctggacagcctccagacctggacagaattcgcacacttctggagctggaaaaatttgaacatcaagggagtcggacaaggagccgggctctggagaggcgacggcggcggcagaaggtggatcagggtagaaacgttgagaatcttgttcaacaggagcttcagtcaaaaagggctcggagctcagggattatgtctcaggtgggccgagaagaagaacattatcaggagaaagcagaccgtgaaaatatgttcctgacaccttccacagaccacagccctttcttgaaaggaaaccaaaatagcttacaacacaaggattcaggctcttcagctgcttgtccttctttaatgcctttgctacaactctcctactctgatgagcaacagttgtgacagtggcaccaaaggtcatttgtggttgtttttgtttgtttgtttcttaaatcctactatctcctggcctggacctcagaaggagctttttgcttatctataatttttcactgccaatttttgatatcctctctcctagagttactgttaaaaggttggttcgtaaagtccacaccccgatgctcagaagtgtcttgccagcaacattcctgctagcatacaggagtgatttcctaaaccagtttcattctagtctgaatagggacaaacaaatcttgaggaagcccaagtgcgtacctttatttttgcccccaccaccctctttctgtacttcaatttttgtttgttttttgtttttttgtccctgtcataaaatattttggtgcttcaaaacttgtaccttcattgtacatccttttcttttctccccttgggtcttattataaaagaagacaatgtacgttgtaattaccaaaaagaatagggaaaaacaagaatttcatgactctacctgtggtctatctttaatttcatttcttttgttaaaaataaaacaatgagtatgtttggatact

SEQ ID NO: 29529 - DNA, 3160 bp, Homo Sapiens
gtggcccgagtcgggaaaatggctgcgagtacctccatggtcccggtggctgtgacggcggcagtggcgcctgtcctgtccataaacagcgatttctcagatttgcgggaaattaaaaagcaactgctgcttattgcgggccttacccgggagcggggcctactacacagtagcaaatggtcggcggagttggctttctctctccctgcattgcctctggccgagctgcaaccgcctccgcctattacagaggaagatgcccaggatatggatgcctataccctggccaaggcctactttgacgttaaagagtatgatcgggcagcacatttcctgcatggctgcaatagcaagaaagcctattttctgtatatgtattccagatatctgtctggagaaaaaaagaaggacgatgaaacagttgatagcttaggccccctggaaaaaggacaagtgaaaaatgaggcgcttagagaattgagagtggagctcagcaaaaaacaccaagctcgagaacttgatggatttggactttatctgtatggtgtggtgcttcgaaaactggacttggttaaagaggccattgatgtgtttgtggaagctactcatgttttgcccttgcattggggagcctggttagaactctgtaacctgatcacagacaaagagatgctgaagttcctgtctttgccagacacctggatgaaagagttttttctggctcatatatacacagagttgcagttgatagaggaggccctgcaaaagtatcagaatctcattgatgtgggcttctctaagagctcgtatattgtttcccaaattgcagttgcctatcacaatatcagagatattgacaaagccctctccatttttaatgagctaaggaaacaagacccttacaggattgaaaatatggacacattctccaaccttctttatgtcaggagcatgaaatcggagttgagttatctggctcataacctctgtgagattgataaatatcgtgtagaaacgtgctgtgtaattggcaattattacagtttacgttctcagcatgagaaagcagccttatatttccagagagccctgaaattaaatcctcggtatcttggtgcctggacactaatgggacatgagtacatggagatgaagaacacgtctgctgctatccaggcttatagacatgccattgaggtcaacaaacgggactacagagcttggtatggcctcgggcagacctatgaaatccttaagatgccattttactgcctttattattatagacgggcccaccagcttcgacccaatgattctcgcatgctggttgctttaggagaatgttacgagaaactcaatcaactagtggaagccaaaaagtgttattggagagcttacgccgtgggagatgtggagaaaatggctctggtgaaactggcaaagcttcatgaacagttgactgagtcagaacaggctgcccagtgttacatcaaatatatccaagatatctattcctgtggggaaatagtagaacacttggaggaaagcactgcctttcgctatctggcccagtactattttaagtgcaaactgtgggatgaagcttcaacttgtgcacaaaagtgttgtgcatttaatgatacccgggaagaaggtaaggccttactccggcaaatcctacagcttcggaaccaaggcgagactcctaccaccgaggtgcctgctccctttttcctacctgcttcactctctgctaacaatacccccacacgcagagtttctccactcaacttgtcttctgtcacgccatagttggctactctcaagccagcacattgttagacccatcttaattaagccttacctccatgtaaagaacagcacgtctgttccaaggacctcagctcttcttgtttctacagatggcaacagctccatagggacagcttgtataattaccttcagaggccaactgacagaatcctggcaggaacagacattatcttgccagttagaagtacttctgtctcacttatgtccaaagagtggctatagatcttggccttcttccctgaatgctttttttttttggcccccaagaaagtcccttttatagcactttagcacaggcaatgctacaggaacaaagtttcaatgctgctgagagtgaaagaaaggaggaaagtctgccactctaccctgagctggcagtagggcactgagtacccttaggaagaagtcagagcaatggatacaaatgaccttgctcttggatttgctgagcatgatccctattctgatgtcagagattaggtttaaatggaatagagctatccatttgttcttactctctagggagacaatcttccaaaacagttttgggggggtcttctaaagctttcaaattggaagtaactttattcaactagagttgaataaaagaagggcaaaaataatctcacagagcttggaactgctgatagcccttactgagggcaaaagatggctatattgttagctatactcctaccaaagcaagcaaggagataggattatagataatttcacggacatttggaaataacattggtgattatacagacaagaataaactcacttcaagctggtctgttttaataaattttcaacgtaattgtctatttttttccctcccatctgcaacagaatacatttttttcagcctttatctagatgaggtaaagggaatcattcttatggtgctcttggagagtttcaggcctgtgcatgtgtgtacagcaggaggtaatatgctataatgtctgctgtaatatatttgcacagtagatgctatggatcattctgagctcagggtccagactttattcttattcccagaattttgtgttacgtttttacctcctaacatatgacacttcatcttatattaaggaaggtttagaatatctaatacgacttgaattcatttgttactaagccttctcaggcaagctgtatactagttactggtctccactgccatgccttttcaaggttcccatggtccagaatgatgtttgattcttaatttttctgtcccttttataatttgttttaatgattttgctacatttggaattcaataaaaaatgtgaacaataataaaaaaaaaaaaaaaaaa

SEQ ID NO: 29530 - DNA, 15304 bp, Homo Sapiens; identical to SEQ ID NO: 22897

SEQ ID NO: 29531 - DNA, 3555 bp, Homo Sapiens
ggtactgtatatacaatctgggtcagctgcagctggttactgcatttctccatgtggcagacagagcaaagccacaacgctttctctgctggattaaagacggcccacagaccagaacttccactatactacttaaaattacataggtggcttgtcaaattcaattgattagtattgtaaaaggaaaaagaagttccttcttacagcttggattcaacggtccaaaacaaaaatgcagctgccattaaagtcacagatgaacaaacttctacactgatttttaaaatcaagaataagggcagcaagtttctggattcactgaatcaacagacacaaaaagctggcaatatagcaactatgaagagaaaagctactaataaaattaacccaacgcatagaagacttttttttctcttctaaaaacaactaagtaaagacttaaatttaaacacatcattttacaacctcatttcaaaatgaagacttttacctggaccctaggtgtgctattcttcctactagtggacactggacattgcagaggtggacaattcaaaattaaaaaaataaaccagagaagataccctcgtgccacagatggtaaagaggaagcaaagaaatgtgcatacacattcctggtacctgaacaaagaataacagggccaatctgtgtcaacaccaaggggcaagatgcaagtaccattaaagacatgatcaccaggatggaccttgaaaacctgaaggatgtgctctccaggcagaagcgggagatagatgttctgcaactggtggtggatgtagatggaaacattgtgaatgaggtaaagctgctgagaaaggaaagccgtaacatgaactctcgtgttactcaactctatatgcaattattacatgagattatccgtaagagggataattcacttgaactttcccaactggaaaacaaaatcctcaatgtcaccacagaaatgttgaagatggcaacaagatacagggaactagaggtgaaatacgcttccttgactgatcttgtcaataaccaatctgtgatgatcactttgttggaagaacagtgcttgaggatattttcccgacaagacacccatgtgtctcccccacttgtccaggtggtgccacaacatattcctaacagccaacagtatactcctggtctgctgggaggtaacgagattcagagggatccaggttatcccagagatttaatgccaccacctgatctggcaacttctcccaccaaaagccctttcaagataccaccggtaactttcatcaatgaaggaccattcaaagactgtcagcaagcaaaagaagctgggcattcggtcagtgggatttatatgattaaacctgaaaacagcaatggaccaatgcagttatggtgtgaaaacagtttggaccctgggggttggactgttattcagaaaagaacagacggctctgtcaacttcttcagaaattgggaaaattataagaaagggtttggaaacattgacggagaatactggcttggactggaaaatatctatatgcttagcaatcaagataattacaagttattgattgaattagaagactggagtgataaaaaagtctatgcagaatacagcagctttcgtctggaacctgaaagtgaattctatagactgcgcctgggaacttaccagggaaatgcaggggattctatgatgtggcataatggtaaacaattcaccacactggacagagataaagatatgtatgcaggaaactgcgcccactttcataaaggaggctggtggtacaatgcctgtgcacattctaacctaaatggagtatggtacagaggaggccattacagaagcaagcaccaagatggaattttctgggccgaatacagaggcgggtcatactccttaagagcagttcagatgatgatcaagcctattgactgaagagagacactcgccaatttaaatgacacagaactttgtacttttcagctcttaaaaatgtaaatgttacatgtatattacttggcacaatttatttctacacagaaagtttttaaaatgaattttaccgtaactataaaagggaacctataaatgtagtttcatctgtcgtcaattactgcagaaaattatgtgtatccacaacctagttattttaaaaattatgttgactaaatacaaagtttgttttctaaaatgtaaatatttgccacaatgtaaagcaaatcttagctatattttaaatcataaataacatgttcaagatacttaacaatttatttaaaatctaagattgctctaacgtctagtgaaaaaaatatttttaaaatttcagccaaataatgcattttatttataaaaatacagacagaaaattagggagaaacctctagttttgccaatagaaaatgcttcttccattgaataaaagttatttcaaattgaatttgtgcctttcacacgtaatgattaaatctgaattcttaataatatatcctatgctgattttcccaaaacatgacccatagtattaaatacatatcatttttaaaaataaaaaaaaacccaaaaataatgcatgcataatttaaatggtcaatttataaagacaaatctatgaatgaatttttcagtgttatcttcatatgatatgctgaacaccaaaatctccagaaatgcattttatgtagttctaaaatcagcaaaatattggtattacaaaaatgcagaatatttagtgtgctacagatctgaattatagttctaatttattattactttttttctaatttactgatcttactactacaaagaaaaaaaaacccaaccaatctgcaattcaaatcagaaagtttggacagctttacaagtattagtgcatgctcagaacaggtgggactaaaacaaactcaaggaactgttggctgttttcccgatactgagaattcaacagctccagagcagaagccacaggggcatagcttagtccaaactgctaatttcattttacagtgtatgtaacgcttagtctcacagtgtctttaactcatctttgcaatcaacaactttactagtgactttctggaacaatttcctttcaggaatacatattcactgcttagaggtgaccttgccttaatatatttgtgaagttaaaattttaaagatagctcatgaaacttttgcttaagcaaaaagaaaacctcgaattgaaatgtgtgaggcaaactatgcatgggaatagcttaatgtgaagataatcatttggacaactcaaatccatcaacatgaccaatgtttttcatctgccacatctcaaaataaaacttctggtgaaacaaattaaacaaaatatccaaacctcatagtggtattattctttgttttacctgtggtcatcttaaactggtttttcagtccctctccacttccttcagaaccaaagaatctgttataagattcctggaaggaactgggcatctaactgttacaccaaatcttaagtgaataaaactttaccaaggcttctcagttaaaaaaaaaa

SEQ ID NO: 29532 - DNA, 5840 bp, Homo Sapiens; identical to SEQ ID NO: 27020

SEQ ID NO: 29533 - DNA, 2690 bp, Homo Sapiens
gggggtggagggcccgggcgctcgggcctcaccagcccgagccaacttgcgctagagtcgggcccgccccctaaggggttaatccttttctcatgttaccgagcggcttataaggagggggaggccaagcctccgccttattgggagcctttgggggtttattctcttcccttctaacttgattaagaatgacccaaaataaattaaagctttgttccaaagccaatgtgtatactgaagtgcctgatggaggatggggctgggcggtagctgtttcatttttcttcgttgaagtcttcacctacggcatcatcaagacatttggtgtcttctttaatgacttaatggacagttttaatgaatccaatagcaggatctcatggataatctcaatctgtgtgtttgtcttaacattttcagctcccctcgccacagtcctgagcaatcgtttcggacaccgtctggtagtgatgttgggggggctacttgtcagcaccgggatggtggccgcctccttctcacaagaggtttctcatatgtacgtcgccatcggcatcatctctggtctgggatactgctttagttttctcccaactgtaaccatcctatcacaatattttggcaaaagacgttccatagtcactgcagttgcttccacaggagaatgtttcgctgtgtttgctttcgcaccagcaatcatggctctgaaggagcgcattggctggagatacagcctcctcttcgtgggcctactacagttaaacattgtcatcttcggagcactgctcagacccatctttatcagaggaccagcgtcaccgaaaatagtcatccaggaaaatcggaaagaagcgcagtatatgcttgaaaatgagaaaacacgaacctcaatagactccattgactcaggagtagaactaactacctcacctaaaaatgtgcctactcacactaacctggaactggagccgaaggccgacatgcagcaggtcctggtgaagaccagccccaggccaagcgaaaagaaagccccgctattagacttctccattttgaaagagaaaagttttatttgttatgcattatttggtctctttgcaacactgggattctttgcaccttccttgtacatcattcctctgggcattagtctgggcattgaccaggaccgcgctgcttttttattatctacgatggccattgcagaagttttcggaaggatcggagctggttttgtcctcaacagggagcccattcgtaagatttacattgagctcatctgcgtcatcttattgactgtgtctctgtttgcctttacttttgctactgaattctggggtctaatgtcatgcagcatattttttgggtttatggttggaacaataggagggactcacattccactgcttgctgaggatgatgtcgtgggcattgagaagatgtcttctgcagctggggtctacatcttcattcagagcatagcaggactggctggaccgccccttgcaggtttgttggtggaccaaagtaagatctacagcagggccttctactcctgcgcagctggcatggccctggctgctgtgtgcctcgccctggtgagaccgtgtaagatgggactgtgccagcatcatcactcaggtgaaacaaaggtagtgagccatcgtgggaagactttacaggacatacctgaagactttctggaaatggatcttgcaaaaaatgagcacagagttcacgtgcaaatggagccggtatgacacactttcttacaacaacagccactgtgttggctggagagggatggggtgggcccaacggggacacaaggaggcagaggagctaacccctctactccactttcaaaactacattttaaagggaatgtgtatgtgaagagcactaccaacatcgcttttgttttgttttgttttgttttaagctttttttttttgcttgtttttaaagccaaaacaaaaaacaaccaagcactcttccatatataaatctggctgtattcagtagcaatacaagagatatgtagaaagactctttggttcacattccgatattaaaatagtgacatgaactggcaaagtggttttaaaagctttcacgtgggataaatgattttctttttttcttttctttcttcctatggtcttgtctgaataaactactctcctgaataaaacaacatccaacccaggtcattgaaatgaaattggccagtcaaaaaaaaaaagacttcaatcatttttaaaattcctaattttcagaaatatgaataaatagtttttgttaaaccctttgtaaaataccaaggttcccgttaacaaattacggcctctgcttgctggaaatgaaatatagtttaagaccaaacattttactaataaacaaattttaagtatatatatatatatataacttgaacttcataaatgtgaagattaccacttctttttatggccagtccttatcagaagtgtttcagtacagaatatacaaaatggcatttaaaaatgtgtttcctgttgcttttagttatacagaaatatgtgactgtagtgtctttaatttaaaccgctatttattattaagttattctaggatgattaaagtaatcaaaagaaataaaatctgagacataagcagccaaaaaaaaaaaaaaaaaaaaaaaaaaaaaa

SEQ ID NO: 29534 - DNA, 4136 bp, Homo Sapiens
gaggagaagtggcgtcgagtccggccgggcagtagaggaaattgcggtagtgaccctcgggcctcgccatgaagagccgctttagcaccattgacctccgcgccgtactcgcggagctgaatgctagcttgctaggaatgagagtaaacaatgtttatgatgtggataataagacataccttattcgtcttcaaaaaccggactttaaagctacacttttacttgaatctggcatacgaattcatacaacagaatttgagtggcctaagaatatgatgccgtctagttttgccatgaagtgccgaaaacatttgaagagtcggagattagtcagtgcaaaacagcttggtgtggatagaattgtagattttcaatttggaagtgatgaagctgcttaccatttaatcattgagctctatgatagggggaacattgttcttacagattatgagtacgtaattttaaatattctaaggtttcgaactgatgaggcagatgatgttaaatttgctgttcgtgaacgctatccacttgatcatgctagagctgctgaacctttgcttactttggaaaggttgactgaaatagtagccagcgcacctaagggtgaactactgaagagggtgcttaacccattacttccctatggaccagctctcattgaacactgtcttttagaaaatggattctcgggtaatgtcaaagtggatgaaaaacttgaaactaaagatattgaaaaagtacttgtttctctgcagaaagcagaagactatatgaaaacaacatccaacttcagtgggaagggatatatcattcagaaaagagaaataaaaccatgcttggaagcagataaaccagttgaagacatactgacgtatgaggaatttcatcctttcttgttttctcaacattcacaatgtccatatatagaatttgaatcatttgacaaggcggtggatgaattttattccaagatagaaggccagaaaattgacttaaaagctttacaacaggaaaagcaagcattgaagaaattagataatgttcgaaaggatcacgaaaacagattggaagctcttcagcaggctcaggaaatagacaaactgaaaggagagctcatagaaatgaacctacaaatagttgacagagccattcaggtagttcgaagtgctttagctaaccagatagattggacagaaattgggttaattgtgaaagaagcccaggctcaaggagaccctgttgcaagtgcaatcaaagaattaaaactacaaacaaaccatgttacaatgctgctaagaaatccatacttgttatcagaggaggaagatgatgatgttgatggtgacgtcaatgttgagaaaaatgaaactgaaccaccaaaaggaaaaaagaaaaaacaaaagaataaacagctgcagaagcctcagaaaaataagcccttacttgtagatgttgatctcagcttgtcagcatatgccaatgccaaaaagtattatgatcacaagagatatgctgctaagaaaacacaaaagactgttgaagctgctgagaaggcattcaagtcagcagaaaagaaaacaaagcaaacattaaaagaagttcagactgttacctctattcaaaaagcaagaaaagtatattggtttgagaaatttctgtggttcattagctcagagaactatctaattataggtggacgagatcagcaacagaatgaaataattgtgaaaagatacttgacaccaggagacatttatgtacatgctgatcttcatggagctactagctgtgtaattaagaatccaacaggagaacccatccccccacggaccttgactgaagctggcacaatggcactttgctacagtgctgcttgggatgcacgagttatcactagtgcttggtgggtgtaccatcatcaggtatctaaaacagcaccaactggagaatatttgacaacaggaagcttcatgataagaggaaaaaagaattttcttcctccctcatatctaatgatggggtttagcttcctttttaaggtagatgagtcttgtgtttggagacatcagggtgaacgaaaagtcagagtacaggatgaagacatggagacactggcaagttgtacaagtgaactcatatcagaagaaatggaacaattagatggaggtgacacgagcagtgatgaggataaagaagaacatgaaactcctgtggaagtagaactcatgactcaggttgaccaagaggatatcactcttcagagtggcagagatgaactaaatgaggagctcattcaggaagaaagctctgaagacgaaggagaatatgaagaggttagaaaagatcaggattctgttggtgaaatgaaggatgaaggggaagagacattaaattatcctgatactaccattgacttgtctcaccttcaaccccaaaggtccatccagaaattggcttcaaaagaggaatcttctaattctagtgacagtaaatcacagagccggagacatttgtcagccaaggaaagaagggaaatgaaaaagaaaaaacttccaagtgactcaggagatttagaagcgttagagggaaaggataaagaaaaagaaagtactgtacacattgaaactcatcagaacacaagcaaaaatgttgcggctgtgcagccaatgaaacgaggacaaaagagtaaaatgaaaaaaatgaaagaaaaatacaaagaccaggatgaagaagaccgtgaacttatcatgaagttgctggggtctgcaggttcaaacaaagaagaaaaagggaagaaggggaagaaaggaaaaacaaaggacgaacctgtgaagaaacagccccagaaacctagaggtggacagagggtctctgacaacattaagaaagaaactccgttccttgaggttataactcatgagttacaagactttgctgtagatgatccacatgatgacaaggaagagcaagatctggatcaacagggaaatgaggaaaacctatttgattctttgacaggccagccacatcctgaagatgtactactgtttgccattccaatatgtgccccttacaccaccatgacaaactacaaatataaagtgaaacttactcctggagtgcagaaaaagggaaaagctgcaaaaacagccttgaatagtttcatgcattccaaagaagcaacagcaagagaaaaagacttattccgcagcgtaaaggacacagatttatcaagaaacattcctggcaaagtgaaagtgtctgcacccaatcttctgaacgtaaaaaggaaatagctgaaatgaaattctaaaatatttgagaagagccaattttatagccttttggaagttcaaagatgaaagcaccatgtatcaggatttccgcattataaaaatgaactaaacattgccttgctatattcaccaaaaggacttacttcttgttttttcccagttttatatagaggaaacactgtctatgataggatttccaaaagtatttgtggacagttaaatgctaattaatatacatctgtagttattctacattttcttgaaatttgggaggttaataccaagtattcatttcatgatgtaaagaaactgaacagtgaagtggcttgattgcttaaactattgacttggtaagtctactgtatataacatctaatatatatattacaggccaaatgaactaaacattgccttgctatattcaccaaaaggacttaattcttgtttttttcccagttttatatagaggaaacactatgataggatttcctaaagtatttgtggacagttaaatgctaattatatacatctgtagttattctacattttcttgaaatttgagaggttaataccaagtattcatttcatgatgtaaagaaactgaacagtgaagtggcttgattgcttaaactattgacttggtaagtctactgtatataacatctaatatatatatattataggccagctacaaggggtttaaatatttaggattgtgtcttgaaaactaagtattggagtggattttcttctgctttcattgatacttgtcagaaaaaaatattagaccaaaatgtaaaatataagtaataattctcatgaaaaaaaaaaaaaaaa

SEQ ID NO: 29535 - DNA, 5307 bp, Homo Sapiens
gaataacagttaagttttggggagtaaaaactgtttcaatttttgactgtgttgggggttggtgctcctaatccctgtgttgttaaagggtcgactatattgtatttttgaaaattgctagagagtggacgtaaagtgttctcactaaacaaattataactatgtgaggtagtgcatatattaagtagctagatttggtcattccacaatgtatatgtacttcaaaacatcatgttgtacatgagaaacacagttttatctgttagtcagttttaaaaataaaaaatattccaactagaaactctgttgtagtttttgaaattacaacttggaggctttgaggaactgattagaagtctcctttctgtttcaggctttcatatccaaaccatagatctttagaagtaacatctgttaattaattattaataaatagtttgagtctttattaattcatggataacttgaccattttctctctccttttgcttagataatcccagatcatggccgggcacagtagctcacgcctgtattcccagcagtttgggaggccgaggcaggcagatcacttgaactcaggagtttgagaccagcttgggcaacatggcaaaaccctgtctctattaaaaatacaaaaattagctgggcatggtagtgcatgcctgtagtcccagctacctgggaggctgaggtgggaggatcgcttgagcctgggaggttgaggcttctgtgcgcgatgattgctccagtgatcacgccattgcactccagcctgggtgacagagtgagaccctgtctccaaaaaaaaaaaaaattaagcaagtagcagttacaagaccaaaagttattttcctttttttttttctctataaaattgcccatttggaccaaatctagttataacttatttcagtgtcattaagaaagttgatgaataagtcatattactcagatgttagtagctatgcatttattaatagttttatttataagtatttagtttcactctgttgcagactattttatgctaaaattagctaaagccaaattactatttcttaaaacatattttttactttttttttttttttaaatattattaggtacttcttgcaagggatatgcattagcacatactcaagaaggggaagaaaagaagcaaacttctggtacatcaaataccagaggatcaagacgaaaacctgcaatgacaactcctacaaggaggtctacacgtaacacaagagctgaaacagccagtcagtctcagagatccccaatatcagacaattctgggtgtgatgccccaggtaacagtaatccatctttaagtgttccctcttcagctgagtcagaaaagcaaacaagacaggctccaaaacggaagtctgtaagaagaggaagaaaaccacctttactgaaaaagaaacttcggagctctgtagctgcccctgaaaaatcatcttccaatgattcagtagatgaagaaacagcagaatctgacacatcacctgtgttagaaaaagagcaccaaccagatgtagacagtagtaacatttgtactgtgcagactcatgtagaaaaccagtctgctaattgcttgaaaagttgcaatgagcaaatagaagaaagtgagaagcatactgcaaattatgatacagaggaaagagtaggatcttcatcttctgagtcttgtgctcaagatcttcctgtgctagttggtgaggaaggggaagttaaaaaactcgagaatacaggtatagaggctaatgttttgtgtttggaaagtgagatttctgaaaatattcttgaaaaaggaggtgatccattggaaaagcaagaccagatatctggactttcacaatcagaggtaaagacagatgtatgtacagttcatcttccaaatgattttcctacatgtttaacatctgaaagcaaagtgtaccaacctgtatcttgtcccctaagtgacttatctgagaatgtagagtcagtggttaatgaagaaaaaataacagagagttccctagtagaaattactgaacataaagattttacactaaaaacagaggagcttatagagagccccaagttagaatcttctgagggtgaaattatacagacagtggacagacaatctgttaagagcccagaggttcaattgcttgggcatgttgaaactgaagatgtagaaataattgcaacatgtgatacttttgggaatgaagatttcaataatattcaagactctgaaaataacttactaaaaaataatcttctgaacaccaaattggaaaaatctttagaagaaaagaatgaatcgctgaccgaacatcctagatctacagagttgcctaaaacacacattgaacagattcagaagcattttagtgaggacaacaatgaaatgatacctatggagtgtgattcattttgcagtgaccaaaatgaatctgaagttgaaccatctgtaaatgctgatcttaaacaaatgaatgaaaattctgtgacacactgttctgaaaataatatgccgtcttctgatcttgcggatgaaaaggttgaaactgtttctcaaccatctgaaagcccaaaagataccatagataaaaccaaaaagcctcgtactcgaagatctagatttcattctccatctacaacttggtcacccaacaaagacactccacaagaaaagaagcggccccagtctccatctcccagaagagaaactgggaaagaaagcaggaagtctcaatcaccatctcctaagaatgagtcagccagaggccggaaaaaatcccgttctcagtccccaaaaaaggatattgcaagagaaaggaggcaatctcagtctcggtctccaaaaagggatactactagggaaagcagaagatctgaatcactgtccccaagaagagaaacttctagagagaacaaaagatctcagccaagagtgaaagattcttccccaggagaaaaatccaggtcccagagcagagaacgagaaagtgatagagatgggcagaggagagagagagaaaggagaaccagaaagtggtctaggtccagatctcattctaggtccccctcaagatgtagaacaaaaagtaagagttcatcatttggtagaattgacagagatagttactctccccggtggaagggaagatgggcaaatgatggttggagatgtccacgaggaaatgatcggtacagaaagaatgacccagagaaacagaatgaaaatacaagaaaagaaaaaaatgacatccatctagatgctgatgatccaaattctgctgacaaacatagaaatgactgtcccaattggataacagaaaaaataaactctgggcctgatccaagaaccagaaatccagaaaagttgaaagagtctcattgggaagaaaatagaaatgaaaattcaggaaattcttggaataaaaactttggttctggttgggtatctaaccgtggtagaggcagaggcaaccgtggcagaggcacttacagaagtagttttgcctataaagatcagaatgaaaatcggtggcaaaatcgaaaacccctctcagggaattcaaacagttcagggagtgaatctttcaagtttgtggaacagcaatcctataagcgaaaaagtgaacaggagttctcatttgatacaccagcagatagatctggatggacatctgcatccagctgggccgtgagaaagactttgccagcagatgtacaaaactactactcacgacgaggcagaaattcttcaggtccacagtctggatggatgaaacaagaggaggaaacatctggacaggattctagcctaaaagaccaaacaaaccagcaagttgatggttctcagctacctataaatatgatgcaaccgcaaatgaatgtaatgcagcaacaaatgaatgcacaacaccagcctatgaatatcttcccatatccagtgggtgttcatgctcctttgatgaacatccaacgcaatccatttaacattcatcctcagctacccttgcatctccacacaggagtgcccctcatgcaggtagccactcctaccagtgtatctcagggactaccaccaccaccaccccctcccccaccatcccaacaagtcaactacattgcttcacaaccagatggaaagcaattgcagggtattcctagttcttctcatgtaagtaataacatgagtacaccagttttgcctgctccgacagcagccccaggaaatacgggaatggttcagggaccaagttctggtaatacttcgtcatcaagtcacagcaaagcctctaatgctgctgtaaaattggcagaaagcaaagtaagtgttgcagtggaagccagcgcagatagctcgaagacagacaagaaattgcaaattcaagaaaaagcagcacaagaggtaaaattggccatcaagccattttaccaaaataaagatatcaccaaggaagaatataaagaaattgtacggaaagcagtagataaagtttgtcatagtaagagtggagaagtaaattctactaaagtggcaaatctggttaaagcctatgtagacaaatacaaatattcacggaaggggagccaaaagaaaactctggaagaacctgtgtctactgaaaaaaacataggctgaaatggggaacgctgtcaaggacattatcaggatatctgcaaagtgcaatttcaacatgtaccattaactgaaaatcatacataactgtgattgaaatttggttttgataaaattatttttttaacataggatatgatgttttgttctaaataaatataggtctgcactgcaacttctgtatccttccttcccctccaccctcccccacaaaattcaagggaaagtaaagggtttaaaggaatgtgcatctttactaggactgtgttatagtgtggatactggaaaatgtatagctttttgattagggcaatggagtgcataaattagaaacttctaagtgcactggttttcaaagagatatatataatgcatttattctgtcaggttaaaatataaagtatgatctttatgattttttccctctaattatagaaagttaaataatgtattaccatgaaaaatgtttctaatattaaatagaacatatcagttgcaaagttcctaatgtgtatttttaaagcacatatctgaataaattgcctagatagaaaaaaaattatcacgagtaaaatttagtgttcaaaacattgaaacactcttcacctattgtatgaccaaataaaggttatgctgcttgttacgcgaaggcc

SEQ ID NO: 29536 - DNA, 2659 bp, Homo Sapiens
gcagcgagagctggaggtgttgggtcgggagaccagccattcgatcccgccgcaggtaggagctggtttccatcctggcaccacggcacacacctccagcctcgagcccggcgctgctgcccgggggtctccttcaggctctttgacgccgttccagggggcacctatccaggcatcctctgggcctctagccagaggactggctcccggcttcagcactccgggctgcagtaagaagtgcccttatcgctctgagccctgccaccatcccgtgaaccaccgaaaccctggtccagcgcgacagccttggacctgggactggacggatccaaaacgctcagcctcggccccccacagacggggctctgcatcgtctctgatatgtcacccaccatctcccacaaggacagcagccggcaacggcggccagggaatttcagtcactctctggatatgaagagcggtcccctgccgccaggcggttgggatgacagtcatttggactcagcgggccgggaaggggacagagaagctcttctgggggataccggcactggcgacttcttaaaagccccacagagcttccgggccgaactaagcagcattttgctactactctttctttacgtgcttcagggtattcccctgggcttggcgggaagcatcccactcattttgcaaagcaaaaatgttagctatacagaccaagctttcttcagttttgtcttttggcccttcagtctcaaattactctgggccccgttggttgatgcggtctacgttaagaacttcggtcgtcgcaaatcttggcttgtcccgacacagtatatactaggactcttcatgatctatttatccactcaggtggaccgtttgcttgggaataccgatgacagaacacccgacgtgattgctctcactgtggcgttctttttgtttgaattcttggccgccactcaggacattgccgtcgatggttgggcgttaactatgttatccagggaaaatgtgggttatgcttctacttgcaattcggtgggccaaacagcgggttactttttgggcaatgttttgtttttggcccttgaatctgccgacttttgtaacaaatatttgcggtttcagcctcaacccagaggaatcgttactctttcagatttcctttttttctggggaactgtatttttaataacaacaacattggttgcccttctgaaaaaagaaaacgaagtatcagtagtaaaagaagaaacacaagggatcacagatacttacaagctgctttttgcaattataaaaatgccagcagttctgacattttgccttctgattctaactgcaaagattggtttttcagcagcagatgctgtaacaggactgaaattggtagaagagggagtacccaaagaacatttagccttattggcagttccaatggttcctttgcagataatactgcctctgattatcagcaaatacactgcaggtccccagccattaaacacattttacaaagccatgccctacagattattgcttgggttagaatatgccctactggtttggtggactcctaaagtagaacatcaagggggattccctatatattactatatcgtagtcctgctgagttatgctttacatcaggttacagtgtacagcatgtatgtttctataatggctttcaatgcaaaggttagtgatccacttattggaggaacatacatgacccttttaaataccgtgtccaatctgggaggaaactggccttctacagtagctctttggcttgtagatcccctcacagtaaaagagtgtgtaggagcatcaaaccagaattgtcgaacacctgatgctgttgagctttgcaaaaaactgggtggctcatgtgttacagccctggatggttattatgtggagtccattatttgtgttttcattggatttggttggtggttctttcttggtccaaaatttaaaaagttacaggatgaaggatcatcttcgtggaaatgcaaaaggaacaattaatatatatgctactggacattctagcaaggtaattgtagtttagttttaattcggagagcaatgataatcagtgcacaggagtataaaatattattttaaacagcgaaattaataatataaaatgccaaatggttgaaaaaatagaaacctttctgtatatttgatcatattttttttttgccttgtcaatgtatttaaagtttacttaaggtcaggaaattctaaaacaacttttctggccttgttatttgatgtatatcttttaaatttactgaccaaagcatgttttaagctgcaatgcagtagtcacgggtggtaaccatgtagtcaggtattgttattagtacctatcactgctgagctgtatttaaaattttggtacaatatataaaatggagaagagcttgatattcaggtactaaccacaactagtctgacattgttggcagttaaaatcttattttgaattgtaaattagttaaattttatgtggaatttgctgagaaaagaatatagactactgaaatgtcattttagttatttttcttatgaccacattgtacaaatgaatctgtgttaaaaagactattttaaatgtatttcctgcttttgtaagcattaaagattt

SEQ ID NO: 29537 - DNA, 3060 bp, Homo Sapiens
tccggaaggaggcgaaccctgaggcgggcccggcaagccttccctgcggccggcagagcccaacgactagtgggactccgcgggggcgggggtagctggagcctggctctggcctggcaggagccgagcttgttccggaagaagccgagcggacgggggccagcctcagcgtcccgggagtgaggcgatagctgcggcggcgacagcgcgggccgggatgaaccgcgacggctgaggcagcggaggtgccggctgcgcgggccccagtgagactccctcgaagcggcagcccaccgttcggggctttgcctcgagccgagccctgcccccgcgagcctcccggacccctttgtgcggccggaggcggcggcgggaacggccatggcggccaacatgtaccgggtgggagattacgtctattttgagaactcttccagcaatccttacctggttagacggattgaggagctcaacaagactgcaaatggaaatgtggaggcaaaggttgtctgtcttttccggcgcagggacatttctagtagcctcaacagcctggctgatagtaatgccagggagtttgaagaggaatcaaagcagccaggggtgtctgagcagcagcgccatcaactgaagcaccgggaactttttctttctcggcaatttgaatcattaccagccacccacatacgggggaaatgcagtgtgaccctcttgaatgagacagatatcttgagccagtacctggaaaaggaggactgctttttttactcactggtgtttgaccccgtgcagaagacacttctcgctgatcagggcgagattagagttggttgcaaataccaagctgagatcccagatcgcctagtagagggagaatctgataatcggaaccagcagaagatggagatgaaggtctgggacccagacaaccctctcacagaccggcagatcgaccagtttcttgtggtggcccgagctgtgggaacctttgcaagagccctagattgtagcagctccattcggcagccaagcttgcacatgagtgcagctgctgcctcccgagatatcactctgtttcacgccatggataccttgcaaaggaacggctacgacctggctaaggccatgtcgaccctggtaccccagggaggcccggtgctgtgtcgggatgagatggaggaatggtcagcctcagaggccatgctatttgaggaggccctagagaagtatgggaaggacttcaatgatattcgccaggattttctaccctggaagtcacttgccagcatagtccagttttattacatgtggaaaaccacagaccggtatattcagcagaaaaggttgaaagctgctgaagcagacagcaaactgaaacaggtctacattcccacctacactaagccaaaccctaaccagatcatttctgtgggttcaaaacctggcatgaatggggctggatttcagaagggcctgacttgtgagagttgccacaccacacagtctgctcagtggtatgcctggggcccacctaacatgcagtgccgcctctgtgcttcctgttggatctactggaagaagtatgggggactgaagaccccaactcagcttgagggggccactcggggcaccacggagccacactcaaggggtcatttatccagacctgaagctcaaagtctctctccttacacaaccagcgccaacagggccaagctactggctaagaacagacaaactttcctgcttcagaccacaaagctgacccgtcttgccagacgcatgtgcagggacctattacagccaaggagggccgcccgacggccttatgctcctatcaatgccaatgccatcaaagcagagtgctccattcgacttcctaaggccgccaagactccattgaagattcaccctctggtgcggctgcccctggcaactatcgtcaaagatctggtggcccaggcacccctgaaaccaaaaacacctcggggtaccaagacaccgatcaacagaaaccagctgtcccagaaccggggactggggggcattatggtgaaacgggcctatgagactatggcaggggcaggggttcctttctctgccaatggaaggcctctggcttcagggattcgttcaagctcacagccagcagccaagcgtcagaaactaaacccagctgatgcccccaatcctgtggtgtttgtggccacaaaggataccagggccctacggaaggctctgacccatctggaaatgcggcgagctgctcgccgacccaacttgcccctgaaggtgaagccaacgctgattgcagtgcggccccctgtccctctacctgcaccctcacatcctgccagcaccaatgagcctattgtcctggaggactgagcacctgtggggaagggaggtgggctgagaggtagagggtggatgcccagggcacccaaacctcccttccctttcgtgtcgaagggagtgaggagtgaattaaggaagagagcaagtgagtgtgtgtccctggaggggttgggcgccctctggtgttaccacctcgagacttgtctcatgcctccatgcttgccgatggaggacagactgcaggaacttggcccatgtgggaacctagcctgttttggggggtaggacccacagatgtcttggacagttttggggggagggttttttaattttttaaaagttttgcctccctttgtgaaaggggatggggaggggaagagtaaacagataacaggtggtggtacctggttgggggaggggggcgtgcactgccatgtctttttttttttttttttttttttttttcctaattgggggtttctctttctgtccggtgtccggactttcctaattggagtttgaggcccctaagctggcatcaaccccaggccacgctcgctctttccttccctcccctccccctctgccttttgtacgccagttctcagaaataaagatcttttgtccgtttttttaacctcggattctgtaattggttcttatagtaacaaataaaaagctgttttcttcagcttctcctgg

SEQ ID NO: 29538 - DNA, 3394 bp, Homo Sapiens; identical to SEQ ID NO: 26618

SEQ ID NO: 29539 - DNA, 2225 bp, Homo Sapiens
agtgacgtctttgccccgcgccgcgccgtcccacccatctccctggcctccggtcccaacttcgcttctctgctgaccctctctcgtcgccgctgccgccgccgcagctgccaaaatgtctacaggtccaactgctgccactggcagtaatcgaagacttcagcagacacaaaatcaagtagatgaggtggtggacataatgcgagttaacgtggacaaggttctggaaagagaccagaagctctctgagttagacgaccgtgcagacgcactgcaggcaggcgcttctcaatttgaaacgagcgcagccaagttgaagaggaaatattggtggaagaattgcaagatgtgggcaatcgggattactgttctggttatcttcatcatcatcatcatcgtgtgggttgtctcttcatgaagaaccagcggaactcaaaactgctgttcaagaaacctcttcaagacttttgacttagaacctgctatattatcaagcttacctactgttatctctaaaattttttttgtgttaatgtaaagttgaatttctaggaaacgtgcctttgttttttaatatgcactccaaattagaaggccggccccgtccacattttgcacagtgcctttacagatttacgtatgggctgatgaagaggccttcttaagttccagagtgctataatctagatgtaatgttgtcactaattaattgccattactcccagttagttacccttgtcatttggcattattttcagaaccacattttaaacctttgggtaatcagatttccaacttatgccttccagaaaaaaacactactgcctaacacaaatctgtgataacaacaggctgtgccttattttgataattttctgattccctagaagagaaccctctactttttgtaagcactactgactctcgctgtatttaagatgctggtgaagagcttttgctcttgcattagatttgaagatgtttacattgttgttattgttatgtatcacttgctaaaaatattgttttaatcagagataacctctttaaaaaaatttttaaagaactatggctatgaccaaagcttctattttgccaaaaagttaaataccgataaaatggccttaagtgtattcctgacagttaaattcagaaacgtgccaaatggaactcaaggtgccccttcagaattaaaatcattaccttgtgtgtgaaccttctacatcttcataggcctttcttccttttgaaaggctgtagacagtgtggctccccttctgattcagtattttgcatgggggttagagaaggtttgaggtagactctgaccgtctcataaaagagttctacccagcagttggcagattatcagctgtggactccagcatgtttctgataattatgcaagcaacaattctgtagcctcaagtaagaccacctgtgaacttgatcattatctggcccaaatatgaagataaactataactttggagtttgtttcctatttgtattcacattctgcttcctaaatcagttttctaaattatgcctgcaattaggcattggtcaggggtgaatggctcttttcacagagagtagccaaccagagacctttgctttgatatcatcaactgcagagaatgctgttgatgggaatgctggaagcagaaactttgtcatcggaaaaacttttcttgtatgcatgagactcaacatcaggatccacagcttaaagatgggaattcaggtatgaaagaaaacaggcaaggaggcactgagggagaaagacacagactttatcgctctgtggctcattgttactggaatattctaaaactcttgttcacatgctattatgacttataaagcagcaacagctgaggcgcaccaggacacagcttccatttctttaacgtctgttcccttaacatcgctgaaatgatttactgttgaagagatgccttgcggtgtggccagctgtgaggagaaagcagctggcagtgttaggacattagtccaccttcagcgcagggtctctggccgggtctgactcagaaaccttggtactcgccccttggccacagtgcccagacccatgtaacccactggctcctgcattaacccagaaatacctcgcttctatctgtgcacttagctgggaacttacccactgtaatcacctaaataaagtgtttataaacatgaaaaaaaaaaaaaaaaaaaaa

SEQ ID NO: 29540 - DNA, 4625 bp, Homo Sapiens
gagaccgggacgagaccggggctgtggtgcggagagaggctgagacggagaagaggagaggcagagagggcgcggggaccgtcagcagcaccttagctacaatcgttcagctattctcggaagagagaagggagagggaggaggccggggcgggagtgggggctgtcaccctcggaccccggcgtgagaggggccgtgcggccggacgtcctcggggtgggcccccagtcggtggccgaagacctacagctcaggcccctgggtcccaaatttccaggctttgcccctcctcctttctcagatacccgggtaacagtcctcatagtccagatatccgggactcgggtcccaacctctctaaacctgggtctctgtttcatagaatttcaaatatcaggttcaggcccctgcgtgcaccagtatccggggttcattccccgggcgttcaaatatcggattcagtctccatcccgttcagatattcggggttcagaccccacaatcagaaatccggaattcggcagctgtcgccctcgacgagggggaggactggaccgcgaggtcagattaggttgtcaccccctcccctccaggggaggcttcccgggcccgcccctcaggaagggcgaaagccgaggaagaggtggcaaggggaaaggtctccttgcccctctccctgcttggcagagccgctggaggaccccaggcggaagcggaggcgctggggcaccatagtgacccctaccaggccaggccccactctcagggcccccaggggccaccatgccagctgggggccgggccgggagcctgaaggacccagatgtggctgagctcttcttcaaggatgacccagaaaagctcttctctgacctccgggaaattggccatggcagctttggagccgtatactttgcccgggatgtccggaatagtgaggtggtggccatcaagaagatgtcctacagtgggaagcagtccaatgagaaatggcaagacatcatcaaggaggtgcggttcttacagaagctccggcatcccaacaccattcagtaccggggctgttacctgagggagcacacggcttggctggtaatggagtattgcctgggctcagcttctgaccttctagaagtgcacaagaaaccccttcaggaggtagagatcgcagctgtgacccacggggcgcttcagggcctggcatatctgcactcccacaacatgatccatagggatgtgaaggctggaaacatcctgctgtcagagccagggttagtgaagctaggggactttggttctgcgtccatcatggcacctgccaactccttcgtgggcaccccatactggatggcacccgaggtgatcctggccatggatgaggggcagtacgatggcaaagtggacgtctggtccttggggataacctgcatcgagctggctgaacggaaaccaccgctctttaacatgaatgcgatgagtgccttataccacattgcacagaacgaatcccccgtgctccagtcaggacactggtctgagtacttccggaattttgtcgactcctgtcttcagaaaatccctcaagacagaccaacctcagaggttctcctgaagcaccgctttgtgctccgggagcggccacccacagtcatcatggacctgatccagaggaccaaggatgccgtgcgggagctggacaacctgcagtaccgcaagatgaagaagatcctgttccaagaggcacccaacggccctggtgccgaggccccagaggaggaagaggaggccgagccctacatgcaccgggccgggactctgaccagcctcgagagtagccactcagtgcccagcatgtccatcagcgcctccagccagagcagctccgtcaacagcctagcagatgcctcagacaacgaggaagaggaggaggaggaggaggaagaggaggaggaggaagaaggccctgaagcccgggagatggccatgatgcaggagggggagcacacagtcacctctcacagctccattatccaccggctgccgggctctgacaacctatatgatgacccctaccagccagagataacccccagccctctccagccgcctgcagccccagctcccacttccaccacctcttccgcccgccgccgggcctactgccgtaaccgagaccactttgccaccatccgaaccgcctccctggtcagccgtcagatccaggagcatgagcaggactctgcgctgcgggagcagctgagcggctataagcggatgcgacgacagcaccagaagcagctgctggccctggagtcacggctgaggggtgaacgggaggagcacagtgcacggctgcagcgggagcttgaggcgcagcgggctggctttggggcagaggcagaaaagctggcccggcggcaccaggccataggtgagaaggaggcacgagctgcccaggccgaggagcggaagttccagcagcacatccttgggcagcagaagaaggagctggctgccctgctggaggcacagaagcggacctacaaacttcgcaaggaacagctgaaggaggagctccaggagaaccccagcactcccaagcgggagaaggccgagtggctgctgcggcagaaggagcagctccagcagtgccaggcggaggaggaagcagggctgctgcggcggcagcgccagtactttgagctgcagtgtcgccagtacaagcgcaagatgttgctggctcggcacagcctggaccaggacctgctgcgggaggacctgaacaagaagcagacccagaaggacttggagtgtgcactgctgcttcggcagcacgaggccacgcgggagctggagctgcggcagctccaggccgtgcagcgcacgcgggctgagctcacccgcctgcagcaccagacggagctgggcaaccagctggagtacaacaagcggcgtgagcaagagttgcggcagaagcatgcggcccaggttcgccagcagcccaagagcctcaaatctaaggagctgcagatcaagaagcagttccaggagacgtgtaagatccagactcggcagtacaaggctctgcgagcacacttgctggagaccacgcccaaagctcagcacaagagcctccttaagcggctcaaggaagagcagacccgcaagctggcgatcttggcggagcagtatgaccagtccatctcagagatgctcagctcacaggcgctgcggcttgatgagacccaggaggcagagttccaggcccttcggcagcagcttcaacaggagctggagctgctcaacgcttaccagagcaagatcaagatccgcacagagagccagcacgagagggagctgcgggagctggagcagagggtcgcgctgcggcgggcactgctggagcagcgggtggaagaggagctgctggccctgcagacaggacgctccgagcgaatccgcagtctgcttgagcggcaggcccgtgagatcgaggccttcgatgcggaaagcatgaggctgggcttctccagcatggctctggggggcatcccggctgaagctgctgcccagggctatcctgctccaccccctgccccagcctggccctcccgtcccgttccccgttctggggcacactggagccatggccctcctccaccaggcatgccccctccagcctggcgtcagccgtctctgctggctcccccaggccccccaaactggctggggccccccacacaaagtgggacaccccgtggcggagccctgctgctgctaagaaacagcccccagcccctgcggcgggcagcctcggggggcagtggcagtgagaatgtgggcccccctgctgccgcggtgcccgggcccctgagccgcagcaccagtgtcgcttcccacatcctcaatggttcttcccacttctattcctgaggtgcagcggggaggagcagatgagctgggcagggcaggggtgggtggagcctgaccctggagggcactgagctggaggcccctgcaagggtaggggacaagatgtaggctccagctcccctcagacctcctcatctcatgagcttcttggggctggccagtggcccagggccagcttggcgataggtgcctcaaggctgcctgggagccccgcctccctaccatggtgccaggggtctccctccgccacctaggaaaggagggagatgtgcgtgtcaaatattcatctagtcccctgggggaggggaagggtgggtctagacatactatattcagagaactatactaccctcacagtgaggccctcagacctgccacagggcagagcaggtctggggcctgaggcagggagaatgagaggccaccttactggcaggaaggatcaggatggggtcttggggtcaggatgcctgggtctcttcccgtaactgtctgacgtcctgtgccgtcttgtcctttatctttttttttttttttttaattgggatcagggctggggcggggaaacaagggaaggaccttggaaggggctgctcccaggcctggggggcagtcgtgggagcccctctcagctgtggggctggcacagagccccaggcaagcttttaataaactgttggttattctaacag

SEQ ID NO: 29541 - DNA, 6138 bp, Homo Sapiens
acttccggttgctgtgctgagtcggaagtgggaacccttcggccgctgagattctgtcgtgtcgtcgctgctggcacttcaggctctgcctctcccactaggtctggatggaggataccttaaagtgaaatgacagaccaggagaataacaacaacatctcaagtaacccctttgctgctctttttggctccctggctgatgccaaacagtttgcggcaatccaaaaagagcagctgaagcaacaatctgatgaactcccagctagcccagatgactcggataatagcgtgtcagagagcctggatgaattcgattactctgtggctgagattagccgctcattccgatcacagcaggaaatatgtgagcaactcaacatcaatcacatgatccaaaggatcttccttattactctggacaacagtgatcccagcttgaaaagcgggaatggcatccctagccgttgtgtgtatttggaagaaatggcagtagagctagaagatcaagactggcttgatatgagcaatgttgagcaggccctcttcgctcgcttattacttcaagatccaggcaaccacttaattaacatgacttcttctacaacgctaaatctctctgctgatcgagatgcaggagagaggcacattttttgttacctttactcctgcttccagagagccaaggaagagattaccaaagttccagagaacctgctaccctttgcagtgcagtgcagaaacctcactgtgtccaatacccgaacagttcttctcaccccagagatctatgttgaccaaaacatccatgagcaactggtagatttgatgttagaagccatccagggagcccgtgagtacatgaacaagatctattttgaagatgtaactgagtttctggaagaggtcattgaagccttgatattggatgaggaagttagaacatttccagaagtcatgattccagtgtttgatattttattgggccgaataaaagatctagagctctgtcagatccttttgtatgcatatctggatattcttctctatttcactaggcaaaaagatatggcaaaggtttttgtagaatacattcagcccaaggaccctaccaatgggcaaatgtaccagaagaccttgctgggagtaattctgagtatctcctgcttattaaagactccgggtgttgtagaaaatcatggctactttttgaatccatctcgttccagcccccaggagatcaaagtacaggaggccaacatccatcagttcatggctcagttccacgaaaagatctaccagatgctgaagaacttactccagctctctccagaaaccaaacactgtatcttgtcctggcttggaaactgtttgcatgcaaatgcaggccgcaccaagatttgggccaatcagatgccagaaatctttttccaaatgtatgcctcagatgctttctttctgaatctgggtgctgctctcctgaagctatgccagccattttgcaaacccagatcctctcggctcctcacctttaatcccacatactgtgccctcaaggagttgaatgatgaagaacgaaaaattaaaaatgtacacatgagaggtttggacaaagaaacctgtttgatcccagctgtgcaggagccgaagtttccacagaactacaaccttgtaacagagaaccttgctctgacagagtacaccttgtacttgggatttcacaggttgcatgatcagatggtaaaaatcaaccaaaatctgcatcggctgcaggttgcctggcgggatgctcagcaaagttctagccctgctgctgacaatcttcgtgagcagtttgaacgactgatgaccatctatctttctaccaagactgccatgacagagccacaaatgctacaaaactgcctaaacttgcaggtgtccatggctgttctactggttcaactggccataggcaatgagggctcacagccaatagagctaacctttcctttgccagatggctacagctctttggcttatgtgccagaattttttgcagataacctgggtgattttctcatttttctccgccgctttgccgatgacattttggagacatcagcagattccctggagcatgtccttcactttatcaccattttcactggaagcatagaaagaatgaagaatccccacctgagggccaaactagcagaggtgttggaagcagtgatgccccacctggatcagaccccaaatcccttggtatccagtgtgttccaccggaaacgtgtgttctgcaactttcagtatgcaccccaacttgcagaggctctaatcaaggtttttgtggacatcgaatttacaggagacccccatcaatttgaacagaagtttaattaccgccgtcccatgtatcctatcctaagatacatgtgggggacagatacctatcgggagagcattaaggatttggctgactatgcctctaagaatttagaagccatgaatcccccacttttcctccgctttcttaacctgctaatgaatgatgccatcttccttttggatgaagccatacagtatttgagcaagataaagattcagcaaattgagaaggatcgaggtgaatgggatagtctgactccagaagcccgccgagaaaaggaggctggcctacagatgtttggacagctggcacgtttccataacatcatgtccaatgaaacaatcggtacccttgcctttctcacatcagagatcaagtcactctttgtgcatcccttcctggctgagcgcatcatctccatgttgaactacttcctgcaacacctggttggccccaagatgggtgccttaaaagtcaaggacttcagcgaatttgacttcaaaccccagcagcttgtatcagatatctgcactatctacttaaatcttggggatgaggagaatttctgtgccactgtgcccaaggatggacgttcctattccccaactctctttgcacagacagttcgagtcttgaagaaaataaataagcctgggaatatgattatggctttcagcaacttggcagagagaatcaagtctcttgcagacctccaacaacaggaagaggaaacctatgcagatgcctgtgatgagttcctggatcccattatgagcacactgatgtgtgaccctgtggtgctgccatcttccagagtcactgtggatagatccaccattgcaagacatttgctcagtgaccaaacagatccctttaaccgtagtcccctcaccatggaccagatccggccaaacacagaactaaaagaaaaaatccaacggtggcttgcagagaggaaacaacaaaaggagcaacttgaatagatactgtgaactaaccaaaccaaaaccaaccccagagtgcagataaacaattgtttgtggtttctctctttctggttctgttccttttctttcttcttttctttttcttttttttttttttttttactaaattagagaactgctcttgctgaaattatgatagttaagattcctaagaacttgacaatgctcccctggcttgcaggaaattatacttattatagcatcaccaagtttagaaatcatcactaattttcaccctctgttgtctcttcatattcttcttccttttcctaaatgaaattatattatttcaactactaaaacttcccgccaccctgctatttctcttccaattactgttcaaacatttttggtgagtgctgcttttataaatatgtgatgtcacatatttcagtgacagctgatgttatcagaaaaatcctgttatcctgtgtatttactagtcctcatgatctagacttaaccccttttctgtgttacagagtaacttcacataaaagcagatacctttaagtttgtgtagacttctgaataagatgatagacgagaattttttttaaaaaaggaatttaaaggaatcttgtgcaacttctgttgatagctcttaattttgttatacagtctttttaatgaggattggtagggcaatcctaccaattgatgggggtgaggagactgttgggcccttattctcttatgaaaatctgtttctacaaggactaggcctaagtagatttaggcaacgggtatcatatccatgaaaaatgtcattttaagacactaatatcaacagtatatctcagtgtgtgagatatataaatacacatacaccccatgtgcttttttgttggtttagtgtaaactgagtaccactttatattttctcttccatagtgagatgtatgcagtatgtggccatgtttactaacatactcattcttcacaaaattctgagattataaaatgtatatagttaatatttgtttgagcttgtgacctgacttctaagagctacttctaacacagccttaggtcttcaattaacaaagtaggaagttgagcacaaccttgtccacagccattttaaatatccacttagccctgtgtagttggtaggtggacaccactttcataagtgaacttgagctcactactcaattgtgcagcttaatatgctgactagggacattcccctatggattatctttatatcactgtctttctaagcccagagatgtcataagtgacaagaaaagtgataggatcaagaaatgggtgtcactgcttcatttggaacatgttattaactatggtctctttcaaataaatagtagttttatatttcaacacaagttgctataagcagtccttgatgggtttttgattgcatcagctggaaagcctcaaatctaagagggcttcccatcctagatataaaataggtgttgcctattgctgtgcttataaaatgaaaaaggaaattgaggacacttttgcaaatgccagaatgtaagattcattcagtgtgctccctgggcctttatggcatgggttgacaggatttgtttattttctaaaattagcttcattcaatatttatcatcctcctttccctctctgagaatgaactatgtataaaataagcttctgcctatttgcatttatcttccaaacccaatctagtaggatgttctcattttaaaaacgaggggaaaagaccagagtttttcaggagaaaactggaggaaaatgggcacaaaaactcagaaggcagctattcccagcagcttcctagttaacaacccccatgctgcctccagtctttgtctgtattcttctgtatttaaccttcagattgtaagccttttctggcaagcttttcttctttttttaaactcttttcctgaaactttttatgaatggctatggcaccattaatgctgctgaatatctttaaactctgcacaagcaagtgtgtagcttaaggccactactggtaaggaaaccaagtgtcctctgtgccttttttctttctgtgaagtaatttaagaatatccaaaaaaattagactttaaaaagttatcttggtacaacaccgtgtgtatatacacttggaagcttaaaaaggtgttttgtctggaacttagaagcagctctaaatctagtagagcagactttctaacatacctagttttgtgtattggctttgctggagtatgatagcaaaatgaagactcttttactcagctctggtattgctcataacttaccaagaggctaatactaaacttggaaaattgtttaagtatgttttatcaagcagtctgggttttgttttttaatatactttttaatggatatgtgaaaactgaaggaaatgttaaaggttttttaatggtgcaagtgaaggtgccagttgctatttgatatcacactctacaaaagcttcattactttatttgatggtggttgctaagcagccattgcacagagcataagtctactgggtgcctttacatgccagaggctgatgctgcactgttgatgtcatgtgaggaaataatgcacatgctctaactgctcaacaggaaatgaacctagaaacagaaaatgaaaaggttgattgaaataaaacttgatcaacgcgactgtattttgaaacattccaggaaggttacttcttgtcaaacttgcctggcagtgtttgttcaaaacttgtatttaataaatgaacatctgacttacaaaaaaaaaaaaaaaaaa

SEQ ID NO: 29542 - DNA, 6103 bp, Homo Sapiens
atccggggcagcggggaatggctgagccaggggttcgccgcccccgccgccgccgccgccgccgccgccgccgccgccgcccgctttcggctcgggcctcaggaccgtagcatcctgagacattttgaattgacacttctcaagatttgactggatcagagttcatcatgtcaaagttgaaaagctcagagtcagtcagggtggtggttcgctgtcggcccatgaatggcaaggaaaaggctgcttcgtatgacaaagtggtggatgtggatgttaagctggggcaggtgtctgtgaagaaccccaaagggacggcccatgaaatgcccaagaccttcacctttgatgccgtctatgactggaatgccaagcagtttgaactgtacgatgagacgttccgaccacttgttgactctgtcctgcaaggtttcaatggaaccatttttgcctatggacaaactgggacaggaaaaacctacaccatggaaggaatccgtggtgaccctgaaaaaagaggagtcattcctaactcatttgaccatatcttcacccacatctctcgatcccagaatcaacaatacctggtcagggcttcttacttagagatctaccaggaggagatccgagatttgctctcaaaggatcagaccaaaaggcttgagctcaaagagaggcctgacacaggagtgtatgtgaaagacctgtcttcctttgtcaccaagagtgtgaaggagatagagcatgtgatgaatgtggggaaccagaaccgttctgtcggtgctaccaacatgaacgagcacagctcgcgttctcatgcaattttcgttatcactattgagtgcagcgaggtgggcctcgatggtgaaaaccacatccgtgtaggaaaattgaaccttgtagatcttgctggcagcgaacggcaagccaagaccggcgcacaaggggagagattaaaagaagctaccaagatcaacctctccctttccgctttgggtaatgtcatctctgctctagtggacggcaaaagcactcacattccatatcgggactcaaagcttaccaggctcctccaagattcccttggtggcaatgccaagactgtgatggtggccaacgtggggcctgcctcttacaacgtagaagagactctgaccactctgcgatatgccaaccgtgccaaaaacattaagaacaaaccaagggtcaatgaggaccccaaggatgccctccttcgagaattccaggaagagattgctcggctcaaggcccagctggaaaaacggtccattggtaggaggaagaggcgagagaagcggagggaaggtggtggcagtggtgggggtggggaagaggaggaggaggagggagaagagggtgaggaggaaggggatgataaggatgattactggcgggaacagcaagaaaaactggagattgagaagcgggccattgtagaggatcacagcttggttgcagaggagaagatgaggctgctgaaggagaaagagaaaaagatggaggacctgcggcgggagaaggatgctgccgagatgctgggcgccaagatcaaggccatggagagtaagttgcttgttggaggaaaaaatatagtagatcatacgaatgaacagcagaaaatcctggagcagaaacgacaggaaattgcagagcagaaacgtcgagaaagagaaatccagcaacagatggaaagtcgagatgaggagaccttggaacttaaagagacatacagctcattgcagcaagaggtggacatcaagaccaaaaaactcaaaaagctcttctccaagcttcaggcagtgaaggctgagatccatgacctccaagaagaacacatcaaggagcgccaagagctagagcagactcagaatgagctcaccagggagctgaaactcaagcatcttattatagaaaactttatccctctggaagaaaaaagtaaaattatgaatagagccttctttgatgaagaggaagatcattggaaactacatcctataaccagactggagaaccagcagatgatgaagcggccagtctcagccgtgggatataagagaccattgagccagcacgcaagaatgtccatgatgattcgtccagaggcccgatatagggcagaaaacattgtgctgttagagctggacatgcccagccggaccaccagagactatgagggtccagccattgcccccaaggtccaggctgcattggatgcggctctgcaggatgaagatgagatacaggtggatgcatcatcatttgaaagcactgcaaataagaaatccaaggccaggcctaaaagtggaaggaagtcgggatcctcctcctcttcctcaggaacccctgcatctcagctttatccacagtctcgggggctggttccaaagtaaagccagcttctcctctcccagggcggaaacagcatttgccttctgagagaagagactagcaaaaagctgcagagaggattcggcccaaactcagaactgttcccctgaggagaagcggtggcctctttgcagatcaaccaacttaatctggttgaacgtgctgttcctaatctggcactcagcccctctgggaaacatcttttaattagcatctcagaaatgcatgggtaaggtaaagtgcgatagttcaagtggaaagcaagagaatgaccagtgaccttgcttccttcccccttgccttcttctcccccttcccctgtgctccctttctctcctctctccttttctagcctgttctttacatggggctcccttcttgttgaacaatagggcagaatcaggagtcaccttagcaggaccacatctttggagcctcgggataaaatgacagtgaggttgaaaagtgaaaaccctagaacttgaataggtgcctgttcttgtagggagaaatgagaaatcgcatttggatccaggccccaggtgggcaccatcagcagtcttgcttccatgcacctcagtaagaagtggatctgcctttgggacctgctcagtgaggaaatctcttccaatttctgcttctgaatgattcaatgttgggagcaatagaaataacattccctttgccttctctgagtgtttagggaaatagcttctttaaaacctcaaaaccatgaccatcctgtcaaagacctaagtctgtaagctggtgccatgtccatacaccatgtcactttactcttcatttgtcaccatcttttcccatgcacgcatactctgaacatccttgtgtgggcccatcctctgcatccagagcatgctctgcagtgggcctgttttgtggaagaaaggaggctgtctctgccttctctgatgggactggagttgagggaaggagctgtattgtggcacttctgaattccccgttttgttccatattggtatagagagcagaagagtagctaggcagatgcagagatggagacatgagactcagtgcagtgggcagggaagacataacagatggaagcaaaggaatcctgcctgccttcagcagagaattcaccgaatcctagaactgtggctccctccaggcagagcctaagatgctggtgaagaatagctgtgtgattgaataggctcaaaggagagttcagaattcccatttacatattactagtttggtttgtaagttttagttccttgtattattgagattcagagcttcattttatgttggtcattaggtgaatattactcattttccctcaagagaagctcataagtgtgtgtgggtgtgagagcacgatggtgcctgtgttctgtgaatgtgtccatatgtgtctgtaagagagacagagaccaagaacttgcccaattttagaaatacactaatgtgcagttgttgccttttgtctgtattgaaggcccattgaatgactaatccaggctggaagcattcccatgtgggtgtctgagtccatgagccaagcctgaggggacagtgagtctccaggtctgccacactggtgcaccttgctggcacggtgcctcaggaaggtggcgactcaggtgggccttgagttatattttaactcagctgctcagttcccagggcacatttctggatcagaacccatgggaaacaggaggtactaagtgcaatgtcttagcattctgcaaaatggagatctgttgtccagcggcttatctcctttttagtaacccttctttctgaacccagggcccttttcagccttccctcatattttcttgagatcaaactttacttctttcttatttactaagaatttgcctgtttgaataagaacaaaacgctaaggtgggtagcctaagctgattttctgctggttacacgtgtctctcacaccacatttcctcaaagctaatctgaattctgtaggctaaaaatattcatgtagcaaatctgagaattgaaaactgcagataaccggccgggtatggtgactcatgcctgtaatcctagcactttgggaggccgaggtgggtggaccacctgaggttaggacttcaagaccagcctggccaacatggtgaaaccccatctgtactaaaaatacaaaaatttgcctggtgtggtggtgcatgcctctagtcctagctactcgggaggctgaggcacgagaatcacttgaacctgggaggcggaggttgcagtgagtcgagataacactactgcattccagcctgggtgacagagtgagactccacctcaaaaaaaaaaaaaaaaaaaaaaaaaacagaaagaaagaaaaagaaaactgcagataaccctatacattaatactggtatctcgaggtgactcttctgaccaagggtggttaagtgacacatagaacttttctaagagaagacagacaagttgacaggcatgccttgtactcagctgtgttcatgtggtggtctgtggaaagaaaagaagactcatttggaaatgaagctgtccctttccaagcagtctctggtgcttttcttctctcaaaatggatccgataaatatttgaatagagcagattgtagaatgtcgtgctgtcaccagaaagctgctgttttgggttctgcattgagccaaatatgtagaggacctaccaagcccactgagggactaggttttcatgtctctagtcatacctagaatgttctgagccgtctgagggccttcatgccggcagcagctagcaaagccagaaagcaagtctaacaggatctaagatgaccatcaggagaaggagtttgagactgtgtatgcaacccccaatagacccccttttactctgatctggagaatgtatctggcttcatattttcaagtcacatgtctctcagacccctggattcagaacccaaggccacaaatcataggcatgaagcactttcttaagactgacctaacgctggattatttcccgtccaatgcctgcatgctgcttgaattgctccacccacacctccatgaccaagggcgccagagtgctgcaactggggcgtgggccgctctctgcttttcctgtctgactctgacaagtcctccctcactgaatgtagaatcgttgccaagtttctgagaagtgtcgattccctgttaacatggatatcagttctgcctcacatttcccacttgaggttgaggcgtactggagacaacacctcagaccatctgaaccccatcagtggacgaaaatggggctgttaatatactctaaaagccatactaaaaatgctctgagggaactggctaagaatagtgggcctggtgattgtctatcacgcaaggctttgttttgtactgttcagaaatctgtcacctttctgcctgcccttgtttcctgaatgaaatgcttctggggttatttatgaaaggagtgatcctggggcaggcaggaggcagtgggcttcatggctccttgaagttattactgatcttgaccttctctttggctacctttagacaaagaatacgccaatcaatacttggggctctaagttttacaattgatatttatttgtatcatctctttgtctaggaatgtaaaagtgattctaaactaagatgtgtaataaaaatcaatcagatttattgtacctacaaaaa

SEQ ID NO: 29543 - DNA, 4930 bp, Homo Sapiens
atgctgaagcggaggcggccgctgctcgaggatcaaacagagcatactgaatcagcaggactggctggtggtgcagcagacatcatgagtaagcaccgagaagtctgttccttatcacgtgtgtaaggggaaaaaggtttaaacaagtctcttaagtggtgtttcctcaccgatggagaattacttccaagcagaagcttacaacctggacaaggtgttagatgaatttgaacaaaacgaagatgaaacagtttcttctactttattggatacaaagtggaataagattctagatcccccttctcaccggctgtcatttaaccctactttggccagtgtgaatgaatctgcagtttctaatgagtcacaaccacaactgaaagtcttctccctggctcattcagctcccctgaccacagaggaagaggatcactgtgctaatggacaggactgtaatctaaatccagagattgccacaatgtggattgatgaaaatgctgttgcagaagaccagttaattaagagaaactatagttgggatgatcaatgcagtgctgttgaagtgggagagaagaaatgtggaaacctggcttgtctgccagatgagaagaatgttcttgttgtagccgtcatgcataactgtgataaaaggacattacaaaacgatttacaggattgtaataattataatagtcaatcccttatggatgcttttagctgttcactggataatgaaaacagacaaactgatcaatttagttttagtataaatgagtccactgaaaaagatatgaattcagagaaacaaatggatccattgaatagaccgaaaacagaggggagatctgttaaccatctgtgtcctacttcatctgatagtctagccagtgtctgttccccttcacaattaaaggatgacggaagtataggtagagacccctccatgtctgcgattacaagtttaacggttgattcagtaatctcatcccagggaacagatggatgtcctgctgttaaaaagcaagagaactatataccagatgaggacctcactggcaaaatcagctctcctaggacagatctagggagtccaaattccttttcccacatgagtgaggggattttgatgaaaaaagagccagcagaggagagcaccactgaagaatccctccggtctggtttacctttgcttctcaaaccagacatgcctaatgggtctggaaggaataatgactgtgaacggtgttcagattgccttgtgcctaatgaagttagggctgatgaaaatgaaggttatgaacatgaagaaactcttggcactacagaattccttaatatgacagagcatttctctgaatctcaggacatgactaattggaagttgactaaactaaatgagatgaatgatagccaagtaaacgaagaaaaggaaaagtttctacagattagtcagcctgaggacactaatggtgatagtggaggacagtgtgttggattggcagatgcaggtctagatttaaaaggaacttgcattagtgaaagtgaagaatgtgatttctccactgttatagacacaccagcagcaaattatctatctaatggttgtgattcctatggaatgcaagacccaggtgtttcttttgttccaaagactttaccctccaaagaagattcagtaacagaagaaaaagaaatagaggaaagcaagtcagaatgctactcaaatatttatgaacagagaggaaatgaggccacagaagggagtggactacttttaaacagcactggtgacctaatgaagaaaaattatttacataatttctgtagtcaagttccatcagtgcttgggcaatcttcccccaaggtagtagcaagcctgccatctatcagtgttccttttggtggtgcaagacccaagcaaccttctaatcttaaacttcaaattccaaagccattatcagaccatttacaaaatgactttcctgcaaacagtggaaataatactaaaaataaaaatgatattcttgggaaagcaaaattaggggaaaactcagcaaccaatgtatgcagtccatctttgggaaacatctctaatgtcgatacaaatggggaacatttagaaagttatgaggctgagatctccactagaccatgccttgcattagctccagatagcccagataatgatctcagagctggtcagtttggaatttctgccagaaagccattcaccactctgggtgaggtggctccagtatgggtaccggattctcaggctccaaattgcatgaaatgtgaagccaggtttacattcaccaaaaggaggcatcactgcagagcatgtgggaaggttttctgtgcttcctgctgtagcctgaaatgtaaactgttatacatggacagaaaggaagctagagtgtgtgtaatctgccattcagtgctaatgaatgctcaagcctgggagaacatgatgagtgcctcaagccagagccctaaccctaacaatcctgctgaatactgttctactatccctcccttgcagcaagctcaggcctcaggagctctgagctctccacctcccactgtgatggtacctgtgggagttttaaagcaccctggagcagaagtggctcagcccagagagcagaggcgagtttggtttgctgatgggatcttgcccaatggagaagttgctgatgcagccaaattaacaatgaatggaacttcctctgcaggaaccctggctgtgtcacacgacccagtcaagccagtaactaccagtcctctaccagcagagacggatatttgtctattctctgggagtataactcaggttggaagtcctgttggaagtgcaatgaatcttattcctgaagatggccttcctcccattctcatctccactggtgtaaaaggagactatgctgtggaagagaaaccatcacagatttcagtaatgcagcagttggaggatggtggccctgacccacttgtatttgttttaaatgcaaatttgttgtcaatggttaaaattgtaaattatgtgaacaggaagtgctggtgtttcacaaccaagggaatgcatgcagtgggtcagtctgagatagtcattcttctacagtgtttaccggatgaaaagtgtttgccaaaggatatctttaatcactttgtgcagctttatcgggatgctctggcagggaatgtggtgagcaacttgggacattccttcttcagtcaaagtttccttggcagtaaagaacatggtggattcttatatgtgacatctacctaccagtcactgcaagacctagtactcccaaccccaccttacttgtttgggattcttatccagaaatgggaaactccttgggctaaagtatttcctatccgtctgatgttgagacttggagctgaatatcgactttatccatgcccactattcagtgtcagatttcggaagccattgtttggagagacggggcataccatcatgaatcttcttgcagacttcagaaattaccagtataccttgccagtagttcaaggtttggtggttgatatggaagttcggaaaactagcatcaaaattcccagcaacagatacaatgagatgatgaaagccatgaacaagtccaatgagcatgtcctggcaggaggtgcctgcttcaatgaaaaggcagactctcatcttgtgtgtgtacagaatgatgatggaaactatcagacccaggctatcagtattcacaatcagcccagaaaagtgactggtgccagtttctttgtgttcagtggcgctctgaaatcctcttctggataccttgccaagtccagtattgtggaagatggtgttatggtccagattactgcagagaacatggattccttgaggcaggcactgcgagagatgaaggacttcaccatcacctgtgggaaggcggacgcggaggaaccccaggagcacatccacatccagtgggtggatgatgacaagaacgttagcaagggtgtcgtaagtcctatagatgggaagtccatggagactataacaaatgtgaagatattccatggatcagaatataaagcaaatggaaaagtaatcagatggacagaggtgtttttcctagaaaacgatgaccagcacaattgcctcagtgatcctgcagatcacagtagattgactgagcatgttgccaaagctttttgccttgctctctgtcctcacctgaaacttctgaaggaagatggaatgaccaaactgggactacgtgtgacacttgactcagatcaggttggctatcaagcagggagcaatggccagccccttccctcgcagtacatgaatgatctggacagcgccttggtgccggtgatccatggaggggcctgccagcttagtgagggccccgttgtcatggaactcatcttttatattctggaaaacatcgtataaacagagaagacttcatttttttctgttcagacttgttgcaacagcagtcatacccaaatcatttgcactttaaaactggaagattaagcttttgttaacactattaatggggtggggaatagggtgggagtgggggtttgggagacgggtgggaaagggtggttggggggaccgatgttccataattctaagtcttctatgcattgtccaccaagaagatctgggcagcttctgttcctgcacaacagttatgctatccttgcagctaatccccttctgttactgtttagacaagaattccgctcctctctcaagatttacttatggtcatgtgctcagaaatgctcaaatgggtacaaccatcaccaagggtgggatgggagggcagaggggaaataaaatataaagcatcagttcttgcactctttgtacagaattggtataaaaaggataattccacactgaaaaaaaaaaaaaaaa

SEQ ID NO: 29544 - DNA, 5227 bp, Homo Sapiens
gctgttggctgggctcgggagggaacgctccaggtaaagcgctgggggaggaagcgacgccgaggagctacggtttcctccagaggtctccgcccctctgcccctatattcccagagctcgagtctgatccgggccttgccgggcaccctggaaaggcgggggtgatagtacagatggagacgcaactgcagagcattttcgaagaggtggtgaaaacggaagttatagaagaggcttttcctggcatgtttatggatactcctgaagatgagaaaacaaaactaattagctgtttgggggccttcagacagttttggggtggtctttctcaggagtctcatgaacagtgtatccagtggattgttaagtttattcatggtcagcatagtcctaaaagaatttcttttctttatgactgcttagcaatggcagttgagactggtctccttccacccaggctggtttgtgaatccctgataaactctgacactcttgagtgggaaagaacacagctttgggccttaacatttaaactggttcggaaaataattgggggagtggattacaagggtgttcgagatctcttaaaagtgattttggagaagattttgacaattcctaatacagtgagctctgctgttgtacagcagcttctggcagcaagagaggttatagcatatatcttggaaagaaatgcctgcttattaccagcctattttgcagtcactgagatcaggaaactgtatcctgaaggcaaacttccacactggttacttggaaacctagtatcagactttgtggataccttcaggcccacagcaaggataaactccatttgtggtcgctgtagtcttctgccagttgtaaataattcgggtgccatttgtaattcatggaaactggatcctgctactcttcgttttcctttgaaaggccttttgccatatgataaggatctgtttgaaccacagactgctttgttgagatatgtattggagcagccttattccagggatatggtctgcaatatgctaggtttaaataagcagcacaagcagcgctgccctgtgctggaggaccagttggtggatctggttgtttatgccatggagcgatctgagaccgaggagaagtttgacgatgggggaacaagccaactcctgtggcagcatctctcaagtcagctcattttctttgtgcttttccagtttgcaagttttccacatatggtgctttctcttcatcagaagttagcagggcgaggactgattaaaggcagagatcatcttatgtgggttctcctgcaattcatttctggaagtattcagaaaaatgcactagctgattttctccctgtgatgaagctcttcgacttgctatacccagaaaaagaatatatcccagttcctgatattaacaaaccccagtcaacccatgcctttgcaatgacctgtatttggattcatctcaatagaaaagctcaaaatgacaactccaagctacagattccaatacctcattccctaagacttcaccatgagttcctgcagcagagtctaagaaataaaagtttacagatgaatgactataagattgctctattgtgtaatgcatactctacaaattcagaatgttttacattacccatgggagctctggtagaaactatttatggaaatggaattatgaggatacctctccctggaacaaactgtatggcttcaggatctattacccccttacctatgaacctcctggattcactgacagttcatgccaaaatgagccttattcacagcattgcaaccagggtgataaaacttgctcatgcaaagtccagtgtggccttggctccagccctagtggaaacttacagtcgtttattggtctatatggaaatagagtctttgggcatcaaaggatttatcagtcagcttttgccaactgttttcaaatcacatgcatgggggatcttacacacactccttgagatgtttagctaccggatgcatcatattcagcctcattacagagttcagctcctgagtcatcttcatactttggctgcagttgcacaaacaaaccagaaccagctccatctttgtgtcgagagcactgctctcaggcttataacagcattaggtagctcagaggtacaaccgcagtttacacgcttccttagtgatcccaaaacagtgctctcagcagaatctgaagaactgaaccgagccttgatattgaccttggctagagcaactcatgtaacagatttttttacaggctctgattcaattcagggaacttggtgtaaagacatacttcagaccatcatgagtttcactcctcataattgggcttcacacaccctgagctgttttccaggcccactacaggcattcttcaaacaaaataatgtgcctcaggaaagccgttttaatctgaaaaaaaatgtggaggaggagtataggaagtggaagtcaatgagcaacgaaaacgacattattacccacttctctatgcagggctcccctcctctctttctttgtcttctctggaaaatgctcttggaaacagatcatattaatcagattggctatagagtattagagagaattggagccagggccttggtagcccatgtgaggacatttgcagatttcctggtatatgagttttctacatcagcagggggtcagcaactcaataaatgcattgaaattcttaatgacatggtatggaagtataacattgttacactggacagattaattctctgcctggccatgcgtagtcacgaaggaaatgaagcccaggtttgttatttcataattcagttgctgttactcaaaccaaacgattttagaaatcgagtaagtgactttgtgaaggaaaattccccagagcactggttacagaatgactggcacaccaagcacatgaattatcacaagaaatatccagagaagttgtattttgagggcctcgcggaacaggtggatcctcctgtacagatccagtctccctatctgcccatctattttgggaatgtgtgtcttcgattccttccagtatttgatatagtaatccacagatttttagagttgcttccggtatccaaatcactggagactctactggatcatctaggaggcttatataaatttcatgatcgtccagtgacttatctgtataacactctgcactattatgaaatgcacctgagagaccgcgcatttctcaaacgaaaactcgtccatgcgatcattggctctctgaaggataatcgaccgcagggctggtgtctaagtgacacttacctgaaatgcgctatgaatgcacgagaggaaaatccttgggttccagatgacacctactattgcagattgattggcagactagtcgatacgatggctggcaaatctcctggtccctttccaaactgtgactggagattcaatgagtttcccaacccagctgcccatgctctccatgttacttgtgtggagctcatggccttggcagtttcaggcaaagaagttgggaatgcccttctaaatgttgtcctaaaaagtcagcctttagtgccaagagagaacattacagcatggatgaatgcaattggtttgatcatcactgccctaccagagccatattggattgttcttcatgatcgaattgtgagtgtcatcagcagccccagcttgacgtctgaaacagagtgggttggctatccattccgcctctttgatttcactgcctgtcatcagtcctactctgagatgagttgtagctatacgttagctcttgcacatgctgtgtggcaccattctagcatcggacaactttctctcattccaaagtttcttactgaagtacttcttcctatagtgaagaccgaattccagttgctttatgtataccatcttgttggaccatttttacaaagatttcagcaagagagaactcgttgtatgatagagattggtgtggcgttttatgacatgctgctgaatgttgaccagtgtagcacccatttaaattacatggatcccatctgtgacttcctctatcacatgaagtatatgtttactggtgacagcgtgaaagagcaagtagagaagattatctgtaacttaaaaccagctttaaaacttcgtcttcgattcatcacacacattagcaagatggagccagctgcagtgcctccacaagccatgaacagtgggtctccagcacctcagtctaatcaggtgcccgtgtctttaccagtaactcagtgaagccagactgtactgtggagaaagtagaaatatatccgtctttgagagtggactcaaaccttttaaatctgaatgcgatcacactgtagtgatatagtagaagcagtgatgatattcagattgttttattttgattcaaatgatgaatctgttgacaccttataactcccatctccctatctatatttttgtctctaagagatcaagtaagatacatgttgttcatattcataacaacttattagagctatgtaggaacatagaggtatctgtgatcaaatgacttgtcattggcactttcagtctttcctattctagccgttgtttttgtttgtattttttattattaatgacatatttagtcttcagatatattattttaaaggcaccacacatgtaaaacagttattacaaatattttatacataaatctcttggtagattttcagaataatagagatttatatcaagaaaaggaatctagattttgttgcattgtaggagcaaacaaggcttcatattctttttaaaatgacttgaaattttattataaatttccatagtttctatcaaggtcaactggcagttttattacctttgctatggacttgaacttactgtataaaattagttggaagccatgtaagaaaataacatctgaaaattcttgaacttaaaatcatgcttaaatggttgattctccaatttctttttttaaaaataagttaattgcttttgcaggttgacactctcacctgacagatgatgtaattcttcaatttttataatcttaaaatttttaaattttatatttgtaaatacagtacacattttatttcttggattttgagagacattgttaattttgggggaattggcattgcgaaagacttgaaaactaatgagtaaagtctgctgaatgaataaaccgtgtgattgtttcccg

SEQ ID NO: 29545 - DNA, 1485 bp, Homo Sapiens
tcagccaattagagctccagttgtcactcctacccacactgggcctgggggtgaagggaagtgtttattaggggtacatgtgaagccgtccagaagtgtcagagtctttgtagctttgaaagtcacctaggttatttgggcatgctctcctgagtcctctgctagttaagctctctgaaaagaaggtggcagacccggtttgctgatcgccccagggatcaggaggctgatcccaaagttgtcagatggagagtaaatacaaggagatactcttgctaacaggcctggataacatcactgatgaggaactggataggtttaagttctttctttcagacgagtttaatattgccacaggcaaactacatactgcaaacagaatacaagtagctaccttgatgattcaaaatgctggggcggtgtctgcagtgatgaagaccattcgtatttttcagaagttgaattatatgcttttggcaaaacgtcttcaggaggagaaggagaaagttgataagcaatacaaatcggtaacaaaaccaaagccactaagtcaagctgaaatgagtcctgctgcatctgcagccatcagaaatgatgtcgcaaagcaacgtgctgcaccaaaagtctctcctcatgttaagcctgaacagaaacagatggtggcccagcaggaatctatcagagaagggtttcagaagcgctgtttgccagttatggtactgaaagcaaagaagcccttcacgtttgagacccaagaaggcaagcaggagatgtttcatgctacagtggctacagaaaaggaattcttctttgtaaaagtttttaatacactgctgaaagataaattcattccaaagagaataattataatagcaagatattatcggcacagtggtttcttagaggtaaatagcgcctcacgtgtgttagatgctgaatctgaccaaaaggttaatgtcccgctgaacattatcagaaaagctggtgaaaccccgaagatcaacacgcttcaaactcagccccttggaacaattgtgaatggtttgtttgtagtccagaaggtaacagaaaagaagaaaaacatattatttgacctaagtgacaacactgggaaaatggaagtactgggggttagaaacgaggacacaatgaaatgtaaggaaggagataaggttcgacttacattcttcacactgtcaaaaaatggagaaaaactacagctgacatctggagttcatagcaccataaaggttattaaggccaaaaaaaaaacatagagaagtaaaaaggaccaattcaagccaactggtctaagcagcatttaattgaagaatatgtgatacagcctcttcaatcagattgtaagttacctgaaagctgcagttcacaggctcctctctccaccaaattaggatagaataattgctggataaacaaattcagaatatcaacagatgatcacaataaacatctgtttctcattcc

SEQ ID NO: 29546 - DNA, 6401 bp, Homo Sapiens
caaggcggccggcggcgaccatggcagcgggccggcggcggccgtagtggcccaggcctgggcttcagcctcccggggccccagagggcggggcggtccgggccgcggcggtggcggcgccacttccctgctcccgcccgaggactcctgcgggcactcgctgaggaccagcggaccggcggcgcgaatctgactgaggggcggggacgccgtctgttccccgccgctcccggcagggccgggccgggctgggccgggctgggccgggcgggcccctgggagcagcccccaggcgggggaccgccttggagacccgaagccggagctagaggcaggcggtgggcccgggtggagtcccggccggagctggtggttcgggggcggtgctaggccccgaggctgcgggacctgagcgcgaggagcctgagtgcgggtccagcggtggcggcatgagccggcccccgccgacggggaaaatgcccggcgcccccgagaccgcgccgggggacggggcaggcgcgagccgccagaggaagctggaggcgctgatccgagaccctcgctcccccatcaacgtggagagcttgctggatggcttaaattccttggtccttgatttagattttcctgctttgaggaaaaacaagaacatagataatttcttaaatagatatgagaaaattgtgaaaaaaatcagaggtctacagatgaaggcagaagactatgatgttgtaaaagttattggaagaggtgcttttggtgaagtgcagttggttcgtcacaaggcatcgcagaaggtttatgctatgaagcttcttagtaagtttgaaatgataaaaagatcagattctgcctttttttgggaagaaagagatattatggcctttgccaatagcccctgggtggttcagcttttttatgcctttcaagatgataggtatctgtacatggtaatggagtacatgcctggtggagaccttgtaaaccttatgagtaattatgatgtgcctgaaaaatgggccaaattttacactgctgaagttgttcttgctctggatgcaatacactccatgggtttaatacacagagatgtgaagcctgacaacatgctcttggataaacatggacatctaaaattagcagattttggcacgtgtatgaagatggatgaaacaggcatggtacattgtgatacagcagttggaacaccggattatatatcacctgaggttctgaaatcacaagggggtgatggtttctatgggcgagaatgtgattggtggtctgtaggtgttttcctttatgagatgctagtgggggatactccattttatgcggattcacttgtaggaacatatagcaaaattatggatcataagaattcactgtgtttccctgaagatgcagaaatttccaaacatgcaaagaatctcatctgtgctttcttaacagatagggaggtacgacttgggagaaatggggtggaagaaatcagacagcatcctttctttaagaatgatcagtggcattgggataacataagagaaacggcagctcctgtagtacctgaactcagcagtgacatagacagcagcaatttcgatgacattgaagatgacaaaggagatgtagaaaccttcccaattcctaaagcttttgttggaaatcagctgcctttcatcggatttacctactatagagaaaatttattattaagtgactctccatcttgtagagaaactgattccatacaatcaaggaaaaatgaagaaagtcaagagattcagaaaaaactgtatacattagaagaacatcttagcaatgagatgcaagccaaagaggaactggaacagaagtgcaaatctgttaatactcgcctagaaaaaacagcaaaggagctagaagaggagattaccttacggaaaagtgtggaatcagcattaagacagttagaaagagaaaaggcgcttcttcagcacaaaaatgcagaatatcagaggaaagctgatcatgaagcagacaaaaaacgaaatttggaaaatgatgttaacagcttaaaagatcaacttgaagatttgaaaaaaagaaatcaaaactctcaaatatccactgagaaagtgaatcaactccagagacaactggatgaaaccaatgctttactgcgaacagagtctgatactgcagcccggttaaggaaaacccaggcagaaagttcaaaacagattcagcagctggaatctaacaatagagatctacaagataaaaactgcctgctggagactgccaagttaaaacttgaaaaggaatttatcaatcttcagtcagctctagaatctgaaaggagggatcgaacccatggatcagagataattaatgatttacaaggtagaatatgtggcctagaagaagatttaaagaacggcaaaatcttactagcgaaagtagaactggagaagagacaacttcaggagagatttactgatttggaaaaggaaaaaagcaacatggaaatagatatgacataccaactaaaagttatacagcagagcctagaacaagaagaagctgaacataaggccacaaaggcacgactagcagataaaaataagatctatgagtccatcgaagaagccaaatcagaagccatgaaagaaatggagaagaagctcttggaggaaagaactttaaaacagaaagtggagaacctattgctagaagctgagaaaagatgttctctattagactgtgacctcaaacagtcacagcagaaaataaatgagctccttaaacagaaagatgtgctaaatgaggatgttagaaacctgacattaaaaatagagcaagaaactcagaagcgctgccttacacaaaatgacctgaagatgcaaacacaacaggttaacacactaaaaatgtcagaaaagcagttaaagcaagaaaataaccatctcatggaaatgaaaatgaacttggaaaaacaaaatgctgaacttcgaaaagaacgtcaggatgcagatgggcaaatgaaagagctccaggatcagctcgaagcagaacagtatttctcaaccctttataaaacacaagttagggagcttaaagaagaatgtgaagaaaagaccaaacttggtaaagaattgcagcagaagaaacaggaattacaggatgaacgggactctttggctgcccaactggagatcaccttgaccaaagcagattctgagcaactggctcgttcaattgctgaagaacaatattctgatttggaaaaagagaagatcatgaaagagctggagatcaaagagatgatggctagacacaaacaggaacttacggaaaaagatgctacaattgcttctcttgaggaaactaataggacactaactagtgatgttgccaatcttgcaaatgagaaagaagaattaaataacaaattgaaagatgttcaagagcaactgtcaagattgaaagatgaagaaataagcgcagcagctattaaagcacagtttgagaagcagctattaacagaaagaacactcaaaactcaagctgtgaataagttggctgagatcatgaatcgaaaagaacctgtcaagcgtggtaatgacacagatgtgcggagaaaagagaaggagaatagaaagctacatatggagcttaaatctgaacgtgagaaattgacccagcagatgatcaagtatcagaaagaactgaatgaaatgcaggcacaaatagctgaagagagccagattcgaattgaactgcagatgacattggacagtaaagacagtgacattgagcagctgcggtcacaactccaagccttgcatattggtctggatagttccagtataggcagtggaccaggggatgctgaggcagatgatgggtttccagaatcaagattagaaggatggctttcattgcctgtacgaaacaacactaagaaatttggatgggttaaaaagtatgtgattgtaagcagtaagaagattcttttctatgacagtgaacaagataaagaacaatccaatccttacatggttttagatatagacaagttatttcatgtccgaccagttacacagacagatgtgtatagagcagatgctaaagaaattccaaggatattccagattctgtatgccaatgaaggagaaagtaagaaggaacaagaatttccagtggagccagttggagaaaaatctaattatatttgccacaagggacatgagtttattcctactctttatcatttcccaaccaactgtgaggcttgtatgaagcccctgtggcacatgtttaagcctcctcctgctttggagtgccgccgttgccatattaagtgtcataaagatcatatggacaaaaaggaggagattatagcaccttgcaaagtatattatgatatttcaacggcaaagaatctgttattactagcaaattctacagaagagcagcagaagtgggttagtcggttggtgaaaaagatacctaaaaagcccccagctccagacccttttgcccgatcatctcctagaacttcaatgaagatacagcaaaaccagtctattagacggccaagtcgacagcttgccccaaacaaacctagctaactgccttctatgaaagcagtcattattcaaggtgatcgtattcttccagtgaaaacaagactgaaatatgatggcccaaaatttattaaaaagctatattttcctgagagactgatacatacactcatacatatatgtgttccccttttccctgtaatataaattacaaatctgggctcctttgaagcaacaggttgaaccaacaatgattggttgatagactaaggatatatgcaactcttccagacttttccataaagctctctcggcagtcgctcacactacaatgcacacaaggattgagaagagttaaaggctaaagaaaacatcttttctagcttcaacagagaggtttcaccagcacatttaccagaagaatctgggaatggattccactacagtgatattgactgcatctttaagaagtgaccattatactgtgtatatatatataaacacacacacatatatatatatatatatagtactctaatactgcaagaaggttttttaaacttcccactttattttttatacacattaatcagatatcattacttgctgcagttgcaactatgcacttgtataaagccataatgttggagtttatatcactcattcctgtgtacctgatggaagttgcatgttcatgtttaagcagttactgtaacaagaagtttaaagttaattatatcagtttcctaatgcttcatgataggcaactttacccattttgaatgccttaatttaatttttttcaaagtctcagccctgtctgtattaaaaaacaaaaaaagcgtttaccagctcttaggatgtaaactagctttgtggaagataaatcgtgcactatttttacacataaatagttatatcaatgtcagcctattttgattaacaaatgtttttaaagtattattggttatagaaacaataatggatggtgttggaactaatatatccttgatgtctgtctattattcattcaactctttttacagacctcagtattagtctgtgactacaaaatattttatttgctttaaatttgctggctaccctagatgtgtttttattcctggtaaagacatttgtgattacattttcacacttaagattcaaaatttttcccaaatataaagaaaactaagacagactgtagatgcattttaaatatttaaatatgatcctcagacatgcagctgtgtgtggcagtattttagtaccgggttaagaaaactggcaactgggaagaagtggcctcaaaggcacttaatttgatttttattttttaaatgctgtcaaagttacagtttacgcaggacattcttgccgtattctcatgatcccagataagtgtgtgttttatactgcaacaatatgcagcaatggtaagcgtaaagttttttttttgtttttgtttttttttatattatgaagtcttttaacagtctctctttatataaatacacagagtttggtatgatatttaaatacatcatctggccaggcatggtggcttacgcctgtaatcctagcactttgggaggccaagacgggcggatcacctgaggtgaggagttcaagaccagcctgcccaacatagtgaaactccgtctctaccaatatacaaaaattagccgggcatgatggtggtggcctgtaatcccagctacttgggaggctgagacaggagaatcgcttgaacccaggagacggtggttgcagtgagcgaagatcgagccactgcactccagcctgggcagctgaacaagactccgtctc

SEQ ID NO: 29547 - DNA, 7250 bp, Homo Sapiens
ccttggccgagaccggtcctctgcggagagggccccgccctctgtgaaggcccgcccgggaattggcggcggcgctgcagccatttccggtttcggggaggtgggtggggtgcggagcgggacttggagcagccgccgccgctgccaccgcctacagagcctgccttgcgcctggtgctgccaggaagatgcggccggagcccggaggctgctgctgccgccgcacggtgcgggcgaatggctgcgtggcgaacggggaagtacggaacgggtacgtgaggagcagcgctgcagccgcagccgcagccgccgccggccagatccatcatgttacacaaaatggaggactatataaaagaccgtttaatgaagcttttgaagaaacaccaatgctggttgctgtgctcacgtatgtggggtatggcgtactcaccctctttggatatcttcgagatttcttgaggtattggagaattgaaaagtgtcaccatgcaacagaaagagaagaacaaaaggactttgtgtcattgtatcaagattttgaaaacttttatacaaggaatctgtacatgaggataagagacaactggaatcggccaatctgtagtgtgcctggagccagggtggacatcatggagagacagtctcatgattataactggtccttcaagtatacagggaatataataaagggtgttataaacatgggttcctacaactatcttggatttgcacggaatactggatcatgtcaagaagcagccgccaaagtccttgaggagtatggagctggagtgtgcagtactcggcaggaaattggaaacctggacaagcatgaagaactagaggagcttgtagcaaggttcttaggagtagaagctgctatggcgtatggcatgggatttgcaacgaattcaatgaacattcctgctcttgttggcaaaggttgcctgattctgagtgatgaactgaatcatgcatcactggttctgggagccagactgtcaggagcaaccattagaatcttcaaacacaacaatatgcaaagcctagagaagctattgaaagatgccattgtttatggtcagcctcggacacgaaggccctggaagaaaattctcatccttgtggaaggaatatatagcatggagggatctattgttcgtcttcctgaagtgattgccctcaagaagaaatacaaggcatacttgtatctggatgaggctcacagcattggcgccctgggccccacaggccggggtgtggtggagtactttggcctggatcccgaggatgtggatgttatgatgggaacgttcacaaagagttttggtgcttctggaggatatattggaggcaagaaggagctgatagactacctgcgaacacattctcatagtgcagtgtatgccacgtcattgtcacctcctgtagtggagcagatcatcacctccatgaagtgcatcatggggcaggatggcaccagccttggtaaagagtgtgtacaacagttagctgaaaacaccaggtatttcaggagacgcctgaaagagatgggcttcatcatctatggaaatgaagactctccagtagtgcctttgatgctctacatgcctgccaaaattggcgcctttggacgggagatgctgaagcggaacatcggtgtcgttgtggttggatttcctgccaccccaattattgagtccagagccaggttttgcctgtcagcagctcataccaaagaaatacttgatactgctttaaaggagatagatgaagttggggacctattgcagctgaagtattcccgtcatcggttggtacctctactggacaggccctttgacgagacgacgtatgaagaaacagaagactgagcctttttggtgctccctcagaggaactctccctcacccaggacagcctgtggcctttgtgagccagttccaggaaccacacttctgtggccatctcacgtgaaagacattgcctcagctactgaaggtggccacctccactctaaatgacattttgtaaatagtaaaaaactgcttctaatccttcctttgctaaatctcacctttaaaaacgaaggtgactcactttgctttttcagtccattaaaaaaacattttattttgcaaccattctacttgtgaaatcacgctgaccctagcctgtctctggctaaccacacaggccattcccctctcccagcaccttgcagacttgggcccatcaagagctactgctggccctggctccgcagcctggatacttacctggccctcctccctagggagcaagtgccttccacttacttcccatccaggtctcagaggtctcaaggccaaccttggaatccttatttaaccattcaagtaatcaacggaagttttcaccctttaatcttaagtttagccttttaagaaaaacagtaagcgatgactgctgaaaggctcattgtgtaatctcccaagggtttggtcttattccattttcttctggtcaccagatgatttcttcctttaccatcaaatacttcttcataatggtcacagtctgaggatgtgcgcaaattctggttcttcccaagctctaaccgtaacacgtcccaccccctttttaaagcacttactgttttcagagcacccatatcccaccctggtgagaaggccactctcacatctgagtgttgggtacaaagctgctccgtagagtgatgtgcactcctggtgggtgaggggcaggggcagtggcagtgtgcaaagaattgattactccttgcagagcctgtggcttgcatttcctactgctttctacgtttgaaaattatgacagtctctggctaggtctgggtccagattaggatttaaactgataaaggaaactgttggtaaatcctctgctcagaaagcatttatcatgttcctatttaaggattaggtttattaatttaggcctcttagaagctaacccacttaaatattactcttctgaatgctagttctcttttattcttgatgtcctaagtcaattgaatctggcatctggggctagggtctgcctgtctacatattttttatttttttctgagaaattctgaacacatagatctctttcctaaactgacattttctattttgactgttttcatactataaccaggtaaagggacttctttcagagagctttatactgcctgaccaaagaacaaatctgaaaatcaccattttaaagttattttttcagttgaaccaaagtttaagtgaagaggacttttggcatattatacccaggatcagtttgtctttttgtatccatcaagtattacaggagaaggattgggaacagaatggaaaaacagtgtatgaaagtcatgttacaggccgagtgcggtggctcacacctgtaatcctagcactttgggaggctgaggcaggtggctcacttgaggtcaggaattcaagaccagcctggccaacatggtgaaaccccgtctctactaaaaagacaaaaaattagctgggcgtggtggcgggcacctataatcccacctacttggtaggctgaggcaggagaatcgcttgaacccaggaggcggaggttgcagtgagacgagattgtgccactgcactctagcctgggtgacagagcaaaactgtgtctcaaaaaaaaaagtcatgttacacatttaagtttttgaaattgctccttttatcggtaaagattctcaatccaaattctcctgggtgtgttgtcatcagctgtgatatgtttgtgcacattacgtatagcagaggatgtaagcaatattattgtttgtgaagttttgtttttaatgtcttgagtatgagttatgtttagtcactgtcagcatctgagaactttaataagcccttgagatattccaaagttttattttacttttttaaagaacagaaaaagatgaatgaaagaaccaaggagagatgcagagactatatttagcatgtataggttaaagtaagaaggaggttgtggtaactaaataggagtcctataaaatcaaatacattgtcaaccttttctgcacatctagtttcctaccatagaatcccactggaataccacatagcttttgcactgcagttactatttactaatgtaaacgtagggtttgtaaaagtcacaaacttataagcaatgaacttacctgctagtctttttattttggcttgcatgaagtcactgcaaattcaaatgtcagtaccggcatttaaaatatatctatatcactttgttggtacaaagttatttcaagataagtgtaattttgttacaagtttattttgaagagacaaatctcctgtgatctatgcaggacctctgtactttctaaagaacaaaatgttatgtagacattatacatggttggttgtctcttcttgaaactgtaatgtaaatctagggtccagtcatatcctaggtatcatcatttatccaagtacttggaggaatacaagtatatataaatacagtcattgagaataagtcgatttgaggcatacaagagtagtttcttacacagtttaacacggcctgattcaagactctgataggattcaaacagataccggttaaccatgactaccaaaactgatcatctgagtcgattgatagaggtgtgactagtccttagcactttttctcattcctctttttattcagcattgctgttacctatttcaggtttataagacctctttcagcagatcacatcagaagccaggaaatgcatagctaggagatgtcaaaagcccatatgaggagtggaccaagcagcagtggcggtttctcctcgcatctttttttttttaagctttaacttagcaggggcatggactttatagcactttttcaactttttgctttgctttggataagaaatccttacctttaaaaaaagcttctagtctccataacccccaaagtactgcttatttgtttgaagaatccagccatcgtagtgctttagtcactatcgtaaacattcatgatagggcaaggattttaaaacaggattcttgcttctgtagtcatcaaggtgaacagaagcatcctacacaaccactaagggctctatgtttgtgtcatgcctcttcaaacaccaaggagttgaacatgcttccagtgatttgtctccgtaatgccttcttcctttatttggcctttctttctttctgtaccttcaagttcttgatttttaaaattccaactctagagaaaaccaatatatggtggtgctgggctttgaagatagcatatcagacgccttggttctgtttgtacacttagccttacatttcaggaggaggcttttcattaggggcttaagctagctcctttggcttttaaaaaaaattttttttcaaatttcttcattacctaagggagcctgcatctaaatttctcaactagttcagcctagctgaattttctagtgtgtaatacactttgcttccttcttattggtgaaaaccagggggatgagtggcttccatggagagatttcctgatttctcagggaggaaaaaagtgatgacatttaccactacttttatgtttttcccctttttccaaattgataaggatttctggttcctagtgatccgggattgggcaacagtgcagaactgccagtcatgccgtaggccgtgaagaaagaatgtgagtaactgttgttttgcaaggatttgtagggttatgggcagttgttgtttgaagcattgctatgacctaattcccaaggtatctttcctctcttggtgttctaggtaagccaatgagctttaatctctacttgctataaccgtgtgcttagaaaaagaggtgagagtagtggttttccttcaaactgtccacattcatgaagattatgaattgttaggacagccagggcaagatagaccctgtctctacaaaaatttttttctaaattaaccgggcatggtggtgcctgcctgtagtcccacctgtgtgggagaatcacttgagcctgggaggtcaaggctgcagtgagccatgattgcacccctgcactccagcctgggtgacagagtgagaccctggctcaataagagggggaaaaaaaattgttaggagctgggtgcggatgcagcctgcaatcccagctacttgagaggctgaggccggaggattgcttaaacccaagaatttgagcgtagcctgggcaacacagcaagaccccatctaagaaaaaaatgttttttaaatcagcttagcccaaaggggttgtgaatggggaggtataaaaagcaaagattattttttggctactaagccaagaacttacagggattttttttttcagtcccagaacctacagataccctgctacttgcttcacgtggatgctcagtgcccagcagccatcttaatacattaaaccagtttaaaaaataccttccatgtggagaaaaacatgtctttttctcgcctcaactttatccacatgaaatgtgtgcccatggctgggcgcagtggctcacctgtaatcccaacactttgggaggctgaagcaggcagattgcttgaggccaggagttcgagaacagtctggccaacatggcgaaacctcatctctactaaaattacaaaaattagccgggcatggtggcacatgcctgtaatcccagctacgtcaggaggctgaggcacaggaattgcttgaacccaagaggcagaggatgcaatgagccaagatcacaccactgcactccagccttggcgacagagggagactctgtctcaaaaaaaaaaaaaaaaggtgtgcccaggcccctagccattgccatgtgcccagccagagagccaaattagagggctggcttccctatcacacagaataaatgctagtgctagccaatgatccctttgcttttaatgtatagaaaatactgttgttccttttgtcatttccagtgacatctgttttctaagcagctcttttctagggaggaaaccaaaggggctaggttaagaccctaatagaaatgttttttctaatctctggtgagtctggaagtgtcacattcacagtccacccttgggagtggcttggtggagctggggacaaggttttgtttactacatagtgcacatgataaatggccttaaactgtgattctttctggtaggataagttataataaactgaccctaaagaatgcaaaaaaaaaaaaaaaaaa

SEQ ID NO: 29548 - DNA, 1340 bp, Homo Sapiens
gcactgtctctatgctccccagcgtctagtctatttattgtcgcggggaagctgcggccgcctcgcacccggaacaacaaagcaaggaagacggagtccgagcctcgggggctcctagcaacgggccggggcgggagttccatggagactggggagcgcgcccgtctcatcctcatccttgtcctccagcttctccttcgcatccgacgcaaccggcagcagcgctgccgccgcgtcctcagccaccgctccctcttcccacggatgtgatcttcgtggtggaaagctaaattttaaaaccaccccaatggatgcagacagtgatgttgcattggacattctaattacaaatgtagtctgtgtttttagaacaagatgtcatttaaacttaaggaagattgctttggaaggagcaaatgtaatttataaacgtgatgttggaaaagtattaatgaagcttagaaaacctagaattacagctacaatttggtcctcaggaaaaattatttgcactggagcaacaagtgaagaagaagctaaatttggtgccagacgcttagcccgtagtctgcagaaactaggttttcaggtaatatttacagattttaaggttgtaaacgttctggcagtgtgtaacatgccatttgaaatccgtttgccagaattcacaaagaacaatagacctcatgccagttacgaacctgaacttcatcctgctgtgtgctatcggataaaatctctaagagctacattacagattttttcaacaggaagtatcacagtaacagggcccaatgtaaaggctgttgctactgctgtggaacagatttacccatttgtgtttgaaagcaggaaagaaattttataattcaccacttaattggttagaatctctaactgagcaccttttaaacctgctgcacattggactcaaaaggaaaactggaccaacaataattgaggaaatagactcttttattcattcacggctacagtgtaagctccagtccctttggattttattccaaaccttgctgtaatataaaaggaagtttacaagacatgatattgctgcttttacaaaaggacattctatttattttcgcagtaattctcatgtccccataagcagagctgtcacagtgtgcactaccttagattgttttattgtcgtcattgttatttttttccattttgagctaatgtgttttatttgtgaatagtcttttacatttttgtatgctgaatatgggcaccaaagaacctgtaaaagttatctttttcaattgaatgtgcacaaataaaagtttggaaaagataaaaaaaaaaaaaaaaaaaaa

SEQ ID NO: 29549 - DNA, 4562 bp, Homo Sapiens
agtggcgcggccggctgggtggcccgcgagctgcacccggatctgctccgcgggggcgacgtgagcgcgcaggggggcggcggcctcgcctcgtctctctctctgcgcctgggtcgggtgggtgacgccgagagccagagagatgtcggatttcgacagtaacccgtttgccgacccggatctcaacaatcccttcaaggatccatcagttacacaagtgacaagaaatgttccaccaggacttgatgaatataatccattctcggattctagaacacctccaccaggcggtgtgaagatgcctaatgtacccaatacacaaccagcaataatgaaaccaacagaggaacatccagcttatacacagattgcaaaggaacatgcattggcccaagctgaacttcttaagcgccaggaagaactagaaagaaaagccgcagaattagatcgtcgggaacgagaaatgcaaaacctcagtcaacatggtagaaaaaataattggccacctcttcctagcaattttcctgtcggaccttgtttctatcaggatttttctgtagacattcctgtagaattccaaaagacagtaaagcttatgtactacttgtggatgttccatgcagtaacactgtttctaaatatcttcggatgcttggcttggttttgtgttgattctgcaagagcggttgattttggattgagtatcctgtggttcttgctttttactccttgttcatttgtctgttggtacagaccactttatggagctttcaggagtgacagttcatttagattctttgtattcttcttcgtctatatttgtcagtttgctgtacatgtactccaagctgcaggatttcataactggggcattggtggttggatttcatcccttactggtctcaaccaaaatattcctgttggaatcatgatgataatcatagcagcacttttcacagcatcagcagtcatctcactagttatgttcaaaaaagtacatggactatatcgcacaacaggtgctagttttgagaaggcccaacaggagtttgcaacaggtgtgatgtccaacaaaactgtccagaccgcagctgcaaatgcagcttcaactgcagcatctagtgcagctcagaatgctttcaagggtaaccagatttaagaatcttcaaacaatacactgttaccttttgactgtacctttttctccagttactgtattctacaaatatttttatgttcaaaacacacagtacagacagcatggatatttcctgttcacttgtgcatgggctaaaaccaggaaaacttccttgtcttattactttacctaatagtttcttaatatttcagtgccccttgcagaaaaaatattacatgctaaataaatattctccatatttttgggggatgacattcagtgaattatttcagtggtgacccactgaaaattaataatggtacttatgattaaaaacgcatttaatactaactgcagtagttctttcaagaatctttagagataaggattgcacattggaaaagtaaaccatgtttcattcctttttccctatttatattgaaagaaataggccagcagagacttagggattttaaattggcttgctttttagctgtttcagtcaccagtgaagagcctatgtgcattttgtagtagataatgtaaaatttgtcatctttttcttttcttttttttagaatagctgatattttgataacaatctctaatttgcatgggcaccacatttcttatattaaaagaattagtgttttggcttctgtactgcttatggttgtaggattcaggggttaatggaatcacagaaatgatattctgcaagaatttcttttaaataaaaagtttgggggtgcaatataagaagtttatataatatgcagtacattatccaaaagagaaggtagttaatgcagtagaaagtagtggtaataattcctttttaaaaaaatttcggtagtcatatagtaacattttgctatatgaaaactttggtatattctgtggttacaactaagattgtgtctggcagctcttttttggggatgtgtgtgtgtgatttttaacagaggtattaaaggctagcctaactgttgtctaaaaagattgtacagtatttaagggattttccttttagcttttcatctccagtggcattaaacataaaaagaccctggcattttttcacatacttgaatccctaaatgcacctgtctttcactttttgagacagactgaatatatctaaaatttccagcaataaaaaaaaaagcatttaacttgcaccaagcaagaaaatataaatacagttaactgcattaagataatcacgttaaaattgttactatgcagcacagaacttcattcttatagtattcttgggttcaacctttgaatcaattttaccactgattaaataaatgactcaaagacatctgtaagtcatgctgctgtgttttgaaagtctttaactaaattaagattgcagaatgatagtgattattcaattagattttaagtaaggattgtgatattagaggctggaaatccttattttttaaaaaatcagataggcataaatagttaaatcactttcattctccccaaacctgtagttacagaaaaagttttatgctagaggtgggatgccaagttttcactatccatgaagcagcgctgcatgtcactaggtaacacagatccatccagatggtgtttacatttgatttatttgggatcttattgacatcaggtatacttggaagacatttcttttattcttcagcgtatgaatttaaagctattttttgtaaatatttctaatcagcgataatttctacctatgttctcaaccaacttagccagtttgtttttcagagcctgtagtcttattggaaatctattttatcagtgtgctttattgagtgtggattttgcatacattcaaaacattaaccacaaaatacagcaagtgcacctatattcaccattaacttatatcccaagtccattttttcctgtacactacaaacaaaagatatattagagacttttgaaaaatgctgaaatactttgcttcagaattggaatgtttatattatgtagaaatcttcaaaggtagcattattaaatagcaaagaataattagaacccacatatctttttttgtgtggatggggaaaatgttttaaaatccagttatttaatatgagtttgagagagaaaattgttttttaaaaatatatgtgcattgaaatgatggcaatgcttatagtatgatcaagtatgaaaggaactttaaattcttatatttacttttctctcagtaaattgttaaattttcactcagcaaaagattggcatttgttaagtgttctatatttagtactaaaatcacagtcatgaaatcatagtcataaaatggtcttcacacagcagtcatccgtgtcatttatcattttgtaatattaaattatggcaattttatttcaaactaaagtttgaacaccggaaagtcattactcagtgatttgtaatttgggacttggattatttatctagagatgtttgtatattttgtcagtaactaatactgcgctgccatcatggtgactgtcatggttctacagaaatgccctccatgtgtccctctaatgttgcatgtttcagtgggttggaagttttgtatatttattgtattaacacagagtgtcataaaataaaatgctgtttactggatgtttgtttgtataattttgaacactataatagcaattcagagacagacattgttaaaggtttgatgtatatagaaattccatgtttgattttttaaaatatgtgtataagtctgtcatgtgctaaacaaaataatatgaaagacctagttaaaaattctaaccaatgtaaaatgaccatttttctgttgcattagacctttacaggtaatggaacatgagcttcacccatattaaatattttggcccctttaaggtcaaaatacagatcatctagaagttagattcaaaatggaaaacctattcatggctcagatttttcattgtgggttaaaaatgggtgtctctgtactagtattgtatttattcaattgaacttgtattctgatttctatccttgctacctattgctgttttatgtactgatgaaagtacctatttgtgtatattggatttttcacttggttagctaaagaagatgtaaaaatatctaaaataatgttcatggtgaatcttattttgagaaatacatgttaaaaaaggaacagtattctttattttctgggtgttatatttaaaaaagcaagtttggatttttacacctaatttactaggaaaatattttattctgtaattcatgttaagattatgtatggtttgcattttaaggggatttatgttaggttaattagttgtttctgtaaatcatttgtaatagcatagtgctttttactcattgctgtatctttttctgaaaacactgttgttaacatctaaaaaaaaaaaaaaaa

SEQ ID NO: 29550 - DNA, 3337 bp, Homo Sapiens; identical to SEQ ID NO: 23287

SEQ ID NO: 29551 - DNA, 1809 bp, Homo Sapiens
cttgctgctggaaacgcagttccggttaggcggctgagtttgtttacgttgctaacagatctagcccctgctttccctagttccagttccaagatggggaaatccttcgccaacttcatgtgcaagaaagactttcatcctgcctccaaatccaatatcaaaaaagtatggatggcagaacagaaaatatcatatgataagaagaaacaagaagaattgatgcagcaatatcttaaagaacaagaatcatatgataatagattgcttatgggagatgaacgtgtaaagaatggccttaatttcatgtatgaagccccaccaggagctaaaaaagaaaacaaagagaaagaagaaacagaaggagagaccgaatacaaatttgaatggcagaaaggagccccacgagaaaaatatgccaaagatgacatgaacatcagagatcagccctttggtattcaggttcgaaatgtgaggtgcattaaatgtcacaaatggggtcatgtcaacacagatcgagaatgtcctttgtttggtctttctggaatcaatgcaagttcggttcccactgatggctcagggccatcgatgcacccctcggagctaatagcggagatgagaaacagtgggtttgcactgaaacgaaatgtactggggagaaacttgaccgcaaatgatccatcacaggagtatgttgcaagtgagggtgaagaagatccagaagttgaatttttaaagtcactaacaaccaaacaaaaacagaaacttctcaggaaattagatcgactggagaagaaaaaaaagaaaaaagatagaaaaaagaaaaagtttcagaagagcagaagtaaacacaaaaaacataagtcctcttcttcctcatcttcctcctcctcctcctcttcctctactgagacttcagaaagcagtagtgagagtgagagtaacaataaagaaaaaaaaatacaaaggaagaaaagaaagaaaaacaagtgttcagggcataacaacagtgattctgaagagaaggacaagtctaagaagagaaagcttcatgaagaactttctagcagtcaccataaccgggaaaaagccaaggaaaagcccaggttcttaaaacacgagagttctagggaggacagcaaatggagccattctgattctgacaaaaagtccagaacccataaacatagcccagagaagagaggctctgaaagaaaggaggggagcagcagaagccacggcagggaggaaaggagccggagaagccggagcagaagtcctggtagttacaagcaaagggagacaaggaaacgggcacagcgaaatcctggtgaagagcaaagcagaagaaatgacagcagaagccatggcacagacttgtatagaggagaaaaaatgtacagagagcacccaggaggtacacatactaaagtgacacaaagagaatgaagcagaagtagagaagaaagactgtatgtgacaattacctgggaataaaaatatctccacttttttattgaatacctttagcaaggggtaaattatgtactgttgtctttctaataaaaaagctcaattttaatttttcatctctagactgtcaattcaagtacaaaactacatgagtactataagaatgaattttgcaaatatttgtaagtaagctattttggggctgtggaaatattttctgttggtaactgtttcttgttccccataccagataaaaaccgcatataactctgtgacattttctttgttctgaaacatcattaaaagaatgacagtacattgaaaaaaaaaaaaaaaaaa

SEQ ID NO: 29552 - DNA, 2158 bp, Homo Sapiens
cgcggatagaggagcgggcgccgggaccgggaatccccgagctgcgccttctggggacgcggcccgggctacgtcggggccgtccgtggggagcggggtcctggaggctgcgcggggctgaggcggcctcgatttgggaactgcctgaagatgccggcctaagcctggagtccaggcatggacttccccacaatttcccgatccccttcggggcctccagccatggacttggaggggcccagggacattcttgtgccttcggaggacctcacccctgacagccagtgggaccctatgccaggaggccccggcagcctcagtcggatggaacttgatgagtcaagccttcaggagctggtgcagcagtttgaagctctgccaggcgatctggtgggcccatccccaggtggagccccctgtcccctacacattgccacaggccatggcctggcctcccaggagattgctgatgcccacgggctcctgtctgccgaagctggccgggatgacctgctgggcctcttgcactgcgaggaatgcccgccttcccagactggtcctgaagagcctctagagcctgccccccgactgttgcagccccctgaggacccagatgaggattctgactccccagaatgggtggagggggcctctgctgagcaggagggcagcaggagctcaagcagttccccggaaccctggctggagacggtgcctctagtcacacctgaagagccacccgctggtgcccagagccccgagaccctggcttcctaccctgccccccaggaggtgcctggtccctgtgaccatgaagacctcctggacggtgtcatatttggggccaggtacctggggtccacccagctggtgtcggaacggaacccgcccaccagcacgcgcatggcccaggcccgggaggccatggaccgcgtcaaggcccccgatggggagacccagcccatgacggaggtggacctgttcgtctccaccaagaggatcaaggtcttgacagcggactcccaggaggccatgatggaccacgccctgcataccatctcctacacagccgacatcggctgcgtgctggtgctgatggcgcggcggcggctggcacggaggccggcaccccaggaccacggccgccgcctctacaagatgctctgccacgtattctacgcggaggacgcccagctcatcgcccaggccattggccaggccttcgccgccgcctacagccagttcctacgggaaagcggtattgaccccagccaggtgggcgtgcacccgagcccaggcgcctgccacctccataatggggacctggaccacttctccaacagtgacaactgccgggaggtgcacctcgagaagcggcgaggggagggcctgggcgtggccctggtggagtcgggctggggctccctgctgcccacagccgtcatcgccaacctgctgcacggggggcctgctgagcgctcgggggccctcagcatcggggaccgcctgaccgccatcaacgggaccagcctggtggggctgcccctggctgcgtgccaggccgctgtccgcgagacgaagtcgcagacgtcggtgacactcagcatcgtccactgccctcccgtcaccaccgccatcatccaccggccccacgcccgcgagcagctgggcttctgcgtggaggacggcatcatctgcagcctcctccgtggtggcatcgccgagcgtgggggcatccgcgtcggccaccgcatcattgagatcaatgggcagagtgtggtggccacgccacacgcccgcatcatcgagctgctcaccgaggcctatggcgaggtgcatatcaagacgatgccagctgccacatatcgcctccttacaggccaggagcagcccgtgtacctgtgaccacctcatcccttgcctgccactgtgccttcgcctccatggccccggagccccatcctgggcctgccctggctggccaggaccccagcggttcttggtcctgtatgatttcctaatataaaaacagtaaaagcttatgcatttggcaaagtctcggatcagggtctacgggaccgaggaccttgtccttcctggaagccactagaagccggtgctgtgaaaatactctgtttattaaagaccaggcggaggg

SEQ ID NO: 29553 - DNA, 1859 bp, Homo Sapiens
cgcaagcagctggatctccggtaactgagacatagggtataactgttgtcgcggcggaggaagtgaggacggcgccaagggccttccgggccagtgttggatccctgtagtttgtgaagatggtgttgctaacaatgatcgcccgagtggcggacgggctcccgctggccgcctcgatgcaggaggacgaacagtctggccgggaccttcaacagtatcagagtcaggctaagcaactctttcgaaagttgaatgaacagtcccctaccagatgtaccttggaagcaggagccatgacttttcactacattattgagcagggggtgtgttatttggttttatgtgaagctgccttccctaagaagttggcttttgcctacctagaagatttgcactcagaatttgatgaacagcatggaaagaaggtgcccactgtgtcccgaccctattcctttattgaatttgatactttcattcagaaaaccaagaagctctacattgacagtcgtgctcgaagaaatctaggctccatcaacactgaattgcaagatgtgcagaggatcatggtggccaatattgaagaagtgttacaacgaggagaagcactctcagcattggattcaaaggctaacaatttgtccagtctgtccaagaaataccgccaggatgcgaagtacttgaacatgcgttccacttatgccaaacttgcagcagtagctgtatttttcatcatgttaatagtgtatgtccgattctggtggctgtgaaataatgaatacagtcactggtaagggagaacctagaacccagtaggtgtatattttcaggaaactgagctcacagagatgtgtattagaatccaagtggaacttctgcctctaaagaccttgcaagaaaagagatgccctgaaaatgaaaggttgcacctcatttaatgaagcttaaccctatgtagaaagtctctttcgggggcagaggctttctctgggtgccaagccatatatattagggaatagtagattgttaatttcgttttttccctcccagtgcattttaaaaacagcactggctggggcattctcattctctgatggagccatcaatgagatttaacttagtcaacctgtgctagcaacattctgaaattccttcaaagaaggcagtcctttgggaaggtgttttttttttttttttttttttgactctaatcaacattccttttgttggtgacatttgtgattttcagtaatctgagtttttgatggccttttaaacaagactccagtatgtgaaggttaattgctgtgctccacagatctcgtctattggcccctgtagaaagttaacctttgttgttttccttttataatttgcttattgcacaattgctttagggtaagtgaattatattaagatgccttgaaattatagcactccttgattaagaagctaaaatgtttctctcatttactccttaaacaaaagacttaaattagtttgggtcattattacttttattttgcagcatttggtttgttattagcgtaagagcaagtataggatatggagaggcccctggcttcatgagaacaaaggcaggcccaggttataattacagctttctcctgccccttctttactttctctaccacagttttctccactgtttgttttcctcttgccacaatttgctaacatttaaaaaattttcctgcacccagtagtttcatatcctgtagacatcctcttaggacattctcaaatttcaaaataaaaaatattcatctatgtagttaattaaagttaaagtttttgcagatcaactactcaaactactaaatacatttacctgagaaaaa

SEQ ID NO: 29554 - DNA, 5801 bp, Homo Sapiens
gagcgagagcgcgaaggaaatctggccgccgccgccgcgagcgctcccgaatttttacttgttcctgcaaagctgctggagctcagaagctgattctatcacattgtaagatgcctttggataattctacagtcctcttaaatgaatctttagaacttggcaagtctcactagataccttcaatcatcattttgagctcaaagaattctgagacttatggttggtcatatagaagagtaccttgaacctatagtttcctgaagaatcagtttaaaagatccaaggagtacaaaaggagaagtacaaatgtctactacaagacgaaaacgtagtatgttatgttgtttaccgtaagctgtagtaaaatgagctcgattgttgacagagatgacagtagtatttttgatgggttggtggaagaagatgacaaggacaaagcgaaaagagtatctagaaacaaatctgaaaagaaacgtagagatcaatttaatgttctcattaaagaactgggatccatgcttcctggtaatgctagaaagatggacaaatctactgttctgcagaaaagcattgattttttacgaaaacataaagaaatcactgcacagtcagatgctagtgaaattcgacaggactggaaacctacattccttagtaatgaagagtttacacaattaatgttagaggctcttgatggtttttttttagcaatcatgacagatggaagcataatatatgtgtctgagagtgtaacttcattacttgaacatttaccatctgatcttgtggatcaaagtatatttaattttatcccagaaggggaacattcagaggtttataaaatactctctactcatctgctggaaagtgattcattaaccccagaatatttaaaatcaaaaaatcagttagaattctgttgtcacatgctgcgaggaacaatagacccaaaggagccatctacctatgaatatgtaaaatttataggaaatttcaaatctttaaacagtgtatcctcttcagcacacaatggttttgaaggaactatacaacgcacacataggccatcttatgaagatagagtttgttttgtagctactgtcaggttagctacacctcagttcatcaaggaaatgtgcactgttgaagaacccaatgaagagtttacatctagacatagtttagaatggaagtttctgtttctagatcacagggcaccacccataatagggtatttgccatttgaagttctgggaacatcaggctatgattactatcatgtggatgacctagaaaatttggcaaaatgtcatgagcacttaatgcaatatgggaaaggcaaatcatgttattataggttcctgactaaggggcaacagtggatttggcttcagactcattattatatcacttaccatcagtggaattcaaggccagagtttattgtttgtactcacactgtagtaagttatgcagaagttagggctgaaagacgacgagaacttggcattgaagagtctcttcctgagacagctgctgacaaaagccaagattctgggtcagataatcgtataaacacagtcagtctcaaggaagcattggaaaggtttgatcacagcccaaccccttctgcctcttctcggagttcaagaaaatcatctcacacggccgtctcagacccttcctcaacaccaaccaagatcccgacggatacgagcactccacccaggcagcatttaccagctcatgagaagatggtgcaaagaaggtcatcatttagtagtcagtccataaattcccagtctgttggttcatcattaacacagccagtgatgtctcaagctacaaatttaccaattccacaaggcatgtcccagtttcagttttcagctcaattaggagccatgcaacatctgaaagaccaattggaacaacggacacgcatgatagaagcaaatattcatcggcaacaagaagaactaagaaaaattcaagaacaacttcagatggtccatggtcaggggctgcagatgtttttgcaacaatcaaatcctgggttgaattttggttccgttcaactttcttctggaaattcatctaacatccagcaacttgcacctataaatatgcaaggccaagttgttcctactaaccagattcaaagtggaatgaatactggacacattggcacaactcagcacatgatacaacaacagactttacagagtacatcaactcagagtcaacaaaatgtactgagtgggcacagtcagcaaacatctctacccagtcagacacagagcactcttacagccccactgtataacactatggtgatttctcagcctgcagccggaagcatggtccagattccatctagtatgccacaaaacagcacccagagtgctgcagtaactacattcactcaggacaggcagataagattttctcaaggtcaacaacttgtgaccaaattagtgactgctcctgtagcttgtggggcagtcatggtacctagtactatgcttatgggccaggtggtgactgcatatcctacttttgctacacaacagcaacagtcacagacattgtcagtaacgcagcagcagcagcagcagagctcccaggagcagcagctcacttcagttcagcaaccatctcaggctcagctgacccagccaccgcaacaatttttacagacttctaggttgctccatgggaatccctcaactcaactcattctctctgctgcatttcctctacaacagagcaccttccctcagtcacatcaccagcaacatcagtctcagcaacagcagcaactcagccggcacaggactgacagcttgcccgacccttccaaggttcaaccacagtagcacacgtgcttcctctcttgacatcaagggaggaaggggatggcccattaagagttactcagatgacctgaggaaaggagggaaagttccagcagtttcatgagatgcagtattgagtgttctagttcctggaattagttggcagagaaaatgctgcctagtgctacagatgtacattaaataccagccagcaggaggtgatcataggggcatagccagttctgacagtgttttaggtgcctggatattttttgatggaaaaagaatatattgccaaatattaagaagctcagctatgaaatgacctccagggaatcagaaaggcactaatgatgttagtaacttttagtggttctgtgcctcttatcaagtgttacagaggacataccactgccatgtcaggggtttgcttacagtgatgccatgaagacagtccagtagacttggtagcgaccccctcccccaacccctctcccttttcagataatgatggaacagtaattactttcagaatgttgtgtgggttcaaattctctatgtacagatgatgtaaaaatatgtatatgtctagataaaaggagagaaagcaaaacattttgtatgctgcatgaaagcgttatctcttccttacaggtgtgagcacctttcctgaaattctgacaccatgtgcaaactgatccatcctgtttttccttttgtttacaacacagtagtgttctgttcacttttccggggcacaagtttttttgttcatactttggctgtgatgtcacagtttgttcagtgaggtatgatgtgctgctgggaatggattttttttttcaggttaaattattgatacaacaggattttcaagttattcagaaatatccctcatttcattatttttcaattatgtttgaaaataggatttgcactgctttattttaggtggctgggagttttgattgcatattttgttatagttcatagttggaaatatttgcgtaaatggttttcaacaagcctgaaagtaatttcaagaatgtttcagttatagaggtaaaatttgcacacaaaacatcttaggcactttttaacattctcaatcatgggaattttaacttttgggatttgttgaaatcttttttattatccttcacaatttcaatgcttcttttagtcagaaatgattcagggttatttgaggggaaaaaaccccatagtgccttgattttaattcaggtgataactcaccatcttgaagtcattgtccggtttccgtagcagttttgaaaccttagtacctttttaacagcatgtgggtgtcagtgtcattattagtctcctaataagttcctctgaagactgctatcagtctcttggactggaggtacaaataatttagaaataaaagatgataacctaacactatcatagttattaatgtgatcctaaaattgtttcctaaatcagcatttttctttagtcatttaagaatttaccagaaatatttgctcaatatgatcttgatattcctacaaagaaaaaagaaggggtagggatttggctatgccttcactacaacattagaatattgtaactcacatgccttctaaacgtgaactaagatttcctttggcaatatcatattctaaaagtaataaattccaatacaagttacatacatttaaaaaacattttacagattttatggtactaatgaaatttacagtgatagaacaaaagaggattagtagaaaatacattattagaatataaaaaatgttattactgaggaaagggaggagaggacaagtgtaataaatcaaaattgacctcaaaagaaaatgtgtaacagagttgaggttgttaaaacagaaaaggttctgaataatgaagattaacctaatgcagaattgctaggtaaagaggtcaggggaatgctaagccagttcttaagacttctctgtcctctgctttgctgttatccttaaggcatatactttgtctttctgcagaaaattctacctggctacaattactttgaacattaatgttgaaaaagaaaacaaccaaagaaaattggtacttacccttctacaaaagaagtgtgactagatatcaatcagtaattaacatatcaaggagctcttctagctaaatgaccatccagtagagatttcccacattcccatgaatatcaagaatagttgtcagaatatgtatgtacctgagcatatgtacacagacaagggggatgttgtggaatatggcaatagcattgttcttctcccctttcaaattgcctttcttgaccttatgccattccatatatatctgagttgtgcctcatttatttattggcaatacctagtgatacggatttagctaacaaaagatatgaagaactattatattgaggcctgtcctctacataccacacttaaaagatggtgaactgtgagtactacttaggttgacagcaacaaagcataagacaagccccaggtaaacgtctaaactgtttactcacattgtcctactccagccccttcaattatttcccatctccacaaatagtcgggggaaaaaattaaaattttcctttatgattcttactgttcttcgcagctcatcttttcctgcttagaattaaccattgctaatttaaaggagcagctagctgcttttctgtcagtctgaagcgtagtagtggaagaggtagtaagcaccagctgcctctttgctgctttgttttcctcctgattctcttaaatttgggttgcaaagctatcccgccccccaccctgccccatgaaacttgagcattcaaatgaagattcagcagtgtctgttcttcatttctatagccaaagctgttagttaaaatcccaaatctatagcatttaaagataccaaatagaaacaccttccagcttt

SEQ ID NO: 29555 - DNA, 2531 bp, Homo Sapiens
agggagagaactctggaggaacgctgagctgagcagcaccgaggacagcgcccggcagcgcccgcgcccaggtctccctccgcagccctgactcgcgcacacgctgagcttttgctcactccccttcgcgcggacacagacacacgcatattcacacacccagacacacaccccgctgtacaatggcagaatcccacctgcagtcatccctcatcacagcctcacagtttttcgagatctggctccatttcgacgctgacggaagtggttacctggaaggaaaggagctgcagaacttgatccaggagctccagcaggcgcgaaagaaggctggattggagttatcacctgaaatgaaaacttttgtggatcagtatgggcaaagagatgatggaaaaataggaattgtagagttggctcacgtattacccacagaagagaatttcctgctgctcttccgatgccagcagctgaagtcctgtgaggaattcatgaagacatggagaaaatatgatactgaccacagtggcttcatagaaactgaggagcttaagaactttctaaaggacctgctagaaaaagcaaacaagactgttgatgacacaaaattagccgagtatacagacctaatgctgaaactatttgattcaaataatgatgggaagctggaattaactgagatggccaggttactaccagtgcaggagaattttcttcttaaattccagggaatcaaaatgtgtgggaaagagttcaataaggcttttgagctgtatgatcaggacggcaatggatacatagatgaaaatgaactggatgctttactgaaggatctgtgcgagaagaataaacaggatctggatattaataatattacaacatacaagaagaacataatggctttgtcggatggagggaagctgtaccgaacggatcttgctcttattctctgtgctggggataactagagttggtggccgcaaccacttgctagtgatacactgtatctaaaaaataactgtgcactataagggagtaggctgtattttcttttatatctgtaaatttaactgcatatagataattatccaggatgtgtggctcattcttttcagcttgtttctatactgtttgtaatatacagtttttgtaaccatatgattgaaaagaagaaagtctatgcttaggccagtcagtacacccaattttaaaaaataacatattcttgctttcacaaatatagttgaacaagatttccctaaaaattccaccaggattaatctctaaaattctagtctctgatttgcaaatgcacatttgtcactgaataatggaattatgtataacaagccaaacattcttattttagacaaccatagaactgtcccacaaaatatttctaagcttatttctaactattaggaggaatgtgcttttccatctaaaatactcaccaaaatatagttaattgtggctttatgaagttaacagtctcattacagatttagtttaccaatcaacagcatgtctactgcttggatccatacaaaactatcggttcaagttgatgtgacaagggaagggagcaccagatgacacataaatctgtctgattctatgcctgtatttccaacaaacttactgtcagagaatatgacctaaatccattttctaaactgttttcatgtgttgcaaattattctagtcaactgctgttttatgtcatactctgtgtaatctctgattaaatttaatatactgcatatcctggtgtctagtttgcatacttcctggattttctttctatgtagaactgttcatttccaccaagggtatctgctgcctctgaaaatatttttttctagctataacaactctattttttactacataattaaattttaatgtaaaattcatagcatcctgattattgaatgttatatcatcaatacttttgtgtattctgtggattctatatttcatattgagatcagcattcaaaatagttctatttctatctgcaaatagtttcaaatgagtttaaaaaaataacatctgaaaagaaatgctaatgtaatcatttatcttatctagcaagaagattctaaaacattctttaacatacatctaagtcagtttcacatatttgtagctagaatatcctatactggttatagttgatatgtaacagttggtgattttagatttctttgattgtgaaacagggagctatgagagatgtgtccatgtgaaatttacagttactgcctaggagttaatgatcgttctgggtcagcttgaatgtccccattctataaattcaacacttattttctgaattcataaaaataaccaaaaaatgtgagctataatgtttccctcaagaacaaacagaaacgagatttgccaaaaactaaaattcaacaaatgatgttgagtgggagattggctttgcctttagcgtgtaaatggaagcactgccattagactgaatttaactactaagaataaataaagaagaaaataacctt

SEQ ID NO: 29556 - DNA, 2611 bp, Homo Sapiens
cgcctctcccaaagtctagccgggcaggggaacgcggtgcattcctgaccggcacctggcgaggctcatgcgtcccgtgagggcggttcctcgagcctgggggcgctcagattgctttggagacgctgagagaacctttgcgagagcgccggttgacgtgcggagtgcggggctccgggggactgagcagcacgagaccccatcctcccctccgggttttcacactgggcgaagggaggactcctgagctctgcctcttccagtaacattgaggattactgtgttttgtgagagctcgctaggcgccctaagcaacagagttctgagaaatcgagaaacatgataaggaattggctgactatttttatcctttttcccctgaagctcgtagagaaatgtgagtcaagcgtcagcctcactgttcctcctgtcgtaaagctggagaacggcagctcgaccaacgtcagcctcaccctgcggccaccattaaatgcaaccctggtgatcacttttgaaatcacatttcgttccaaaaatattactatccttgagctccccgatgaagttgtggtgcctcctggagtgacaaactcctcttttcaagtgacatctcaaaatgttggacaacttactgtttatctacatggaaatcactccaatcagaccggcccgaggatacgctttcttgtgatccgcagcagcgccattagcatcataaaccaggtgattggctggatctactttgtggcctggtccatctccttctaccctcaggtgatcatgaattggaggcggaaaagtgtcattggtctgagcttcgacttcgtggctctgaacctgacaggcttcgtggcctacagtgtattcaacatcggcctcctctgggtgccctacatcaaggagcagtttctcctcaaataccccaacggagtgaaccccgtgaacagcaacgacgtcttcttcagcctgcacgcggttgtcctcacgctgatcatcatcgtgcagtgctgcctgtatgagcgcggtggccagcgcgtgtcctggcctgccatcggcttcctggtgctcgcgtggctcttcgcatttgtcaccatgatcgtggctgcagtgggagtgatcacgtggctgcagtttctcttctgcttctcctacatcaagctcgcagtcacgctggtcaagtattttccacaggcctacatgaacttttactacaaaagcactgagggctggagcattggcaacgtgctcctggacttcaccgggggcagcttcagcctcctgcagatgttcctccagtcctacaacaacgaccagtggacgctgatcttcggagacccaaccaagtttggactcggggtcttctccatcgtcttcgacgtcgtcttcttcatccagcacttctgtttgtacagaaagagaccggggtatgaccagctgaactagcacccagggacccagtgtacccagcctctggcctcgtgccctgctggggaaggcctcacccagcgaaggccggagaagcggttgggccctggcacacagggctggctcagtgtgcggacagaggagaccactctgctcctggggccagaggccattcaatagcctgccttcgtccgggcccctcctgggcctccccggccaggcacgtggcaccgtcgccttgacaccgccatctcttttctttaaggcttcaggcagcgcgcacaggctctggcagccgtctcaggcaggactgggcaccaagcttgcagccgaaggccttgccccaaactaccagcgtttctgcaagcagcttgaagggctgaccttgcagccgggtgagccaagggcactttgctgccaccgctgcattcccagagatcaagcagcccggtgccgtggccagtgaactcagaggtgctggtggacgggctaggactttggggttaggccatggggctctttctctgaaggccactttcctgacgtactctctgtacataactcagcgtccgtgactgcagtaacagccagccctacccagagtatttctgagccatgaggggcccaccagattggttctgaattggattcatgcccagcgcattagcatagtaactcctttcagattttttggagggacgtttggaagtggcttactctcttctgccctctctcctacctccaccttctcagatgagccccatctgagcacatccagctgctccttacccagcatctggagtacaggacatagctctctcctgctaccagtctgtgccttagaggtcgttaggcctgccaaacggcgaccagctcccctggagcgagggcaggccccttccctctctttccccagacacctacttgagactcaccaatttctggcctgttcaggagcctcagataagtatttgtacttgagaccacctcacacaatctgtatgggcccaaccctgatctcaaacctccttccctctgcccaaagctgtccttcctatggcaggaggggtgggggtcccaggacgtgcctcatacatgacttgagcttgtcagtccactgagtttccttctacgagatcaacgcgaggggcctgtatcttgaattaaagcctactcgcttcctttc

SEQ ID NO: 29557 - DNA, 8680 bp, Homo Sapiens
acggggcctgaagcggcggtaccggtgctggcggcggcagctgaggccttggccgaagccgcgcgaacctcagggcaagatgcttggaaccggacctgccgccgccaccaccgctgccaccacatctagcaatgtgagcgtcctgcagcagtttgccagtggcctaaagagccggaatgaggaaaccagggccaaagccgccaaggagctccagcactatgtcaccatggaactccgagagatgagtcaagaggagtctactcgcttctatgaccaactgaaccatcacatttttgaattggtttccagctcagatgccaatgagaggaaaggtggcatcttggccatagctagcctcataggagtggaaggtgggaatgccacccgaattggcagatttgccaactatcttcggaacctcctcccctccaatgacccagttgtcatggaaatggcatccaaggccattggccgtcttgccatggcaggggacacttttaccgctgagtacgtggaatttgaggtgaagcgagccctggaatggctgggtgctgaccgcaatgagggccggagacatgcagctgtcctggttctccgtgagctggccatcagcgtccctaccttcttcttccagcaagtgcaacccttctttgacaacatttttgtggccgtgtgggaccccaaacaggccatccgtgagggagctgtagccgcccttcgtgcctgtctgattctcacaacccagcgtgagccgaaggagatgcagaagcctcagtggtacaggcacacatttgaagaagcagagaagggatttgatgagaccttggccaaagagaagggcatgaatcgggatgatcggatccatggagccttgttgatccttaacgagctggtccgaatcagcagcatggagggagagcgtctgagagaagaaatggaagaaatcacacagcagcagctggtacacgacaagtactgcaaagatctcatgggcttcggaacaaaacctcgtcacattacccccttcaccagtttccaggctgtacagccccagcagtcaaatgccttggtggggctgctggggtacagctctcaccaaggcctcatgggatttgggacctcccccagtccagctaagtccaccctggtggagagccggtgttgcagagacttgatggaggagaaatttgatcaggtgtgccagtgggtgctgaaatgcaggaatagcaagaactcgctgatccaaatgacaatccttaatttgttgccccgcttggctgcattccgaccttctgccttcacagatacccagtatctccaagataccatgaaccatgtcctaagctgtgtcaagaaggagaaggaacgtacagcggccttccaagccctggggctactttctgtggctgtgaggtctgagtttaaggtctatttgcctcgcgtgctggacatcatccgagcggccctgcccccaaaggacttcgcccataagaggcagaaggcaatgcaggtggatgccacagtcttcacttgcatcagcatgctggctcgagcaatggggccaggcatccagcaggatatcaaggagctgctggagcccatgctggcagtgggactaagccctgccctcactgcagtgctctacgacctgagccgtcagattccacagctaaagaaggacattcaagatgggctactgaaaatgctgtccctggtccttatgcacaaaccccttcgccacccaggcatgcccaagggcctggcccatcagctggcctctcctggcctcacgaccctccctgaggccagcgatgtgggcagcatcactcttgccctccgaacgcttggcagctttgaatttgaaggccactctctgacccaatttgttcgccactgtgcggatcatttcctgaacagtgagcacaaggagatccgcatggaggctgcccgcacctgctcccgcctgctcacaccctccatccacctcatcagtggccatgctcatgtggttagccagaccgcagtgcaagtggtggcagatgtgcttagcaaactgctcgtagttgggataacagatcctgaccctgacattcgctactgtgtcttggcgtccctggacgagcgctttgatgcacacctggcccaggcggagaacttgcaggccttgtttgtggctctgaatgaccaggtgtttgagatccgggagctggccatctgcactgtgggccgactcagtagcatgaaccctgcctttgtcatgcctttcctgcgcaagatgctcatccagattttgacagagttggagcacagtgggattggaagaatcaaagagcagagtgcccgcatgctggggcacctggtctccaatgccccccgactcatccgcccctacatggagcctattctgaaggcattaattttgaaactgaaagatccagaccctgatccaaacccaggtgtgatcaataatgtcctggcaacaataggagaattggcacaggttagtggcctggaaatgaggaaatgggttgatgaactttttattatcatcatggacatgctccaggattcctctttgttggccaaaaggcaggtggctctgtggaccctgggacagttggtggccagcactggctatgtagtagagccctacaggaagtaccctactttgcttgaggtgctactgaattttctgaagactgagcagaaccagggtacacgcagagaggccatccgtgtgttagggcttttaggggctttggatccttacaagcacaaagtgaacattggcatgatagaccagtcccgggatgcctctgctgtcagcctgtcagaatccaagtcaagtcaggattcctctgactatagcactagtgaaatgctggtcaacatgggaaacttgcctctggatgagttctacccagctgtgtccatggtggccctgatgcggatcttccgagaccagtcactctctcatcatcacaccatggttgtccaggccatcaccttcatcttcaagtccctgggactcaaatgtgtgcagttcctgccccaggtcatgcccacgttccttaacgtcattcgagtctgtgatggggccatccgggaatttttgttccagcagctgggaatgttggtgtcctttgtgaagagccacatcagaccttatatggatgaaatagtcaccctcatgagagaattctgggtcatgaacacctcaattcagagcacgatcattcttctcattgagcaaattgtggtagctcttgggggtgaatttaagctctacctgccccagctgatcccacacatgctgcgtgtcttcatgcatgacaacagcccaggccgcattgtctctatcaagttactggctgcaatccagctgtttggcgccaacctggatgactacctgcatttactgctgcctcctattgttaagttgtttgatgcccctgaagctccactgccatctcgaaaggcagcgctagagactgtggaccgcctgacggagtccctggatttcactgactatgcctcccggatcattcaccctattgttcgaacactggaccagagcccagaactgcgctccacagccatggacacgctgtcttcacttgtttttcagctggggaagaagtaccaaattttcattccaatggtgaataaagttctggtgcgacaccgaatcaatcatcagcgctatgatgtgctcatctgcagaattgtcaagggatacacacttgctgatgaagaggaggatcctttgatttaccagcatcggatgcttaggagtggccaaggggatgcattggctagtggaccagtggaaacaggacccatgaagaaactgcacgtcagcaccatcaacctccaaaaggcctggggcgctgccaggagggtctccaaagatgactggctggaatggctgagacggctgagcctggagctgctgaaggactcatcatcgccctccctgcgctcctgctgggccctggcacaggcctacaacccgatggccagggatctcttcaatgctgcatttgtgtcctgctggtctgaactgaatgaagatcaacaggatgagctcatcagaagcatcgagttggccctcacctcacaagacatcgctgaagtcacacagaccctcttaaacttggctgaattcatggaacacagtgacaagggccccctgccactgagagatgacaatggcattgttctgctgggtgagagagctgccaagtgccgagcatatgccaaagcactacactacaaagaactggagttccagaaaggccccacccctgccattctagaatctctcatcagcattaataataagctacagcagccggaggcagcggccggagtgttagaatatgccatgaaacactttggagagctggagatccaggctacctggtatgagaaactgcacgagtgggaggatgcccttgtggcctatgacaagaaaatggacaccaacaaggacgacccagagctgatgctgggccgcatgcgctgcctcgaggccttgggggaatggggtcaactccaccagcagtgctgtgaaaagtggaccctggttaatgatgagacccaagccaagatggcccggatggctgctgcagctgcatggggtttaggtcagtgggacagcatggaagaatacacctgtatgatccctcgggacacccatgatggggcattttatagagctgtgctggcactgcatcaggacctcttctccttggcacaacagtgcattgacaaggccagggacctgctggatgctgaattaactgcgatggcaggagagagttacagtcgggcatatggggccatggtttcttgccacatgctgtccgagctggaggaggttatccagtacaaacttgtccccgagcgacgagagatcatccgccagatctggtgggagagactgcagggctgccagcgtatcgtagaggactggcagaaaatccttatggtgcggtcccttgtggtcagccctcatgaagacatgagaacctggctcaagtatgcaagcctgtgcggcaagagtggcaggctggctcttgctcataaaactttagtgttgctcctgggagttgatccgtctcggcaacttgaccatcctctgccaacagttcaccctcaggtgacctatgcctacatgaaaaacatgtggaagagtgcccgcaagatcgatgccttccagcacatgcagcattttgtccagaccatgcagcaacaggcccagcatgccatcgctactgaggaccagcagcataagcaggaactgcacaagctcatggcccgatgcttcctgaaacttggagagtggcagctgaatctacagggcatcaatgagagcacaatccccaaagtgctgcagtactacagcgccgccacagagcacgaccgcagctggtacaaggcctggcatgcgtgggcagtgatgaacttcgaagctgtgctacactacaaacatcagaaccaagcccgcgatgagaagaagaaactgcgtcatgccagcggggccaacatcaccaacgccaccactgccgccaccacggccgccactgccaccaccactgccagcaccgagggcagcaacagtgagagcgaggccgagagcaccgagaacagccccaccccatcgccgctgcagaagaaggtcactgaggatctgtccaaaaccctcctgatgtacacggtgcctgccgtccagggcttcttccgttccatctccttgtcacgaggcaacaacctccaggatacactcagagttctcaccttatggtttgattatggtcactggccagatgtcaatgaggccttagtggagggggtgaaagccatccagattgatacctggctacaggttatacctcagctcattgcaagaattgatacgcccagacccttggtgggacgtctcattcaccagcttctcacagacattggtcggtaccacccccaggccctcatctacccactgacagtggcttctaagtctaccacgacagcccggcacaatgcagccaacaagattctgaagaacatgtgtgagcacagcaacaccctggtccagcaggccatgatggtgagcgaggagctgatccgagtggccatcctctggcatgagatgtggcatgaaggcctggaagaggcatctcgtttgtactttggggaaaggaacgtgaaaggcatgtttgaggtgctggagcccttgcatgctatgatggaacggggcccccagactctgaaggaaacatcctttaatcaggcctatggtcgagatttaatggaggcccaagagtggtgcaggaagtacatgaaatcagggaatgtcaaggacctcacccaagcctgggacctctattatcatgtgttccgacgaatctcaaagcagctgcctcagctcacatccttagagctgcaatatgtttccccaaaacttctgatgtgccgggaccttgaattggctgtgccaggaacatatgaccccaaccagccaatcattcgcattcagtccatagcaccgtctttgcaagtcatcacatccaagcagaggccccggaaattgacacttatgggcagcaacggacatgagtttgttttccttctaaaaggccatgaagatctgcgccaggatgagcgtgtgatgcagctcttcggcctggttaacacccttctggccaatgacccaacatctcttcggaaaaacctcagcatccagagatacgctgtcatccctttatcgaccaactcgggcctcattggctgggttccccactgtgacacactgcacgccctcatccgggactacagggagaagaagaagatccttctcaacatcgagcatcgcatcatgttgcggatggctccggactatgaccacttgactctgatgcagaaggtggaggtgtttgagcatgccgtcaataatacagctggggacgacctggccaagctgctgtggctgaaaagccccagctccgaggtgtggtttgaccgaagaaccaattatacccgttctttagcggtcatgtcaatggttgggtatattttaggcctgggagatagacacccatccaacctgatgctggaccgtctgagtgggaagatcctgcacattgactttggggactgctttgaggttgctatgacccgagagaagtttccagagaagattccatttagactaacaagaatgttgaccaatgctatggaggttacaggcctggatggcaactacagaatcacatgccacacagtgatggaggtgctgcgagagcacaaggacagtgtcatggccgtgctggaagcctttgtctatgaccccttgctgaactggaggctgatggacacaaataccaaaggcaacaagcgatcccgaacgaggacggattcctactctgctggccagtcagtcgaaattttggacggtgtggaacttggagagccagcccataagaaaacggggaccacagtgccagaatctattcattctttcattggagacggtttggtgaaaccagaggccctaaataagaaagctatccagattattaacagggttcgagataagctcactggtcgggacttctctcatgatgacactttggatgttccaacgcaagttgagctgctcatcaaacaagcgacatcccatgaaaacctctgccagtgctatattggctggtgccctttctggtaactggaggcccagatgtgcccatcacgttttttctgaggcttttgtactttagtaaatgcttccactaaactgaaaccatggtgagaaagtttgactttgttaaatattttgaaatgtaaatgaaaagaactactgtatattaaaagttggtttgaaccaactttctagctgctgttgaagaatatattgtcagaaacacaaggcttgatttggttcccaggacagtgaaacaatagtaataccacgtaaatcaagccattcattttggggaacagaagatccataactttagaaatacgggttttgacttaactcacaagagaactcatcataagtacttgctgatggaagaatgacctagttgctcctctcaacatgggtacagcaaactcagcacagccaagaagcctcaggtcgtggagaacatggattaggatcctagactgtaaagacacagaagatgctgacctcacccctgccacctatcccaagacctcactggtctgtggacagcagcagaaatgtttgcaagataggccaaaatgagtacaaaaggtctgtcttccatcagacccagtgatgctgcgactcacacgcttcaattcaagacctgaccgctagtagggaggtttattcagatcgctggcagcctcggctgagcagatgcacagaggggatcactgtgcagtgggaccaccctcactggccttctgcagcagggttctgggatgttttcagtggtcaaaatactctgtttagagcaagggctcagaaaacagaaatactgtcatggaggtgctgaacacagggaaggtctggtacatattggaaattatgagcagaacaaatactcaactaaatgcacaaagtataaagtgtagccatgtctagacaccatgttgtatcagaataatttttgtgccaataaatgacatcagaattttaaacata

SEQ ID NO: 29558 - DNA, 3745 bp, Homo Sapiens
cgcaaagcaagtgggcacaaggagtatggttctaacgtgattggggtcatgaagacgttgctgttggacttggctttgtggtcactgctcttccagcccgggtggctgtcctttagttcccaggtgagtcagaactgccacaatggcagctatgaaatcagcgtcctgatgatgggcaactcagcctttgcagagcccctgaaaaacttggaagatgcggtgaatgaggggctggaaatagtgagaggacgtctgcaaaatgctggcctaaatgtgactgtgaacgctactttcatgtattcggatggtctgattcataactcaggcgactgccggagtagcacctgtgaaggcctcgacctactcaggaaaatttcaaatgcacaacggatgggctgtgtcctcatagggccctcatgtacatactccaccttccagatgtaccttgacacagaattgagctaccccatgatctcagctggaagttttggattgtcatgtgactataaagaaaccttaaccaggctgatgtctccagctagaaagttgatgtacttcttggttaacttttggaaaaccaacgatctgcccttcaaaacttattcctggagcacttcgtatgtttacaagaatggtacagaaactgaggactgtttctggtaccttaatgctctggaggctagcgtttcctatttctcccacgaactcggctttaaggtggtgttaagacaagataaggagtttcaggatatcttaatggaccacaacaggaaaagcaatgtgattattatgtgtggtggtccagagttcctctacaagctgaagggtgaccgagcagtggctgaagacattgtcattattctagtggatcttttcaatgaccagtacttggaggacaatgtcacagcccctgactatatgaaaaatgtccttgttctgacgctgtctcctgggaattcccttctaaatagctctttctccaggaatctatcaccaacaaaacgagactttgctcttgcctatttgaatggaatcctgctctttggacatatgctgaagatatttcttgaaaatggagaaaatattaccacccccaaatttgctcatgctttcaggaatctcacttttgaagggtatgacggtccagtgaccttggatgactggggggatgttgacagtaccatggtgcttctgtatacctctgtggacaccaagaaatacaaggttcttttgacctatgatacccacgtaaataagacctatcctgtggatatgagccccacattcacttggaagaactctaaacttcctaatgatattacaggccggggccctcagatcctgatgattgcagtcttcaccctcactggagctgtggtgctgctcctgctcgtcgctctcctgatgctcagaaaatatagaaaagattatgaacttcgtcagaaaaaatggtcccacattcctcctgaaaatatctttcctctggagaccaatgagaccaatcatgttagcctcaagatcgatgatgacaaaagacgagatacaatccagagactacgacagtgcaaatacgacaaaaagcgagtgattctcaaagatctcaagcacaatgatggtaatttcactgaaaaacagaagatagaattgaacaagttgcttcagattgactattacaacctgaccaagttctacggcacagtgaaacttgataccatgatcttcggggtgatagaatactgtgagagaggatccctccgggaagttttaaatgacacaatttcctaccctgatggcacattcatggattgggagtttaagatctctgtcttgtatgacattgctaagggaatgtcatatctgcactccagtaagacagaagtccatggtcgtctgaaatctaccaactgcgtagtggacagtagaatggtggtgaagatcactgattttggctgcaattccattttacctccaaaaaaggacctgtggacagctccagagcacctccgccaagccaacatctctcagaaaggagatgtgtacagctatgggatcatcgcacaggagatcattctgcggaaagaaaccttctacactttgagctgtcgggaccggaatgagaagattttcagagtggaaaattccaatggaatgaaacccttccgcccagatttattcttggaaacagcagaggaaaaagagctagaagtgtacctacttgtaaaaaactgttgggaggaagatccagaaaagagaccagatttcaaaaaaattgagactacacttgccaagatatttggactttttcatgaccaaaaaaatgaaagctatatggataccttgatccgacgtctacagctatattctcgaaacctggaacatctggtagaggaaaggacacagctgtacaaggcagagagggacagggctgacagacttaactttatgttgcttccaaggctagtggtaaagtctctgaaggagaaaggctttgtggagccggaactatatgaggaagttacaatctacttcagtgacattgtaggtttcactactatctgcaaatacagcacccccatggaagtggtggacatgcttaatgacatctataagagttttgaccacattgttgatcatcatgatgtctacaaggtggaaaccatcggtgatgcgtacatggtggctagtggtttgcctaagagaaatggcaatcggcatgcaatagacattgccaagatggccttggaaatcctcagcttcatggggacctttgagctggagcatcttcctggcctcccaatatggattcgcattggagttcactctggtccctgtgctgctggagttgtgggaatcaagatgcctcgttattgtctatttggagatacggtcaacacagcctctaggatggaatccactggcctccctttgagaattcacgtgagtggctccaccatagccatcctgaagagaactgagtgccagttcctttatgaagtgagaggagaaacatacttaaagggaagaggaaatgagactacctactggctgactgggatgaaggaccagaaattcaacctgccaacccctcctactgtggagaatcaacagcgtttgcaagcagaattttcagacatgattgccaactctttacagaaaagacaggcagcagggataagaagccaaaaacccagacgggtagccagctataaaaaaggcactctggaatacttgcagctgaataccacagacaaggagagcacctatttttaaacctaaatgaggtataaggactcacacaaattaaaatacagctgcactgaggcagcgacctcaagtgtcctgaaagcttacattttcctgagacctcaatgaagcagaaatgtacttaggcttggctgccctgtctggaacatggactttcttgcatgaatcagatgtgtgttctcagtgaaataactaccttccactctggaaccttattccagcagttgttccagggagcttctacctggaaaagaaaagaaatgaatagactatctagaacttgagaagattttattcttatttcatttattttttgtttgtttatttttatcgtttttgtttactggctttccttctgtattcataagattttttaaattgtcataattatattttaaatacccatcttcattaaagtatatttaactcataatttttgcagaaaatatgctatatattaggcaagaataaaagctaaagg

SEQ ID NO: 29559 - DNA, 3279 bp, Homo Sapiens
ccggctcgaagcgcaacgaggaagcgtttgcggtgatcccggcgactgcgctggctaatgcggtaccggctagcgtggcttctgcaccccgcactgcccagcaccttccgctcagtcctcggcgcccgcctgccgcctccggagcgcctgtgtggtttccaaaaaaagacttacagcaaaatgaataatccagccatcaagagaataggaaatcacattaccaagtctcctgaagacaagcgagaatatcgagggctagagctggccaatggtatcaaagtacttcttatgagtgatcccaccacggataagtcatcagcagcacttgatgtgcacataggttcattgtcggatcctccaaatattgctggcttaagtcatttttgtgaacatatgctttttttgggaacaaagaaataccctaaagaaaatgaatacagccagtttctcagtgagcatgcaggaagttcaaatgcctttactagtggagagcataccaattactattttgatgtttctcatgaacacctagaaggtgccctagacaggtttgcacagttttttctgtgccccttgttcgatgaaagttgcaaagacagagaggtgaatgcagttgattcagaacatgagaagaatgtgatgaatgatgcctggagactctttcaattggaaaaagctacagggaatcctaaacaccccttcagtaaatttgggacaggtaacaaatatactctggagactagaccaaaccaagaaggcattgatgtaagacaagagctactgaaattccattctgcttactattcatccaacttaatggctgtttgtgttttaggtcgagaatctttagatgacttgactaatctggtggtaaagttattttctgaagtagagaacaaaaatgttccattgccagaatttcctgaacaccctttccaagaagaacatcttaaacaactttacaaaatagtacccattaaagatattaggaatctctatgtgacatttcccatacctgaccttcagaaatactacaaatcaaatcctggtcattatcttggtcatctcattgggcatgaaggtcctggaagtctgttatcagaacttaagtcaaagggctgggttaatactcttgttggtgggcagaaggaaggagcccgaggttttatgttttttatcattaatgtggacttgaccgaggaaggattattacatgttgaagatataattttgcacatgtttcaatacattcagaagttacgtgcagaaggacctcaagaatgggttttccaagagtgcaaggacttgaatgctgttgcttttaggtttaaagacaaagagaggccacggggctatacatctaagattgcaggaatattgcattattatcccctagaagaggtgctcacagcggaatatttactggaagaatttagacctgacttaatagagatggttctcgataaactcagaccagaaaatgtccgggttgccatagtttctaaatcttttgaaggaaaaactgatcgcacagaagagtggtatggaacccagtacaaacaagaagctataccggatgaagtcatcaagaaatggcaaaatgctgacctgaatgggaaatttaaacttcctacaaagaatgaatttattcctacgaattttgagattttaccgttagaaaaagaggcgacaccataccctgctcttattaaggatacagtcatgagcaaactttggttcaaacaagatgataagaaaaaaaagccgaaggcttgtctcaactttgaatttttcagcccatttgcttatgtggaccccttgcactgtaacatggcctatttgtaccttgagctcctcaaagactcactcaacgagtatgcatatgcagcagagctagcaggcttgagctatgatctccaaaataccatctatgggatgtatctttcagtgaaaggttacaatgacaagcagccaattttactaaagaagattattgagaaaatggctacctttgagattgatgaaaaaagatttgaaattatcaaagaagcatatatgcgatctcttaacaatttccgggctgaacagcctcaccagcatgccatgtactacctccgcttgctgatgactgaagtggcctggactaaagatgagttaaaagaagctctggatgatgtaacccttcctcgccttaaggccttcatacctcagctcctgtcacggctgcacattgaagcccttctccatggaaacataacaaagcaggctgcattaggaattatgcagatggttgaagacaccctcattgaacatgctcataccaaacctctccttccaagtcagctggttcggtatagagaagttcagctccctgacagaggatggtttgtttatcagcagagaaatgaagttcacaataactgtggcatcgagatatactaccaaacagacatgcaaagcacctcagagaatatgtttctggagctcttctgtcagattatctcggaaccttgcttcaacaccctgcgcaccaaggagcagttgggctatatcgtcttcagcgggccacgtcgagctaatggcatacagagcttgagattcatcatccagtcagaaaagccacctcactacctagaaagcagagtggaagctttcttaattaccatggaaaagtccatagaggacatgacagaagaggccttccaaaaacacattcaggcattagcaattcgtcgactagacaaaccaaagaagctatctgctgagtgtgctaaatactggggagaaatcatctcccagcaatataattttgacagagataacactgaggttgcatatttaaagacacttaccaaggaagatatcatcaaattctacaaggaaatgttggcagtagatgctccaaggagacataaggtatccgtccatgttcttgccagggaaatggattcttgtcctgttgttggagagttcccatgtcaaaatgacataaatttgtcacaagcaccagccttgccacaacctgaagtgattcagaacatgaccgaattcaagcgtggtctgccactgtttccccttgtgaaaccacatattaacttcatggctgcaaaactctgaagattccccatgcatgggaaagtgcaagtggatgcattcctgagtcttccagagcctaagaaaatcatcttggccactttaatagtttctgattcactattagagaaacaaacaaaaaattgtcaaatgtcattatgtagaaatattataaatccaaagtaa

SEQ ID NO: 29560 - DNA, 2879 bp, Homo Sapiens
ggggcaagcccaagccgcagagggggccgccaccgcctcctgcctcctcttcgtctcctccccctcccccgtctgacgctgcctcctcgggaagggtgtttggagggcagcggccgccccaagccggagccccgcagcgcttcttatgatcagctcggtgtgtgtctcctcctaccgcgggcgcaagtcggggaacaagcctccgtccaaaacatgtctgaaggaggagatggccaagggcgaggcgtcggagaagatcatcatcaacgtgggcggcacgcgacatgagacctaccgcagcaccctgcgcaccctaccgggaacccgcctcgcctggctggccgaccccgacggcgggggccggcccgagaccgatggcggcggtgtgggtagcagcggcagcagcggcggcgggggctgcgagttcttcttcgacaggcacccgggcgtcttcgcctacgtgctcaactactaccgcaccggcaagctgcactgccccgcggacgtgtgcgggccgctcttcgaagaggagctcaccttctggggcatcgacgagaccgacgtggaaccctgctgctggatgacctaccggcagcaccgcgacgccgaggaggcgctcgacatcttcgagagcccggacggaggcggcagcggcgcggggcccagcgacgaggccggcgacgatgagcgggagctggccctgcagcgactgggcccccacgagggaggcgcgggccatggcgccgggtctgggggctgccgcggctggcagccccgcatgtgggcgctcttcgaggatccctactcctcccgggccgctagggtagtggcctttgcctctctcttcttcatcctggtctccatcaccactttctgcctggagacccatgaggcctttaatatcgaccgcaacgtgacagagatcctccgcgtagggaacatcaccagcgtgcacttccggcgggaggtagagacagagcccatcctgacctacatcgagggcgtatgtgtgctgtggttcacactggagttcctggtgcgcatcgtgtgctgccccgacacgctggacttcgtcaagaacctgctcaacatcatcgactttgtggccatcctgcccttctacctggaggtggggctgagcggcctgtcatccaaggcggcccgcgacgtgctgggcttcctgcgcgtggtgcgcttcgtgcgcatcctgcgtatcttcaagctcacacgccacttcgtggggctacgcgtgctgggccacaccctgagggccagcaccaatgagttcctgctgcttatcatcttcctggccctgggtgtgctcatctttgccaccatgatctactacgctgagcgcattggggccaggccctccgaccctcggggtaatgaccacaccgacttcaagaacatccccattggcttctggtgggctgtggtcaccatgacgacactgggctacggagacatgtaccccaagacgtggtcaggcatgctggtaggggcactgtgtgcactggctggcgtgctcaccatcgccatgccggtgcctgtcatcgtcaacaacttcggcatgtactactccctggccatggccaagcagaagctgcccaagaaacggaagaagcacgtgccacggccggcgcagctggagtcacccatgtactgcaagtctgaggagacttccccccgggacagcacctgcagtgataccagcccccctgcccgggaagagggtatgatcgagaggaaacgggcagactctaagcagaatggcgatgccaacgcagtgctgtctgatgaggagggagctggcctcacccaacccctggcctcctccccgacccccgaggagcgccgggccctgcgacgctccaccactcgagacagaaacaagaaggcagctgcctgcttcctgctcagcactggggactatgcctgcgccgatggtagtgtccggaaaggcacattcgtcctccgtgaccttccccttcagcattcacctgaggctgcatgccctccaactgctgggactctgttcctgccacattgaggaagggggctgggcacgacatggcatcatactcaggagccttcttcaccagctccttgggacaatggaatatcccagggtggtgacagcagatggagctacttgggggagagctcaagttggtcaggcaacagctggggtgatggcctgtgagccacaggccacatcaggaactttccccactgcctccatgcaaggctgcagagctatggtccctttctccactgcactggagctttgaagacctaagaggctagtggttcctggagctagtggttacctgaacagagacctgccaagacgccctctcgtccaactatgcccaggctgaagtcctcaccctctcttaaagcggcaccaacgtgagagagacaggcagacagacagaaagccagaggcttagggaaactctggaacccagacaagaatcttttcgctgggaaagactcagatatccttgtttgcacaggactggtggaaaatctcccatgcgaccctcggggcccagagccatctgggtctgatgttctgttccattgtacatcgaagagatatatatgcacatatagtatctatattcatacatattatactcttgtgtgtagtgcacgtgctattggtggtttgtcttctttgttaggctgtgtctccctaagcccttgccccacccagagtttcccgtccccttcactgatttctgttgtttctgctgactgtgtgggtggaatgtcccaagaaaagtgcatctgggaattgccagtccagctgggtagtcccaggctcctgtcttggggatgtttcccctgtcagcaagtaacctggtgaa

SEQ ID NO: 29561 - DNA, 5312 bp, Homo Sapiens
ggccgcggcggcggaggcagcagcggcggcggcagtggcggcggcgaaggtggcggcggctcggccagtactcccggcccccgccatttcggactgggagcgagcgcggcgcaggcactgaaggcggcggcggggccagaggctcagcggctcccaggtgcgggagagaggcctgctgaaaatgactgaatataaacttgtggtagttggagctggtggcgtaggcaagagtgccttgacgatacagctaattcagaatcattttgtggacgaatatgatccaacaatagaggattcctacaggaagcaagtagtaattgatggagaaacctgtctcttggatattctcgacacagcaggtcaagaggagtacagtgcaatgagggaccagtacatgaggactggggagggctttctttgtgtatttgccataaataatactaaatcatttgaagatattcaccattatagagaacaaattaaaagagttaaggactctgaagatgtacctatggtcctagtaggaaataaatgtgatttgccttctagaacagtagacacaaaacaggctcaggacttagcaagaagttatggaattccttttattgaaacatcagcaaagacaagacagggtgttgatgatgccttctatacattagttcgagaaattcgaaaacataaagaaaagatgagcaaagatggtaaaaagaagaaaaagaagtcaaagacaaagtgtgtaattatgtaaatacaatttgtacttttttcttaaggcatactagtacaagtggtaatttttgtacattacactaaattattagcatttgttttagcattacctaatttttttcctgctccatgcagactgttagcttttaccttaaatgcttattttaaaatgacagtggaagtttttttttcctctaagtgccagtattcccagagttttggtttttgaactagcaatgcctgtgaaaaagaaactgaatacctaagatttctgtcttggggtttttggtgcatgcagttgattacttcttatttttcttaccaattgtgaatgttggtgtgaaacaaattaatgaagcttttgaatcatccctattctgtgttttatctagtcacataaatggattaattactaatttcagttgagaccttctaattggtttttactgaaacattgagggaacacaaatttatgggcttcctgatgatgattcttctaggcatcatgtcctatagtttgtcatccctgatgaatgtaaagttacactgttcacaaaggttttgtctcctttccactgctattagtcatggtcactctccccaaaatattatattttttctataaaaagaaaaaaatggaaaaaaattacaaggcaatggaaactattataaggccatttccttttcacattagataaattactataaagactcctaatagcttttcctgttaaggcagacccagtatgaaatggggattattatagcaaccattttggggctatatttacatgctactaaatttttataataattgaaaagattttaacaagtataaaaaattctcataggaattaaatgtagtctccctgtgtcagactgctctttcatagtataactttaaatcttttcttcaacttgagtctttgaagatagttttaattctgcttgtgacattaaaagattatttgggccagttatagcttattaggtgttgaagagaccaaggttgcaaggccaggccctgtgtgaacctttgagctttcatagagagtttcacagcatggactgtgtccccacggtcatccagtgttgtcatgcattggttagtcaaaatggggagggactagggcagtttggatagctcaacaagatacaatctcactctgtggtggtcctgctgacaaatcaagagcattgcttttgtttcttaagaaaacaaactcttttttaaaaattacttttaaatattaactcaaaagttgagattttggggtggtggtgtgccaagacattaattttttttttaaacaatgaagtgaaaaagttttacaatctctaggtttggctagttctcttaacactggttaaattaacattgcataaacacttttcaagtctgatccatatttaataatgctttaaaataaaaataaaaacaatccttttgataaatttaaaatgttacttattttaaaataaatgaagtgagatggcatggtgaggtgaaagtatcactggactaggaagaaggtgacttaggttctagataggtgtcttttaggactctgattttgaggacatcacttactatccatttcttcatgttaaaagaagtcatctcaaactcttagttttttttttttacaactatgtaatttatattccatttacataaggatacacttatttgtcaagctcagcacaatctgtaaatttttaacctatgttacaccatcttcagtgccagtcttgggcaaaattgtgcaagaggtgaagtttatatttgaatatccattctcgttttaggactcttcttccatattagtgtcatcttgcctccctaccttccacatgccccatgacttgatgcagttttaatacttgtaattcccctaaccataagatttactgctgctgtggatatctccatgaagttttcccactgagtcacatcagaaatgccctacatcttatttcctcagggctcaagagaatctgacagataccataaagggatttgacctaatcactaattttcaggtggtggctgatgctttgaacatctctttgctgcccaatccattagcgacagtaggatttttcaaacctggtatgaatagacagaaccctatccagtggaaggagaatttaataaagatagtgctgaaagaattccttaggtaatctataactaggactactcctggtaacagtaatacattccattgttttagtaaccagaaatcttcatgcaatgaaaaatactttaattcatgaagcttactttttttttttggtgtcagagtctcgctcttgtcacccaggctggaatgcagtggcgccatctcagctcactgcaacctccatctcccaggttcaagcgattctcgtgcctcggcctcctgagtagctgggattacaggcgtgtgccactacactcaactaatttttgtatttttaggagagacggggtttcaccctgttggccaggctggtctcgaactcctgacctcaagtgattcacccaccttggcctcataaacctgttttgcagaactcatttattcagcaaatatttattgagtgcctaccagatgccagtcaccgcacaaggcactgggtatatggtatccccaaacaagagacataatcccggtccttaggtagtgctagtgtggtctgtaatatcttactaaggcctttggtatacgacccagagataacacgatgcgtattttagttttgcaaagaaggggtttggtctctgtgccagctctataattgttttgctacgattccactgaaactcttcgatcaagctactttatgtaaatcacttcattgttttaaaggaataaacttgattatattgtttttttatttggcataactgtgattcttttaggacaattactgtacacattaaggtgtatgtcagatattcatattgacccaaatgtgtaatattccagttttctctgcataagtaattaaaatatacttaaaaattaatagttttatctgggtacaaataaacaggtgcctgaactagttcacagacaaggaaacttctatgtaaaaatcactatgatttctgaattgctatgtgaaactacagatctttggaacactgtttaggtagggtgttaagacttacacagtacctcgtttctacacagagaaagaaatggccatacttcaggaactgcagtgcttatgaggggatatttaggcctcttgaatttttgatgtagatgggcatttttttaaggtagtggttaattacctttatgtgaactttgaatggtttaacaaaagatttgtttttgtagagattttaaagggggagaattctagaaataaatgttacctaattattacagccttaaagacaaaaatccttgttgaagtttttttaaaaaaagctaaattacatagacttaggcattaacatgtttgtggaagaatatagcagacgtatattgtatcatttgagtgaatgttcccaagtaggcattctaggctctatttaactgagtcacactgcataggaatttagaacctaacttttataggttatcaaaactgttgtcaccattgcacaattttgtcctaatatatacatagaaactttgtggggcatgttaagttacagtttgcacaagttcatctcatttgtattccattgattttttttttcttctaaacattttttcttcaaacagtatataactttttttaggggatttttttttagacagcaaaaactatctgaagatttccatttgtcaaaaagtaatgatttcttgataattgtgtagtaatgttttttagaacccagcagttaccttaaagctgaatttatatttagtaacttctgtgttaatactggatagcatgaattctgcattgagaaactgaatagctgtcataaaatgaaactttctttctaaagaaagatactcacatgagttcttgaagaatagtcataactagattaagatctgtgttttagtttaatagtttgaagtgcctgtttgggataatgataggtaatttagatgaatttaggggaaaaaaaagttatctgcagatatgttgagggcccatctctccccccacacccccacagagctaactgggttacagtgttttatccgaaagtttccaattccactgtcttgtgttttcatgttgaaaatacttttgcatttttcctttgagtgccaatttcttactagtactatttcttaatgtaacatgtttacctggaatgtattttaactatttttgtatagtgtaaactgaaacatgcacattttgtacattgtgctttcttttgtgggacatatgcagtgtgatccagttgttttccatcatttggttgcgctgacctaggaatgttggtcatatcaaacattaaaaatgaccactcttttaattgaaattaacttttaaatgtttataggagtatgtgctgtgaagtgatctaaaatttgtaatatttttgtcatgaactgtactactcctaattattgtaatgtaataaaaatagttacagtgacaaaaaaaaaaaaaaa

SEQ ID NO: 29562 - DNA, 4666 bp, Homo Sapiens
cgagactcagccagaggagtacggattaaggggccgaagaaagaggagtgaggcaggggagcgaggcggacgctccgagcgcatcggactcacctgggccggcggcgagcggcgagtacgagtggactcttgccctccgcagcatgcgccccgcctgctaagtcgccgccgtctcgccctcacctagcaccgccaatcccgcctggatggagtcccctctagggttcccattggctcctgtgagtgcttgggtgttcgggagcctgtttttggcggaggggaaccaacttttgaagttcgcccagaagactgcgttccagccccagttccccggcagcgggacccggcgaagacgcgaccgcggcgcgagtcaccatgggaagcaaaggtgtctaccagtaccactggcaaagccacaatgtcaagcacagtggtgtggacgacatggtgctactgtccaagatcacagagaactccatcgtggagaatctgaagaagagatacatggatgactacatttttacatatataggatctgtattaatctcagtcaaccctttcaagcagatgccatattttggggaaaaggaaattgaaatgtaccaaggagcggcacagtatgaaaacccaccacatatctatgcccttgcagataatatgtacagaaacatgatcattgacagagagaaccagtgcgtcattatcagtggtgaaagtggtgctggaaaaacagtggctgccaaatatatcatgagctacatctccagagtgtctggaggagggaccaaagtccagcacgtgaaggacattatcctgcagtccaacccgctgctggaggccttcgggaacgccaagaccgtccggaacaacaactccagccgatttggaaaatactttgaaatccagttcagtccaggtggggaaccagatggtggaaagatctccaacttccttctggaaaaatctagggtggtgatgaggaacccaggagagcggagttttcacatattttaccagctcatcgagggcgcctctgcagagcagaaacacagccttggcatcaccagcatggactattattactacctgagcctctcgggctcatacaaggttgatgacattgacgacaggcgggagtttcaggaaactctgcacgccatgaatgtgattgggatctttgcagaagagcaaacgctggtgttgcagatagtggcgggtattctccacctgggaaacatcagcttcaaagaagttggcaactacgcggctgtggagagtgaagagtttttagcttttcctgcatatctgctagggataaaccaggaccggttgaaagaaaagctaacaagccggcagatggatagcaagtggggaggcaaatccgaatccatccacgtgaccctcaacgtagagcaggcctgttacacccgggatgcgctcgccaaggccctgcacgcccgggtctttgatttcttggtagattccatcaataaagccatggagaaagaccatgaagaatacaacattggcgtcctagacatctatggctttgaaatattccagaaaaatggctttgaacagttttgtatcaattttgttaatgaaaaactgcagcagatttttattgaactgacattaaaggcagaacaggaagaatatgttcaagagggaataagatggacacccattgagtactttaataataaaatcgtatgtgacctcatagagaacaaagtgaaccctcctggcatcatgagcatcctggatgacgtgtgcgccacgatgcatgcggtgggtgagggggcagatcagacgctgctccagaaacttcagatgcagattgggagtcatgagcacttcaacagttggaaccaaggcttcatcattcatcattatgctgggaaggtatcctatgacatggatggcttttgtgaaaggaaccgggatgtgctttttatggatctcatcgagcttatgcagagcagcgagctgcctttcataaagtctttatttccggaaaatctgcaggctgacaagaaagggcgcccaactactgccggaagcaaaataaagaaacaagccaatgaccttgtgagcaccctgatgaaatgtacgccccactacattcgctgcatcaagccaaacgaaaccaagaagcccagagactgggaggaaagcagggtaaagcatcaagtcgaatatttgggtctgaaagagaacattcgagtgagaagagctggctatgcctatcggcgcatcttccaaaaattcctacagaggtatgccattctgaccaaagccacctggccttcttggcagggagaggagaagcaaggcgtcctgcacctgctgcagtcggtcaacatggacagcgaccagttccagctggggaggagtaaagtgttcatcaaagcccccgagtctctatttcttttagaagagatgagagagagaaagtatgatgggtatgctcgagtgatacagaaatcatggaggaaattcgtggcccggaagaaatacgttcaaatgagagaagaagcctcagacctcttattgaacaagaaggagagaaggagaaacagtattaacaggaactttataggggattatattgggatggaagagcacccagaactccagcagttcgtgggcaagagggagaagattgatttcgcagacacagtcaccaagtatgacaggaggttcaagggtgtaaagcgagacctgctccttaccccaaagtgcttgtacttaatcggacgagaaaaagtcaaacagggcccagacaagggcctggtgaaagaagtcctgaagcggaaaatcgagatagaacggatcttgtctgtgtccctcagtactatgcaggatgacatttttattctccatgagcaagagtatgacagtttgcttgaatctgtcttcaaaactgaattcctaagcctcttagcaaagcgttacgaggagaagacccagaagcaactacctctgaaattcagcaatacgcttgaactgaagttgaaaaaggaaaactggggccctggagtgcagggtgcgggctcccggcaagtgcagttccaccaagggtttggggacctggctgtcctcaagcccagtaacaaagtgctgcaggtcagcatcggacctggactgcccaagaactcccgtcctaccagaaggaacactacccaaaatacaggttattccagtgggactcaaaatgccaactacccagtgagagctgcccctcctcccccaggataccatcagaacggagtcatcagaaaccagtatgtgccatatccccatgctcctggaagccagaggtccattcagaaaagcctgtacacctccatggcccgcccgcccttgcctcggcagcagtctaccagttcagaccgagtgtcacagacgccagagagcctggatttcctcaaggtcccggaccagggagctgcaggggtcaggagacaaacaaccagtcggcctcccccagctgggggcagacccaagccccagcccaagcccaagcctcaggttccacagtgcaaggctttgtatgcctatgacgctcaggacacagacgaactcagctttaatgccaatgacattattgatattatcaaagaagatccttctggctggtggacgggtcgactacgaggcaagccagggctgttccccaacaactatgtgaccaagatctgaggtgcccgtgactctgacacatggggcagaggagctccaggcacagaccaggtgaggggatatttaggtgctccccttacaatccacaatgagcaattgcttctccaaggcctggagctattctggtaccttccccatggaggacactgaaaaggctgggttggggacagggagtatcactccataagtgatcctaaaaggtagcctcttcataggaaccaggaggacaaaaccaccatgcattaagatttatttattgtatttaaacctggtgagaggacaagtgaggtctgctcagaccttgtaggcttctatcaaaacagcaccctgcttgctcaccaggcctagagaatggctgtaggtggcggctgagaagtgcctttagttgaagagcacatttctttcatctctcttgtctatacctgatagacacattcctctctgccaccttccttcagggaggacccgccctctgcagactgggcttagcgtgagcaggcacttcccatgtacgtgccaagggtaagctggcctgctgagcccagggcgacagaggggcactggtttacactttgccgggaccatcagggccgccaagcaggtcaggggctgggggctggtcctgctggctttgatttctctgggtcttcaattagaatgtggctgggcccatattggtttgtgttaaatgctgtacttactacaagaatcttttttcaagcatgtacatttataaaaacaggatcatatactgtatatataaaaatcttgagatggtagaaacatgtatgaatgtactaagtagtattccactgtactcattcataaggtaggttttcttacaaaactcacaccaggtacttaaagatgtgctctgcttttttccaactacggagtgtcactgctttctaggtcagtccctgcagactcttctcaactctttccctataggaaacttact

SEQ ID NO: 29563 - DNA, 1491 bp, Homo Sapiens
ggagtgtctccgcccttcccgcctcccgtctccgagcttcttaaacacaggccttgggcctacggctctgggggtacttgggggggcgggggcaggtctgatgagtaacccctccccccaggttccagaggaagaagcctccacatctgtctgccggcccaagagttccatggcctccacttcccgccgccaacgccgagaacgtcgctttcgtcgttacttgtctgcaggacggctggtccgggcccaggccctcctccagcgacacccaggcctcgatgtagatgctgggcagcccccaccactgcaccgggcctgtgcccgccacgatgcccctgccctgtgcctgctgcttcggctcggggctgaccctgcccaccaggaccgccatggggacacggcactgcatgctgctgcccgccagggcccagatgcctacaccgatttcttcctcccgctgctaagccgctgtccctccgccatgggaataaagaataaggatggggagacccctggccaaattttgggctggggacccccctgggattctgctgaagaggaggaagaagatgatgcctccaaggagcgggaatggagacagaagctccagggtgagctggaggacgagtggcaggaagtcatggggaggtttgaaggtgatgcctcccatgaaacccaggaacctgagtccttctcagcctggtcagatcgcctggcccgggaacatgcccagaagtgccagcagcagcagcgagaagcagagggatcctgtcgacccccacgtgctgagggctccagccagagctggcgacagcaggaggaggagcagcggctcttcagggagcgagcccgggccaaggaggaagagctgcgtgagagccgagccaggagggcgcaggaggctctaggggaccgagaacccaagccaaccagggccgggcccagggaagagcaccccagaggagcggggaggggcagcctctggcgatttggtgatgtgccctggccctgccctgggggaggggacccagaggccatggctgcagccctggtggccaggggcccccctttggaggaacagggggctctgaggaggtacttgagggtccagcaggtccgctggcaccctgaccgcttcctgcagcgattccgaagccagattgagacctgggagctgggccgtgtgatgggagcagtgacagccctttctcaggccctgaatcgccatgcagaggccctcaagtgaccctagggaagaagcaagaaacttcggggctgcagcctcaggatgaggcagaaggaagggtaagggaaaggatggggaccacaaggaagagccaggtgctgctcagcagaggatatgggtgggagcgaaagttgtaacaagtgggggtggggggtgcgggccgccaccactgctccttgactctgccgtttcctaataagacctggttccacatctcaaaaaaaaaaaaaaaaaaaaaaaaaaaa

SEQ ID NO: 29564 - DNA, 1927 bp, Homo Sapiens
tgccagcccaagtcggaacttggatcacatcagatcctctcgagctccagcaggagaggcccttcctcgcctggcagcccctgagcggctcagcagggcaccatggcaagatcccttctcctgcccctgcagatcttactgctatccttagccttggaaactgcaggagaagaagcccagggtgacaagattattgatggcgccccatgtgcaagaggctcccacccatggcaggtggccctgctcagtggcaatcagctccactgcggaggcgtcctggtcaatgagcgctgggtgctcactgccgcccactgcaagatgaatgagtacaccgtgcacctgggcagtgatacgctgggcgacaggagagctcagaggatcaaggcctcgaagtcattccgccaccccggctactccacacagacccatgttaatgacctcatgctcgtgaagctcaatagccaggccaggctgtcatccatggtgaagaaagtcaggctgccctcccgctgcgaaccccctggaaccacctgtactgtctccggctggggcactaccacgagcccagatgtgacctttccctctgacctcatgtgcgtggatgtcaagctcatctccccccaggactgcacgaaggtttacaaggacttactggaaaattccatgctgtgcgctggcatccccgactccaagaaaaacgcctgcaatggtgactcagggggaccgttggtgtgcagaggtaccctgcaaggtctggtgtcctggggaactttcccttgcggccaacccaatgacccaggagtctacactcaagtgtgcaagttcaccaagtggataaatgacaccatgaaaaagcatcgctaacgccacactgagttaattaactgtgtgcttccaacagaaaatgcacaggagtgaggacgccgatgacctatgaagtcaaatttgactttacctttcctcaaagatatatttaaaccaacctcatgccctgttgataaaccaatcaaattggtaaagacctaaaaccaaaacaaataaagaaacacaaaaccctcagtgctggagaagagtcagtgagaccagcactctcaaacactggaactggacgttcgtacagtctttacggaagacacttggtcaacgtacaccgagacccttattcaccacctttgacccagtaactctaatcttaggaagaacctactgaaacaaaaaaaatccaaaatgtagaacaagacttgaatttaccatgatattatttatcacagaaatgaagtgaaaccatcaaacatgttccaaaagtaccagatggcttaaataatagtctggcttggcacaacgatgttttttttctttgagacagagtctctgttgcttgggctgcaatgcagtgatgcaatcttggctcactgcaacctccgcctcctgggttcaagtgattctcgtgcttcagcctcccaagtacctgggactacaggtgtgcaccaccacaccaggctaattttttgtgtatttttactagagacagggtttcaccatgttggccagcgtggtcttgaacgcctgacctcagatgatccacccaccttggcctcccaaagtgctgggattacaggcatgagccaccacggccagcccacaatgatattacaaacctattaaaaatgatacttagacagaattgtcagtattattcaagaacatttaggctataggatgttaaatgacaaaaggaaggacaaaaatatatatgtatgtgaccctacccataaaaaatgaaatattcacagaatcagatctgaaaacacatgtcccagactgcatactggggtcgtcatgaggtgtctccttccttctgtgtacttttccttgaatgtgcacttttataacatgaaaaataaaggtggggaaaaaagtctgaaga

SEQ ID NO: 29565 - DNA, 1077 bp, Homo Sapiens
tgtctccggccgatcgctcggcgctcgggtccgcggccgctgcggcgccgggcatttctccgcagctcggctcgcggccgcgcccgccgccgcccggcccgcgcccatgcaggccatcaagtgcgtggtggtcggcgacggcgccgtggggaagacatgcttgctgatcagctacacgaccaacgccttccccggagagtacatccccaccgtttttgacaactactctgccaacgtgatggtggacgggaaaccagtcaacttggggctgtgggacacagcgggtcaggaggactacgatcggctgcggccactctcctacccccaaactgacgtctttctgatctgcttctctctggtgagcccggcctccttcgagaatgttcgtgccaagtggtacccggaggtgcggcaccactgcccccacacgcccatcctcctggtgggcaccaagctggacctccgcgacgacaaggacaccattgagcggctgcgggacaagaagctggcacccatcacctacccacagggcctggccatggcccgggagattggctctgtgaaatacctggagtgctcagccctgacccagcggggcctgaagacagtgtttgacgaggcgatccgcgcggtgctctgcccgcccccagtgaagaagccggggaagaagtgcaccgtcttctagagccctggcccacccgagcctgagggctggcggggagcagccctggacgtgtccgctgttgtgttgagacgtgtggtgtccctgagtcggctgtggggagcggtgggggtgggccggggggaagcatggggatgaggctgggtggcaggatcctgtcctctctgccgcctcattctggggtgtggctccagccttccctggcccccgccggaggccgggagggagcagggtctccctcagggctgcaggggcaggtgcagggaagccccaggatgggcttccctggagggggagggtgggggggagttctgttccttgtgccccgaggtggggcagccccttctcattttatacaataaacattctccacctacaaaaaaaaaaaaaaaaaa

SEQ ID NO: 29566 - DNA, 6455 bp, Homo Sapiens
gaggaagcgattctggggtttctgtgttgaacggttcttgtccgcgaagatgcgcttcggcctctgtcaggggacttgaacgggcttagtgggcttcagccagcttttctccaccggttccccacggggaccccccccccccggccgttgcaatggcgggcgtggggccggggggctacgcggcggagttcgtgccaccgccagagtgccccgtctttgagccgagttgggaggagttcacagatccgctcagctttatcggccgcatccggcctttggcggagaaaaccggcatctgcaaaattcggccgcccaaggactggcagcctccatttgcctgtgaagtaaaaagctttcgtttcactccaagagtccagcgcctgaatgaacttgaggcaatgaccagagtgagattggatttcttggatcaactagcaaaattttgggaacttcaaggatctactctgaagatccctgtggtagagagaaaaatcctggatctgtatgctttgagcaagattgttgccagcaaaggaggttttgaaatggtcaccaaagagaagaaatggtctaaagtgggtagtcgcttgggatatctgccaggaaaaggaactgggtctcttttgaagtcacattatgaaagaattctctacccatatgagcttttccagtctggtgtgagccttatgggtgtgcagatgcctaatttagatcttaaagaaaaagtggagcctgaggttctcagcactgatacccaaacttccccagagccaggcacaaggatgaacattctgccgaagagaacaagacgtgtgaagactcagtcagaatctggagatgtgagtagaaacacggaactgaagaaacttcagatttttggggctgggcccaaggttgtgggcttggcaatgggaacaaaagataaagaagatgaggtcacccgaagacgaaaagttaccaacaggtcagacgcatttaacatgcaaatgagacaacggaaaggcactctctctgttaactttgttgatctctatgtttgtatgttttgtggtcggggaaacaatgaagataaattgcttttgtgtgatggatgtgatgacagctatcatacattttgtctaattcctccactacctgatgtgcccaaaggagactggaggtgtcctaaatgtgtcgccgaggaatgtagcaaacctcgagaagcctttggatttgaacaagctgtacgagagtatacacttcagagctttggagagatggcagataattttaagtctgattattttaatatgccagtccatatggttcccacagaactagtagaaaaggaattttggcggctggtaagcagcattgaagaagatgttattgtggaatatggagcagatatctcctcaaaagactttggaagtggatttccggtgaaggatgggcggagaaagattctgccagaagaagaggaatatgcactttctggttggaatttgaataacatgcctgtcctggaacagtctgttcttgcacatattaatgtggacatctctggtatgaaagtgccgtggctctatgtgggaatgtgcttctcttctttttgctggcacattgaggatcactggagttattccatcaactacttgcactggggggagccaaagacatggtatggtgtgccatctcatgctgcagagcaactggaggaggtgatgagagagctggcccccgagttatttgaatcccagcctgatcttctgcatcagttagttaccatcatgaaccccaacgtgctaatggagcatggtgtgcctgtgtacaggaccaatcagtgtgctggcgagtttgttgtgacatttcctcgtgcctatcactctggatttaaccagggctacaactttgctgaagctgtgaacttctgtactgctgactggttgcccattggacgtcaatgtgtaaatcattaccgacgcctaaggcgccactgtgtcttttcacacgaggaactaattttcaagatggcagcagatccagaatgcttagatgtggggctggctgccatggtctgcaaagaattgactctcatgactgaagaagaaacacgattaagagagtctgttgtacagatgggtgtcctgatgtcagaagaagaagtgtttgaacttgttcctgatgatgagcggcagtgttcagcatgcagaaccacatgttttctctctgctctcacatgttcctgtaatcctgagcggcttgtatgtctctaccatccaactgatctgtgcccctgccccatgcagaagaaatgtcttagatatcgctacccattagaagacctcccttctctgctatatggtgtaaaagtcagggcacagtcctatgacacttgggtcagtcgtgttacagaagcattgtctgctaacttcaaccacaaaaaagatttgattgaattgcgagtaatgctggaagatgctgaggataggaaatacccagagaatgatctctttcgaaaactcagggatgctgtaaaagaagctgagacctgtgcttctgtggctcagctgcttctgagcaaaaagcagaaacacagacagagcccagatagtgggaggactcggaccaaactgacagtggaagaattgaaggcctttgtccaacaactttttagtcttccgtgtgtcatcagccaagctcggcaagtaaagaatctgctagatgatgtggaagagtttcatgaacgtgctcaggaggccatgatggatgaaaccccagattcttccaaactccagatgttgatagatatgggctctagtctctatgtggaactccctgaattaccacgactgaagcaagagctacaacaggctcggtggttggacgaagtaagactgaccttatcagatccgcaacaagtcactttggatgtcatgaagaagctgatagactctggggtagggttggcaccccaccatgctgtggagaaagcaatggctgaactacaggagctccttacagtctctgaacgatgggaagaaaaggctaaggtctgcctacaggcaagaccgaggcacagtgtggcaagtttagaaagcattgtgaatgaagccaagaacattccagcctttctacccaatgtgttgtccttgaaagaagccttacaaaaggctcgagaatggaccgctaaagtggaagctattcagagtggcagcaattacgcttatttggagcagcttgagagcttgtctgcgaaaggacgccctattcctgtgcgtcttgaagcactgccgcaagtggaatcacaggtagcagcagcacgggcatggagagaacggactgggcggacgtttcttaagaagaattctagccatacattgttacaggtgctgagcccccggaccgacattggtgtatatgggagtggcaaaaataggaggaaaaaagtaaaagaactaatagaaaaagaaaaagaaaaggatctggacctggagcctctgagtgatctggaggaaggattggaggaaaccagagatacagccatggtggtggcagttttcaaagaacgggagcaaaaagagattgaagccatgcattctctcagagcagccaacctagccaagatgacaatggtggaccgcatagaagaagtaaaattttgcatttgccgcaagacagccagtgggtttatgctacagtgtgagctctgcaaagactggttccataacagctgtgttcctcttcctaaatcaagttcccaaaaaaaaggatccagctggcaagctaaagaagtaaaattcctttgccctctttgtatgcggtctcgaaggcccaggctagagactattctgtcactcctggtatcccttcagaagttgcccgtacggttgcctgaaggagaggccctgcagtgtttgacagaacgtgctatgagttggcaagatagagcgcggcaggctctagccacagatgaactatcctctgccctggccaaactatctgtgttgagccagcgtatggtggaacaggcggctcgagaaaaaactgaaaagatcatcagtgcagaactccaaaaagcagctgccaatccagacttacagggacacttacctagtttccagcagtctgcttttaaccgggtggtgagcagtgtgtcatcttctcctcgacaaacaatggactatgatgatgaagaaacagactctgatgaagacattcgagagacatatggctacgacatgaaggacacagccagtgtgaagtcctctagtagtcttgaacccaatcttttttgtgatgaagagattcccatcaaatccgaggaggtggtgacccacatgtggacagcaccttcattttgtgcagagcatgcttattcttctgcttctaagagttgttctcaagtattttttgggaaaggttctagcaccccaaggaaacaacctcggaagagccctttggtgccccgaagtttggaacctccagtgctggagttgtcacctggagctaaggcacaactggaagaacttatgatggttggagatctcctggaagtatctctggacgagactcaacacatatggcggattttgcaggccacacacccaccctctgaagacagattcttgcatatcatggaggatgacagcatggaagagaaaccactaaaagtgaaaggaaaggactcttcagagaagaaacggaaacggaagctagaaaaggtagagcaactttttggagaaggaaaacagaagtccaaggagttaaagaaaatggacaaacctagaaagaagaaattaaaattaggtgcagacaaatcaaagaagctgaataaactggccaagaaactagcaaaagaagaagagagaaagaaaaagaaggagaaggctgctgcagccaaagttgaacttgtgaaagagagcactgaaaagaaaagagagaaaaaggtgctggacatcccctcaaagtatgactggtcaggagcagaggagtctgatgatgagaatgctgtgtgcgcagaaccagactgccaaaggccctgcaaggacaagggagttgtatttgtaacgaagaagagagagataaaaaatattagttttaaaagtgtcctatgtgactgcttttctaaaaaggtagactgggtacaatgtgatggtggctgtgatgagtggtttcatcgggtttgtgtgggtgtatctccagaaatggctgaaaatgaagattacatctgtataaactgtgcaaagaagcaggggccagttagcccaggtccagcaccacctccttccttcataatgagctacaaactaccaatggaggatcttaaagagaccagttagcagatgcttggttagtttgggacatggggggacatggaccacattgagaccttagtcatcaagtagagtggtttatatcacttggaatgttgcttctaaagatgaatggccttcagagaaagtccccttagtgctggcttcctctttgcatggactctgtgggttacattgctctatcaacatatctatgcagagggtgtcttctttggtacaacagccaatatctcatgtctcctttgagtgtggtttactgcattaaggccagatgcttaattgagctctagggtggctggttagtattaatacattggtgtgctaacagggcatataggatgtggcttttgtccagctgatagtagttagaggcttacaacttaggagcagcaccaactgaaggtgctaattgcttggatctccttcattaggatagttggagagggattggagtaccactttcttccactgttaccaggtacttaatgccctaaagatacaactaggagtaacagggccaaagttatttctgttagacgtcaaggaatggtatcacagtctattgacctcagcgatttgtgcttgtttgtgctagaagaacatcccaaataggagaacctctcacaagctggggcaggtcaccttatctttgtaagatgaggatatcatctagatcagaaatctgactagattggattctgaggagaagaacctactacaaggcaaggagccgttttttggctttgaaaagtcttgctgtcttgggtctacattttagggaagagcaggtacatggatccaggcttctgccaaaaaaaaaaagagaagaagatgacgagtatgaccagtcgtactatcttactgagccacagtgatgcatgcttttcggggaaaacttcattcacaagtattccagacaccaggcttcaggcatggccatgagcaagaccagcaaataacagctttttcccttgcagccctgaccccaatgtctgctgtttccaacactggtgatttctaactacggcccacagcagatgctgttgaataacaccatggcttcatcagaggatgtggggttgtagtacctctgggtgatgaagttgttttagcaaatccatttttaaaaaaaaaaaaaaa

SEQ ID NO: 29567 - DNA, 3084 bp, Homo Sapiens
gccaggtgctcccgccttccaccctccgccctcctccctcccctgggccctgctccctgccctcctgggcagccagggcagccaggacggcaccaagggagctgccccatggacagggccccacagagacagcaccgagcctcacgggagctgctggctgcaaagaagacccacacctcacaaattgaagtgatcccttgcaaaatctgtggggacaagtcgtctgggatccactacggggttatcacctgtgaggggtgcaagggcttcttccgccggagccagcgctgtaacgcggcctactcctgcacccgtcagcagaactgccccatcgaccgcaccagccgaaaccgatgccagcactgccgcctgcagaaatgcctggcgctgggcatgtcccgagatgctgtcaagttcggccgcatgtccaagaagcagagggacagcctgcatgcagaagtgcagaaacagctgcagcagcggcaacagcagcaacaggaaccagtggtcaagacccctccagcaggggcccaaggagcagataccctcacctacaccttggggctcccagacgggcagctgcccctgggctcctcgcctgacctgcctgaggcttctgcctgtccccctggcctcctgaaagcctcaggctctgggccctcatattccaacaacttggccaaggcagggctcaatggggcctcatgccaccttgaatacagccctgagcggggcaaggctgagggcagagagagcttctatagcacaggcagccagctgacccctgaccgatgtggacttcgttttgaggaacacaggcatcctgggcttggggaactgggacagggcccagacagctacggcagccccagtttccgcagcacaccggaggcaccctatgcctccctgacagagatagagcacctggtgcagagcgtctgcaagtcctacagggagacatgccagctgcggctggaggacctgctgcggcagcgctccaacatcttctcccgggaggaagtgactggctaccagaggaagtccatgtgggagatgtgggaacggtgtgcccaccacctcaccgaggccattcagtacgtggtggagttcgccaagaggctctcaggctttatggagctctgccagaatgaccagattgtgcttctcaaagcaggagcaatggaagtggtgctggttaggatgtgccgggcctacaatgctgacaaccgcacggtcttttttgaaggcaaatacggtggcatggagctgttccgagccttgggctgcagcgagctcatcagctccatctttgacttctcccactccctaagtgccttgcacttttccgaggatgagattgccctctacacagcccttgttctcatcaatgcccatcggccagggctccaagagaaaaggaaagtagaacagctgcagtacaatctggagctggcctttcatcatcatctctgcaagactcatcgccaaagcatcctggcaaagctgccacccaaggggaagcttcggagcctgtgtagccagcatgtggaaaggctgcagatcttccagcacctccaccccatcgtggtccaagccgctttccctccactctacaaggagctcttcagcactgaaaccgagtcacctgtggggctgtccaagtgacctggaagagggactccttgcctctccctatggcctgctggcccacctccctggaccccgttccaccctcacccttttcctttcccatgaaccctggagggtggtccccaccagctctttggaagtgagcagatgctgcggctggctttctgtcagcaggccggcctggcagtgggacaatcgccagagggtggggctggcagaacaccatctccagcctcagctttgacctgtctcatttcccatattccttcacacccagcttctggaaggcatggggtggctgggatttaaggacttctgggggaccaagacatcctcaagaaaacaggggcatccagggctccctggatgaatagaatgcaattcattcagaagctcagaagctaagaataagcctttgaaatacctcattgcatttccctttgggcttcggcttggggagatggatcaagctcagagactggcagtgagagcccagaaggacctgtataaaatgaatctggagctttacattttctgcctctgccttcctcccagctcagcaaggaagtatttgggcaccctaccctttacctggggtctaaccaaaaatggatgggatgaggatgagaggctggagataattgttttatgggatttgggtgtgggactagggtacaatgaaggccaagagcatctcagacatagagttaaaactcaaacctcttatgtgcactttaaagatagactttaggggctggcacaaatctgatcagagacacatatccatacacaggtgaaacacatacagactcaacagcaatcatgcagttccagagacacatgaacctgacacaatctctcttatccttgaggccacagcttggaggagcctagaggcctcaggggaaagtcccaatcctgagggaccctcccaaacatttccatggtgctccagtccactgatcttgggtctggggtgatccaaataccaccccagctccagctgtcttctaccactagaagacccaagagaagcagaagtcgctcgcactggtcagtcggaaggcaagatcagatcctggaggactttcctggcctgcccgccagccctgctcttgttgtggagaaggaagcagatgtgatcacatcaccccgtcattgggcaccgctgactccagcatggaggacaccagggagcagggcctgggcctgtttccccagctgtgatcttgcccagaacctctcttggcttcataaacagctgtgaaccctcccctgagggattaacagcaatgatgggcagtcgtggagttgggggggttgggggtgggattgtgtcctctaaggggacgggttcatctgagtaaacataaaccccaacttgtgccattctttataaaatgattttaaaggcaaaaaaaaaaaaaaaaaaaa

SEQ ID NO: 29568 - DNA, 7885 bp, Homo Sapiens; identical to SEQ ID NO: 22391

SEQ ID NO: 29569 - DNA, 3283 bp, Homo Sapiens
aggagaagagcaaagaaaagcagtccgtctggatttgtttgcccaggactggcgccgcgcacgcggatcgccgaggggagtgcggtcggagtcaccgcgcccccgcctccccgcccgggcagctgaggccgggggttggagcgctgcccccgcgcacagtccccgagcgcccgacgtctccgcgcaggttcttgaagcagctgggcctggggcgcccactaatgtggccctgagggccggagcccgcaccgacgggagcgggagccggagcagctgcgggcgccgagtggccggtgcgcccggcggagcgcgcgtgcgtggccagcgcgctccccgcttctgcttggctttccggcttaattttcctcggcgggattaaagttggaaattgaccggagaattgagttgccggggaacagagccccggccgccgccagagcgatgttcccgcagagccggcacccgacgccgcaccaggctgcaggccagcccttcaagttcactatcccggagtccctggaccggattaaagaggaattccagttcctgcaggcgcagtatcacagccttaaattggaatgtgagaaactggcaagtgaaaagacagaaatgcagaggcactatgtgatgtattatgaaatgtcatatggattaaacattgaaatgcacaaacagactgaaatcgccaagagattgaatacgatttgtgcacaagtcatcccatttctgtctcaggaacatcaacaacaggtggcccaggctgttgaacgtgccaaacaggtgaccatggcagagttgaatgccatcatcgggcagcagcagttgcaagctcagcatctttctcatggccacggacccccagttccccttacgcctcacccttcgggacttcagcctcctggaatcccgcccctcgggggcagtgccggccttcttgcgctgtctagtgctctgagtgggcagtctcacttggcaataaaagatgacaagaagcaccacgatgcagagcaccacagagacagagagccgggcacaagtaattccctcctggtcccagacagtctaagaggcacagataaacgcagaaatggacctgaattttccaatgacatcaagaaaaggaaggtggatgataaggactccagccactatgacagtgatggtgacaaaagcgatgacaacttagttgtggatgtgtctaatgaggacccttcttctccgcgagcaagccctgcccactcgccccgggaaaatggaatcgacaaaaatcgcctgctaaagaaggatgcttctagcagtccagcttccacggcctcctcggcaagttccacttctttgaaatccaaagaaatgagcttgcatgaaaaagccagcacgcctgttctgaaatccagcacaccaacgcctcggagcgacatgccaacgccgggcaccagcgccactccaggcctccgtccaggtctcggcaagcctccagccatagaccccctcgttaaccaagcggcagctggcttgaggacacccctggcagtgcccggcccatatcctgctccttttgggatggtcccccacgctggcatgaacggcgagctgaccagcccaggcgctgcctacgccagtttacacaacatgtcgccccagatgagcgccgcagccgccgcggccgccgtggtggcctacgggcgctcccccatggtggggtttgatcctccccctcacatgagagtacctaccattcctccaaacctggcaggaatccctggggggaaacctgcatactccttccacgttactgcagacggtcagatgcagcctgtcccttttccccccgacgccctcatcggacccggaatcccccggcatgctcgccagatcaacaccctcaaccacggggaggtggtgtgcgctgtgaccatcagcaaccccacgagacacgtgtacacaggcgggaagggctgcgtcaaggtctgggacatcagccaccctggcaataagagccctgtctcccagctcgactgtctgaacagagacaattatatccgttcctgtaaattgctacccgatggctgcactctcatagtgggaggggaagccagtactttgtccatttgggacctggcggctccaaccccgcgcatcaaggcggagctgacgtcctcggcccccgcctgctacgccctggccatcagccccgattccaaggtctgcttctcatgctgcagcgacggcaacatcgctgtgtgggatctgcacaaccagacactagtgaggcaattccagggccacacagacggagccagctgtattgacatttctaatgatggcaccaagctctggacgggtggtttggacaacacagtcaggtcctgggacctgcgcgaggggcggcagctgcagcagcacgacttcacctcccagatcttctccctggggtactgccccaccggggagtggctggcagtgggcatggagagcagcaatgtggaggtgctgcacgtgaacaagcctgacaagtaccagctgcacctgcatgagagctgcgtgctgtccctgaaatttgcttactgtggtaaatggtttgtgagtactggaaaagataacctcctcaatgcttggcggaccccctatggagccagcatattccagtccaaagagtcctcgtcagtgcttagctgtgacatctctgtggatgataagtacatagtcactggctcgggggacaagaaggctacagtctatgaagtcatctactgaaaacattatgtggtttaacgtttatagttgaattgggccaaaatgtttcgaatttatagaaatagaaaagttgtaactttaaaagagaaaaaaaattacaaacacctgtttccaaaccttgacagaaaactactttgagtctacaaagaggaggcgacaagtccatcagcagaaagtcacctgtctacatagaccaaatggagcaccaaggccaagcggacagaggggccatgggttgtaggattgaggaacggaatctgccgactcacatgacagcccattctttctttctgggtgatctggggatcacgccttgcccaagtgtgagattacctttctgttccttgcagttcacctcactttccgtcctttgtagagcagtggtgtctccaatgaacttgtttcctggttttgcatcttgtgaaatgtttttttgtatttttgttgaaggttaaacatttgtataaattgtaaatatatttggtttattacagtaaaggctttagtaccaataaaaaaaaaaaaaaaa

SEQ ID NO: 29570 - DNA, 2314 bp, Homo Sapiens
gtttcctcggcggcctcggagcgcgggtgcagcagttgtgtcccgacccctgggagcgccatggcagagctgtgccccctggccgaggagctgtcgtgctccatctgcctggagcccttcaaggagccggtcaccactccgtgcggccacaacttctgcgggtcgtgcctgaatgagacgtgggcagtccagggctcgccatacctgtgcccgcagtgccgcgccgtctaccaggcgcgaccgcagctgcacaagaacacggtgctgtgcaacgtggtggagcagttcctgcaggccgacctggcccgggagccacccgccgacgtctggacgccgcccgcccgcgcctctgcacccagcccgaatgcccaggtggcctgcgaccactgcctgaaggaggccgccgtgaagacgtgcttggtgtgcatggcctccttctgtcaggagcacctgcagccgcacttcgacagccccgccttccaggaccacccgctgcagccgcccgttcgcgacctgttgcgccgcaaatgttcccagcacaatcggctgcgggaatttttctgccccgagcacagcgagtgcatctgccacatctgcctggtggagcataagacctgctctcccgcgtccctgagccaggccagcgccgacctggaggccaccctgaggcacaaactaactgtcatgtacagtcagatcaacggggcgtcgagagcactggatgatgtgagaaacaggcagcaggatgtgcggatgactgcaaacagaaaggtggagcagctacaacaagaatacacggaaatgaaggctctcttggacgcctcagagaccacctcgacaaggaagataaaggaagaggagaagagggtcaacagcaagtttgacaccatttatcagattctcctcaagaagaagagtgagatccagaccttgaaggaggagattgaacagagcctgaccaagagggatgagttcgagtttctggagaaagcatcaaaactgcgaggaatctcaacaaagccagtctacatccccgaggtggaactgaaccacaagctgataaaaggcatccaccagagcaccatagacctcaaaaacgagctgaagcagtgcatcgggcggctccaggagctcacccccagttcaggtgaccctggagagcatgacccagcgtccacacacaaatccacacgccctgtgaagaaggtctccaaagaggaaaagaaatccaagaaacctccccctgtccctgccttacccagcaagcttcccacgtttggagccccggaacagttagtggatttaaaacaagctggcttggaggctgcagccaaagccaccagctcacatccgaactcaacatctctcaaggccaaggtgctggagaccttcctggccaagtccagacctgagctcctggagtattacattaaagtcatcctggactacaacaccgcccacaacaaagtggctctgtcagagtgctatacagtagcttctgtggctgagatgcctcagaactaccggccgcatccccagaggttcacatactgctctcaggtgctgggcctgcactgctacaagaaggggatccactactgggaggtggagctgcagaagaacaacttctgtggggtaggcatctgctacggaagcatgaaccggcagggcccagaaagcaggctcggccgcaacagcgcctcctggtgcgtggagtggttcaacaccaagatctctgcctggcacaataacgtggagaaaaccctgccctccaccaaggccacgcgggtgggcgtgcttctcaactgtgaccacggctttgtcatcttcttcgctgttgccgacaaggtccacctgatgtataagttcagggtggactttactgaggctttgtacccggctttctgggtattttctgctggtgccacactctccatctgctcccccaagtaggcaggctgtaggcacttgggctgactgcctgcagaagtcccaagaccctagtgaaaatacagcaggcagaactctccttggataattccccaagaggtcccaaggattgggagcatgggaggggagctggcgggagggtgggaggtgggatttagccaggaaaggggtgagagtgattgtgttgtgggcgaggaggcgtttccaccccctggtgcctatcagggcagggtgacctactccccattgttctggaaatctccaggctgctgggcagctgggcagagctctgggaagtgaagtcatgagtgcccgattcctcttagagaaaatccataccttcagatcttggtgttttgaattc

SEQ ID NO: 29571 - DNA, 1561 bp, Homo Sapiens
cgcacgccacccgcccgccgcctgccagagctgctcggcccgcagccagggggacagcggctggtcggaggctcgcagtgctgtcggcgagaagcagtcgggtttggagcgcttgggtcgcgttggtgcgcggtggacacgagggaccccagttcccgcgagcagctccgcgccggccctgagagactaagctgaaactgctgctcagctcccaagatggtgccacccaaattgcatgtgcttttctgcctctgcggctgcctggctgtggtttatccttttgactggcaatacataaatcctgttgcccatatgaaatcatcagcatgggtcaacaaaatacaagtactgatggctgctgcaagctttggccaaactaaaatcccccggggaaatgggccttattccgttggttgtacagacttaatgtttgatcacactaataagggcaccttcttgcgtttatattatccatcccaagataatgatcgccttgacaccctttggatcccaaataaagaatatttttggggtcttagcaaatttcttggaacacactggcttatgggcaacattttgaggttactctttggttcaatgacaactcctgcaaactggaattcccctctgaggcctggtgaaaaatatccacttgttgttttttctcatggtcttggggcattcaggacactttattctgctattggcattgacctggcatctcatgggtttatagttgctgctgtagaacacagagatagatctgcatctgcaacttactatttcaaggaccaatctgctgcagaaataggggacaagtcttggctctaccttagaaccctgaaacaagaggaggagacacatatacgaaatgagcaggtacggcaaagagcaaaagaatgttcccaagctctcagtctgattcttgacattgatcatggaaagccagtgaagaatgcattagatttaaagtttgatatggaacaactgaaggactctattgatagggaaaaaatagcagtaattggacattcttttggtggagcaacggttattcagactcttagtgaagatcagagattcagatgtggtattgccctggatgcatggatgtttccactgggtgatgaagtatattccagaattcctcagcccctcttttttatcaactctgaatatttccaatatcctgctaatatcataaaaatgaaaaaatgctactcacctgataaagaaagaaagatgattacaatcaggggttcagtccaccagaattttgctgacttcacttttgcaactggcaaaataattggacacatgctcaaattaaagggagacatagattcaaatgcagctattgatcttagcaacaaagcttcattagcattcttacaaaagcatttaggacttcataaagattttgatcagtgggactgcttgattgaaggagatgatgagaatcttattccagggaccaacattaacacaaccaatcaacacatcatgttacagaactcttcaggaatagagaaatacaattaggattaaaataggtttttta

SEQ ID NO: 29572 - DNA, 6614 bp, Homo Sapiens
ctgcgcgccgctggcgctgaggggaggaagtttgctgtcgagcggcctgggttccgtgggcaaggccgtgggaggcagcgttggctgcttcgacacactgagggcggcgcgatgggagacgagatggatgccatgattcccgagcgggagatgaaggattttcagtttagagcgctaaagaaggtgagaatctttgactcccctgaggaattgcccaaggaacgctcgagtctgcttgctgtgtccaacaaatatggtctggtcttcgctggtggagccagtggcttgcagatttttcctactaaaaatcttcttattcaaaataaacccggagatgatcccaacaaaatagttgataaagtccaaggcttgctagttcctatgaaattcccaatccatcacctggccttgagctgtgataacctcacactctctgcgtgcatgatgtccagtgaatatggttccattattgctttttttgatgttcgcacattctcaaatgaggctaaacagcaaaaacgcccatttgcctatcataagcttttgaaagatgcaggaggcatggtgattgatatgaagtggaaccccactgtcccctccatggtggcagtttgtctggctgatggtagtattgctgtcctgcaagtcacggaaacagtgaaagtatgtgcaactcttccttccacggtagcagtaacctctgtgtgctggagccccaaaggaaagcagctggcagtgggaaaacagaatggaactgtggtccagtatcttcctactttgcaggaaaaaaaagtcattccttgtcctccgttttatgagtcagatcatcctgtcagagttctggatgtgctgtggattggtacctacgtcttcgccatagtgtatgctgctgcagatgggaccctggaaacgtctccagatgtggtgatggctctactaccgaaaaaagaagaaaagcacccagagatatttgtgaactttatggagccctgttatggcagctgcacggagagacagcatcattactacctcagttacattgaggaatgggatttagtgctggcagcatctgcggcttcaacagaagttagtatccttgctcgacaaagtgatcagattaattgggaatcttggctactggaggattctagtcgagctgaattgcctgtgacagacaagagtgatgactccttgcccatgggagttgtcgtagactatacaaaccaagtggaaatcaccatcagtgatgaaaagactcttcctcctgctccagttctcatgttactttcaacagatggtgtgctttgtccattttatatgattaatcaaaatcctggggttaagtctctcatcaaaacaccagagcgactttcattagaaggagagcgacagcccaagtcaccaggaagtactcccactaccccaacctcctctcaagccccacagaaactggatgcttctgcagctgcagcccctgcctctctgccaccttcatcacctgctgctcccattgccactttttctttgcttcctgctggtggagcccccactgtgttctcctttggttcttcatctttgaagtcatctgctacggtcactggggagcccccttcatattccagtggctccgacagctccaaagcagccccaggccctggcccatcaaccttctcttttgttcccccttctaaagcctccctagcccccacccctgcagcgtctcctgtggctccatcagctgcttcattctcctttggatcatctggttttaagcctaccctggaaagcacaccagtgccaagtgtgtctgctccaaatatagcaatgaagccctccttcccaccctcaacctctgctgtcaaagtcaaccttagtgaaaagtttactgctgcagctacctctactcctgttagtagctcccagagcgcacccccgatgtcgccattctcttctgcctccaagccagctgcttctggaccactcagccaccccacacctctctcagcaccacctagttccgtgccattgaagtcctcagtcttgccctcaccatcaggacgatctgctcagggcagttcaagcccagtgccctcaatggtacagaaatcacccaggataacccctccagcggcaaagccaggctctccccaggcaaagtcacttcagcctgctgttgcagaaaagcagggacatcagtggaaagattcagatcctgtaatggctggaattggggaggagattgcacactttcagaaggagttggaagagttaaaagcccgaacttccaaagcctgtttccaagtgggcacttctgaggagatgaagatgctgcgaacagaatcagatgacttgcatacctttcttttggagattaaagagaccacagagtcgcttcatggagatataagtagcctgaaaacaactttacttgagggctttgctggtgttgaggaagccagagaacaaaatgaaagaaatcgtgactctggttatctgcatttgctttataaaagaccactggatcccaagagtgaagctcagcttcaggaaattcggcgccttcatcagtatgtgaaatttgctgtccaagatgtgaatgatgttctagacttggagtgggatcagcatctggaacaaaagaaaaaacaaaggcacctgcttgtgccagagcgagagacactgtttaacaccctagccaacaatcgggaaatcatcaaccaacagaggaagaggctgaatcacctggtggatagtcttcagcagctccgcctttacaaacagacttccctgtggagcctgtcctcggctgttccttcccagagcagcattcacagttttgacagtgacctggaaagcctgtgcaatgctttgttgaaaaccaccatagaatctcacaccaaatccttgcccaaagtaccagccaaactgtcccccatgaaacaggcacaactgagaaacttcttggccaagaggaagaccccaccagtgagatccactgctccagccagcctgtctcgatcagcctttctgtctcagagatattatgaagacttggatgaagtcagctcaacgtcatctgtctcccagtctctggagagtgaagatgcacggacgtcctgtaaagatgacgaggcagtggttcaggcccctcggcacgcccccgtggttcgcactccttccatccagcccagtctcttgccccatgcagcaccttttgctaaatctcacctggttcatggttcttcacctggtgtgatgggaacttcagtggctacatctgctagcaaaattattcctcaaggggccgatagcacaatgcttgccacgaaaaccgtgaaacatggtgcacctagtccttcccaccccatctcagccccgcaggcagctgccgcagcagcactcaggcggcagatggccagtcaggcaccagctgtaaacactttgactgaatcaacgttgaagaatgtccctcaagtggtaaatgtgcaggaattgaagaataaccctgcaaccccttctacagccatgggttcttcagtgccctactccacagccaaaacacctcacccagtgttgaccccagtggctgctaaccaagccaagcaggggtctctaataaattcccttaagccatctgggcctacaccagcatccggtcagttatcatctggtgacaaagcttcagggacagccaagatagaaacagctgtgacttcaaccccatctgcttctgggcagttcagcaagcctttctcattttctccatcagggactggctttaattttgggataatcacaccaacaccgtcttctaatttcactgctgcacaaggggcaacaccctccactaaagagtcaagccagccggacgcattctcatctggtgggggaagcaaaccttcttatgaggccattcctgaaagctcacctccctcaggaatcacatccgcatcaaacaccaccccaggagaacctgccgcatctagcagcagacctgtggcaccttctggaactgctctttccaccacctctagtaagctggaaaccccaccgtccaagctgggagagcttctgtttccaagttctttggctggagagactctgggaagtttttcaggactgcgggttggccaagcagatgattctacaaaaccaaccaataaggcttcatccacaagcctaactagtacccagccaaccaagacgtcaggcgtgccctcagggtttaattttactgcccccccggtgttagggaagcacacggagccccctgtgacatcctctgcaaccaccacctcagtagcaccaccagcagccaccagcacttcctcaactgccgtttttggcagtctgccagtcaccagtgcaggatcctctggggtcatcagttttggtgggacatctctaagtgctggcaagactagtttttcatttggaagccaacagaccaatagcacagtgcccccatctgccccaccaccaactacagctgccactccccttccaacatcattccccacattgtcatttggtagcctcctgagttcagcaactaccccctccctgcctatgtccgctggcagaagcacagaagaggccacttcatcagctttgcctgagaagccaggtgacagtgaggtctcagcatcagcagcctcacttctagaggagcaacagtcagcccagcttccccaggctcctccgcaaacttctgactctgttaaaaaagaacctgttcttgcccagcctgcagtcagcaactctggcactgcagcatctagtactagtcttgtagcactttctgcagaggctaccccagccaccacgggggtccctgatgccaggacggaggcagtaccacctgcttcctccttttctgtgcctgggcagactgctgtcacagcagctgctatctcaagtgcaggccctgtggccgtcgaaacatcaagtacccccatagcctccagcaccacgtccattgttgctcccggcccatctgcagaggcagcagcatttggtaccgtcacttctggctcatccgtctttgctcagcctcctgctgccagttctagctcagctttcaaccagctcaccaacaacacagccactgccccctctgccacgcccgtgtttgggcaagtggcagccagcaccgcaccaagtctgtttgggcagcagactggtagcacagccagcacagcagctgccacaccacaggtcagcagctcagggtttagcagcccagcttttggtaccacagccccaggggtctttggacagacaaccttcgggcaggcctcagtctttgggcagtcggcgagcagtgctgcaagtgtcttttccttcagtcagcctgggttcagttccgtgcctgccttcggtcagcctgcttcctccactcccacatccaccagtggaagtgtctttggtgccgcctcaagtaccagtagctccagttccttctcatttggacagtcttctcccaacacaggaggggggctgtttggccaaagcaacgctcctgcttttgggcagagtcctggctttggacagggaggctctgtctttggtggtacctcagctgccaccacaacagcagcaacctctgggttcagcttttgccaagcttcaggttttgggtctagtaatactggttctgtgtttggtcaagcagccagtactggtggaatagtctttggccagcaatcatcctcttccagtggtagcgtgtttgggtctggaaacactggaagagggggaggtttcttcagtggccttggaggaaaacccagtcaggatgcagccaacaaaaacccattcagctcggccagtgggggctttggatccacagctacctcaaatacctctaacctatttggaaacagtggggccaagacatttggtggatttgccagctcgtcgtttggagagcagaaacccactggcactttcagctctggaggaggaagtgtggcatcccaaggctttgggttttcctctccaaacaaaacaggtggcttcggtgctgctccagtgtttggcagccctcctacttttgggggatcccctgggtttggaggggtgccagcattcggttcagccccagcctttacaagccctctgggctcgacgggaggcaaagtgttcggagagggcactgcagctgccagcgcaggaggattcgggtttgggagcagcagcaacaccacatccttcggcacgctcgcgagtcagaatgcccccactttcggatcactgtcccaacagacttctggttttgggacccagagtagcggattctctggttttggatcaggcacaggagggttcagctttgggtcaaataactcgtctgtccagggttttggtggctggcgaagctgagggcgtgtcagcaggcctttcgatccctgggaccaaccgcatcctcagcttcttccccgagaaatgctggagcaggctgttcagaccgacgttgccatcaaaacacatacacccagaaagaaacaacagaaaccaaaactcacaaggcgcatgattacttgttttatatttcatgttgggttttccctcccactattaaacagtctgtttccgtacaaaaaaaaaaaaaa

SEQ ID NO: 29573 - DNA, 2991 bp, Homo Sapiens
gtggcttgccggcttcggggaaggtgcggcaggcggtgctgcggcctggcacagcaggtttggggtgcgggaggcgggcggggtaggagcgcggcgggcggggccgggcggcgggcggggctggcggggcggccgggccatgcagggcgcagagccggctaaaccctgctgagacccggctccgtgcgtccaggggcggctaatgcccctcacgctgtctacgctgctgcaaccgggccgcatctggacggggcgccgcgcggcggagccgacgccgggccacaatgctgcttggagcctctctggtgggggtgctgctgttctccaagctggtgctgaaactgccctggacccaggtgggattctccctgttgttcctctacttgggatctggcggctggcgcttcatccgggtcttcatcaagaccatcaggcgcgatatctttggcggcctggtcctcctgaaggtgaaggcaaaggtgcgacagtgcctgcaggagcggcggacagtgcccattttgtttgcctctaccgttcggcgccaccccgacaagacggccctgatcttcgagggcacagatacccactggaccttccgccagctggatgagtactcaagcagtgtagccaacttcctgcaggcccggggcctggcctcgggcgatgtggctgccatcttcatggagaaccgcaatgagttcgtgggcctatggctgggcatggccaagctcggtgtggaggcagccctcatcaacaccaacctgcggcgggatgctctgctccactgcctcaccacctcgcgcgcacgggcccttgtctttggcagcgaaatggcctcagccatctgtgaggtccatgccagcctggacccctcgctcagcctcttctgctctggctcctgggagcccggtgcggtgcctccaagcacagaacacctggaccctctgctgaaagatgctcccaagcaccttcccagttgccctgacaagggcttcacagataaactgttctacatctacacatccggcaccacagggctgcccaaggccgccatcgtggtgcacagcaggtattaccgcatggctgccctggtgtactatggattccgcatgcggcccaacgacatcgtctatgactgcctccccctctaccactcagcaggaaacatcgtgggaatcggccagtgcctgctgcatggcatgacggtggtgattcggaagaagttctcagcctcccggttctgggacgattgtatcaagtacaactgcacgattgtgcagtacattggtgaactgtgccgctacctcctgaaccagccaccgcgggaggcagaaaaccagcaccaggttcgcatggcactaggcaatggcctccggcagtccatctggaccaacttttccagccgcttccacataccccaggtggctgagttctacggggccacagagtgcaactgtagcctgggcaacttcgacagccaggtgggggcctgtggtttcaatagccgcatcctgtccttcgtgtaccccatccggttggtacgtgtcaacgaggacaccatggagctgatccgggggcccgacggcgtctgcattccctgccagccaggtgagccgggccagctggtgggccgcatcatccagaaagaccccctgcgccgcttcgatggctacctcaaccagggcgccaacaacaagaagattgccaaggatgtcttcaagaagggggaccaggcctaccttactggtgatgtgctggtgatggacgagctgggctacctgtacttccgagaccgcactggggacacgttccgctggaaaggtgagaacgtgtccaccaccgaggtggaaggcacactcagccgcctgctggacatggctgacgtggccgtgtatggtgtcgaggtgccaggaaccgagggccgggccggaatggctgctgtggccagccccactggcaactgtgacctggagcgctttgctcaggtcttggagaaggaactgcccctgtatgcgcgccccatcttcctgcgcctcctgcctgagctgcacaaaacaggaacctacaagttccagaagacagagctacggaaggagggctttgacccggctattgtgaaagacccgctgttctatctagatgcccagaagggccgctacgtcccgctggaccaagaggcctacagccgcatccaggcaggcgaggagaagctgtgattccccccatccctctgagggccggcggatgctggatccggagccccaggttccgccccagagcggtcctggacaaggccagaccaaagcaagcagggcctggcacctccatcctgaggtgctgcccctccatccaaaactgccaagtgactcattgccttcccaacccttccagaggctttctgtgaaagtctcatgtccaagttccgtcttctgggctgggcaggccctctggttcccaggctgagactgacgggttttctcaggatgatgtcttgggtgagggtagggagaggacaaggggtcaccgagcccttcccagagagcagggagcttataaatggaaccagagcagaagtccccagactcaggaagtcaacagagtgggcagggacagtggtagcatccatctggtggccaaagagaatcgtagccccagagctgcccaagttcactgggctccacccccacctccaggaggggaggagaggacctgacatctgtaggtggcccctgatgccccatctacagcaggaggtcaggaccacgcccctggcctctccccactcccccatcctcctccctgggtggctgcctgattatccctcaggcagggcctctcagtccttgtgggtctgtgtcacctccatctcagtcttggcctggctatgaggggaggaggaatgggagagggggctcaggggccaataaactctgccttgagtcctcctaaaaaaaaaaaaaaaaaaaaaaaaaaaaaaaaaaaaaaaaaaaa

SEQ ID NO: 29574 - DNA, 5535 bp, Homo Sapiens
gaaccatttgaatgagaggaggggatcacgggtagagtgggctccaggaggtagggcgagcagggtgtgacgggggccagactcttgagccagtacatatccagccatactcatggaccccagtgatttccccagtccatttgacccattgaccctgccagagaagcccctggctggagacctaccagtagacatggaatttggagaggatctactggaatcccagactgccccaactcgaggatgggccccccctggcccttctccatcctcgggagccctggacctgcttgatacccctgctggcctggaaaaagaccctggagtcctggatggagccactgagttgctggggctgggggggctgctctataaagccccctctcccccggaggtggaccacggtcctgagggaaccctggcatgggatgcaggagatcagaccctagagcctggaccagggggccagacccctgaggtggtaccacctgatccaggggctggggcaaattcctgttcacctgaggggctactagagcctttggctccagattctccaataacactgcagtccccacatattgaagaggaggagaccacctccatagctactgcaagaaggggctcccctgggcaggaggaggagcttccccaagggcagccacagagcccaaatgccccgcctagcccttcagtgggagagactctgggggatggaatcaacagttctcagaccaaacctgggggctctagcccccctgcacatccttccttgccaggagatggcctgactgcgaaggcgagtgagaagccgcctgaacggaagagaagcgagcgcgttaggagagcagaacctccaaaacctgaggttgtagattccactgagagcattccagtgtcagatgaggattctgatgccatggtagatgaccccaatgatgaggactttgtgccattccggccccggcgctctcctcgcatgtccctacgctcaagtgtgtcacaaagggccgggcgctctgcagtgggcaccaagatgacttgtgcacattgccggacaccactgcagaaggggcagactgcctatcagcgcaaggggctgcctcagctcttctgctcgtcatcctgcctcaccactttctccaagaagccctcgggcaaaaagacctgtaccttctgcaagaaggagatctggaacaccaaggactcggttgtggcgcagactggttctggaggctccttccatgagttctgcacatccgtctgtctctccctgtatgaggcccagcagcagcgcccgatcccccagtctggggatcccgccgacgctactcgctgcagcatatgccagaagactggagaggtcctgcacgaggtcagcaatggcagcgtggtacaccggctctgcagcgattcttgcttctccaaattccgggccaacaagggactgaaaaccaactgttgtgaccagtgtggggcttacatctacaccaagaccgggagtcctggccctgagctcctcttccacgagggccaacaaaagcggttctgcaacacaacctgcttgggggcgtacaagaagaaaaacacacgtgtgtacccatgtgtctggtgcaagaccctgtgtaagaactttgagatgctatcacatgtggatcgtaatggcaagaccagcttgttctgttccctgtgctgtaccacttcttacaaagtgaagcaggcagggctcactggccctccccgaccctgcagcttctgccgccgcagcctctctgacccctgttactacaacaaggttgaccgcacagtctaccagttctgcagccccagctgctggaccaagttccagcgcacaagccctgaggggggcattcacctgagctgtcactactgtcacagcctcttcagtggcaagcctgaggtcttggactggcaggaccaagtgttccagttctgctgccgtgattgctgtgaggacttcaagcggcttcggggtgtggtgtcccagtgtgagcactgtcggcaggagaaactcttgcatgagaaactccgattcagcggagtggagaaaagcttctgcagcgaaggctgtgtgctgctgtacaaacaggacttcactaagaagctgggcttgtgctgtatcacttgtacttactgctcccagacctgccagcgcggagtcaccgagcaactggatggcagcacctgggacttctgcagtgaggactgtaagagcaagtacctgctgtggtactgcaaggctgcccggtgccatgcgtgtaagcgccaggggaagctgctggagaccatccactggcgtgggcagatccgtcatttctgcaaccagcagtgtcttctgcgtttctatagccagcagaaccaacccaacctggatacccagagtgggcccgagagcctcctgaacagtcagtctcctgagtcaaaaccccagacaccctctcaaaccaaagtggagaacagcaacacagtgaggaccccagaggaaaatgggaatttgggcaagatccctgtgaagacccgatcagctcccactgctcccacccctccacccccaccacccccagcaacaccccgcaaaaacaaggctgccatgtgtaagccactgatgcagaatcggggcgtctcctgcaaggtggagatgaagtccaaaggaagtcaaacagaagagtggaagccacaggtgatcgtgctgcccatcccagtgcccatcttcgtgccagtgcctatgcatctgtactgccagaaagtcccggtgcctttctcgatgcctatcccggtgcctgtgcccatgttcttgcccactaccttggagagcacagacaagattgtagagaccattgaggagctgaaggtgaagatcccttccaaccccttggaggccgacatcctggctatggcagaaatgattgcagaggctgaggagttagacaaggcctcatctgacctttgtgatcttgtgagcaaccagagtgcagagggactcctggaagactgtgacctgtttgggcctgctcgagatgatgtcctggccatggcagtcaagatggccaatgtcttggatgagcctgggcaagacttggaggcagacttccctaagaatcctctggacattaatcccagtgtagacttcctctttgattgtggcctggtagggcctgaggatgtgtctactgaacaagaccttccccgaaccatgaggaagggtcaaaagcggctggtgctttccgaaagctgctcccgggactccatgagcagtcagcctagttgtaccgggctcaactattcatatggtgtcaatgcttggaagtgctgggtgcagtcaaaatatgccaatggagaaaccagcaagggtgatgagctgcgctttggccccaaacccatgcgtatcaaagaggatattctcgcctgctcagctgctgagctcaactacggtctggcccagtttgtgagagaaatcactcggcccaatggtgaacgatatgaacctgacagtatctactatttgtgtcttggcatccagcagtacttgctggaaaataaccggatggtgaacattttcacggacctttactacctgacttttgttcaagaactcaacaagtctctgagtacctggcagcccacactcctccccaacaatacggtgttctctcgagtggaggaggagcacctctgggagtgtaagcaactgggggtctactcgccctttgtcctcctcaacaccctcatgttcttcaacactaagttttttgggctgcagacagctgaggaacacatgcaactctccttcaccaatgtggtgcggcagtcccgcaagtgtaccacccctcggggcaccaccaaggtggtgagcatccgctactatgccccagtccgccagaggaaagggcgagacacgggtcctggaaaacggaagagagaagatgaagcccctatcttagagcagcgtgagaaccgcatgaatcccctccgctgccctgtcaagttctatgaattctatctctcaaaatgtcctgaaagcctccggactcgcaacgatgtgttctacctgcaacctgaacggtcctgcatcgccgagtcacctctctggtattctgtgatccccatggaccgcagcatgttggagagcatgctcaatcgcatcctggctgtgcgcgagatttatgaggaactgggtcgtcctggggaggaagacctggactgagctcgtgtgccatccatatccatctttcacatcaatgtctgtcctgtggccatgtccctcagggtgacaggcccaggaaccaatgctactcattctgaagggccctgactgctcctttccgctcacccattccctgccttctctaggaaccctggcttttatcttcttccgtaccacttgacaaccatggggccctggtcttctgtactcaggggctggtctcccagtgatgggcaaaagccagcttgcccgttttctttatgcttcagagtaaacccctccttctgggtccagactctgggtggagtgttaatagctctggtgatcctgttggctttgggtttcctgacccatcccgcataggtagagcctcttgttcctaggcatgacctagggaaaaacccagctgccttctctgccctgtgcccactcccttctctactcttccccagcaccatgccaaaaggtcttatctgaaaggtaagaaataaacaatgaaagcgatgaggggaccatttacataaaacacagagcttagacactcttcccctcctatgaaataattggttgttggcaccatctcaccaccgcatatccctcaccccctcggcaagcaccaatccttggtgctgccgtttttaaaatcttccaaatgcctttttttcctcagaggcagagaatgactaagtacggggagcagactcctgttgtgcagactcctgtccccttggtttctgtgtttgtctctctgccatcttaggttgccatgagccatggtgtcaacatgcttagccccctctgtaactgcctccctttagttcaatggacagacctcccaaggcaaaaactaccttctgacttgggttgaggctgggttcccctctattgttcccctatcataagagctaggccaagcctatgggaccttgagtcatgcaggatgggatctgtggtcaaaggacaggcgaggagctgtgggcgcagggcctgccgccactgcctacatcttctctcttccccatcttgcattggaggtcccagaaaacaattagcttctggcaaagggggtacccacttctttccctgttgactttgctgtttcccaggctcctttttgtgtttttataactgtcaccagttagccactgtttaaattgtatatattgttctgaggcgcctggcctgtcccttcagtgagccatgcccacccttgtgttgtagtgagaagctgttgtcacgactaaccttctgtctctgaaattgtttgtttcaaataaagagttaaaattgtcaaaaaaaaaaaaaaaaaa

SEQ ID NO: 29575 - DNA, 5687 bp, Homo Sapiens
ttccccgctgccagcactcaccctctctccgctcctgctcgcaacctcgcggttcctggggtgcttgtgcccactgtgtggacagcgcgggcggacttttgggccggggccgggcggcgggggaggctctctaaggcctccgcctctgcctctcccgcccccttacccgccccggagcgggaagcggcggaggctccgccatggcctcgggagccggaggagtcggagggggcggtggcggcaagatccggacgcggcgttgccaccaggggccaattaagccttaccagcaggggcgacaacagcatcagggcattcttagcagggttacagaatctgttaagaatattgtgccagggtggctacaaagatacttcaacaagaatgaagatgtatgcagctgttcaacagacacaagcgaggttccacgctggccagaaaataaagaggaccatctggtatatgccgatgaggagagctctaatattactgatgggagaatcacacctgagccagcagtcagtaatacagaagaaccttcaacaactagtactgcttcaaattatccagatgtgttaacaaggccttctcttcatcggagccatctgaatttttccatgttggaatcccctgcattacactgtcagccatctacatcctcggcattcccaattggcagttcgggattttcccttgtaaaggaaattaaagattctacctctcagcatgatgatgataacatctcaactaccagtggtttttcttcaagagcttctgataaagatataactgtttcaaagaacacttcattgccacctctgtggtccccagaagctgaacgttctcactcactctcacagcacactgccaccagctcaaaaaaaccagcattcaacttgtctgcctttggaacactttccccttcacttgggaattcttcaatccttaaaaccagtcagcttggagattctcctttttatcctggaaaaacaacatacggtggggcagcagctgctgtaagacagtctaaactacgaaatacaccttatcaggcaccagttagaagacaaatgaaagctaagcaactcagtgcacaatcttacggtgtgaccagttcaacagctcggcgaatattgcagtctttagagaagatgtcaagccctttagcggatgcaaaaagaattccatccattgtttcttctcctctgaattctcctcttgataggagtgggatagatatcacagattttcaggccaaaagagaaaaggtggattctcaatatcctcctgttcagagacttatgaccccaaagccagtttccatagcaacaaatcgaagtgtttattttaaaccatctctgactccttctggtgaattcaggaagactaatcaaagaatagataacaagtgcagtactggatatgaaaaaaatatgacacccggacaaaatagagaacaacgagaaagtggcttttcatatccaaatttcagtttgcctgcagccaatggtttatcttctggagtaggtggtggaggtggcaagatgagacgagaaagaacacgctttgttgcttctaaacctctggaggaggaggaaatggaagttccagtattaccgaaaatctctctaccgatcaccagttcttcactgcctacctttaattttagttcccctgagatcacaacttcctctccatcacccatcaattcgtctcaagcattaacaaacaaggtacaaatgacctctccgagcagcactggcagtcccatgtttaaattttcatctccaatcgtaaaatctactgaggcaaatgtactacctccatcatctattggatttacatttagtgtgcctgttgcaaaaacagcagaactttctggttctagtagtactttagaaccaattataagtagttcagctcatcatgtcactacagtgaacagtacaaattgtaagaagacaccacctgaagattgtgagggtccttttagacctgcagaaatcctgaaagaaggaagtgttctagatattctgaaaagccctggtttcgcatcgccgaagatagattctgttgctgctcagcccaccgcaacaagcccagtagtttatacaagaccagcaataagtagcttttcttctagtggaattgggtttggggagagtttaaaagctgggtcatcatggcagtgtgatacatgtctactccagaacaaagttacagacaacaaatgcatagcctgtcaagcagcaaaattgtcacccagagatactgctaaacagactggaattgaaacaccaaataaaagtggcaaaacaactctttctgcatcagggacaggctttggagacaaatttaaaccagtgataggcacttgggattgtgatacctgtttagtgcaaaataaacctgaagcaataaaatgtgtagcctgtgaaacaccgaaacctggaacttgtgtgaagcgagcccttacattgacagtggtttcggaaagtgctgagactatgactgcttcatcttccagctgcactgtaaccactggtaccttaggatttggagataaattcaaaaggcccattggatcttgggagtgttcagtatgctgtgtttctaataatgcagaagacaataagtgtgtgtcctgtatgtctgagaaaccaggaagttcagtacctgcttcaagtagcagcactgtacctgtctctctgccttctggaggctctctaggattggaaaagttcaagaaacccgagggaagctgggactgtgaattgtgcctagtgcagaataaggcagactctaccaaatgtttggcatgtgaaagtgcaaagccaggcacaaaatctgggtttaaaggctttgacacatcttcctcatcttcgaactcagcagcctcctcatccttcaaatttggtgtctcatcatcctcttctgggccttctcagactttaacaagcactggaaattttaaatttggagatcagggaggattcaaaataggtgtgtcatctgattctgggtctataaaccccatgagtgaaggctttaaattttctaaaccaataggagattttaaatttggagtttcatctgaatctaagcccgaagaagttaaaaaagatagtaagaatgataattttaagtttggactttcttctggtttaagcaacccagtttctttaactccatttcaatttggggtatctaatcttggacaggaagaaaagaaagaggaactgcccaaatcttcctctgcaggttttagctttggtacaggtgttattaactccacccctgctcctgctaacaccatagtgacctctgagaacaagagcagcttcaaccttggaaccatagaaaccaagagtgcttcagtggctcctttcacatgtaagacatcagaagctaaaaaagaagaaatgcctgccaccaaaggaggattctcttttggcaacgtggagcctgcctctctgccatctgcctcagtgtttgttttgggaaggacagaagagaaacagcaagagcctgtcacttctacttccctagtttttgggaagaaagctgacaatgaagagccaaagtgtcaaccagtgttttcctttgggaattcagagcaaaccaaagatgagaattcttcaaagtccacatttagttttagtatgacaaaaccatctgagaaggaatctgaacagccagcaaaagccacttttgcctttggagctcaaactagtactacagctgatcaaggtgcagcaaagccagtttttagtttcttgaacaacagttcctctagttcaagtacaccagccacttctgctggtggtggcatatttggtagttccacctcttcctccaatccacctgtggctacctttgtgtttggacagtccagcaatcctgtgagcagctctgcctttggtaacactgctgaatccagcacctctcagtctttgctattttctcaagatagcaaactagcaaccacatccagcacaggtacagctgtcaccccatttgtctttggtccaggagccagcagtaataatactaccacctctggtttcggctttggagccacaaccacatctagctctgcaggatcctcctttgtatttggaactggaccctcagcaccatctgccagtccagcatttggtgctaaccagaccccaacatttggacaaagtcaaggtgccagccagcccaatcccccaggctttggatctatatcatcttccacagcattatttcccactggttctcagcctgcaccacctacttttgggacagtgtcaagcagtagccagccccctgtgtttggacagcaacctagtcagtctgcatttggctctggaacaactcctaattctagttcggctttccagtttggcagcagcactacaaatttcaacttcacaaacaacagtccatcaggagtgttcacatttggtgcaaattctagcacacctgcagcctcagcccagccttcaggctcggggggctttccatttaaccagtctccagcagcatttacagtggggtcaaatgggaaaaatgtgttctcttcttctggaacttcattctctggtcgcaagataaagactgctgttagacgcaggaaataaaggtcacattggtgttgtactcaattttaacaacagctggtgccctgctttcagatactggattgtactttgtgctggggttatctgaagtcagatctgcctaaggacttctttaattttggaattttcctcctttctctttcgttacagaagccccaccctgcctcacccacccttttttaaataaataaatagctagactggtgactgattcttcagcaaaaatattttatgatccagcagattattcactgatttgacatagtctggctgtacccaggaatggagcctgcacggtgaatggctttgtatagaacctctttgtctacaccattatgtgcgctgataagcgttcatggaacgcgttgaaattgtaattatatctgaggaattctgtatagattagaattctgtatagattagagagtgttgaaacggatgatttctatgctgagtttgtgctggtgtatgtgtgaagtgagtgagttgggtgtattgtgcgctaaacttttctgatagaggaagcctgattaaagaatggtccgtgctaaggacttgttagatctagttcactctccatttaataattatatgctatttctatattttcattctcctatcacctgtcttgcctttttcattattttattatgaaacttgtgtaaatacaattttgtttctgtactttttggcataacataaatctgtgaacttgaaatttgaattttgtgttagagatttttttgttgtttgtttagtcttgtctcagattttattatgtaaatcccattattcaaagttgcctaaatccatttggaaatctttaaaaaaaaaattggggattcttaaagttgaatttattggcttttctgatccagttttgtttggaccaaaaaccagtattgtacaaagtattaagcatatatttttatatttactaaaatggactgtggtgactttggataataaggaaaagtttaatattaaagccatgtttattacagtataattaacatgttaaaccatgggataaatgccatcaataaaaaattatgacat

SEQ ID NO: 29576 - DNA, 931 bp, Homo Sapiens
gcagagcccagggagctggaggtcggcgcttcctctcgtgcttggtccactgacgcgcggccccgccgcgaggagcatcagatccatgctgctgctgactcggagccccacagcttggcacaggctctctcagctcaagcctccggtcctccctgggaccctgggaggccaggccctgcatctgaggtcctggcttttgtcaaggcagggccctgcagagacaggtgggcagggccagccccagggccctgggcttcgaacccggctgctgatcacaggcctgttcggggctggactcggtggggcctggctggccctgagggctgagaaggagaggctgcagcagcaaaagcgaacagaagccctgcgccaggcagctgtgggccagggcgacttccacctgctggatcacagaggccgggctcgctgcaaggctgacttccggggccagtgggtgctgatgtactttggcttcactcactgccctgacatctgcccagacgagctggagaagctggtgcaggtggtgcggcagctggaagcagagcctggtttgcctccagtgcagcctgtcttcatcactgtggaccccgagcgggacgacgttgaagccatggcccgctacgtccaggacttccacccaagactgttgggtctgaccggctccaccaaacaggttgcccaggctagtcacagttaccgcgtgtactacaatgccggccccaaggatgaggaccaggactacatcgtggaccactccattgccatctacctgctcaaccctgacggcctcttcacggattactacggccggagcagatcggctgagcagatctcagacagtgtgcggcggcacatggcggctttccgcagtgtcctgtcttgagccactgcagtctgggccccatcattaaacgggctgcgtttaaaa

SEQ ID NO: 29577 - DNA, 1918 bp, Homo Sapiens
aagtctacatgaaaaggatggtttcttggagcttccacaaacttaaaaccatgaaacatctattattgctactattgtgtgtttttctagttaagtcccaaggtgtcaacgacaatgaggagggtttcttcagtgcccgtggtcatcgaccccttgacaagaagagagaagaggctcccagcctgaggcctgccccaccgcccatcagtggaggtggctatcgggctcgtccagccaaagcagctgccactcaaaagaaagtagaaagaaaagcccctgatgctggaggctgtcttcacgctgacccagacctgggggtgttgtgtcctacaggatgtcagttgcaagaggctttgctacaacaggaaaggccaatcagaaatagtgttgatgagttaaataacaatgtggaagctgtttcccagacctcctcttcttcctttcagtacatgtatttgctgaaagacctgtggcaaaagaggcagaagcaagtaaaagataatgaaaatgtagtcaatgagtactcctcagaactggaaaagcaccaattatatatagatgagactgtgaatagcaatatcgcaactaaccttcgtgtgcttcgttcaatcctagaaaacctgagaagcaaaatacaaaagttagaatctgatgtctcagctcaaatggaatattgtcgcaccccatgcactgtcagttgcaatattcctgtggtgtctggcaaagaatgtgaggaaattatcaggaaaggaggtgaaacatctgaaatgtatctcattcaacctgacagttctgtcaaaccgtatagagtatactgtgacatgaatacagaaaatggaggatggacagtgattcagaaccgtcaagacggtagtgttgactttggcaggaaatgggatccatataaacagggatttggaaatgttgcaaccaacacagatgggaagaattactgtggcctaccaggtgaatattggcttggaaatgataaaattagccagcttaccaggatgggacccacagaacttttgatagaaatggaggactggaaaggagacaaagtaaaggctcactatggaggattcactgtacagaatgaagccaacaaataccagatctcagtgaacaaatacagaggaacagccggtaatgccctcatggatggagcatctcagctgatgggagaaaacaggaccatgaccattcacaacggcatgttcttcagcacgtatgacagagacaatgacggctggttaacatcagatcccagaaaacagtgttctaaagaagacggtggtggatggtggtataatagatgtcatgcagccaatccaaacggcagatactactggggtggacagtacacctgggacatggcaaagcatggcacagatgatggtgtagtatggatgaattggaaggggtcatggtactcaatgaggaagatgagtatgaagatcaggcccttcttcccacagcaatagtccccaatacgtagatttttgctcttctgtatgtgacaacatttttgtacattatgttattggaattttctttcatacattatattcctctaaaactctcaagcagacgtgagtgtgactttttgaaaaaagtataggataaattacattaaaatagcacatgattttcttttgttttcttcatttctcttgctcaccaagaagtaacaaaagtatagttttgacagagttggtgttcataatttcagttctagttgattgcgagaattttcaaataaggaagaggggtcttttatccttgtcgtaggaaaaccatgacggaaaggaaaaactgatgtttaaaagtccacttttaaaactatatttatttatgtaggatctgtcaaagaaaacttccaaaaagatttattaattaaaccagactctgttgcaat

SEQ ID NO: 29578 - DNA, 2997 bp, Homo Sapiens
gttcccactctccttccacctcggaccggccggggctccgcagagccaaagctcgcttgtccccggaaccgccctgctgccgccgcctgcttcctctgctcgcggttagcccgtcagtccctgctctgtgcgcgcctccatctgggccatggatggtgttgttacagatcttataacagtcggtttaaagcggggatctgatgagcttctttcttctggcatcattaacggaccttttaccatgaatagttctactccttctacagctaatgggaatgacagcaagaaatttaaacgagatagacctccctgttcgccttcccgtgttctccatcttcgaaaaattccatgtgatgtcaccgaagcagagatcatatcattaggtctaccatttggcaaagtaactaatcttttgatgttgaaaggaaaaagccaggctttcttagaaatggcttctgaggaagctgccgttactatggtgaattattacactcctattactcctcaccttcgaagccagcctgtttatattcagtattccaatcacagagaacttaagactgacaatctacctaatcaagctcgagcccaagctgcactgcaggctgtcagtgccgtccaatcaggaagcctggccctttctggaggtccttccaatgaaggcacagtcctacctgggcagagccctgtgcttcgaataattattgaaaacctcttttaccctgttaccctggaagttcttcatcagatattttctaaatttggcacagtcttgaagattatcacctttacaaagaataatcagtttcaagccttgcttcagtatgctgacccagtaaatgcacattatgccaaaatggctctggatggccagaatatctataatgcatgctgcactctgcgcattgacttctccaagctcaccagccttaatgtgaaatataataatgacaaaagcagagacttcactcgcttagaccttcctactggtgatggccagccatcccttgaaccccctatggctgctgcttttggtgcaccgggtataatttcttcaccatatgcaggggctgctggatttgccccagccattggatttcctcaagctacaggtctatcagttccagctgttcctggagctcttggtcctctcacaatcacctcttctgctgtcactggaaggatggccattcctggggctagtggtataccaggaaattctgttctactcgtcacaaatctcaatcctgatcttatcacaccacatgggctttttatcctatttggagtctatggtgatgtacatcgagtgaagattatgtttaataagaaagaaaatgccttggttcagatggcggatgcaaatcaagctcagctagcaatgaaccatctaagtggtcagagactttatgggaaagtgcttcgtgctacactgtccaaacatcaagcagtacagcttcctcgagagggacaagaagaccaaggtctgactaaggatttcagcaatagtcctttgcatcgctttaaaaagccgggctctaaaaacttccagaatatctttccaccatcagccactctgcatctttccaacattcccccttctgttacagtggatgatctgaagaaccttttcatagaagctggatgttcagtgaaggcttttaaattctttcagaaagatcgcaaaatggcgctcattcaattgggatctgtggaagaagcaattcaggccctcattgagcttcataaccatgaccttggagaaaatcaccacctcagagtttccttctcaaaatctacaatctgacttttctgtgaatttttctcctaaaactggaccataatttcagtaaaaccttcagacatagactgaagcagctcaagaccaattttgcctctttcacaaaaataactctgagtttgatattcaagtatattttaaaaatcaagggattttttttttttgtattccccctgcccccgccagtcaaaggtttcttttccctttttaccatggtttctacaaaaataaccttcaggaaaaagaaaatcaggaaaaaaattttttttcaataatcttattccctatattaaattagatttgaagaggattaacgttgttttagtttgggtccagatcagccttatacaacatttctaaactcatttgtacttttaaaaaatttaaacacagacttctaaaattacttgatgtaagtaatttaaatcacttatgaccaagttattaaccttatgaatcagaagtctgacccttgtaggaaattatattcacatataaagtacatcagatctttgccatatattgatggttattatgcataaacacattgagttgtgttggaagcagatttataaacctgcatgttttctttgaatgatttctttttttcactgtaagacactcctttaaataatgcctgtctttaactttttaagactatttggaaaaatgcagtgtctcagctgtccccagggaaattaagtggaattcaactaagatctgttaataagatgtcagaataactaataattttattaggaaaaaatcatgttttaaatttcaaaatgacacttatttgtcaagtaatatgatcttggaaaattttaaagaaaaataatcctacttataaactacttttttataattgttttcagaaaaaaagtttacagtcttaaggaaaatattcaggtctatcatatggtttgacagattttttaaaagttatttttggtaaggtcttcttttagaaaaaaattaatctcaagggttttttgtaccactataatctctaatacttactcagaattactgtgtatttacttaatttcttattatgtgccttattatgtgcttaagatacaataggttagagtttaatctaaatatcttgaaagctatattgtgggcttggtaagcattttgttttttctttctctgttttggtaaggatttaaaatttttttcattgcaatttt

SEQ ID NO: 29579 - DNA, 1864 bp, Homo Sapiens
ctggcggctcttgggactggcggggctgcgcgcggggttagggtgggggtacgggaaggctcaacccaggacctgcgtaccttgctttgggggcgcactaagcacctgccgggagcagggggcgcaccgggaactcgcagatttcgccagttgggcgcactggggatctgtggactgcgtccgggggatgggctagggggacatgcgcacgctttgggccttacagaatgtgatcgcgcgagggggagggcgaagcgtggcgggagggcgaggcgaaggaaggagggcgtgagaaaggcgacggcggcggcgcggaggagggttatctatacatttaaaaaccagccgcctgcgccgcgcctgcggagacctgggagagtccggccgcacgcgcgggacacgagcgtcccacgctccctggcgcgtacggcctgccaccactaggcctcctatccccgggctccagacgacctaggacgcgtgccctggggagttgcctggcggcgccgtgccagaagcccccttggggcgccacagttttccccgtcgcctccggttcctctgcctgcaccttcctgcggcgcgccgggacctggagcgggcgggtggatgcaggcgcgatggacggcggcacactgcccaggtccgcgccccctgcgccccccgtccctgtcggctgcgctgcccggcggagacccgcgtccccggaactgttgcgctgcagccggcggcggcgaccggccaccgcagagaccggaggcggcgcagcggccgtagcgcggcgcaatgagcgcgagcgcaaccgcgtgaagctggtgaacttgggcttccaggcgctgcggcagcacgtgccgcacggcggcgccagcaagaagctgagcaaggtggagacgctgcgctcagccgtggagtacatccgcgcgctgcagcgcctgctggccgagcacgacgccgtgcgcaacgcgctggcgggagggctgaggccgcaggccgtgcggccgtctgcgccccgcgggccgccagggaccaccccggtcgccgcctcgccctcccgcgcttcttcgtccccgggccgcgggggcagctcggagcccggctccccgcgttccgcctactcgtcggacgacagcggctgcgaaggcgcgctgagtcctgcggagcgcgagctactcgacttctccagctggttagggggctactgagcgccctcgacctatgagcctcagccccggaagccgagcgagcggccggcgcgctcatcgccggggagcccgccaggtggaccggcccgcgctccgcccccagcgagccggggacccacccaccaccccccgcaccgccgacgccgcctcgttcgtccggcccagcctgaccaatgccgcggtggaaacgggcttggagctggccccataagggctggcggcttcctccgacgccgcccctccccacagcttctcgactgcagtggggcggggggcaccaacacttggagatttttccggaggggagaggattttctaagggcacagagaatccattttctacacattaacttgagctgctggagggacactgctggcaaacggagacctatttttgtacaaagaacccttgacctggggcgtaataaagatgacctggacccctgcccccactatctggagttttccatgctggccaagatctggacacgagcagtccctgaggggcggggtccctggcgtgaggcccccgtgacagcccaccctggggtgggtttgtgggcactgctgctctgctagggagaagcctgtgtggggcacacctcttcaagggagcgtgaactttataaataaatcagttctgtttaaaaaaaaaaaaaaaa

SEQ ID NO: 29580 - DNA, 1568 bp, Homo Sapiens
aggcttgtgtagatcatgccgccagtagcggccctgactgccgaggaaacggtagcttaggacagttggctgttaagtgacactgattctccccgccccgcctgacccccgagaaggaggcttgtcccccgctgcgtgagggggtggggaagtgggtagtgaattcggatctacctgggaggggggagtggaagttcccgccccggagagcggcgaggcggcagccacagttgattatggaagattcccacaagagtaccacgtcagagacagcacctcaacctggttcagcagttcagggagctcacatttctcatattgctcaacaggtatcatctttatcagaaagtgaggagtcccaggactcatccgacagcataggctcctcacagaaagcccacgggatcctagcacggcgcccatcttacagaaaaattttgaaagacttatcttctgaagatacacggggcagaaaaggagacggagaaaattctggagtttctgctgctgtcacttctatgtctgttccaactcccatctatcagactagcagcggacagtacattgccattgccccaaatggagccttacagttggcaagtccaggcacagatggagtacagggacttcagacattaaccatgacaaattcaggcagtactcagcaaggtacaactattcttcagtatgcacagacctctgatggacagcagatacttgtgcccagcaatcaggtggtcgtacaaactgcatcaggagatatgcaaacatatcagatccgaactacaccttcagctacttctctgccacaaactgtggtgatgacatctcctgtgactctcacctctcagacaactaagacagatgacccccaattgaaaagagaaataaggttaatgaaaaacagagaagctgctcgagaatgtcgcagaaagaagaaagaatatgtgaaatgcctggaaaaccgagttgcagtcctggaaaatcaaaataaaactctaatagaagagttaaaaactttgaaggatctttattccaataaaagtgtttgattcctaagaaagaaaatatttttgtggacatgcataaaaattaaatggatttcctagtggagttttataaattaaaaggtcaaaactgaagctttttatttaggcttttccaaatcaaggataaatatcttacgcacgatatctagtgacagaggagaaagtggaaaatgacctcaaggaagctacgggcacaactggaagctttgtagaaattaaacatattcaaggagcaagaaatgaactttcagcagtctaaattttctaaataaccaatagttgccaatctaaaatggcagagaagatgaaatttgataaactgaattttttttaaaaatccatttaccctacaggtttgcatttgtttgctgaaatttacctttttttagttatatatatgtgtgtgtgtgtgtgtaatttctgccaataaattctaaattacaaaggtaagagaaaacctagtacattactaaatatataaagtatatgttctgattatgtaaaaaaaaaaaaaaaaaa

SEQ ID NO: 29581 - DNA, 2357 bp, Homo Sapiens
tccggaccctttcttcccatcctttgctcctaggattttacatgttgcctgcaaagggagtcaaacttagggggcaggcaaacaaacgagttctttccagcctctgtaaccggatcgctagagcgaaataaactcgcacaagtgtccagagatcgtagccagacagccagcctgcgcttgaacgaacttttaagtgaggctgcaagagccgccgggatgtagattttagttcgtggccaagcacaactacgacgatcctgtccctgccccaccccatccccaagaatgcatggaggaaggagagaggaagcaggtgagggccgcctgcatttctgcacgtcggcgccggttagaaaccctgcagttttgagagagaagaagaggagatggaggggccaggagccacgactcccgggagagcgcagggaggggcgtgggtgccccttcgcccacctccgcccccgtcacctcgacagctgtcccgctcttggaattcattggcttcctctacccggcctcccaaacaccaccccaatctagtttagccccccgccccaccctcgctgacctaataaggccatgcaagtgtgcgggggagctacataaaagcgcgggctcgcgccgactctgcaccacgcaggggaagagaaagcaggagccgtccagcacggaggaaggcgaccatggccaaggagtggggctacgccagtcacaacggtcctgaccactggcatgaacttttcccaaatgccaagggggaaaaccagtcgcccgttgagctgcatactaaagacatcaggcatgacccttctctgcagccatggtctgtgtcttatgatggtggctctgccaagaccatcctgaataatgggaagacctgccgagttgtatttgatgatacttatgataggtcaatgctgagagggggtcctctccctggaccctaccgacttcgccagtttcatcttcactggggctcttcggatgatcatggctctgagcacaccgtggatggagtcaagtatgcagcggagcttcatttggttcactggaacccgaagtataacacttttaaagaagccctgaagcagcgcgatgggatcgctgtgattggcatttttctgaagataggacatgagaatggcgagttccagattttccttgatgcattggacaagattaagacaaagggcaaggaggcgcccttcacaaagtttgacccatcctgcctgttcccggcatgccgggactactggacctaccagggctcattcaccacgccgccctgcgaggaatgcattgtgtggctgctgctgaaggagcccatgaccgtgagctctgaccagatggccaagctgcggagcctcctctccagtgctgagaacgagcccccagtgcctcttgtgagcaactggcgacctccacagcctatcaataacagggtggtgagagcttccttcaaatgaggctgctggatcttgccctcttcaggaaaggaaacctaccattggagagcttggttccttgcctccttctggtgctcttactccaagtctatttcatttttccacactgagcaatgaatgtgagagatgtggtcaccaagatctaagttacttgttgaaagaaagttactttcgacaagatctaatatgaaagcatagatttcacatttgatctctgtaataatcatctttcctataaaagtagcatttttggtaaagtttcaaagaagaagaaacagagatggaagagtaaagatatttttaaaatggctagctattgggcaccagtttttctgttatctaaaatttcacacaacttcatgtttttatttttatattatgagttgtccatcttaaagaaatatgagtaattctacatgtagtagaggtgtatgaagatcatataacaattaaacataagccagaaattaaaatgactatagacagcaagaattgagctaataatatgttttaactcttaacaccagcaagaagtcagtcatttattgaagttttagctactaagattacttggttttgattaccagtgaaaagaaaacacaatacaatcaggagttttcaaatttttgattcagtatttgaatttcttcttcataaatgtagttggaatttatcctagtatttttctttacctgaaggagggccatttatttttaatttcactacatttttctttgcatgattattaaaataaaaactgcctctgttgtgtttctcactggaggctggaatgaatgatcactagaacacaaaagagtgaatgatgacacttgaagtcaaagcagttgtactgatcaccagaaccaataaagacataaatggaaaacgttg

SEQ ID NO: 29582 - DNA, 4443 bp, Homo Sapiens
ggacgccatgctggggactctgacacccctgtcttcgctgctgctgctgctactggtgctggtgctggggtgtgggccgcgggcgtcctctggtggcggggccggtggggcggcgggctatgccccagtgaagtacatccagcccatgcagaaaggacctgtgggaccgcccttccgtgagggcaaaggccagtacctggaaatgcctctaccgctgctgccgatggacctgaagggagagcccggcccccctgggaagcccgggcctcggggtccccctggcccccctggcttcccaggaaaaccaggcatgggaaagccaggactccatgggcagcctggccctgctgggccccctggcttctcccggatgggcaaggctggtcccccagggctccctggcaaggtcgggccaccagggcagccggggcttcggggggagccaggaatacgaggggaccagggcctccggggacccccaggaccccctggcctcccgggcccctcaggcattactatccctggaaaaccaggtgcccaaggggtgccagggcccccaggattccagggggaaccagggccccagggggagcctgggcccccaggtgatcgaggcctcaagggggataatggagtgggccagcccgggctgcctggggccccagggcaggggggtgcccccggcccccccggcctccctggtccagctggcttaggcaaacctggtttggatgggcttcctggggccccaggagacaagggtgagtctgggcctcctggagttccaggccccaggggggagccaggagctgtgggcccaaaaggacctcctggagtagacggtgtgggagtcccaggggcagcagggttgccaggaccacagggcccatcaggggccaaaggggagccagggacccggggcccccctgggctgataggccccactggctatgggatgccaggactgccaggccccaagggggacaggggcccagctggggtcccaggactcttgggggacaggggtgagccaggggaggatggggagccaggggagcagggcccacagggtcttgggggtccccctggacttcctgggtctgcagggcttcctggcagacgtgggccccctgggcctaagggtgaggcagggcctggaggacccccaggagtgcctggcattcgaggtgaccaggggcctagtggcctggctgggaaaccaggggtcccaggtgagaggggacttcctggggcccatggaccccctggaccaactgggcccaagggtgagccgggtttcacgggtcgccctggaggaccaggggtggcaggagccctggggcagaaaggtgacttggggctccctgggcagcctggcctgaggggtccctcaggaatcccaggactccagggtccagctggccctattgggccccaaggcctgccgggcctgaagggggaaccaggcctgccagggccccctggagaggggagagcaggggaacctggcacggctgggcccacggggcccccaggggtccctggctcccctggaatcacgggccctccggggcctcccgggcccccgggaccccctggtgcccctggggccttcgatgagactggcatcgcaggcttgcacctgcccaacggcggtgtggagggtgccgtgctgggcaaggggggcaagccacagtttgggctgggcgagctgtctgcccatgccacaccggccttcactgcggtgctcacctcgcccttccccgcctcgggcatgcccgtgaaatttgaccggactctctacaatggccacagcggctacaacccagccactggcatcttcacctgccctgtgggcggcgtctactactttgcttaccatgtgcacgtcaagggcaccaacgtgtgggtggccctgtacaagaacaacgtgccggccacctatacctacgatgagtacaagaagggctacctggaccaggcatctggtggggccgtgctccagctgcggcccaacgaccaggtctgggtgcagatgccgtcggaccaggccaacggcctctactccacggagtacatccactcctccttttcaggattcttgctctgccccacataacccgcggggggtgtcctgctgccctggcctcctcccctttagtggtagagcgaccttttcaattacaaagaacctcctggaaaaaaaaacaaaagctgaacagaggcggccgtggccttggcccgaggagactaacttgctttctccctgcatgcaggctgagattgtttctggaaggggctggcctgagtttctttcccccaaatgtctgtgcagtgtcagggctgcaccccataggccctgaggcacacagcccagccccttgtgagtcctggcctctgctgggccctgaaggagctgagagggagctcaactccccaccccgccacgtggggagacagcccttcccactggctccctgatggcacctgctggaggaaaggggcacggcctccctcacagcccttggctggggctcctccagctccccctgggacctccagcatatgacagtggactaaggactgtggggttttcctccaaggggaagggagaagaggggaccatcgaggtggcgagtgtggacaccctgccaggactgcagcccccatggtgatgctgtggcatcagacatgtccgtggtgggcacagtgcctgttgccctgggaaagggcaacctccctttcactgctccagtggcagccatggggaaggcagtttgtgagggcttggggcacagacctggggcaggaggcagctcttcacgttcatccctgtctctcccgggctgcccccgccagctctggctgtttagcttgagggcagcacagaggcccctgggacacctacaggccagaaagatcaacctctgtgaagtgtctagaagtatctagtgcagatggtggcggaggcagaatcgaccatcagcaaacatgagcactcttccctttctccccttccacctgctgcgggctgggctggttttctcaatacaaaattgtaagaggatccttgtcaccccagccaggtatccccaaggcagagcacctctcgtttggccctctgaacaaggtgcacgcgagctgggggatgaagacggctcccacttccttttccttaataagaaccatatggtgggtgtatgtgtgtacaagaggggttcatctgtgggggcttcctctccttccaccctctggttccaatttcctgttctaagcaggactagggcccaggaggctaaggctgggagagaaagggtgccaacaggtcccttgggaatgagttggctctggacgtttctgccctgttccccgatcagagctcctctgcaggaaacaggcaggatgcccctcccaacccctcagtccctacgtcaagcggagtggataaggctgagatgagtgctgggagtggtggacattcctgctcgtgcaaagatggccactttccccgcagctgcagggcctcgcgctcggccctcgccaggccagccccactccttgtaccaagtgtgaactggggtcattcggtctgtgatctcgttgcactgctccaagtctggctgtgtccaggcggtccatgttgaaaatggaggatggctgctgacttctgactggctgagcagtgggttccttcaggttccttgccaaccctcctcccctgcccacaacttctccaaacaaagcaggctgtttgctcacttcttcaaaaggaggaatgataacccaaatctgcccaagtgacacttgagaaggttttggctggggttcctggtggatttcttactacctaacgcccaagaaaaccaactaaggactctcaaaccatacctggtgggggttcttcgctcaacctcttcttccctaggtcaaagccactatcatctgatgtgttagggatgggttctgattggcagaaattaatcagctcccaatgggagcccacggaactaagtagggtcccaagaaaaaaaacgggagctatttcacagagctgagcttctgccaaatttcattcctcaaacctttcaggaggggtggttggcgtttctaaaatgtttatgggatttgagttgcaggtgtccacttaactgactagctttgataaacaatgtcagattttaactatgaaaacgacattaccttgtgcatttttatattgattcctattttttttttaagattaaagtttaaatgttttccactagtcatttcacttctaacttggtataggaagcttagctctctacatacctatcatgtgccctgtatcacagaagattcaggaaaaatgcacttgggaatcaaagaaaatggaacttctttttgaaaagacaagcaaccatgttaactgtattgacacatcctcaataaaacctgttgtat

SEQ ID NO: 29583 - DNA, 2245 bp, Homo Sapiens
cccgcggctgccgccgccatttcgggcgctgctgtgaagctgaaaccggagccggtccgctgggcggcgggcgccgggggccggaggggcgcgcgcggcggcggcaccccagcgtttaggcgcggaggcagccatggcgggcaacttcgactcggaggagcggagtagctggtactgggggaggttgagtcggcaggaggcggtggcgctgctgcagggccagcggcacggggtgttcctggtgcgggactcgagcaccagccccggggactatgtgctcagcgtctcagagaactcgcgcgtctcccactacatcatcaacagcagcggcccgcgcccgccggtgccaccgtcgcccgcccagcctccgcccggggtgagcccctccagactccgaataggagatcaagagtttgattcattgcctgctttactggaattctacaaaatacactatttggacactacaacgttgatagaaccagtttccagatccaggcagggtagtggagtgattctcaggcaggaggaggcggagtatgtgcgagccctctttgactttaatgggaatgatgaggaagatcttccctttaagaaaggagacatcttgagaatccgggacaagcctgaagagcagtggtggaatgcggaggacagcgaaggcaagagagggatgattccagtcccttacgtcgagaagtatagacctgcctccgcctcagtatcggctctgattggaggtcggtgagctggtaaaggttacgaagattaatgtgagtggtcagtgggaaggggagtgtaatggcaaacgaggtcacttcccattcacacatgtccgtctgctggatcaacagaatcccgatgaggacttcagctgagtatagttcaacagttttgctgacagatgggaacaatcttttttttttttttccaactgccatctatacaattttcttacagatgtcaaaagcagtctagtttatataagcattctgttacctgtgatattttttagactgaactgctccattcctagtcttaattaccatattcagggtacgaactggagggcttgtgtgttagcttctgaattggcaattggaggcggtagtggtcgtgcctgtgtgtatcagaagggataggtatcttgcctcctttctctcaggcagtgcaaatcaccctgtggaaaaccgatggacaggaaggagtgttacacactgcttaccctgatttattcagtggttttgttttcattctggaaccatactatcaaatggcgacagactgttccgttccacccccgtgaagtaatcatgcaccgtgtgaatagtatcaagcaggattgctttcattgtatggagcatgaccagcgtgtgactcattctgacatttcagatcctaagaattctaagaacactactagaagcatttgttccctcctagtcaatgcttcatactttttcttgggattcttttagcccttgacattcttgtcccccaaacctgtaagtaggtgaattcctaagataagtgtgtattttcattccaggtgaaaagcaggatgtaccgagcactttattcagtgcatagctttaagccagtgttggattcactaagtggacagccagtctcccagctctctgccttccccaaaagggtcgtagtaggtcacccttctacagcagctaactagagtcctaactaatgggatccagcagggccatttctccagagggccagtatcctattaggagactcttggaattcttaggttctactcaagagtggaaggaccaatcacctctgatattctgtggaaggttttggggtcaaattctgccctctgcattctgtgcaacttgtataaaagtcaagttagtattacatgaatttggggtagggttagtgctttgaaaaaatgttgaaccggctgggcgcggtggctcacgtctgtaatcccagcactttgggaggccgaggcgggtggatcatgaggtcaggagttcgagaccagcctggccaacatagtgaaaccccatctctgctaaagatataaaaaattagcccggcgtggtggtgcacgcctgtaatcccagctactcgggaggctgaggcaggagaattgcttcaacctgggaggtggaggctgcagtgagccgagatcgcaccactgcgttccagcctgagcgacagggcaagactcagtctcaaaaaaaaaaaaaaggaaaaaaaaaagaaaaaaaaa

SEQ ID NO: 29584 - DNA, 5662 bp, Homo Sapiens
ggtcgccggccagcgtgaaccgggacatggagccgcccggcgggagcctggggcccggccgcgggacccgggacaagaagaagggccggagcccagatgagctgccctcggcgggcggcgacggcggcaaatctaagaaatttctggagagatttaccagcatgagaattaagaaggagaaggaaaagcccaattctgctcatagaaattcttctgcatcatatggggatgatcccacagcacagtcattgcaagatgtttcagatgaacaagtgctggttctctttgaacagatgctgctggatatgaacctgaatgaggagaaacagcaacctttgagggagaaggacatcatcatcaagagggagatggtgtcccaatacttgtacacctccaaggctggcatgagccagaaggagagctctaagtctgccatgatgtatattcaggagttgaggtcaggcttgcgggatatgcctctgctcagctgcctggagtcccttcgtgtgtctctcaacaacaaccctgtcagttgggtgcaaacatttggtgctgaaggcttggcctccttattggacattcttaaacgacttcatgatgagaaagaagagactgctgggagttacgatagccggaacaagcatgagatcattcgctgcttgaaagcttttatgaacaacaagtttggaatcaagaccatgttggagacagaagaaggaatcctactgctggtcagagccatggatcctgctgttcccaacatgatgattgatgcagctaagctgctttctgctctttgtattctaccgcagccagaggacatgaatgaaagggttttggaggcaatgacagaaagagctgagatggatgaagtggaacgtttccagccgctgctggatggattaaaaagtggaaccactattgcactgaaggttggatgcctacagctgatcaatgctctcatcacaccagcggaggaacttgacttccgagttcacatcagaagtgaactgatgcgtttggggctacatcaggtgttgcaggaccttcgagagattgaaaatgaagatatgagagtgcaactaaatgtgtttgatgaacaaggggaagaggattcctatgacctgaagggacggctggatgacattcgcatggagatggatgactttaatgaagtctttcagattctcttaaacacagtgaaggattcaaaggcagagccacacttcctttccatcctgcagcacttactcttggtccgaaatgactatgaggccagacctcagtactataagttgattgaagaatgtatttcccagatagttctgcacaagaacggggctgatcctgacttcaagtgccggcacctccagattgagattgagggattaattgatcaaatgattgataagacaaaggtggagaaatctgaagccaaagctgcagagctggaaaagaagttggactcagagttaacagcccgacatgagctacaggtggaaatgaaaaagatggaaagtgactttgagcagaagcttcaagatcttcagggagaaaaagatgcactgcattctgaaaagcagcaaattgccacagagaaacaggacctggaagcagaggtgtcccagctcacaggagaggttgccaagctgacaaaggaactggaagatgccaagaaagaaatggcttccctctctgcggcagctattactgtacctccttctgttcctagtcgtgctcctgttccccctgcccctcctttacctggtgactctggcactattattccaccaccacctgctcctggggatagtaccactcctcctcctcctcctcctcctcctcctcctccacctcctttacctggaggtactgctatctctccaccccctcctttgtctggggatgctaccatccctccaccccctcctttgcctgagggtgttggcatcccttcaccctcttctttgcctggaggtactgccatccccccacctcctcctttgcctgggagtgctagaatccccccaccaccacctcctttgcctgggagtgctggaattccccccccacctcctcccttgcctggagaagcaggaatgccacctcctcctccccctcttcctggtggtcctggaatccctccacctcctccatttcccggaggccctggcattcctccacctccacccggaatgggtatgcctccacctcccccatttggatttggagttcctgcagccccagttctgccatttggattaacccccaaaaagctttataagccagaggtgcagctccggaggccaaactggtccaagcttgtggctgaggacctctcccaggactgcttctggacaaaggtgaaggaggaccgctttgagaacaatgaacttttcgccaaacttacccttaccttctctgcccagaccaagaccaagaaggatcaagaaggtggagaagaaaagaaatctgtgcaaaagaaaaaagtaaaagagttaaaggtgttggattcaaagacagcccagaatctctcaatctttttgggttccttccgcatgccctatcaagagattaagaatgtcatcctggaggtgaatgaggctgttctgactgagtctatgatccagaacctcattaagcaaatgccagagccagagcagttaaaaatgctttctgaactgaaggatgaatatgatgacctggctgagtcagagcagtttggcgtggtgatgggcactgtgccccgactgcggcctcgcctcaatgccattctcttcaagctacaattcagcgagcaagtggagaatatcaagccagagattgtgtctgtcactgctgcatgtgaggagttacgtaagagtgagagcttttccaatctcctagagattaccttgcttgttggaaattacatgaatgctggctccagaaatgctggtgcttttggcttcaatatcagcttcctctgtaagcttcgagacaccaagtccacagatcagaagatgacgttgttacacttcttggctgagttgtgtgagaatgactatcccgatgtcctcaagtttccagacgagcttgcccatgtggagaaagccagccgagtttctgctgaaaacttgcaaaagaacctagatcagatgaagaaacaaatttctgatgtggaacgtgatgttcagaatttcccagctgccacagatgaaaaagacaagtttgttgaaaaaatgaccagctttgtgaaggatgcacaggaacagtataacaagctgcggatgatgcattctaacatggagaccctctataaggagctgggcgagtacttcctctttgaccccaagaagttgtctgttgaagaatttttcatggatcttcacaattttcggaatatgtttttgcaagcagtcaaggagaaccagaagcggcgggagacagaagaaaagatgaggcgagcaaaactagccaaggagaaggcagagaaggagcggctagagaagcagcagaagagagagcaactcatagacatgaatgcagagggcgatgagacaggtgtgatggacagtcttctagaagccctgcagtcaggggcagcattccgacggaagagagggccccgtcaagccaacaggaaggccgggtgtgcagtcacatctctgctagcttcggagctgaccaaggatgatgccatggctgctgttcctgccaaggtgtccaagaacagtgagacattccccacaatccttgaggaagccaaggagttggttggccgtgcaagctaatgtgggtcctgtgaccgcggcagctcctcagcggagccgcagactgtcctgccctgcagcatgtgcctaaaggctcaaggggatattcctctggggtggccactcccaccaccctgaccctgtctttctctctggcctgctgctctctcaacatcacatacagcttcagctgcctggaggccagaaggaaagggcagtgcaggggaggcctgagcccgacttagccagccctggctgttgtattaccaaagcagggtccatgtttgctgccttaaccctgtctcctctctgttactcagagggcctcatctcagacaaggcccagcctgctttttctcagccctgactttctaatgggctttcccccctaggtcagtcttgctggatttgtgcttttcttttgtggtttctctggccctgagaatagcatggggcttgtaaacctttgggctagatccctcctttcattgctgttgtctctgctcttccctctcctggctgtggttatttattattagtggtgtggcactgggagctgctcctaaggaagcagggagcaaatcccacctttaccccaccttcctgggaaaggcctccaaagcaaaggatctggaccagtttccctgctgtgctgtggcccaggccagagcctgtgggcaggcaggcagggcatagcgacagtgtgggacctgcccccagcttctgccacgctttatgcccttgcctctctggacgctctgcaccaaccccaggctactgagccaccttccctcctcatgccttccctgagctttggtgcatctcatctggactatgggttgtactgtgaccatcccaacacctcaccctctgtctacaaggaaatgggaggtggagggttgtactgtgaccatcccaacacctcaccctctgtctacaaggaaatgggaggtggagcctcctggctgagaaattgttttgcaaatggatctatttttgtatgaaaaaaaaaatttttttaaagaaaactgttccttccccctttcccctccataatgtaagaagctttggtggcaggttacagagttctgggatttcttctcacaggcccaatcctgaatgtgcccctggaccttctggacccttgagtccaaggcagatcctctctcccagggaatccgacacaggaggaaccccttctctggttgagctgggccaggcctaagagtagcaggaactctaagaccacagagttttttataaatgtataaatgtatcaagccaaatgtgcagatgctaactggacattctggggaactgggcaccaggagtgccttcatacactgtaccccagctctcttctaaaagagaagtgggtgggcacactgaactgtttggtggccccaaccacaggaagctgcaattctctggcttagggtgatacttttgccctccttgtgcccctctcagctttccatccccagctaggaagaaagaatggcactcttgggcttggcccagaattagagttattagagcaagagagagcttaggaagcatgagggcaactatagtgaggccttattgccaggagggagggttttggttgctggcgcttgtgtataaaggggcaagagcagctcctttggactattcctgggaggactctgatgcagggcgtctgttgctcccctgggtcacctcctccctgctcgctgacatctggggctttgaccctttcttttttaatctacttttgctaagatgcatttaataaaaaaaaagagagagagagagaggtgtgagggacaaaatgcaaacctatttcccttgcctcataggcttctgggatgtcatcacctccagtttgttggttttgtttccaactgttaataaagcattgaaacagt

SEQ ID NO: 29585 - DNA, 1276 bp, Homo Sapiens
cttccctcttcactttgtacctttctctcctcgactgtgaagcgggccgggacctgccaggccagaccaaaccggacctcgggggcgatgcggctgctgcccctgctgcggactgtcctctgggccgcgttcctcggctcccctctgcgcgggggctccagcctccgccacgtagtctactggaactccagtaaccccaggttgcttcgaggagacgccgtggtggagctgggcctcaacgattacctagacattgtctgcccccactacgaaggcccagggccccctgagggccccgagacgtttgctttgtacatggtggactggccaggctatgagtcctgccaggcagagggcccccgggcctacaagcgctgggtgtgctccctgccctttggccatgttcaattctcagagaagattcagcgcttcacacccttctccctcggctttgagttcttacctggagagacttactactacatctcggtgcccactccagagagttctggccagtgcttgaggctccaggtgtctgtctgctgcaaggagaggaagtctgagtcagcccatcctgttgggagccctggagagagtggcacatcagggtggcgagggggggacactcccagccccctctgtctcttgctattactgctgcttctgattcttcgtcttctgcgaattctgtgagccaagcagaccttccctctcatcccaaggagccagagtcctcccaagatcccctggaggaggagggatccctgctgcctgcactgggggtgccaattcagaccgacaagatggagcattgatgggggagatcagagggtctgaggtgactcttgcaggagcctgtcccctcatcacaggctaaagaagagcagtagacagccctggacactctgaagcagaggcaagacaaacacaggcgctttgcaggctgctctgagggtctcagcccatcccccaggaggactgggatttggtatgatcaaatcctcaagccagctgggggcccaggctgaagacctggggacaggtcgattgctggaccagggcaaagaagaagccctgccatctgtgccctgtgggccttttccctggggcagcaccttgccctccccaggggatcactcacttgtcttctatgaagacggactcttcatgaggttgaatttcatgccagtttgtatttttataagtatctagaccaaaccttcaataaaccactcatctttttgttgccctccccaaaaaaaaaaaaaaaaaaaaa

SEQ ID NO: 29586 - DNA, 5616 bp, Homo Sapiens
ccccggcgcagcgcggccgcagcagcctccgccccccgcacggtgtgagcgcccgacgcggccgaggcggccggagtcccgagctagccccggcggccgccgccgcccagaccggacgacaggccacctcgtcggcgtccgcccgagtccccgcctcgccgccaacgccacaaccaccgcgcacggccccctgactccgtccagtattgatcgggagagccggagcgagctcttcggggagcagcgatgcgaccctccgggacggccggggcagcgctcctggcgctgctggctgcgctctgcccggcgagtcgggctctggaggaaaagaaagtttgccaaggcacgagtaacaagctcacgcagttgggcacttttgaagatcattttctcagcctccagaggatgttcaataactgtgaggtggtccttgggaatttggaaattacctatgtgcagaggaattatgatctttccttcttaaagaccatccaggaggtggctggttatgtcctcattgccctcaacacagtggagcgaattcctttggaaaacctgcagatcatcagaggaaatatgtactacgaaaattcctatgccttagcagtcttatctaactatgatgcaaataaaaccggactgaaggagctgcccatgagaaatttacaggaaatcctgcatggcgccgtgcggttcagcaacaaccctgccctgtgcaacgtggagagcatccagtggcgggacatagtcagcagtgactttctcagcaacatgtcgatggacttccagaaccacctgggcagctgccaaaagtgtgatccaagctgtcccaatgggagctgctggggtgcaggagaggagaactgccagaaactgaccaaaatcatctgtgcccagcagtgctccgggcgctgccgtggcaagtcccccagtgactgctgccacaaccagtgtgctgcaggctgcacaggcccccgggagagcgactgcctggtctgccgcaaattccgagacgaagccacgtgcaaggacacctgccccccactcatgctctacaaccccaccacgtaccagatggatgtgaaccccgagggcaaatacagctttggtgccacctgcgtgaagaagtgtccccgtaattatgtggtgacagatcacggctcgtgcgtccgagcctgtggggccgacagctatgagatggaggaagacggcgtccgcaagtgtaagaagtgcgaagggccttgccgcaaagtgtgtaacggaataggtattggtgaatttaaagactcactctccataaatgctacgaatattaaacacttcaaaaactgcacctccatcagtggcgatctccacatcctgccggtggcatttaggggtgactccttcacacatactcctcctctggatccacaggaactggatattctgaaaaccgtaaaggaaatcacagggtttttgctgattcaggcttggcctgaaaacaggacggacctccatgcctttgagaacctagaaatcatacgcggcaggaccaagcaacatggtcagttttctcttgcagtcgtcagcctgaacataacatccttgggattacgctccctcaaggagataagtgatggagatgtgataatttcaggaaacaaaaatttgtgctatgcaaatacaataaactggaaaaaactgtttgggacctccggtcagaaaaccaaaattataagcaacagaggtgaaaacagctgcaaggccacaggccaggtctgccatgccttgtgctcccccgagggctgctggggcccggagcccagggactgcgtctcttgccggaatgtcagccgaggcagggaatgcgtggacaagtgcaaccttctggagggtgagccaagggagtttgtggagaactctgagtgcatacagtgccacccagagtgcctgcctcaggccatgaacatcacctgcacaggacggggaccagacaactgtatccagtgtgcccactacattgacggcccccactgcgtcaagacctgcccggcaggagtcatgggagaaaacaacaccctggtctggaagtacgcagacgccggccatgtgtgccacctgtgccatccaaactgcacctacggatgcactgggccaggtcttgaaggctgtccaacgaatgggcctaagatcccgtccatcgccactgggatggtgggggccctcctcttgctgctggtggtggccctggggatcggcctcttcatgcgaaggcgccacatcgttcggaagcgcacgctgcggaggctgctgcaggagagggagcttgtggagcctcttacacccagtggagaagctcccaaccaagctctcttgaggatcttgaaggaaactgaattcaaaaagatcaaagtgctgggctccggtgcgttcggcacggtgtataagggactctggatcccagaaggtgagaaagttaaaattcccgtcgctatcaaggaattaagagaagcaacatctccgaaagccaacaaggaaatcctcgatgaagcctacgtgatggccagcgtggacaacccccacgtgtgccgcctgctgggcatctgcctcacctccaccgtgcagctcatcacgcagctcatgcccttcggctgcctcctggactatgtccgggaacacaaagacaatattggctcccagtacctgctcaactggtgtgtgcagatcgcaaagggcatgaactacttggaggaccgtcgcttggtgcaccgcgacctggcagccaggaacgtactggtgaaaacaccgcagcatgtcaagatcacagattttgggctggccaaactgctgggtgcggaagagaaagaataccatgcagaaggaggcaaagtgcctatcaagtggatggcattggaatcaattttacacagaatctatacccaccagagtgatgtctggagctacggggtgaccgtttgggagttgatgacctttggatccaagccatatgacggaatccctgccagcgagatctcctccatcctggagaaaggagaacgcctccctcagccacccatatgtaccatcgatgtctacatgatcatggtcaagtgctggatgatagacgcagatagtcgcccaaagttccgtgagttgatcatcgaattctccaaaatggcccgagacccccagcgctaccttgtcattcagggggatgaaagaatgcatttgccaagtcctacagactccaacttctaccgtgccctgatggatgaagaagacatggacgacgtggtggatgccgacgagtacctcatcccacagcagggcttcttcagcagcccctccacgtcacggactcccctcctgagctctctgagtgcaaccagcaacaattccaccgtggcttgcattgatagaaatgggctgcaaagctgtcccatcaaggaagacagcttcttgcagcgatacagctcagaccccacaggcgccttgactgaggacagcatagacgacaccttcctcccagtgcctgaatacataaaccagtccgttcccaaaaggcccgctggctctgtgcagaatcctgtctatcacaatcagcctctgaaccccgcgcccagcagagacccacactaccaggacccccacagcactgcagtgggcaaccccgagtatctcaacactgtccagcccacctgtgtcaacagcacattcgacagccctgcccactgggcccagaaaggcagccaccaaattagcctggacaaccctgactaccagcaggacttctttcccaaggaagccaagccaaatggcatctttaagggctccacagctgaaaatgcagaatacctaagggtcgcgccacaaagcagtgaatttattggagcatgaccacggaggatagtatgagccctaaaaatccagactctttcgatacccaggaccaagccacagcaggtcctccatcccaacagccatgcccgcattagctcttagacccacagactggttttgcaacgtttacaccgactagccaggaagtacttccacctcgggcacattttgggaagttgcattcctttgtcttcaaactgtgaagcatttacagaaacgcatccagcaagaatattgtccctttgagcagaaatttatctttcaaagaggtatatttgaaaaaaaaaaaaagtatatgtgaggatttttattgattggggatcttggagtttttcattgtcgctattgatttttacttcaatgggctcttccaacaaggaagaagcttgctggtagcacttgctaccctgagttcatccaggcccaactgtgagcaaggagcacaagccacaagtcttccagaggatgcttgattccagtggttctgcttcaaggcttccactgcaaaacactaaagatccaagaaggccttcatggccccagcaggccggatcggtactgtatcaagtcatggcaggtacagtaggataagccactctgtcccttcctgggcaaagaagaaacggaggggatggaattcttccttagacttacttttgtaaaaatgtccccacggtacttactccccactgatggaccagtggtttccagtcatgagcgttagactgacttgtttgtcttccattccattgttttgaaactcagtatgctgcccctgtcttgctgtcatgaaatcagcaagagaggatgacacatcaaataataactcggattccagcccacattggattcatcagcatttggaccaatagcccacagctgagaatgtggaatacctaaggatagcaccgcttttgttctcgcaaaaacgtatctcctaatttgaggctcagatgaaatgcatcaggtcctttggggcatagatcagaagactacaaaaatgaagctgctctgaaatctcctttagccatcaccccaaccccccaaaattagtttgtgttacttatggaagatagttttctccttttacttcacttcaaaagctttttactcaaagagtatatgttccctccaggtcagctgcccccaaaccccctccttacgctttgtcacacaaaaagtgtctctgccttgagtcatctattcaagcacttacagctctggccacaacagggcattttacaggtgcgaatgacagtagcattatgagtagtgtggaattcaggtagtaaatatgaaactagggtttgaaattgataatgctttcacaacatttgcagatgttttagaaggaaaaaagttccttcctaaaataatttctctacaattggaagattggaagattcagctagttaggagcccaccttttttcctaatctgtgtgtgccctgtaacctgactggttaacagcagtcctttgtaaacagtgttttaaactctcctagtcaatatccaccccatccaatttatcaaggaagaaatggttcagaaaatattttcagcctacagttatgttcagtcacacacacatacaaaatgttccttttgcttttaaagtaatttttgactcccagatcagtcagagcccctacagcattgttaagaaagtatttgatttttgtctcaatgaaaataaaactatattcatttccactctaaaaaaaaaaaaaaaaa

SEQ ID NO: 29587 - DNA, 2180 bp, Homo Sapiens
gggcggaaaagcctgtttacacagactgcacaccgcctggggaataatgcagtaaaggaagtgagccggctcggcctgactgctccaacttcctgctctcacacacaccagaggggaaaaaaaaagaggagcgagagaaagaaaaaaagggggaaaaatcaggatctcattacaagagccacagaccgtctgcagacgcctgtcagcatggaaagtcgggggctttcgcccgggtcctcctagaaattccccccgaagaagactcccccacatctgggtatggagagtgcaatcacgctgtggcagttcctgttgcagttgctgctggatcagaaacatgagcatttgatctgctggacctcgaacgatggtgaattcaagctcctcaaagcagaagaagtggccaagctgtggggactccgaaaaaacaaaacaaatatgaactatgataagctgagcagagccctgcgatactattatgacaagaacatcatcaagaaggtgatcgggcagaagtttgtgtacaagtttgtctctttcccggagatcctgaagatggatcctcacgcggtggagatcagccgggagagccttctgctgcaggacagcgactgcaaggcgtctccggagggccgcgaggcccacaaacacggcctggccgccctcagaagcacgagccgcaacgaatacatccactcaggcctgtactcgtccttcaccattaattccctgcagaacccaccagacgccttcaaggccatcaagacggagaagctggaggagccgcccgaagacagcccccccgtggaagaagtcaggactgtgatcaggtttgtgaccaataaaaccgacaagcacgtcaccaggccggtggtgtccctgccttccacgtcagaggctgcggcggcgtccgccttcctggcctcgtccgtctcggccaagatctcctctttaatgttgccaaacgctgccagtatttcatccgcctcacccttctcatctcggtccccgtccctgtcccccaactcacccctcccttctgaacacagaagcctcttcctggaggccgcctgccatgactccgattccctggagcccttgaacctgtcatcgggctccaagaccaagtctccatctcttcccccaaaggccaaaaaacccaaaggcttggaaatctcagcgcccccgctggtgctctccggcaccgacatcggctccatcgccctcaacagcccagccctcccctcgggatccctcaccccagccttcttcaccgcacagacaccaaatggattgcttctgactccgagtccactgctctccagcatacatttctggagcagccttagtccagttgctccgctgagtcctgccaggctgcaagggccaagcacgctgttccagttccccacactgcttaatggccacatgccagtgccaatccccagtctggacagagctgcttctccagtactgctttcttcaaactctcagaaatcctgatgacgtctggccacaattaaggactcattaactgatgaaacaaatttgtccccacgggctagtttacctgtgtcgtgagaaggacattgtgaaactcttgttaatttggtttgcacttttcataacatggatagtctagatttatgttagcattttaaaaactgtttttgatatattcaagtatatatgaaaatctgtttggcattaagtgaattttaatgtttttgtttttatatccttttagctcttaagtgttgaacactgttgacagtgaagaacttttcttaatggttttcagtataactaataaggatgtgaagcttttttctctttagttctgagtatgctaaactgtgtgcttatatagactataaccagttgtgccttcctttgcatttaatgtaaatgaatgatttatatattttttagtattaagaggaaatgtttgaaagatgaaaattagtatcaaacagctctctagtagaatttcattatttttcaccagtgggcaatatgaaagcatatatcacgttttgttttactttcaattgtataagaattgccttagaacctcttttgaactgaaattcagtaaatgtccaagtaatgtttttataataaactaagccatatttagacaataaacatcgaaaaaaaaaaaaaaaaaaaaaaaaaaa

SEQ ID NO: 29588 - DNA, 5228 bp, Homo Sapiens
cgggcgagggccgggcaggaggagcgggcgcggcgcgggcgaggctgggacccgagcgcgctcacttcgccgcaaagtgccaacttcccctggagtgccgggcgcgcaccgtccgggcgcgggggaaagaaaggcagcgggaatttgagatttttgggaagaaagtcggatttcccccgtccccttccccctgttactaatcctcattaaaaagaaaaacaacagtaactgcaaacttgctaccatcccgtacgtcccccactcctggcaccatgaaggcggccgtcgatctcaagccgactctcaccatcatcaagacggaaaaagtcgatctggagcttttcccctccccggatatggaatgtgcagatgtcccactattaactccaagcagcaaagaaatgatgtctcaagcattaaaagctactttcagtggtttcactaaagaacagcaacgactggggatcccaaaagacccccggcagtggacagaaacccatgttcgggactgggtgatgtgggctgtgaatgaattcagcctgaaaggtgtagacttccagaagttctgtatgaatggagcagccctctgcgccctgggtaaagactgctttctcgagctggccccagactttgttggggacatcttatgggaacatctagagatcctgcagaaagaggatgtgaaaccatatcaagttaatggagtcaacccagcctatccagaatcccgctatacctcggattacttcattagctatggtattgagcatgcccagtgtgttccaccatcggagttctcagagcccagcttcatcacagagtcctatcagacgctccatcccatcagctcggaagagctcctctccctcaagtatgagaatgactacccctcggtcattctccgagaccctctccagacagacaccttgcagaatgactactttgctatcaaacaagaagtcgtcaccccagacaacatgtgcatggggaggaccagtcgtggtaaactcgggggccaggactcttttgaaagcatagagagctacgatagttgtgatcgcctcacccagtcctggagcagccagtcatctttcaacagcctgcagcgtgttccctcctatgacagcttcgactcagaggactatccggctgccctgcccaaccacaagcccaagggcaccttcaaggactatgtgcgggaccgtgctgacctcaataaggacaagcctgtcattcctgctgctgccctagctggctacacaggcagtggaccaatccagctatggcagtttcttctggaattactcactgataaatcctgtcagtcttttatcagctggacaggagatggctgggaattcaaactttctgacccagatgaggtggccaggagatggggaaagaggaaaaacaaacctaagatgaattatgagaaactgagccgtggcctacgctactattacgacaaaaacatcatccacaagacagcggggaaacgctacgtgtaccgctttgtgtgtgacctgcagagcctgctggggtacacccctgaggagctgcacgccatgctggacgtcaagccagatgccgacgagtgatggcactgaaggggctggggaaaccctgctgagaccttccaaggacagccgtgttggttggactctgaattttgaattgttattctattttttattttccagaactcattttttaccttcaggggtgggagctaagtcagttgcagctgtaatcaattgtgcgcagttgggaaaggaaagccaggacttgtggggtgggtgggaccagaaattcttgagcaaattttcaggagagggagaagggccttctcagaagcttgaaggctctggcttaacagagaaagagactaatgtgtccaatcatttttaaaaatcatccatgaaaaagtgtcttgagttgtggacccattagcaagtgacattgtcacatcagaactcatgaaactgatgtaaggcaattaatttgcttctgtttttaggtctgggagggcaaaaaagaggtgggtgggatgaaacatgttttggggggggatgcactgaaaatctgagaactatttacctatcactctagttttgaagcaaagatggacttcagtggggaggggccaaaaccgttgttgtgttaaaatttattttattaaattttgtgccagtattttttttcttaaaaatcgtcttaagctctaaggtggtctcagtattgcaatatcatgtaagtttgtttttatttgccggctgaggattctgtcacaatgaaagaaaactgtttatatagaccccattggaaaagcaaaacgctctcactgagatcagggatcccaaattcatgggacttatataagaaggacaattaatgctgatttgggtacaggggaattatgtgtgtgaatgtcatctacaattaaaaaaaattagcacatccctttacttacttgttatcagtggattctcggggtttggacttaatgttgagctaagaagcattaagtctttgaactgaatgtattttgcatccctggttttggacgacagtaaacgtaggagcactgttgaagtcctggaagggagatcgaaggaggaagattgacttggttctttcttagtcctatatctgtagcatagatgacttggaataaaagctgtatgcatgggcattacccctcaggtcctaagaaataagtcctgaatgcatgtcgttccaaactaacactctgtaatttttcttttatgtcttattttccaagagtcctccattttttgcaccccctcaccgccaactctgttattcagtagagagaagtgtacggctttctgattggtgagtgaaaaagtaacttgagacacgacctaagttgaagagtttagacttgctgagttttagaagtgatggaaattaagagagcatttcaataaaatgtgacttggctgtctttggaagagaagtgcaaggctttcctttgaagaatttaaattagtccggtaggatgtcaggtgagactgtgtatgcaaaatgaatggcacaggtgatgccagggcctcttgcttgggtctgatgtcttggcacagggtaagtgaaggttaattccagaagagaggaatgacttgaaggcaaaggaaactaaggaaggaggttcagtgaggaaaataaggttgtccatgagatttgaatagatttttagttcccccaaggtttaaatacaaacatagtcaagcaaggtagtcatctttctgctggttgtgagggggaatctgaaaatggagttttagaggaaaagtcaacatctaactagtgaggaaaagtgcctaatacaattagaatctccctcactctatagttgcccagttgaaaggataaggaggaggggtggcttttatggacttccatgagagaaggaaagaaatatttcaggtaagcttctcagggctggccctttttgggatttggatgagaaattggaagtactaactactttctagcatatctttaagaaaattgattgttatttactcccagatcctcttgcagacccagaattatcaggaacatagctctgtgattcatgagtgtccccatactgatgaattggagcatccatatggaaagcaaaggcagaattatcccagctgtattattttgatcttttggatgcaggtgccttaatgaagctctcaaaatattttaggagctgctcagggagtgttgggtggaactgtttggactacattgttttctcttagattatgtgatttttgttgggcactggcaaaaggtgtgtgtgtgaatgtgtgcatgtgtgtgaatgttgtgtgtgtgtgtgtgtgtgtgtgtgtgtgtgtgtgtgtttgcagacatgcaaaactgcagctgaaataataccttagatttctaggtaagtctttccacatttcaataatgggtaagagtagaaccagggccgggtatcaattattgcttgctgtttgcaaccaggcataaaatcactttctcaaatcatccaccgttcctattaaatttatgccggaaactctccttctgtgagtataactcctgcagttcctatagcagataagatataagaaagtgcctcctagtgctcctccgcccgcttgtttgctaaaattccctttctctctaagtccaccattttcaagatttgtagatagtgtattagttaagacagctttgtcgatctggccagatgttttttctcctttgtccaaaggccagagaccatcccaggaagagtggtgggtggtttatacactggaaatgttgcgtttatgctttttaaaaacacacgttaacttcagaggaaggatgggcaaatctggtctagctgggtgaaacccttattttcccagagatgccttaacctttgttggttttggctttagggttcagagtcacttttgttcccttctccattctggagagggacttcccctacatagagccctgatttttgtggctgtggggattggaggtagcattcaaagatcagatgtgcttttcctcactttggagatgaacactctgggttttacagcattaacctgcctaaccttcatggtgagaaatacaccatctctcttctagtcatgctgtgcatgccgcttactctgttggggtctatataaatttgttgaactcttacctacattccaaagaagtttcaaggaaccataaatatatgtatacatatacatatataaaatatatatattaaaataaaattatcaggaatactgcctcagttattgaacttttttttttaagaatactttttttttaagctgagaagtatagggatgaaaaagatgttatattgtgtttgactattttccaacttgtattttcatataatttatattttttaaaagctgaaaatttagaagcaagatgaaaaaaaggaaaagcaggtgctttttaaaaatcagaactgaggtagcttagagatgtagcgatgtaagtgtcgatgtttttttaaaaaaaaatgcaaaaaaattcttatggcggagttttttgtttgtttattttagtagctgatgctggcacatcattttgctggagagttttttatatactgtagcctgatttcatattgtattttaaactgtgtgaaattaaaaacaaagaatttcattcataaaaaaaaaaaaaaaaaaaaaaaaaaaaaaaaaaaaaaaaaa

SEQ ID NO: 29589 - DNA, 2478 bp, Homo Sapiens
ggcagcggcaacggcagagacagcaacgtgcccgccgcagtcagcccggcctcgtcggacccgcaccggcccgcccgcccgcccgcaccgcgtcggggcgccctctccactgcgcgcggtacaaggaaatggtagaactagtgatctcacccagcctcactgtaaacagcgattgtctggataaactgaagtttaaccgtgctgacgctgctgtgtggactctgagtgacagacaaggcatcaccaaatcggcccccctgagagtgtcccagctcttctccagatcttgcccacgtgtcctcccccgccagccttccacagccatggcagcctacggccagacgcagtacagtgcggggatccagcaggctaccccctatacagcttacccacctccagcacaagcctatggaatcccttcctacagcatcaagacagaagacagcttgaaccattcccctggccagagtggattcctcagctatggctccagcttcagcacctcacccactggacagagcccatacacctaccagatgcacggcacaacagggttctatcaaggaggaaatggactgggcaacgcagccggtttcgggagtgtgcaccaggactatccttcctaccccggcttcccccagagccagtacccccagtattacggctcatcctacaaccctccctacgtcccggccagcagcatctgcccttcgcccctctccacgtccacctacgtcctccaggaggcatctcacaacgtccccaaccagagttccgagtcacttgctggtgaatacaacacacacaatggaccttccacaccagcgaaagagggagacacagacaggccgcaccgggcctccgacgggaagctccgaggccggtctaagaggagcagtgacccgtccccggcaggggacaatgagattgagcgtgtgttcgtgtgggacttggatgagacaataattatttttcactccttactcacggggacatttgcatccagatacgggaaggacaccacgacgtccgtgcgcattggccttatgatggaagagatgatcttcaaccttgcagatacacatctgttcttcaatgacctggaggattgtgaccagatccacgttgatgacgtctcatcagatgacaatggccaagatttaagcacatacaacttctccgctgacggcttccacagttcggccccaggagccaacctgtgcctgggctctggcgtgcacggcggcgtggactggatgaggaagctggccttccgctaccggcgggtgaaggagatgtacaatacctacaagaacaacgttggtgggttgataggcactcccaaaagggagacctggctacagctccgagctgagctggaagctctcacagacctctggctgacccactccctgaaggcactaaacctcatcaactcccggcccaactgtgtcaatgtgctggtcaccaccactcaactaattcctgccctggccaaagtcctgctatatggcctggggtctgtgtttcctattgagaacatctacagtgcaaccaagacagggaaggagagctgcttcgagaggataatgcagagattcggcagaaaagctgtctacgtggtgatcggtgatggtgtggaagaggagcaaggagcgaaaaagcacaacatgcctttctggcggatatcctgccacgcagacctggaggcactgaggcacgccctggagctggagtatttatagcaggatcagcagcatctccacctgccatctcaccctcagaccccctcgccttccccacctccccaccgagaactccagagacccagatgttggacaccaggaaggggccccacagccgagacgacgtgtccagtgaccatctcagaagccgtccatcagtccaaatgggggttctgagaaggaaagtacccaacattggcttcggagtatttgactttggggaaaagggctggctcggagtctagactcttctgtaagactcacagaacaaaagcaaggaattgctgatttggggggtgcctggtgatgaggaggggatgggtttgtcttgtcttctttttaatttatggactagtctcattactccggaattatgctcttgtacctgtgtggctgggtttcttagtcgttggtttggtttggttttttgaactggtatgtggggtggttcacagttctaatgtaagcactctattctccaagttgtgctttgtggggacaatcattctttgaacattagagaggaaggcagttcaagctgttgaaaagactattgcttatttttgtttttaaagacctacttgacgtcatgtggacagtgcacgtgccttacgctacatcttgttttctaggaagagggggatgctgggaaggaatgggtgctttgtgatggataaaaggcattaaataaaaccacgtttacattttgaaaaaaaaaaaaaaaaaaaaaaaa

SEQ ID NO: 29590 - DNA, 14756 bp, Homo Sapiens
ctgggcggccgggcgcggggagagggcgcgggagcggctcgtgcggcaggtaccatgcggacgcgcgagcccggcgaggccccggcaggcccgtccctgctcgggggcgcgctgagacggcgggtgagctccacgagagcgccgtcgccacttcgggccaactttgcgattcccgacagttaagcaatggggagacatttggctttgctcctgcttctgctccttctcttccaacattttggagacagtgatggcagccaacgacttgaacagactcctctgcagtttacacacctcgagtacaacgtcaccgtgcaggagaactctgcagctaagacttatgtggggcatcctgtcaagatgggtgtttacattacacatccagcgtgggaagtaaggtacaaaattgtttccggagacagtgaaaacctgttcaaagctgaagagtacattctcggagacttttgctttctaagaataaggaccaaaggaggaaatacagctattcttaatagagaagtgaaggatcactacacattgatagtgaaagcacttgaaaaaaatactaatgtggaggcgcgaacaaaggtcagggtgcaggtgctggatacaaatgacttgagaccgttattctcacccacctcatacagcgtttctttacctgaaaacacagctataaggaccagtatcgcaagagtcagcgccacggatgcagacataggaaccaacggggaattttactacagttttaaagatcgaacagatatgtttgctattcacccaaccagtggtgtgatagtgttaactggtagacttgattacctagagaccaagctctatgagatggaaatcctcgctgcggaccgtggcatgaagttgtatgggagcagtggcatcagcagcatggccaagctaacggtgcacatcgaacaggccaatgaatgtgctccggtgataacagcagtgacattgtcaccatcagaactggacagggacccagcatatgcaattgtgacagtggatgactgcgatcagggtgccaatggtgacatagcatctttaagcatcgtggcaggtgaccttctccagcagtttagaacagtgaggtcctttccagggagtaaggagtataaagtcaaagccatcggtgacattgattgggacagtcatcctttcggctacaatctcacactacaggctaaagataaaggaactccgccccagttctcttctgttaaagtcattcacgtgacttctccacagttcaaagccgggccagtcaagtttgaaaaggatgtttacagagcagaaataagtgaatttgctcctcccaacacacctgtggtcatggtaaaggccattcctgcttattcccatttgaggtatgtttttaaaaggacacctggaaaagctaaattcagtttaaattacaacactggtctcatttctattttagaaccagttaaaagacagcaggcagcccattttgaacttgaagtaacaacaagtgacagaaaagcgtccaccaaggtcttggtgaaagtcttaggtgcaaatagcaatccccctgaatttacccagacagcgtacaaagctgcttttgatgagaacgtgcccattggtactactatcatgagcctgagtgccgtagaccctgatgagggtgagaatgggtacgtgacatacagtatcgcaaatttaaatcatgtgccgtttgcgattgaccatttcactggtgccgtgagtacgtcagaaaacctggactacgaactgatgcctcgggtttatactctgaggattcgtgcatcagactggggcttgccgtaccgccgggaagtcgaagtccttgctacaattactctcaataacttgaatgacaacacacctttgtttgagaaaataaattgtgaagggacaattcccagagatctaggcgtgggagagcaaataaccactgtttctgctattgatgcagatgaacttcagttggtacagtatcagattgaagctggaaatgaactggatttgtttagtttaaaccccaactcgggggtattgtcattaaagcgatcgctaatggatggcttaggtgcaaaggtgtctttccacagtctgagaatcacagctacagatggagaaaattttgccacaccattatatatcaacataacagtggctgccagtcacaagctggtaaacttgcagtgtgaagagactggtgttgccaaaatgctggcagagaagctcctgcaggcaaataaattacacaaccagggagaggtggaggatattttcttcgattctcactctgtcaatgctcacataccgcagtttagaagcactcttccgactggtattcaggtaaaggaaaaccagcctgtgggttccagtgtaattttcatgaactccactgaccttgacactggcttcaatggaaaactggtctatgctgtttctggaggaaatgaggatagttgcttcatgattgatatggaaacaggaatgctgaaaattttatctcctcttgaccgtgaaacaacagacaaatacaccctgaatattaccgtctatgaccttgggataccccagaaggctgcgtggcgtcttctacatgtcgtggttgtcgatgccaatgataatccacccgagtttttacaggagagctattttgtggaagtgagtgaagacaaggaggtacatagtgaaatcatccaggttgaagccacagataaagacctggggcccaacggacacgtgacgtactcaattcttacagacacagacacattttcaattgacagcgtgacgggtgttgttaacatcgcacgccctctggatcgagagctgcagcatgagcactccttaaagattgaggccagggaccaagccagagaagagcctcagctgttctccactgtcgttgtgaaagtatcactagaagatgttaatgacaacccacctacatttattccacctaattatcgtgtgaaagtccgagaggatcttccagaaggaaccgtcatcatgtggttagaagcccacgatcctgatttaggtcagtctggtcaggtgagatacagccttctggaccacggagaaggaaacttcgatgtggataaactcagtggagcagttaggatcgtccagcagttggactttgagaagaagcaagtgtataatctcactgtgagggccaaagacaagggaaagccagtttctctgtcttctacttgctatgttgaagttgaggtggttgatgtgaatgagaacctgcacccacccgtgttttccagctttgtggaaaaggggacagtgaaagaagatgcacctgttggttcattggtaatgacggtgtcggctcatgatgaggacgccggaagagatggggagatccgatactccattagagatggctctggcgttggtgttttcaaaataggtgaagagacaggtgtcatagagacgtcagatcgactggaccgtgaatcgacctcccattattggctaacagtctttgcaaccgatcagggtgtcgtgcctctttcatcgttcatagagatctacatagaggttgaggatgtcaatgacaatgcaccacagacatcagagcctgtttattacccagaaatcatggaaaattctcctaaagatgtatctgtggtccagatcgaggcatttgatccagattcgagctctaatgacaagctcatgtacaaaattacaagtggaaatccacaaggattcttttcaatacatcctaaaacaggtctcatcacaactacgtcaaggaagctagaccgagaacagcaagatgaacacatattagaggttactgtgacagacaatggtagtccccccaaatcaaccattgcaagagtcattgtgaaaatccttgatgaaaatgacaacaaacctcagtttctgcaaaagttctacaaaatcagactccctgagcgggaaaagccagaccgagaaagaaatgccagacgggagccgctctatcgcgtcatagccaccgacaaggatgagggccccaatgcagaaatctcctacagcatcgaagacgggaatgagcatggcaaatttttcatcgaaccgaaaactggagtggtttcgtccaagaggttttcagcagctggagaatatgatattctttcaattaaggcagttgacaatggtcgccctcaaaagtcatcaaccaccagactccatattgaatggatctccaagcccaaacagtccctggagcccatttcatttgaagaatcattttttacctttactgtgatggaaagtgaccccgttgctcacatgattggagtaatatctgtggagcctcctggcatacccctttggtttgacatcactggtggcaactacgacagtcacttcgatgtggacaagggaactggaaccatcattgttgccaaacctcttgatgcagaacagaagtcaaactacaacctcacagtcgaggctacagatggaaccaccactatcctcactcaggtattcatcaaagtaatagacacaaatgaccatcgtcctcagttttctacatcaaagtatgaagttgttattcctgaagatacagcgccagaaacagaaattttgcaaatcagtgctgtggatcaggatgagaaaaacaaactaatctacactctgcagagcagtagagatccactgagtctcaagaaatttcgtcttgatcctgcaaccggctctctctatacttctgagaaactggatcatgaagctgtttcaccagcacacctcacggtcatggtacgagatcaagatgtgcctgtaaaacgcaactttgcaaggattgtggtcaatgtcagcgacacgaatgaccacgccccgtggttcaccgcttcctcctacaaagggcgggtttatgaatcggcagccgttggctcagttgtgttgcaggtgacggctctggacaaggacaaagggaaaaatgctgaagtgctgtactcgatcgagtcaggaaatattggaaatattggaaattcttttatgattgatcctgtcttgggctctattaaaactgccaaagaattagatcgaagtaaccaagcggagtatgatttaatggtaaaagctacagataagggcagtccaccaatgagtgaaataacttctgtgcgtatctttgtcacaattgctgacaacgcctctccgaagtttacatcaaaagaatattctgttgaacttagtgaaactgtcagcattgggagtttcgttgggatggttacagcccatagtcaatcatcagtggtgtatgaaataaaagatggaaatacaggtgatgcttttgatattaatccacattctggaactatcatcactcagaaagccctggactttgaaactttgcccatttacacattgataatacaaggaactaacatggctggtttgtccactaatacaacggttctagttcacttgcaggatgagaatgacaacgcgccagtttttatgcaggcagaatatacaggactcattagtgaatcagcctcaattaacagcgtggtcctaacagacaggaatgtcccactggtgattcgagcagctgatgctgataaagactcaaatgctttgcttgtatatcacattgttgaaccatctgtacacacatattttgctattgattctagcactggtgctattcatacagtactaagtctggactatgaagaaacaagtatttttcactttaccgtccaagtgcatgacatgggaaccccacgtttatttgctgagtatgcagcgaatgtaacagtacatgtaattgacattaatgactgcccccctgtgtttgccaagccattatatgaagcatctcttttgttaccaacatacaaaggagtaaaagtcatcacagtaaatgctacagatgctgattcaagtgcattctcacagttgatttactccatcaccgaaggcaacatcggggagaagttttctatggactacaagactggtgctctcactgtccaaaacacaactcagttaagaagccgctacgagctaaccgttagagcttccgatggcagatttgccggccttacctctgtcaaaattaatgtgaaagaaagcaaagaaagtcacctaaagtttacccaggatgtctactctgcggtagtgaaagagaattccaccgaggccgaaacattagctgtcattactgctattgggagtccaatcaatgagcctttgttttatcacatcctcaacccagatcgcagatttaaaataagccgcacttcaggggttctgtcaaccactggcacgcccttcgatcgtgagcagcaggaggcgtttgatgtggttgtagaagtgatagaggaacataagccttctgcagtggcccacgttgtcgtgaaggtcattgtagaagaccaaaatgataatgcgccggtgtttgtcaaccttccctactacgccgttgttaaagtggacactgaggtgggccatgtcattcgctatgtcactgctgtagacagagacagtggcagaaacggggaagtgcattactacctcaaggaacatcatgaacactttcaaattggacccttgggtgaaatttcactgaaaaagcaatttgagcttgacaccttaaataaagaatatcttgttacagtggttgcaaaagatggagggaacccggccttttcagcggaagttatcgttccgatcactgtcatgaataaagccatgcctgtgtttgaaaaacctttctacagtgcagagattgcagagagcatccaggtgcacagccctgtggtccacgtgcaggctaacagcccggaaggcctgaaagtgttctacagcatcacagacggagaccctttcagccagttcactattaacttcaatactggagttatcaatgtcatagctcctctggactttgaggcccacccggcatataagctgagcatacgcgcaactgactccttgacgggcgctcatgctgaagtatttgtggacatcatagtagacgacatcaatgataaccctcctgtgtttgctcagcagtcttatgcggtgaccctgtctgaggcatctgtaattggaacgtctgttgttcaagttagagccaccgattctgattcagaaccaaatagaggaatctcataccagatgtttgggaatcacagcaagagtcatgatcattttcatgtagacagcagcactggcctcatctcactactcagaaccctggattacgagcagtcccggcagcacacgatttttgtgagggcagttgatggtggtatgcccacgctgagcagtgatgtgattgtcacggtggacgttaccgacctcaatggtaatccaccactctttgaacaacagatttatgaagccagaattagcgagcacgcccctcatgggcatttcgtgacctgtgtaaaagcctatgatgcagacagttcagacatagacaagttgcagtattccattctgtctggcaatgatcataaacattttgtcattgacagtgcaacagggattatcaccctctcaaacctgcaccggcacgccctgaagccattttacagtcttaacctgtcagtgtctgatggagtttttagaagttccacccaggttcatgtaactgtaattggaggcaatttgcacagtcctgctttccttcagaacgaatatgaagtggaactagctgaaaacgctcccctacataccctggtgatggaggtgaaaactacggatggggattctggtatttatggtcacgttacttaccatattgtaaatgactttgccaaagacagattttacataaatgagagaggacagatatttactttggaaaaacttgatcgagaaaccccggcggagaaagtgatctcagtccgtttaatggctaaggatgctggaggaaaagttgctttctgcaccgtgaatgtcatccttacagatgacaatgacaatgcaccacaatttcgagcaaccaaatacgaagtgaatatcgggtccagtgctgctaaagggacttcagtcgtaaagtctgcaagtgatgccgatgagggctccaatgccgacatcacctatgccattgaagcagactctgaaagtgtaaaagagaatttggaaattaacaaactgtccggcgtaatcactacaaaggagagcctcattggcttggaaaatgaattcttcactttctttgttagagctgtggataatgggtctccatcaaaagaatctgttgttcttgtctatgttaaaatccttccaccggaaatgcagcttccaaaattttcagaacctttctatacctttacagtgtcagaggacgtgcctgttggaacagagatagatctcatccgagcagaacatagtgggactgttctttacagcctggtcaaagggaatactccagaaagcaatagggatgagtcctttgtgattgacagacagagcgggagactgaagttggagaagagtcttgatcatgagacaactaagtggtatcagttttccatactggccaggtgcactcaagatgaccatgagatggtggcttctgtagatgttagtatccaagtgaaagatgcaaatgacaacagcccggtctttgaatctagtccatatgaggcattcattgttgaaaacctgccagggggaagtagagtaattcagatcagggcatctgatgctgactcaggaaccaacggccaagttatgtatagcctggatcagtcacaaagtgtggaagtcattgaatcctttgccattaacatggaaacaggctggattacaactttaaaggaacttgaccatgaaaagagagacaattaccagattaaagtggttgcatcagatcatggtgaaaagatccagctatcctccacagccattgtggatgttaccgtcaccgatgtcaacgatagtccaccacgattcacggccgagatctataaagggactgtgagtgaggatgacccccaaggtggggtgattgccatcttaagtaccacggatgctgattctgaagagatcaacagacaagttacatatttcataacaggaggggatcctttaggacagtttgccgttgaaactatacagaatgaatggaaggtatatgtgaagaaacctctagacagggaaaaaagggacaattaccttcttactatcacggcaactgatggcaccttctcatcaaaagcgatagttgaagtgaaagttctggatgcaaatgacaacagtccagtttgtgaaaagactttatattcagacactattcctgaagacgtccttcctggaaaattgatcatgcagatctctgctacagacgcagacatccgctctaacgctgaaattacttacacgttattgggttcaggtgcagaaaaattcaaactaaatccagacacaggtgaactgaaaacgtcaaccccccttgatcgtgaggagcaagctgtttatcatcttctcgtcagggccacagatggaggaggaagattctgccaagccagtattgtcgtcacgctagaagatgtgaacgataacgcccccgaattctctgccgatccttatgccatcaccgtgtttgaaaacacagagccgggaacgctgctgacaagagtgcaggccacagatgccgacgcaggattaaatcggaagattttatactcactgattgactctgctgatgggcagttctccattaacgaattatctggaattattcagttagaaaaacctttggacagagaactccaggcagtatacaccctctctttgaaagctgtggatcaaggcttgccaaggaggctgactgccactggcactgtgattgtatcagttcttgacataaatgacaacccccctgtgtttgagtaccgtgaatatggtgccaccgtgtctgaggacattcttgttggaactgaagttcttcaagtgtatgcagcaagtcgggatattgaagcaaatgcagaaatcacctactcaataataagtggaaatgaacatgggaaattcagcatagattctaaaacaggggccgtatttatcattgagaatctggattatgagagctctcatgagtattacctaacagtagaggccactgatggaggcacgccttcactgagcgacgttgccactgtgaacgttaatgtaacagatatcaacgataatacccctgtgttcagccaagacacctacacgacagtcatcagtgaagatgccgttcttgagcagtctgtcatcacggttatggccgatgatgccgatggaccttccaacagccacatccactactcaattatagatggcaaccaaggaagctcgttcacaattgaccccgtcaggggagaagtcaaagtgaccaaacttctcgaccgagaaacgatttcaggttacacgctcacggttcaagcttctgataatggcagtccacccagagtcaacacgacgaccgtgaacatcgatgtgtccgatgtcaatgacaacgcgcccgtcttctccaggggaaactacagtgtcattatccaggaaaataagccagtgggcttcagcgtgctgcagctggtagtaacagatgaggattcttcccataacggtccacccttcttctttactattgtaactggaaatgatgagaaggcttttgaagttaacccgcaaggagtcctcctgacatcatctgccatcaagaggaaggagaaagatcattacttactgcaggtgaaggtggcagataatggaaagcctcagttgtcatctttgacatacattgacattagggtaattgaggagagcatctatccgcctgcgattttgcccctggagattttcatcacctcttctggagaagaatactcaggtggcgtcattgggaagatccatgccacagaccaggacgtgtatgatactctaacctacagtctcgaccctcagatggacaacctgttctctgtttccagcacagggggcaagctgatagcacacaaaaagctagacatagggcaataccttctcaatgtcagcgtaacagatgggaagttcacgacggtggccgacatcacagtgcatatcagacaagtcacacaggagatgttgaaccacaccatcgcgatccgctttgccaacctcactccggaagaattcgttggtgactactggcgcaacttccagcgagctttacggaacatcctgggtgtgaggaggaacgacatacagattgttagtttgcagtcctctgaacctcacccacatctggacgtcttactttttgtagagaaaccaggtagtgctcagatctcaacaaaacaacttctgcacaagattaactcttccgtgactgacattgaggaaatcattggagttaggatactgaatgtattccagaaactctgcgcgggactggactgcccctggaagttctgcgatgaaaaggtgtctgtggatgaaagtgtgatgtcaacacacagcacagccagactgagttttgtgactccccgccaccacagggcagcggtgtgtctctgcaaagagggaaggtgcccacctgtccaccatggctgtgaagatgatccgtgccctgagggatccgaatgtgtgtctgatccctgggaggagaaacacacctgtgtctgtcccagcggcaggtttggtcagtgcccagggagttcatctatgacactgactggaaacagctacgtgaaataccgtctgacggaaaatgaaaacaaattagagatgaaactgaccatgaggctcagaacatattccacgcatgcggttgtcatgtatgctcgaggaactgactatagcatcttggagattcatcatggaaggctgcagtacaagtttgactgtggaagtggccctggaattgtctctgttcagagcattcaggtcaatgatgggcagtggcacgcagtggccctggaagtgaatggaaactatgctcgcttggttctagaccaagttcatactgcatcgggcacagccccagggactctgaaaaccctgaacctggataactatgtgttttttggtggccacatccgtcagcagggaacaaggcatggaagaagtcctcaagttggtaatggtttcaggggttgtatggactccatttatttgaatgggcaggagctccctttaaacagcaaacccagaagctatgcacacatcgaagagtcggtggatgtatctccaggctgcttcctgacggccacggaagactgcgccagcaacccttgccagaatggaggcgtttgcaatccgtcacctgctggaggttattactgcaaatgcagtgccttgtacatagggacccactgtgagataagcgtcaatccgtgttcctccaacccatgcctctatgggggcacgtgtgttgtcgacaacggaggctttgtttgccagtgtagaggattatatactggtcagaggtgtcagcttagtccatactgcaaagatgaaccctgtaagaatggcggaacatgctttgacagtttggatggcgccgtttgtcagtgtgattcgggttttaggggagaaaggtgtcagagtgatatcgacgagtgctctggaaacccttgcctgcacggggccctctgtgagaacacgcacggctcctatcactgcaactgcagccacgagtacaggggacgtcactgcgaggatgctgcgcccaaccagtatgtgtccacgccgtggaacattgggttggcggaaggaattggaatcgttgtgtttgttgcagggatatttttactggtggtggtgtttgttctctgccgtaagatgattagtcggaaaaagaagcatcaggctgaacctaaagacaagcacctgggacccgctacggctttcttgcaaagaccgtattttgattccaagctaaataagaacatttactcagacataccaccccaggtgcctgtccggcctatttcctacaccccgagtattccaagtgactcaagaaacaatctggaccgaaattccttcgaaggatctgctatcccagagcatcccgaattcagcacttttaaccccgagtctgtgcacgggcaccgaaaagcagtggcggtctgcagcgtggcgccaaacctgcctcccccacccccttcaaactccccttctgacagcgactccatccagaagcctagctgggactttgactatgacacaaaagtggtggatcttgatccctgtctttccaagaagcctctagaggaaaagccttcccagccatacagtgcccgggaaagcctgtctgaagtgcagtccctgagctccttccagtccgaatcgtgcgatgacaatgggtatcactgggatacatcagattggatgccaagcgttcctctgccggacatacaagagttccccaactatgaggtgattgatgagcagacacccctgtactcagcagatccaaacgccatcgatacggactattaccctggaggctacgacatcgaaagtgattttcctccacccccagaagacttccccgcagctgatgagctaccaccgttaccgcccgaattcagcaatcagtttgaatccatccaccctcctagagacatgcctgccgcgggtagcttgggttcttcatcaagaaaccggcagaggttcaacttgaatcagtatttgcccaatttttatcccctcgatatgtctgaacctcaaacaaaaggcactggtgagaatagtacttgtagagaaccccatgccccttacccgccagggtatcaaagacacttcgaggcgcccgctgtcgagagcatgcccatgtctgtgtacgcctccaccgcctcctgctctgacgtgtcagcctgctgcgaagtggagtccgaggtcatgatgagtgactatgagagcggggacgacggccacttcgaagaggtgacgatcccgcccctggattcccagcagcacacggaagtctgactctcaactccccccaaagtgcctgactttagtgaacctagaggtgatgtgagtaatccgcgctgttctttgcagcagtgcttccaagctttttttggtgagccgaatgggcatggctgcgctggatcctgcgcctctggacgtgctagccatttccagtgtcccaactactgtcatcgtgaggttttcatcggctgtgccatttcccaacgtcttttgggatttacatctgtctgtgttaaaataatcaaacgaaaaatcagtcctgtgttgtcagcatgattcatgtatttatatagatttgattattttaattttcctgtctcttttttttgtaaattttatgtacagatttgatttttcatagttttaactagatttccaagatattttgtgcatttgtttcaactgaattttggtggtgtcagtgccattatctagcaccctgatttttttttttttactataaccagggtttcattctgtctttttccactgaagtgtgacattttgttagtacatttcagtgtagtcattcatttctagctgtacataggatgaaggagagatcagatacatgaacatgtcttacatgggttgctgtatttagaattataaacatttttcattattggaaagtgtaacggggaccttctgcatacctgtttagaaccaaaaccaccatgacacagtttttatagtgtctgtatatttgtgatgcaatggtcttgtaaaggtttttaatgaaaactaccattagccagtctttcttactgacaataaattattaataaaat

SEQ ID NO: 29591 - DNA, 4015 bp, Homo Sapiens
cgaacgagcggcgctcggcggggacagaaagagggagagagagagagagagagagggagaggcgcggccgggcgaggcgggcccgtccgggagcgggctccggggaaggggtgcgggtctgggcgccggagcggggagcggggccgcgtccctctcagcgccagctctacttgagccccacgagccgctgtccccctggcgcgctcggggccgcgggacgggcgcacgccgccttctcctagtcaagtatccgagccgccccgaaactcgggcggcgagtcggccacgggaagtttattctccggctccttttctaaaaggaagaaacagaagtttctcccagcggacagcttttctttccgcctttttggccctgtctgaaatcgggggtccccagggctggcaggccaggctcgctgggctcctaatcttttttttaatttccaatttttgattgggccgtgggtccccgctgagctccggctgcgcgcgggggcgggagggcgcgcgcaggggagggaccgagagacgcgccgactttttagagggagggatcgggtggacaactggtcccgcggcgctcgcagagccggaaagaagtgctgtaagggacgctcgggggacgctgttcctgaggtgtcgccgcctccctgtcctcgccctccgcggtgggggagaaacccaggagcgaagcccagagcccgcggcgcggccggcggacgaacgagcgcgcagcagccggtgcgcggccgcggcgagggcgggggaagaaaaacaccctgtttcctctccggcccccaccgcggatcatgtaccaggattatcccgggaactttgacacctcgtcccggggcagcagcggctctcctgcgcacgccgagtcctactccagcggcggcggcggccagcagaaattccgggtagatatgcctggctcaggcagtgcattcatccccaccatcaacgccatcacgaccagccaggacctgcagtggatggtgcagcccacagtgatcacctccatgtccaacccataccctcgctcgcacccctacagccccctgccgggcctggcctctgtccctggacacatggccctcccaagacctggcgtgatcaagaccattggcaccaccgtgggccgcaggaggagagatgagcagctgtctcctgaagaggaggagaagcgtcgcatccggcgggagaggaacaagctggctgcagccaagtgccggaaccgacgccgggagctgacagagaagctgcaggcggagacagaggagctggaggaggagaagtcaggcctgcagaaggagattgctgagctgcagaaggagaaggagaagctggagttcatgttggtggctcacggcccagtgtgcaagattagccccgaggagcgccgatcgcccccagcccctgggctgcagcccatgcgcagtgggggtggctcggtgggcgctgtagtggtgaaacaggagcccctggaagaggacagcccctcgtcctcgtcggcggggctggacaaggcccagcgctctgtcatcaagcccatcagcattgctgggggcttctacggtgaggagcccctgcacacccccatcgtggtgacctccacacctgctgtcactccgggcacctcgaacctcgtcttcacctatcctagcgtcctggagcaggagtcacccgcatctccctccgaatcctgctccaaggctcaccgcagaagcagtagcagcggggaccaatcatcagactccttgaactcccccactctgctggctctgtaacccagtgcacctccctccccagctccggagggggtcctcctcgctcctccttcccagggaccagcaccttcaagcgctccagggccgtgagggcaagagggggacctgccaccagggagcttcctggctctgggggacccaggtgggacttagcagtgagtattggaagacttgggttgatctcttagaagccatgggacctcctccctcattcatcttgcaagcaaatcccatttcttgaaaagccttggagaactcggtttggtagacttggacatctctctggcttctgaagagcctgaagctggcctggaccattcctgtccctttgttaccatactgtctctggagtgatggtgtccttccctgccccaccacgcatgctcagtgccttttggtttcaccttccctcgacttgaccctttcctcccccagcgtcagtttcactccctcttggtttttatcaaatttgccatgacatttcatctgggtggtctgaatattaaagctcttcatttctggagatggggcagcaggtggctcttctgctggggctgacttgtccagaaggggacaaagtgcaatacagagccttccctaccctgacgcctcccagtcatcatctccagaactcccagcggggctccctgagctctcaaggagatgctgccatcactgggaggctcagaggacccttcctgcccaccttcggagacggcttctggaggaacggcttggccagaagacagggtgtgagtgagacagtggggcacaggttgggtttgccaaacgcctaattaccaggccaggaagcatgccaacaaagccacacgggtgtcctagccagcttcccttcacctggtgtcttgagtagggcgtctcctgtaattactgccttgccattctgcccctggacccttctctccggaccagggaggcgtccctccctaggagccacacattatactccaagtccctgccgggctccgcctttcccccaccctggctctcagggtgacgccacccacagagatttaatgagcgtgggcctggaccttccccagatgctgccaggcagcccctccccaagcctcaaagaagcatttgctgaggatggagaggcaggggagggaggcgggaggccgtcactggagtggcgtctgcagcagctgctgccccagcacccgctcagcctgtcctggctgctcacctccccgcagggcaccgggcctttcctgccctctgtggtcatctgccacctgctggatcaagtgctttctcttttacactcccctgtccccaccccagtgcactcttctggcccaggcagcaagcaagctgtgaacagctggcctgagctgtcgctgtggcttgtggctcatgcgccattcctggttgtctgttgaatctttctggctgctggaattggagataggatgttttgcttcccactgcaggagagctgccccctttcacggggttggggaagggtccccctggcctccagcaggagcacagctcagcagggtccctgctgcccacccctctgagccttttctccccagggtatggctcctgctgagtttcttgtccagcagggccttgacaggaatccagggagtagctcctggccagaaccagcctctgcggggcttgtgctctgcaaagactctgctgctggggattcagctctagaggtcacagtatcctcgtttgaaagataattaagatcccccgtggagaaagcagtgacacattcacacagctgttccctcgcatgttatttcatgaacatgacctgttttcgtgcactagacacacagagtggaacagccgtatgcttaaagtacatgggccagtgggactggaagtgacctgtacaagtgatgcagaaaggagggtttcaaagaaaaaggattttgtttaaaatactttaaaaatgttatttcctgcatcccttggctgtgatgcccctctcccgatttcccaggggctctgggagggacccttctaagaagattgggcagttgggtttctggcttgagatgaatccaagcagcagaatgagccaggagtagcaggagatgggcaaagaaaactggggtgcactcagctctcacaggggtaatcatctcaagtggtatttgtagccaagtgggagctattttcttttttgtgcatatagatatttcttaaatgaaaaaaaaaaaaaaaaaaaaaaaaaa

SEQ ID NO: 29592 - DNA, 3494 bp, Homo Sapiens
ggcacccttcggcgagcgctgtttgtttagggctcggtgagtccaatcaggagcccaggctgcagttttccggcagagcagtaagaggcgcctcctctctcctttttattcaccagcagcgcggcgcagaccccggactcgcgctcgcccgctggcgccctcggcttctctccgcgcctgggagcaccctccgccgcggccgttctccatgcgcagcgcccgcccgaggagctagacgtcagcttggagcggcgccggaccgtggatggccttgactgacggcggctggtgcttgccgaagcgcttcggggccgcgggtgcggacgccagcgactccagagcctttccagcgcgggagccctccacgccgccttcccccatctcttcctcgtcctcctcctgctcccggggcggagagcggggccccggcggcgccagcaactgcgggacgcctcagctcgacacggaggcggcggccggacccccggcccgctcgctgctgctcagttcctacgcttcgcatcccttcggggctccccacggaccttcggcgcctggggtcgcgggccccgggggcaacctgtcgagctgggaggacttgctgctgttcactgacctcgaccaagccgcgaccgccagcaagctgctgtggtccagccgcggcgccaagctgagccccttcgcacccgagcagccggaggagatgtaccagaccctcgccgctctctccagccagggtccggccgcctacgacggcgcgcccggcggcttcgtgcactctgcggccgcggcggcagcagccgcggcggcggccagctccccggtctacgtgcccaccacccgcgtgggttccatgctgcccggcctaccgtaccacctgcaggggtcgggcagtgggccagccaaccacgcgggcggcgcgggcgcgcaccccggctggcctcaggcctcggccgacagccctccatacggcagcggaggcggcgcggctggcggcggggccgcggggcctggcggcgctggctcagccgcggcgcacgtctcggcgcgcttcccctactctcccagcccgcccatggccaacggcgccgcgcgggagccgggaggctacgcggcggcgggcagtgggggcgcgggaggcgtgagcggcggcggcagtagcctggcggccatgggcggccgcgagccccagtacagctcgctgtcggccgcgcggccgctgaacgggacgtaccaccaccaccaccaccaccaccaccaccatccgagcccctactcgccctacgtgggggcgccactgacgcctgcctggcccgccggacccttcgagaccccggtgctgcacagcctgcagagccgcgccggagccccgctcccggtgccccggggtcccagtgcagacctgctggaggacctgtccgagagccgcgagtgcgtgaactgcggctccatccagacgccgctgtggcggcgggacggcaccggccactacctgtgcaacgcctgcgggctctacagcaagatgaacggcctcagccggcccctcatcaagccgcagaagcgcgtgccttcatcacggcggcttggattgtcctgtgccaactgtcacaccacaactaccaccttatggcgcagaaacgccgagggtgaacccgtgtgcaatgcttgtggactctacatgaaactccatggggtgcccagaccacttgctatgaaaaaagagggaattcaaaccaggaaacgaaaacctaagaacataaataaatcaaagacttgctctggtaatagcaataattccattcccatgactccaacttccacctcttctaactcagatgattgcagcaaaaatacttcccccacaacacaacctacagcctcaggggcgggtgccccggtgatgactggtgcgggagagagcaccaatcccgagaacagcgagctcaagtattcgggtcaagatgggctctacataggcgtcagtctcgcctcgccggccgaagtcacgtcctccgtgcgaccggattcctggtgcgccctggccctggcctgagcccacgccgccaggaggcagggagggctccgccgcgggcctcactccactcgtgtctgcttttgtgcagcggtccagacagtggcgactgcgctgacagaacgtgattctcgtgcctttattttgaaagagatgtttttcccaagaggcttgctgaaagagtgagagaagatggaagggaagggccagtgcaactgggcgcttgggccactccagccagcccgcctccggggcggaccctgctccacttccagaagccaggactaggacctgggccttgcctgctatggaatattgagagagattttttaaaaaagattttgcattttgtccaaaatcatgtgcttcttctgatcaattttggttgttccagaatttcttcataccttttccacatccagatttcatgtgcgttcatggagaagatcacttgaggccatttggtacacatctctggaggctgagtcggttcatgaggtctcttatcaaaaatattactcagtttgcaagactgcattgtaactttaacatacactgtgactgacgtttctcaaagttcatattgtgtggctgatctgaagtcagtcggaatttgtaaacagggtagcaaacaagatatttttcttccatgtatacaataatttttttaaaaagtgcaatttgcgttgcagcaatcagtgttaaatcatttgcataagatttaacagcattttttataatgaatgtaaacattttaacttaatggtacttaaaataatttaaaagaaaaatgttaacttagacattcttatgcttcttttacaactacatcccattttatatttccaattgttaaagaaaaatatttcaagaacaaatcttctctcaggaaaattgcctttctctatttgttaagaatttttatacaagaacaccaatataccccctttattttactgtggaatatgtgctggaaaaattgcaacaacactttactacctaacggatagcatttgtaaatactctaggtatctgtaaacactctgatgaagtctgtatagtgtgactaacccacaggcaggttggtttacattaatttttttttttgaatgggatgtcctatggaaacctatttcaccagagttttaaaaataaaaagggtattgttttgtcttctgtacagtgagttccttcccttttcaaagctttctttttatgctgtatgtgactatagatattcatataaaacaagtgcacgtgaagtttgcaaaatgctttaaggccttcctttcaaagcatagtccttttggagccgttttgtaccttttataccttggcttatttgaagttgacacatggggttagttactactctccatgtgcattggggacagtttttataagtgggaaggactcagtattattatatttgagatgataagcattttgtttgggaacaatg

SEQ ID NO: 29593 - DNA, 2909 bp, Homo Sapiens; identical to SEQ ID NO: 26786

SEQ ID NO: 29594 - DNA, 1679 bp, Homo Sapiens
actgtaggcaccaccgggcgccgaatggctgttttctaactgggatcctcggtgacgtatggctgcctgccccttggcagctgtctttatggaccagtaggcagagcgaaattgacgctgacaagacttttgcatcttggaagggactgtaatctactgtagtgaagaacagagcctctcaatcagacgggtgtaaataagagacggaggggagtccaaaagaaaaggaagaggaggaaaaacaagtgtgtgttggggggaacagggggaaaagcatttttggtggatggtatgaagccagccatggaaactgcagccgaggaaaatactgaacaaagccaagagagaaaaggctgctttgaatgctgcatcaagtgtctgggaggagtcccctacgcctccctggtggccaccatcctctgcttctccggggtggccttattctgcggctgtgggcatgtggctctcgcaggcaccgtggcgattcttgagcaacacttctccaccaacgccagtgaccatgccttgctgagcgaggtgatacaactgatgcagtatgtcatctatggaattgcgtcctttttcttcttgtatgggatcattctgttggcagaaggcttttacaccacaagtgcagtgaaagaactgcacggtgagtttaaaacaaccgcttgtggccgatgcatcagtggaatgttcgttttcctcacctatgtgcttggagtggcctggctgggtgtgtttggtttctcagcggtgcccgtgtttatgttctacaacatatggtcaacttgtgaagtcatcaagtcaccgcagaccaacgggaccacgggtgtggagcagatctgtgtggatatccgacaatacggtatcattccttggaatgctttccccggaaaaatatgtggctctgccctggagaacatctgcaacacaaacgagttctacatgtcctatcacctgttcattgtggcctgtgcaggagctggtgccaccgtcattgccctgctgatctacatgatggctactacatataactatgcggttttgaagtttaagagtcgggaagattgctgcactaaattctaaattgcataaggagttttagagagctatgctctgtagcatgaaatatcactgacactccagactaaagcagagtctaggtttctgcaattttgttacagtaatttgtaaatagctttagtaaactcaccttgcatggtagattaataagatgacttactgtacatgaattacacaataatgagatctggtggctatttccacattttgaaaaggattcagttatttactgacagtggtgagcatcctttttaaaataatgttctcatacttaaacattagagagcagtatctttaaatgaattattaacactttggaatacttacattttctgttatttttgattgcctgataaccagtttcaatgatgaaaatgaaaacaagtgctgaagatgaaatggaagagaaccgttttaatctggattttgttttgtcacacctggaaaatactttgcaaatatgttctaaattgaaaacaatttttttatgatcacatggttcactaccaaatgaccctcaaataagccagatgaaaatttgaagaaaaaggtcacccagttctctggaaaaaaaaaaaaaaaaaaaaaaaaaa

SEQ ID NO: 29595 - DNA, 1924 bp, Homo Sapiens
ccccgccttcacccactgcctctgcctccctggggcagagctgtttcccagacgggtggggcggggcccaactgtcccagctccttcagccctttctgtccctcccagtgaggccagctgcggtgaagagggtgctctcttgcctggcgttccctctgcacggctgccccctcccaccctgcccactaagccagacccactgtcgccattcccacttctggtcctgccacctcctgagctgccttcccgcctggtctgggtagagtcatggcctcgagcacaggtgaccggagccaggcggtgaggcatggactgagggcgaaggtgctgacgctggacggcatgaacccgcgtgtgcggagagtggagtacgcagtgcgtggccccatagtgcagcgagccttggagctggagcaggagctgcgccagggtgtgaagaagcctttcaccgaggtcatccgtgccaacatcggggacgcacaggctatggggcagaggcccatcaccttcctgcgccaggtcttggccctctgtgttaaccctgatcttctgagcagccccaacttccctgacgatgccaagaaaagggcggagcgcatcttgcaggcgtgtgggggccacagtctgggggcctacagcgtcagctccggcatccagctgatccgggaggacgtggcgcggtacattgagaggcgtgacggaggcatccctgcggaccccaacaacgtcttcctgtccacaggggccagcgatgccatcgtgacggtgctgaagctgctggtggccggcgagggccacacacgcacgggtgtgctcatccccatcccccagtacccactctactcggccacgctggcagagctgggcgcagtgcaggtggattactacctggacgaggagcgtgcctgggcgctggacgtggccgagcttcaccgtgcactgggccaggcgcgtgaccactgccgccctcgtgcgctctgtgtcatcaaccctggcaaccccaccgggcaggtgcagacccgcgagtgcatcgaggccgtgatccgcttcgccttcgaagagcggctctttctgctggcggacgaggtgtaccaggacaacgtgtacgccgcgggttcgcagttccactcattcaagaaggtgctcatggagatggggccgccctacgccgggcagcaggagcttgcctccttccactccacctccaagggctacatgggcgagtgcgggttccgcggcggctatgtggaggtggtgaacatggacgctgcagtgcagcagcagatgctgaagctgatgagtgtgcggctgtgcccgccggtgccaggacaggccctgctggacctggtggtcagcccgcccgcgcccaccgacccctcctttgcgcagttccaggctgagaagcaggcagtgctggcagagctggcggccaaggccaagctcaccgagcaggtcttcaatgaggctcctggcatcagctgcaacccagtgcagggcgccatgtactccttcccgcgcgtgcagctgcccccgcgggcggtggagcgcgctcaggagctgggcctggcccccgatatgttcttctgcctgcgcctcctggaggagaccggcatctgcgtggtgccagggagcggctttgggcagcgggaaggcacctaccacttccggatgaccattctgccccccttggagaaactgcggctgctgctggagaagctgagcaggttccatgccaagttcaccctcgagtactcctgagcaccccagctggggccaggctgggtcgccctggactgtgtgctcaggagccctgggaggctctggagcccactgtacttgctcttgatgcctggcggggtggggtggggggggtgctgggcccctgcctctctgcaggtccctaataaagctgtgtggcagtctg

SEQ ID NO: 29596 - DNA, 2989 bp, Homo Sapiens; identical to SEQ ID NO: 25385

SEQ ID NO: 29597 - DNA, 785 bp, Homo Sapiens
agtcccggccagtgcctctgcttccggctcgaattgctctcgctcacgcttgccttcaacatgtccgagactgcgcctgccgcgcccgctgctccggcccctgccgagaagactcccgtgaagaagaaggcccgcaagtctgcaggtgcggccaagcgcaaagcgtctgggcccccggtgtccgagctcattactaaagctgttgccgcctccaaggagcgcagcggcgtatctttggccgctctcaagaaagcgctggcagccgctggctatgacgtggagaagaacaacagccgcatcaagctgggtctcaagagcctggtgagcaagggcaccctggtgcagaccaagggcaccggcgcgtcgggttccttcaaactcaacaagaaggcggcctctggggaagccaagcctaaggctaaaaaggcaggcgcggccaaggccaagaagccagcaggagcggcgaagaagcccaagaaggcgacgggggcggccacccccaagaagagcgccaagaagaccccaaagaaggcgaagaagccggctgcagctgctggagccaaaaaagcgaaaagcccgaaaaaggcgaaagcagccaagccaaaaaaggcgcccaagagcccagcgaaggccaaagcagttaaacccaaggcggctaaaccaaagaccgccaagcccaaggcagccaagccaaagaaggcggcagccaagaaaaagtagaaagttcctttggccaactgcttagaagcccaacacaacccaaaggctcttttcagagccaccca

SEQ ID NO: 29598 - DNA, 1519 bp, Homo Sapiens
ctgcctcggaacgctgtcccccgcagcgacggcccgttccacctcgcgatctgccgggtacccgggcggcgtggcgctcggcctccagggatccactgtgcggtgccaaaaaagaggcggaggctcgcggcacagctctcccggcgcagctctcgggccgccgccgccgctcccaggcccgtctcccggcccgtggcagtcggggctcgcggacaaaacaagttgagcgcgagcgcgttgattggttggcggacggtgcgaggtggacgctgattggctgagggcagcgcgaggcgggcgctgattggctgcgacgcgccgacgccggtgttttgcagtcctgggcagctcggcagtccagcccggcccgggtcatggtggtgggccgagggctgctcggccgccgcagcctcgccgcgctgggagccgcctgcgcccgccgaggcctcggtccagccctgctgggagttttctgccacacagatttgcggaagaacctgaccgtggacgagggcaccatgaaggtagaggtgctgcctgccctgaccgacaactacatgtacctggtcattgatgatgagaccaaggaggctgccattgtggatccggtgcagccccagaaggtcgtggacgcggcgagaaagcacggggtgaaactgaccacagtgctcaccacccaccaccactgggaccatgctggcgggaatgagaaactggtcaagctggagtcgggactgaaggtgtacgggggtgacgaccgtatcggggccctgactcacaagatcactcacctgtccacactgcaggtggggtctctgaacgtcaagtgcctggcgaccccgtgccacacttcaggacacatttgttacttcgtgagcaagcccggaggctcggagccccctgccgtgttcacaggtgacaccttgtttgtggctggctgcgggaagttctatgaagggactgcggatgagatgtgtaaagctctgctggaggtcttgggccggctccccccggacacaagagtctactgtggccacgagtacaccatcaacaacctcaagtttgcacgccacgtggagcccggcaatgccgccatccgggagaagctggcctgggccaaggagaagtacagcatcggggagcccacagtgccatccaccctggcagaggagtttacctacaaccccttcatgagagtgagggagaagacggtgcagcagcacgcaggtgagacggacccggtgaccaccatgcgggccgtgcgcagggagaaggaccagttcaagatgccccgggactgaggccgccctgcaccttcagcggatttggggattaggctcttttaggtaactggctttcctgctggtccgtgcgggaaattcagtcttgatttaaccttaattttacagcccttggcttgtgttatcggacattctaatgcatatttataagagaagtttaacaagtatttattcccataaaaaaaaaaaaaaaaaaaaaaaaaaaaaaaaaaaaaaaa

SEQ ID NO: 29599 - DNA, 4220 bp, Homo Sapiens
gagtgcgttcgcggctgctttgacctggtgggcgccgcctccggcactgcaccgaggcggggcgccagcgcccaggttgctgggctggccttggcgcccccttcccctacccagagcgcaggcaggcaggggggtcccgccgcgccccttcagcatatgccggtgcagctgacgacagccctgcgtgtggtgggcaccagcctgtttgccctggcagtgctgggtggcatcctggcagcctatgtgacgggctaccagttcatccacacggaaaagcactacctgtccttcggcctgtacggcgccatcctgggcctgcacctgctcattcagagcctttttgccttcctggagcaccggcgcatgcgacgtgccggccaggccctgaagctgccctccccgcggcggggctcggtggcactgtgcattgccgcataccaggaggaccctgactacttgcgcaagtgcctgcgctcggcccagcgcatctccttccctgacctcaaggtggtcatggtggtggatggcaaccgccaggaggacgcctacatgctggacatcttccacgaggtgctgggcggcaccgagcaggccggcttctttgtgtggcgcagcaacttccatgaggcaggcgagggtgagacggaggccagcctgcaggagggcatggaccgtgtgcgggatgtggtgcgggccagcaccttctcgtgcatcatgcagaagtggggaggcaagcgcgaggtcatgtacacggccttcaaggccctcggcgattcggtggactacatccaggtgtgcgactctgacactgtgctggatccagcctgcaccatcgagatgcttcgagtcctggaggaggatccccaagtagggggagtcgggggagatgtccagatcctcaacaagtacgactcatggatttccttcctgagcagcgtgcggtactggatggccttcaacgtggagcgggcctgccagtcctactttggctgtgtgcagtgtattagtgggcccttgggcatgtaccgcaacagcctcctccagcagttcctggaggactggtaccatcagaagttcctaggcagcaagtgcagcttcggggatgaccggcacctcaccaaccgagtcctgagccttggctaccgaactaagtataccgcgcgctccaagtgcctcacagagacccccactaagtacctccggtggctcaaccagcaaacccgctggagcaagtcttacttccgggagtggctctacaactctctgtggttccataagcaccacctctggatgacctacgagtcagtggtcacgggtttcttccccttcttcctcattgccacggttatacagcttttctaccggggccgcatctggaacattctcctcttcctgctgacggtgcagctggtgggcattatcaaggccacctacgcctgcttccttcggggcaatgcagagatgatcttcatgtccctctactccctcctctatatgtccagccttctgccggccaagatctttgccattgctaccatcaacaaatctggctggggcacctctggccgaaaaaccattgtggtgaacttcattggcctcattcctgtgtccatctgggtggcagttctcctgggagggctggcctacacagcttattgccaggacctgttcagtgagacagagctagccttccttgtctctggggctatactgtatggctgctactgggtggccctcctcatgctatatctggccatcatcgcccggcgatgtgggaagaagccggagcagtacagcttggcttttgctgaggtgtgacatggcccccaagcagagcgggtaaagtgcaatgggtaagggagggaaggggaatggaagagaaaagacagggtgggagggaggagggagtgctgtgttttagtctcttaatggtccaaaggacaaatctaaaatgcaaagaacggtgatgtagtatggcctgacagctctgtttagaggaggcaacactgatcccccagatgcagggctgcaggggattctgtgttttcagactgcctgtctgcttgcatctgcacataggcagtagcctcctcctgggctccagagggcactcagaagttgtgctaaaccaagttaagtcccattcagtggcaacttgtgataggtacctgagtgacggcaacctgcggaaggaggttctcccagcccatctgaacacaaccagaggtggcaggagaatttctactgagcgagctgggccggttagtgtatgtcacccccaccccacccctaagtagtcatcaatgcaataagattgcgcctgagatacaaggcccagaagcctgatctttgggcatcagaaaacagggtccaggaatggtgctttatgtgagataccccactccacatcaacattccagggatgagccaaaccagcagggagttagcactgaactgcttttaaaagtgcacattaaaaaggaaagtttgccaggaggaacaaagagattgtggtggtgctaaaggaggccataagctacacagaggccttgggtgttccacctggaaactgctcagacgtctagatgggttcttagcttgtctgtgatctctgctggggagataaaaagattaagccccaacatgttcagaaaagaagtgaagtcttgggtattttaacctgtatactcttgaattcctctcaaattcagctctgatctgaggctaagacacactccccacttcactttcttcaaagccacattttttgaggtatcactgcagtcacctcttctaccctcatcatcataggtaaggttttcaaggtggcaattggggcggagccccggctcttatagaagcttcagcaggaggcaagcgtgttctcagcacatatgggaactatgaggagcctctgatcaaattggctacaatcttggagctgcttggacggattccttggcagccgggttagcatgtgtgactttcaggctactgttcttgacaatcatctccaatggaaagcttttcagtgttcccaaagtgaactctcaaatccaaaatggttatctttgagaccatccattctcctcagtggcttctccagggaattcttacagccaagttgtgacagtcactgcatttgcctgcttctttccagaaaccaaactaggagatgaaactggttcctacatcctaaggttcttgctttctctctcatgcctcctgaggctgtttttggctgttttccctctgctgcttttggggaatgaggggaagccattttccagtgacttgcaatccaggctgttctcagcgttttgagtttaaaacctgggatcctgactaagcctttgacttaagggttgcttgcttgccctccaaatgtcctttctcagaggggccagctaacccgtgcagaaccagcactaaggtggacagcagacaagagggcaagcctctagtgtaccaagtgcttcctacaaagacgcaaggtgtgctctgagccacagatgggcaaaccctggtgctttccttcatctcccacgaactcaagggttttccaggtgtagctaacagttgccacatcacacagacctcgagtttctggtaagactgctggttgacatcagacccaacccatgaaggctggaaggcagcaggcatttgctaaggcagctgatccaggcaatcgttctgctggccaagaagttaaactattttgagcattagaatggaggaaatccggtcagccaagtgcagagttcagacttcgctaagggcttgtttttcttcagcatttacttgaagattaatgtaggatgacaggctctcctggctgtcctaccatcagctctgccttgcactgtggtcgtcaactttcctcaaatcaaaaacaggcaggtacaggtagtgggctcacaacgtttgacctcgactggtttttctaagttattttgtacatttttcagcagcaaaaccaaactgggtcttcagctttatccccgtttcttgcaagggaagagcctttatacaattggacgcattttggtttttcctcattgagaattcaaatcctcttttgtattgtttctacaataatttgtaaacatatttatttttacctgcttttttttttttttttaattttcaggtcaagttttttatactgcacttatttgtcaaaataaagattctcacatatgccggttatctcgaaa

SEQ ID NO: 29600 - DNA, 7710 bp, Homo Sapiens
caaccaaccagtggttcatcccagccgtgaggggggacattccccctgggtgtgcagcctatggcttcgtgtgtgacgggactcgcctcctggtgtttggtgggatggtggagtatgggaaatacagcaatgacctctacgaactccaggcgagccggtgggagtggaagagactcaaagcaaagacgcccaaaaacgggccccctccgtgtcctcgactcgggcacagcttctcccttgtgggcaacaaatgctacctgtttgggggtctggccaatgatagcgaggacccaaagaacaacattccaaggtacctgaatgacttatatatcctggaattacggccaggctctggagtggtagcctgggacattcccatcacttacggggtcctaccaccaccccgggagtcacatactgccgtggtctacaccgaaaaagacaataagaagtccaagctggtgatctacggcgggatgagtggctgcaggctgggggacctgtggaccctagatattgacaccctgacgtggaataagcccagtctcagcggggtggcgcctcttcctcgcagtctccactcggcaaccaccatcggaaataaaatgtacgtgtttggtggctgggtgcctctcgtcatggatgacgtcaaagtggccacacacgagaaggagtggaagtgtaccaacacgctggcttgtctcaacctggataccatggcctgggagaccatcctgatggatacactggaggacaacatcccccgtgctcgggctggccactgcgcagtcgccatcaacacccgcctgtacatttggagtgggcgtgacggctaccgcaaggcctggaacaaccaggtctgctgcaaggacctctggtacctagagacagaaaagccaccacccccagcccgagtacaactggtacgcgccaacaccaactccctggaggtgagctggggggcagtggcaacagccgacagctaccttctccagctccagaaatatgacattcctgccacggctgctactgccacctcccctacacccaatccggtcccatctgtgcctgccaaccctcccaagagccctgccccagcagcagccgcacctgctgtgcagccgctgacccaagtaggcatcacgctcctgccccaggctgcccccgcacccccgaccaccaccaccatccaggtcttgccaacggtgcctggcagctccatttctgtgcccaccgcagccaggactcaaggtgtccctgctgttctcaaagtgaccggtcctcaggctacaacaggaactccattggtcaccatgcgacctgccagccaggctgggaaagcccctgtcaccgtgacctcccttcccgccggagtgcggatggttgtgccaacacagagtgcccagggaacggtgattggcagtagcccacagatgagtgggatggccgcactggccgctgcggccgctgccacccagaagatccccccttcctcgcgacccacggtgctgagtgtcccagcgggtaccaccatcgtgaagaccatggctgtgacacctggcactaccaccctcccagccactgtgaaggtggcctcctcgccagtcatggtgagcgtgagcaaccctgccactcgcatgctgaagactgcagccgcccaggtggggacatcggtttcctccgccaccaacacgtctacccgccctatcatcacagtgcacaagtcaggcactgtgacagtggcccagcaagcccaggtggtgaccacagttgtgggcggggtcaccaagaccatcaccctggtgaagagccccatctctgtcccaggaggcagtgctctgatttccaatctgggcaaagtgatgtcggtggtccagaccaaaccagttcagacttcagcagtcacaggccaggcgtccacgggtcctgtgactcagatcatccagaccaaagggcccctgccagcgggaacaatcctgaagctggtgacctcagcagatggcaagcccaccaccatcatcactaccacgcaggccagtggggcggggaccaagcccaccatcctgggcatcagcagcgtctcccccagtaccaccaagcccggcacgaccaccatcatcaaaaccatccccatgtcggccatcatcacccaggcgggcgccacgggtgtgaccagcagtcctggcatcaagtcacccatcaccatcatcaccaccaaggtgatgacttcaggaactggagcacctgcgaaaatcatcactgctgtccccaaaattgccactggccacgggcagcagggagtgacccaggtggtgcttaagggggccccgggacagccaggcaccatcctccgcactgtgcccatggggggtgttcgcctggtcacacccgtcaccgtctccgccgtcaagccagccgtcaccacgttggttgtgaaaggcaccacaggtgtcacgaccctaggcacagtgacaggcaccgtctccaccagccttgccggggcggggggccacagcactagtgcttccctggccacgcccatcaccaccttgggcaccattgccaccctctcaagccaggtgatcaaccccactgccatcactgtgtcggccgcacagaccacgctgacagcggcaggcgggctcacaaccccgaccatcaccatgcagcccgtgtcccagcccacccaggtaactctgatcacggcacctagtggggtggaggcccagcctgtgcatgacctccctgtgtccattctggcctccccgactacagaacagcccaccgccacagttaccatcgccgactcaggccagggtgatgtgcagcctggcactgtcaccttggtgtgctccaacccaccctgtgagacccacgagactggcaccaccaacacggccaccactactgttgtggctaaccttgggggacacccccagcccacccaagtgcagttcgtctgtgacagacaggaggcagctgcttctcttgtgacctcgactgtgggccagcagaatggtagcgtggtccgagtctgttcgaacccgccctgcgagacccacgagacgggcaccaccaacaccgccaccaccgccacctccaacatggccgggcagcatggctgctcaaacccaccctgcgagacccacgagacgggcaccaccaacactgccactacagccatgtcgagcgtcggcgccaaccaccagcgagatgcccgtcgggcctgtgcagctggcacccctgccgtgatccggatcagtgtggccactggggcgctggaggcagcccagggctctaagccccagtgccaaacccgccagaccagcgcgaccagcaccaccatgactgtgatggccaccggggccccgtgctcggccggcccactccttgggccgagcatggcacgggagcccgggggccgcagccctgcttttgtgcagttggcccctctgagcagcaaagtcaggctgagcagcccaagcattaaggaccttcctgcggggcgccacagccatgcggtcagcaccgctgccatgacccgttccagcgtgggtgctggggagccccgcatggcacctgtgtgcgagagcctccagggtggctcgcccagcaccacagtgactgtgacagccctggaggcactgctgtgcccctcggccaccgtgacccaagtctgctccaacccaccatgtgagacccacgagacaggcaccaccaacaccgccactacctcgaatgcaggcagcgcccagagggtgtgctccaacccgccatgcgagacccacgagacgggcaccacccacacggccaccaccgctacttcaaacgggggcacgggccagcccgagggtgggcagcagccccctgctggtcgcccctgtgagacacaccagaccacttccactggcaccaccatgtcggtcagcgtgggtgccctgcttcccgacgccacttcttcccacaggaccgtggagtctggcctagaggtggcggcggcacccagcgtcaccccccaggctggcaccgcgctgctggctcctttcccaacacagagggtgtgctccaaccccccctgtgagacccacgagacgggcaccactcacacggccaccactgtcacttccaacatgagttcaaaccaagaccccccacctgctgccagcgatcagggagaggtggagagcacccagggcgacagcgtgaacatcaccagctccagtgccatcacgacaaccgtgtcctccacactgacgcgggctgtgaccaccgtgacgcagtccacaccggtcccgggcccctctgtgccgcccccagaggaactccaggtgtcgccaggtcctcgccagcagctgccaccacggcagcttctgcagtcggcttccacagccctgatgggggagtccgccgaggtcctgtcagcctcccagacccctgagctcccggccgccgtggatctgagcagcacaggggagccatcttcgggccaggagtctgccggctctgcggtggtggccactgtggtggtccagccacccccacccacacagtccgaagtagaccagttatcacttccccaagagctaatggccgaggcccaagctggcaccaccaccctcatggtaacggggctcacccccgaggagctggcagtgacggctgctgcagaagcagctgcccaggccgcagccacggaggaagcccaggccctggccatccaggcggtgctccaggccgcgcagcaggccgtcatgggcaccggcgagcccatggacacctccgaggcagcagcaaccgtgactcaggcggagctggggcacctgtcggccgagggtcaggagggccaggccaccaccatacccattgtgctgacacagcaggagctggctgccctggtgcagcagcagcagctgcaggaggcccaggcccagcagcagcatcaccacctccccactgaggccctggcccctgccgacagtctcaacgacccagccattgagagcaattgcctcaatgagctggccggcacggtccccagcactgtggcgctgctgccctcaacggccactgagagcctggctccatccaacacatttgtggccccccagccggttgtggtggccagcccagccaagctgcaggctgcagctaccctgaccgaagtggccaatggcatcgagtccctgggtgtgaagccagacctgccgcccccacccagcaaagcccccatgaagaaggaaaaccagtggtttgatgtgggagtcattaagggcaccaatgtaatggtgacacactatttcctgccaccagatgatgctgtcccatcagacgatgatttgggcaccgtccctgactataaccagctgaagaagcaggagctgcagccaggcacagcctataagtttcgtgttgccggaatcaatgcctgtgcgcgggggcccttcagcgaaatctcagcctttaagacgtgcctgcctggtttcccaggggccccttgtgccattaaaatcagcaaaagtccggatggtgctcacctcacctgggagccaccctctgtgacctccggcaagattatcgagtactccgtgtacctggccatccagagctcacaggctgggggcgagctcaagagctccaccccggcccagctggccttcatgcgggtgtactgcgggcccagcccctcctgcctggtgcagtcctccagcctttccaacgcccacatcgactacaccaccaagcccgccatcatcttccgcatcgccgcccgcaatgagaagggctatggcccggccacacaagtgaggtggctgcaggaaaccagtaaagacagctctggcaccaagccagccaacaagcggcccatgtcctctccagaaatgaaatctgctccaaagaaatctaaggccgatggtcagtgagaggaagctgactagcccctggattcttctccagacccccctgcttcaggaacacccgccagggcccacccctcccaccccgtcccagcattcgcacttcaccctcgcgagccgctgttcactcctctcccctttctctttctctctgtttttaaaataatctaaagaaagcacattttaccattgctgttgggaggaagcagaggcagatgggaaagcagagagaggagcgcgcttcctttcctccccgctgccgcccaccctggggagagacttttgcggggagggaaggcggacgtgaggacagccagctccccctcccaaggctgtgcgttcctgagggccaggtcgggggcaggcatggaggggaggaaaggcgtccctcttggccctccccagagtggctttcctggcaccctggcctgggtgtctggttctgttttcttttcttccccttgtgtttccagtcacctaacttcccttcctcaggctcccccggcccaccctgctcagtgaccccacaggaagcttacacattttctcagaggcctttgtgctcccacctcttctaccctccccctcttctttcccattttaaaaaagaaaagaaggaaaaagaaaaaaggggcaaggagccccgcggcggcctgggcagcgcctgtgcagacctccctgcaggccgcactgccaactgctgcatttgttgtgttttttaggttgcaattggtgaagttcacactttcattgtaattttagcgtgtggggttttgtcccttttttgttgttgttagctgtgtacagaatgtgtaatcttttttcttttctcttttttttgttttgttttgttttgtttttgtttttttacttttttcttcttggctaattcttggcagggatctttctggaggaaaagctggggccagccagggcaggagaggtgtgaaatctgccacgaggggcctgctgtttgccacccagcccaacttcctgttgctggcccctgccctctgcccttttgcctgtcctcaggccgctggaacaaaggaaggacagctcattcctcatgggcgatcactccgcatctatagggtcgagcctaggggagcttgagggagggctggggcctccttgtcctggatttccagctctccccatgccccctccctgagcaccaccggcaccgcctcccaaacagggctgctggtttccgcagccactgctccacctcccccaaatcgtcatggaaagggtggagaatggaggggaaccaggcgtccttggaggcagcttgggagggtgactgtgtagtgtcacccacaagggaggctagggcaatggagcaggccaccagcagcagctgtgcagcatggaactcaggccaggctccgaggctgggggatctgcttggagttttctgccccccaccccaaacttctgtcgaggagcaaggcttgccagcaagtcagaaggatttgaaccgagcagccaatctttccagccctcccctaccgacctctgcctggagacgcagcagcctgtgtcctccagggcctctggtttgttgtattatagtatatttcgctgtggaaaatgtcacgtttagtcaccttggagcccactcacctggtcctgttgttttaccccatcccttctctcgcgcgcctattgatttgtttctgaggagagtacaccgttcactattgtagagtaacccctgtgactcaatattaccatagtgcgatgtcgttttgtgctattttgaacaattaaaagactttttttgaaataa

SEQ ID NO: 29601 - DNA, 1078 bp, Homo Sapiens
gcagcctcaaaccccagctgttggggccaggacacccagtgagcccatacttgctctttttgtcttcttcagactgcgccatggggctcagcgacggggaatggcagttggtgctgaacgtctgggggaaggtggaggctgacatcccaggccatgggcaggaagtcctcatcaggctctttaagggtcacccagagactctggagaagtttgacaagttcaagcacctgaagtcagaggacgagatgaaggcgtctgaggacttaaagaagcatggtgccaccgtgctcaccgccctgggtggcatccttaagaagaaggggcatcatgaggcagagattaagcccctggcacagtcgcatgccaccaagcacaagatccccgtgaagtacctggagttcatctcggaatgcatcatccaggttctgcagagcaagcatcccggggactttggtgctgatgcccagggggccatgaacaaggccctggagctgttccggaaggacatggcctccaactacaaggagctgggcttccagggctaggcccctgccgctcccacccccacccatctgggccccgggttcaagagagagcggggtctgatctcgtgtagccatatagagtttgcttctgagtgtctgctttgtttagtagaggtgggcaggaggagctgaggggctggggctggggtgttgaagttggctttgcatgcccagcgatgcgcctccctgtgggatgtcatcaccctgggaaccgggagtggcccttggctcactgtgttctgcatggtttggatctgaattaattgtcctttcttctaaatcccaaccgaacttcttccaacctccaaactggctgtaaccccaaatccaagccattaactacacctgacagtagcaattgtctgattaatcactggccccttgaagacagcagaatgtccctttgcaatgaggaggagatctgggctgggcgggccagctggggaagcatttgactatctggaacttgtgtgtgcctcctcaggtatggcagtgactcacctggttttaataaaacaacctgcaacatctca

SEQ ID NO: 29602 - DNA, 5279 bp, Homo Sapiens
gccgagcggcggcgcggcgcggcaacatggcgacggtgcccgtgtactgcgtctgccggctcccctacgacgttacccgcttcatgatcgagtgcgacgcctgcaaggactggttccacggcagctgtgttggggtggaagaggaggaggcgcccgacatcgacatataccactgcccaaactgtgagaaaacccatgggaagtccaccttaaagaagaagcggacctggcacaaacacggcccggggcaagcgcctgacgtcaagcccgtgcagaatggcagccagctcttcatcaaggagctgcggagccggacctttcccagtgctgaagacgtggtggcccgtgtgccaggaagtcagctcacgctgggctacatggaggagcacggcttcaccgagcccatcctcgtccctaagaaagacgggctgggtctggctgtcccggcccccacgttctatgtcagtgacgtcgagaactacgtggggccggaacggagtgtggatgtgacagatgtcaccaagcagaaggactgcaagatgaagctgaaggagtttgtggactattactacagcaccaaccgcaagcgggtcctcaacgtcaccaacctcgagttctctgacacccgaatgtccagcttcgtggagccacctgacattgtaaagaaactgtcatgggtagaaaactactggccagatgatgcattgctggccaagcccaaagtgaccaagtactgcctaatctgcgtgaaggacagttacaccgacttccacatcgactctgggggcgcctctgcctggtaccacgtgctcaagggggagaagaccttctatctcatcaggccggcctcggccaacatctccctgtatgagcgctggcggtctgcctctaaccacagcgagatgttctttgctgaccaggtcgacaaatgctacaagtgcatcgtcaagcagggccagaccctcttcatcccctcaggctggatctacgccacactcacccctgtggactgcctggccttcgcgggacatttcctccacagcctgagtgtggagatgcagatgagagcatatgaagtggaaaggaggttgaaactgggcagcctgactcagtttcccaactttgaaactgcgtgctggtacatggggaagcacctgctggaggcattcaaaggctctcacaaatctgggaagcagctgccccctcatctagtccaaggagctaaaattctcaatggtgctttccgatcgtggacgaagaagcaggctttggcagagcatgaggacgagctcccggagcacttcaaaccttcacagctaatcaaagacctggccaaagagatccggctcagtgagaatgcctccaaagccgtccgaccggaagtgaatactgtcgcctcgtcagatgaggtgtgtgacggggaccgggagaaggaggagcccccgtctcccattgaggccaccccgcctcaatccctcctggagaaagtgtccaaaaaaaagactcccaaaactgtgaagatgcccaagccatccaaaatccccaagcccccgaagccccctaagcccccaaggccccccaaaacgctgaagctcaaagatggaggcaagaagaaagggaagaagtcccgggagtcagcctcacccaccatccccaacctggacctgctcgaagcccacaccaaggaggcactgaccaagatggagccgcccaagaagggcaaggccacaaagagtgtcctgagtgtgcccaacaaagatgtggttcacatgcagaatgatgtggagaggctggaaattcgagagcaaaccaagagcaagtcagaggccaagtggaagtacaagaacagcaaacctgactccttactgaagatggaagaggagcagaagctagagaagtcgcctctagctggaaacaaagacaataagttctctttttctttctccaacaagaaactcctcggctccaaggctctcaggcccccgacgagccctggtgtgttcggggccttgcagaacttcaaggaggacaagcccaagcccgtgcgggatgagtatgagtacgtgtcggatgacggtgagctcaagatcgacgagtttcccatcaggaggaagaaaaacgccccgaaaagggacttgtccttcttgttggataagaaggctgtgctgcccacgcctgtcacgaagccaaagctggactcggcagcgtacaagagtgatgactcctcggacgagggttcgctgcacatcgacacagacaccaagcccggccgcaatgccagagtcaagaaggagagtgggagctcggcagctggcatcttggacctgctgcaggccagtgaggaggttggcgcgctggagtacaaccccagcagccagcccccggcctcccccagcacacaggaagccattcagggaatgctgtccatggccaacctgcaggcctccgactcctgcctgcagaccacgtggggagctggccaggccaaggggagctcgctggctgcccatggtgcccggaagaatgggggtggcagtggcaagagtgcaggcaaacgactgctgaagagggctgccaagaacagtgtcgacctggacgactacgaggaagagcaggaccacctggatgcctgcttcaaggactcagactacgtttacccctcactggagtcagatgaagacaaccccatctttaagtcccggtcgaagaaaaggaaaggctcagacgacgctccctacagcccaacagcaagggtcggcccatcggtgccaagacaggacaggcctgtgcgtgagggtacacgggtggcttccatcgagaccgggctggcggctgctgcagctaagttgtcccagcaggaggagcagaaaagcaagaaaaaaaagagtgccaagaggaagctgactcctaacaccacctccccttccacctccacctccatctctgccggcaccacctccacctccaccacgccagcctccaccacgccagcctctaccaccccggcctccaccaccccggcctccaccagcacggccagcagccaggcctcgcaggagggcagctcgccagagcccccgcctgagtcgcatagcagcagcctggcggaccatgagtacacagccgctggcaccttcaccggggcccaggctggccgcacctcccagcccatggcccctggggtctttctcacacagaggcggccctccgcatcgtctccaaacaacaacaccgctgccaaaggaaaacgtacgaaaaagggcatggcgaccgccaagcagaggcttgggaaaattttgaaaattcatcggaacgggaaactactcctttaagatttggaaagccaggatccttctgctccgctcaggacccccggagccccgcgaaaacatctgcctcccaggagggtgccgagctgcctcaccagggagggccttgcctcttcccggctgccatctccccaacaagcgtctgtcccttcagccggcagagcgagcccagcgtggcccctcaatttgaaaatggacgtcttttctcaagttgctaagagtgatctgtcccagaaaagcggccctgcaagtttgaggaccgcttattccactttaaggacagccttcaggccccctgagcgtgggtgtgattgcagggcctctgcagctctgctgagagcatgagtccttcaaggaagacagagtgagccaatgctcaccagccccagagtcagagctggccacaggctggcagcctccaggggcttaaaaaaaaaggcaaagaacacagaaagaggaggagcaagtgggatgtttatgtccccccttctcttcctgagtgattctcagccaagtccagacagtgctcggcgggtgaggaagggtctgccccgagctttctggttggcaggtggcagcaggatggtgggtgttcagcctgaatgcccaggagcatttctggggggcagctaagactggcagctgggttggtgtgttagcgggcaggggagccattgtggggtccccaggaaagggcaagggctcagccacatcttggggtctgggaggcccaggctaagccatgtggcagggaccgtcttgccctgctggccacactctggagaagcacttctcagccaaggcacccctgccctgggactggcagggcaggggcaggggcagggacagtggccaggcggcccgaggacttacggtcggcacttctctgttctcccgtgtcagcgtgtggtgtcgcctgcatgggtcgtacctggatggtgtgtccaccatcgacacggaggggctggatttgtttctcaggcaatcctgtattttaattttagatgtatttcctgaagcatatttttcatagaatgtagcgtgtaaatagctttttaaataacttcttttttataagagtaaaagtatctttaggaatttctttctatagagttcttcattaacatttatacgagttttttgctgagtcagatggacagttgggttctgatgctttttccttctcctttccttttattattattatttttttcttttaagaactaaggtattgcctgaaaaacaagtgatgtctgtgcagccttacactctgtctttacagaagcaaatagtacacaaaagatctatttcagacacattttgaagatgaatcttcaactttaataccagctctttgttttccttgtatgatgaggggattgggggatacagttattttactagcaccttgtgaagtgtttccgtgttttgtgatgctgtaatttattaatgtttgtagctttttatatttgtacatttcttatgagctttgtttatatacccattacctggatgtttttgtccactgggagaggcagcttggtggaggccttatccactcccacttgtcctgtttggagggacgcagtccctagggcccgagactgggtgggagagggggagtctcacggggccccaggcttattcagaactggtgtttttaaagtttcctttaccctgcccttgttgaacatttatataatctaacctggacatcaagctgttctctctctctcttttttttaattttattattattattttggcaacatgtacatttctaacaaagtttatcgtggctattaaagtgttttatttcccaattcatattactcttgtatcgagtccatgaggtctaaggcaacttagatcaaagttttaaaaaagtaaaaatatttcaggttttgtacaaaaaaaaaaaaaaaaaaaaaaaaaaaaaaaaaaaaaaaa

SEQ ID NO: 29603 - DNA, 5431 bp, Homo Sapiens
aggaggaatcgctggtcgccagcgaggggtgcggcttcaatttcaataactttattggtggcctgatctgcagaacagccatcacatcagtggcccttggaggagggagcgcatcgcccgaggtggtccccgacgagctgcagccatgggaaacaccaccagcgaccgggtgtccggggagcgccacggcgccaaggctgcacgctccgagggcgcaggcggccatgccccggggaaggagcacaagatcatggtggggagtacggacgaccccagcgtgttcagcctccctgactccaagctccctggggacaaagagtttgtatcatggcagcaggatttggaggactccgtaaagcccacacagcaggcccggcccactgttatccgctggtctgaaggaggcaaggaggtcttcatctctgggtccttcaacaattggagcaccaagattccactgattaagagccataatgactttgttgccatcctggacctccctgagggagagcaccaatacaagttctttgtggatggacagtgggttcatgatccatcagagcctgtggttaccagtcagcttggcacaattaacaatttgatccatgtcaagaaatctgattttgaggtgttcgatgctttaaagttagattctatggaaagttctgagacatcttgtagagacctttccagctcacccccagggccttatggtcaagaaatgtatgcgtttcgatctgaggaaagattcaaatccccacccatccttcctcctcatctacttcaagttattcttaacaaagacactaatatttcttgtgacccagccttactccctgagcccaaccatgttatgctgaaccatctctatgcattgtccattaaggacagtgtgatggtccttagcgcaacccatcgctacaagaagaagtatgttactactctgctatacaagcccatttgaagggatcccttcttgcctctaaggattcaggagaagcatctcccttgcatttctggactgaaccagtcttacctgagactggaaggctgatttgctttgaggctgatatgtgtgtttcagagcctctgagtaggatgctctgcttttgcatttgattgcagatgagagctttatgagttcacggaatttattttaagaaaaaaaaatatacatatgagaagaaggtaaatggaagcctcctagccccagctagaagtattgtttctgcctgtgggttttcaccaagacctgtttgggggcgctgcaggaataactatataggaagatttttcctaaaatgaaagaacagcaaactcttaggatccttgttgggtggagattctatcactgctaccttggctctccaaggaatgggcttgtgctagaccgctgccctacttaacagctgcctcattgcaagggcagtttttcttgcatgggttctctatattcccagagtatgtggcacaatctgtgttgtttatatgataccagatgccccacaagaacccttattcctctcatttcacattcttcctttaatagcctccttcagatcccatacctgacccctctctaacacaaaacttattgggtaagtgactttgaaaagttttgtggcacctgacccaccccagacactagggctatcagaaggtctcctttttagcccagcacaggcccaggccactttgtcgtgtttgttttaacttctaaagaaaatatgtttcagcattataagaaaggcagaatgcagaacacctacatttttgttttagtttggtgccaaggctcaggctgtattggcaaattcccgaaagttttcccactttgcctggccctgcttctgtcttttctttctcagtaaacagttctgaaggcaggagtggaacccgggagtattttcatgtctttcatccttgaaagatttttatgtgcctgcattttttttttaattaaaaaatgccttttcattggtcttaagagaccgcattggagaatttcaggcttttgataaatgcttcttcaaagagattttcttctctagtctagccttccacattcttagattaatatggccaaccctgtacacatcactacactaaacactgctctagataaactgctcaagttcatttaactcatttgatgcacctaaaggggttcctcattttaaagatttgttaggccaagaagcaagagagtattcctagtattcccaaccatgaaaagtatcattctttgcaccaaatgttaacaaaatcattttgttctcctgcctcttctttttaaaggtgtttgatgattaagtggggtcactgaattccatttgtggactgaaaagtattcaatccacttttggggttcagagataaaacattttttcccaagtagctggggctcttccattttgcagataagtcaaataatcaacactaaaggaggctaaactgttgatgaatgagagactccctgactgctcagatgaccctagccacactgaaagggcacctacaggtcagtttagctacctcctgtctttcccatgcaaagctgataacacagttgtctttggacttgtagacctcttggattccaggtgtgatggagtaaagtgtgggattgttgttttgctgggatgcaaataactaaatgctttggtggttaattgctaagagtaaatactactttagccatccaaggccaccttctgcagcaaaaggcttttgtggagaaccttttatgttcccaaccactttttgaatggtgtgccatttaaaaatccaggccagatcctattataaccaactctcaggatttacagccttcagttgtactagaattttgtttttatccaatactcattaaataagtgggccacttaggaagattcaaaatcttggttattacatgaagtttgttatatttcttgtcaacagtattgaaatgtaatatgtatgtgttcatgtatgaaaatttttactccacacaggtgtttcagtagagtggggcaggaaaagagatctcttcgatttctttcaggcctgaggcttttgtgaaatgcgtcagccccctgtgacagtaggttttgatgctagtgatcttcagatctttctctctggaaatgtgcagagagtgtcagtttcccaagttctgaggtaactctcagcccagatgtgaaatgggagcctaccagctggtatagaagggaatgggtaggaggcactgggtgctgactcattcagcactgtcccttttctatactgctgatacatcccatggttctgagaagccttatctcagtctatttggaagagagggaggaagagaaggaagtaacccaaagtactactcatttatccttgtatattgattagttaaagggataattaatttaatgctgaggagagtttgacagattttgaaaatgagtaaaggcaaaaaaaatttttttagcctttattttgcttttgggaattttacagagtcaaagtaggcagaataagaaaatagttcttcaggagggccgacctttaaagaacttcaacatagtttcggaattgtggggaagagaagagtgactgagctgagaagtaataatagaataaagggttgagtaacttagaactgaaaatgatctcttttaaaaagaaattaaatcagacaccacatggtggtgtccttggatctcactgtgcagaattagcagtgtataaccatcttctcttttcatcttgttccaattctctcctctttcctttccattctgctttaagctcatgtgtcaggcagactttaccagagtgtcagacattacctaaaacacatacgttagccatgctgctggtatggagaaattccacaccatgattattagcctcctttaagctgaatgggatttaaccattctaggcaacacccctgaagggcatacctaacctcaatagtgttggcttttaaaacgtatgtttgtatggtagagaaactttgtaaaagaagaatccaagagaagtttgtgaggatcctacaaacccaggcccactcactttgctctaattctttctagtatcttgtagatctaatgggtctgggataaaaactttgaaaagtgtcaatattccatgtatgctgctgaaatgaagttaagtttggaaagaagtgatacctctagactgggtttatattaatctgggatataaatgaagaagacatactaatagaactccttgcttttaattggggaaatagggctttaataattttgacctcaactaaaaatgatatgcaatagtctctgtgtgtgtttgaaatacattgtgttctcagagatttctacattctcacgttctagtgatttggggcatgggcttaatagcagatgtacagtgtattcctgcattattgtgattccccttaaagcccagttcttgctgtcttctaccaggggctgctgactccagttacccatggaatgcaggacctgggaggggtagccattagggtctttcaaaactctttggatctaagcatttgtctctccttaagtgccaatcacaattggatatggaaggactgtgatttctgcaatgaacccaaacttttagagtaaaaagccaaatttaaattataagaaagaagggaaaaaagagaaaaactcaagtctattacttgtagagtccaattcttagcaatggaatcgctctaggattctagtttgggctttgtctggatttgcttttctcagttgtgctttgaagtgaataagctttgttacaaattaattttttattagttccaatattagttggagttaacttgaattgattgtatgtagcacagcacttttgcagtaagattggtgtgaaatactaaacactatggattttgtaggtgtcaggttaaatggtcaagggatacctacattaagtcatatattaggtattgatgatcttacttcttttctgttcccctgtacaaaacacttacctaacccagcttgtggttttaggacagccaaagctcactgttgttggttagtcctaatcactacacgggtctcataaatgagacttgtttgaattttggtacattggagcatgttggttggtattacacggcagcatttcgaatgagtgcagctctgtgtctgtcagaaaggagagataagactactttgaagggaattaaatatgtgagtcctctttttaatggtgctttttgtaacctttaatgctgaggtacagagctgcttttcaatatttcataaaggagtggcagacaagagtggattttaaagctgttcttcaaacgtaatttgtcactggactctgacacacctggaaattatatgatatgatacatacagaaatgttgtgggttttttccataaaactttaataaaagtattatacagcaataaaaaaaaaa

SEQ ID NO: 29604 - DNA, 5537 bp, Homo Sapiens
gaacccggcgaggaaatacatgcactggctgagaatcgcccgcgccagggcgcaacgccacaaggtgtagggagtgtgcggggtggggcgaaaggggacccaagagtccctgtggctcggagtgccgggccgtcggttcttcattcctgccctcggggcagacggagtgaccccggcccccactccccgccccgaccatggtagtgttcaatggccttcttaagatcaaaatctgcgaggccgtgagcttgaagcccacagcctggtcgctgcgccatgcggtgggaccccggccgcagactttccttctcgacccctacattgccctcaatgtggacgactcgcgcatcggccaaacggccaccaagcagaagaccaacagcccggcctggcacgacgagttcgtcaccgatgtgtgcaacggacgcaagatcgagctggctgtctttcacgatgcccccataggctacgacgacttcgtggccaactgcaccatccagtttgaggagctgctgcagaacgggagccgccacttcgaggactggattgatctggagccagaaggaagagtgtatgtgatcatcgatctctcagggtcgtcgggtgaagcccctaaagacaatgaagagcgtgtgttcagggaacgcatgcggccgaggaagcggcagggggccgtcaggcgcagggtccatcaggtcaacggccacaagttcatggccacctatcttcggcagcccacctactgctcccattgcagagacttcatctggggtgtcataggaaagcagggataccagtgtcaagtctgcacctgcgtggtccacaagcggtgccacgagctcataatcacaaagtgtgctgggttaaagaagcaggagacccccgaccaggtgggctcccagcggttcagcgtcaacatgccccacaagttcggtatccacaactacaaggtccctaccttctgcgatcactgtgggtccctgctctggggactcttgcggcagggtttgcagtgtaaagtctgcaaaatgaatgttcaccgtcgatgtgagaccaacgtggctcccaactgtggagtggatgccagaggaatcgccaaagtactggccgacctgggcgttaccccagacaaaatcaccaacagcggccagagaaggaaaaagctcattgctggtgccgagtccccgcagcctgcttctggaagctcaccatctgaggaagatcgatccaagtcagcacccacctccccttgtgaccaggaaataaaagaacttgagaacaacattcggaaagccttgtcatttgacaaccgaggagaggagcaccgggcagcatcgtctcctgatggccagctgatgagccccggtgagaatggcgaagtccggcaaggccaggccaagcgcctgggcctggatgagttcaacttcatcaaggtgttgggcaaaggcagctttggcaaggtcatgttggcagaactcaagggcaaagatgaagtatatgctgtgaaggtcttaaagaaggacgtcatccttcaggatgatgacgtggactgcacaatgacagagaagaggattttggctctggcacggaaacacccgtaccttacccaactctactgctgcttccagaccaaggaccgcctctttttcgtcatggaatatgtaaatggtggagacctcatgtttcagattcagcgctcccgaaaattcgacgagcctcgttcacggttctatgctgcagaggtcacatcggccctcatgttcctccaccagcatggagtcatctacagggatttgaaactggacaacatccttctggatgcagaaggtcactgcaagctggctgacttcgggatgtgcaaggaagggattctgaatggtgtgacgaccaccacgttctgtgggactcctgactacatagctcctgagatcctgcaggagttggagtatggcccctccgtggactggtgggccctgggggtgctgatgtacgagatgatggctggacagcctccctttgaggccgacaatgaggacgacctatttgagtccatcctccatgacgacgtgctgtacccagtctggctcagcaaggaggctgtcagcatcttgaaagctttcatgacgaagaatccccacaagcgcctgggctgtgtggcatcgcagaatggcgaggacgccatcaagcagcacccattcttcaaagagattgactgggtgctcctggagcagaagaagatcaagccacccttcaaaccacgcattaaaaccaaaagagacgtcaataattttgaccaagactttacccgggaagagccggtactcacccttgtggacgaagcaattgtaaagcagatcaaccaggaggaattcaaaggtttctcctactttggtgaagacctgatgccctgagagcccactgcagttggactttgccgatgctgcaagaaggggtgcagagaagactcctgtgttggagacactcagcaggtcttgaactacttctcctcctcggagccccagtcccatgtccactgtctatttattgcattcccttgccccaggccacctcctccccctcccacctggtgaccagaaggcgctctcggttcttgtctcaccagtaatgcagactcattgggtcagcaattagctgtatacactgccgtgtttggaccattggcaagcctggttccactcctcaggggctcctggcagtgaagcaacttcagttcttttactgcaaagaacagaaaaaagaaagaaagcaaacaagaagactccggctctgctatcggacacagatcctgatccctcttgcttcttttccctcctgcaccgcagcttgccatccctgcccttctgtcctggagaagagactggtgcttctccgcacacacgagggagggcgcccttgaggcatgccctctgagggagggagaccagagatgcagggattggccagctgggttggtttgctctggaatggctaactcttgcctgctttggttttagcttttcagcatgccaaagtcatgtaagtttgtgtcttgtggaagaaatcctctttgtggaaaaagaaacagggttttgaactctgttaacatttgaaaaatatattttcaaattcactttctaattggccaaaagagatgagttccagtctgaatacaggtagatattaaagggctaataaaaaatgagaaaccggtcgtccaaggtggatgctgtcaatgcccgagtgacacatgagagctgtatgaattgagagaaaaggcaacaagtagcattcttcatcattcaagttctacctggacacaaaggcgaggaccctggggttccaacaaagctcagctcccagattctctttccagtttcatcctaagttcctagcataaacactatttattttctgcagcagtgtgttatttttgcgcacttatacaaaatggtagtactactgtgttgtggtttttaaacattaaacatgtaaagttatatacgaaatatctgcttttggaataagcagaatgaggctaaacatgggttatacaaagggtatctggaaactgaagagcaacttgttagaaaactgacaatgtcgcaagatgtactcagttttgtttctgtgtgacatgcaatggcaactcatgtggacactattgaagggatgtgacattacctcctgtagatatgctaacagtgttattctttcatttccaagggttctctgtggctttgtgtatatgtttcccagaggtcatttgattacctaatttactgaactgatttagcagggaatggaatccattccaactattgcacgtggatttcccagctgcccctaaatatatatacttgtgagtggcaaagtggcactaatgaagcttttgccttttgtacatttgagatttttgtatatagtgtttgctgcaaggcctgtggaattaattcgttgcatatagaggtatcaactgctgcatgttcaggcatattataaaactttagtctatgaaagaataattataataatgtccaggtgcaatactctgtaagtctattggttcaagttaccgagagataggtgtgttcctttatgggggatgggggggtgtgttggggattctttgtattgtttatttcattttggtttattttaaaagatgtaaacatatattaagctatattaaatctcacatacagttcttctgtgctctattataccctgatagagatgggggagagaaaggaatgtttttgatggtggtttcaaagctcggacagtaactatcttgagcccattagagagtctgtgtccatatttgcatctggctggtcatagcctttgttactaatgatgacattcagttctcttttgtttttattttttaaaaactcaggtgtaattattatctgttcttaagataattgcaaatattaaatattatgatatatcaattcatgtgtttggcataccagtgaatgatgaagaacatgagattaatttaatttatcttcggtaacttgacattctggagagagactatcttctggagttgagtacaagcacagaaacatctttacggtggcatcatctcattttttaggaagacatgataatactgcccatcatattcatgtgtaactactgttctttcttctgctttcttcaccataataaactttggacaaccaagcaagctctaaccgcaatgccagatggccttgtccgagggcctagtgtttgcacggcagtgggaactgggcctttcctacaggacaactggcaagtttgctgggaagtcaaataatacattccacctggcagctgaaggcagccagtcagtctgtcccagaaagggcccttttcagcacccaaagctgggctggctgggatgcctctggctggtgaagttctcacataggctgatttaaatccagcaaaggtctatagaaaaaggcttgcgtgttcgttgagtaatcattgtttcattttcatttttacgagagtttgaaaatagacacactgttaacacttctgccagttttttctgatctttccagccccaccccctttctctttctctctctctctcaaagaaaaaaaaaatgggagtgcaaaaaaaacaaagccaaaaaatatatgaaggatagctgttcttctgtgttctctcattatggactttgtgaagtagaaacataattttttttcctccaaaggtgaaaaaacaatgcattcttgctttaaaaaaaaaaaagaaggctaaaaaattacctctttttaaattatgtgcaaaataattctggctaactgtaaaatgtattcaattttaggattttttttttttgtattgtgatgctttatttgtacatttttttcctttctggatgtaattttaatctcttgccattcattagtgttatttcattgtaaacgttattgtgccaaatgtactgtattcaaaaggatgtgaatgtgtattgtttcagaacctaataaatacaatgacgttaagtcttaaaaaaaaaaaaaaaaaa

SEQ ID NO: 29605 - DNA, 861 bp, Homo Sapiens
aaaaggccggcggaacagccagaggagcagagaggcaaagaaacattgtgaaatctccaactcttaaccttcaacatgaaagtctctgcagtgcttctgtgcctgctgctcatgacagcagctttcaacccccagggacttgctcagccagatgcactcaacgtcccatctacttgctgcttcacatttagcagtaagaagatctccttgcagaggctgaagagctatgtgatcaccaccagcaggtgtccccagaaggctgtcatcttcagaaccaaactgggcaaggagatctgtgctgacccaaaggagaagtgggtccagaattatatgaaacacctgggccggaaagctcacaccctgaagacttgaactctgctacccctactgaaatcaagctggagtacgtgaaatgacttttccattctcctctggcctcctcttctatgctttggaatacttctaccataattttcaaataggatgcattcggttttgtgattcaaaatgtactatgtgttaagtaatattggctattatttgacttgttgctggtttggagtttatttgagtattgctgatcttttctaaagcaaggccttgagcaagtaggttgctgtctctaagcccccttcccttccactatgagctgctggcagtgggtttgtattcggttcccaggggttgagagcatgcctgtgggagtcatggacatgaagggatgctgcaatgtaggaaggagagctctttgtgaatgtgaggtgttgctaaatatgttattgtggaaagatgaatgcaatagtaggactgctgacattttgcagaaaatacattttatttaaaatctcctaaaaaaaaaaa

SEQ ID NO: 29606 - DNA, 1493 bp, Homo Sapiens
ttcctttcatgttcagcatttctactccttccaagaagagcagcaaagctgaagtagcagcaacagcaccagcagcaacagcaaaaaacaaacatgagtgtgaagggcatggctatagccttggctgtgatattgtgtgctacagttgttcaaggcttccccatgttcaaaagaggacgctgtctttgcataggccctggggtaaaagcagtgaaagtggcagatattgagaaagcctccataatgtacccaagtaacaactgtgacaaaatagaagtgattattaccctgaaagaaaataaaggacaacgatgcctaaatcccaaatcgaagcaagcaaggcttataatcaaaaaagttgaaagaaagaatttttaaaaatatcaaaacatatgaagtcctggaaaagggcatctgaaaaacctagaacaagtttaactgtgactactgaaatgacaagaattctacagtaggaaactgagacttttctatggttttgtgactttcaacttttgtacagttatgtgaaggatgaaaggtgggtgaaaggaccaaaaacagaaatacagtcttcctgaatgaatgacaatcagaattccactgcccaaaggagtccagcaattaaatggatttctaggaaaagctaccttaagaaaggctggttaccatcggagtttacaaagtgctttcacgttcttacttgttgtattatacattcatgcatttctaggctagagaaccttctagatttgatgcttacaactattctgttgtgactatgagaacatttctgtctctagaagttatctgtctgtattgatctttatgctatattactatctgtggttacagtggagacattgacattattactggagtcaagcccttataagtcaaaagcatctatgtgtcgtaaagcattcctcaaacattttttcatgcaaatacacacttctttccccaaatatcatgtagcacatcaatatgtagggaaacattcttatgcatcatttggtttgttttataaccaattcattaaatgtaattcataaaatgtactatgaaaaaaattatacgctatgggatactggcaacagtgcacatatttcataaccaaattagcagcaccggtcttaatttgatgtttttcaacttttattcattgagatgttttgaagcaattaggatatgtgtgtttactgtactttttgttttgatccgtttgtataaatgatagcaatatcttggacacatttgaaatacaaaatgtttttgtctaccaaagaaaaatgttgaaaaataagcaaatgtatacctagcaatcacttttactttttgtaattctgtctcttagaaaaatacataatctaatcaatttctttgttcatgcctatatactgtaaaatttaggtatactcaagactagtttaaagaatcaaagtcatttttttctctaataaactaccacaacctttcttttttaaaaaaaaaaa

SEQ ID NO: 29607 - DNA, 4451 bp, Homo Sapiens
gctcatactagggacgggaagtcgcgaccagagccattggagggcgcggggactgcaaccctaatcagcagagcccaaatggcgcagtgggaaatgctgcagaatcttgacagcccctttcaggatcagctgcaccagctttactcgcacagcctcctgcctgtggacattcgacagtacttggctgtctggattgaagaccagaactggcaggaagctgcacttgggagtgatgattccaaggctaccatgctattcttccacttcttggatcagctgaactatgagtgtggccgttgcagccaggacccagagtccttgttgctgcagcacaatttgcggaaattctgccgggacattcagcccttttcccaggatcctacccagttggctgagatgatctttaacctccttctggaagaaaaaagaattttgatccaggctcagagggcccaattggaacaaggagagccagttctcgaaacacctgtggagagccagcaacatgagattgaatcccggatcctggatttaagggctatgatggagaagctggtaaaatccatcagccaactgaaagaccagcaggatgtcttctgcttccgatataagatccaggccaaagggaagacaccctctctggacccccatcagaccaaagagcagaagattctgcaggaaactctcaatgaactggacaaaaggagaaaggaggtgctggatgcctccaaagcactgctaggccgattaactaccctaatcgagctactgctgccaaagttggaggagtggaaggcccagcagcaaaaagcctgcatcagagctcccattgaccacgggttggaacagctggagacatggttcacagctggagcaaagctgttgtttcacctgaggcagctgctgaaggagctgaagggactgagttgcctggttagctatcaggatgaccctctgaccaaaggggtggacctacgcaacgcccaggtcacagagttgctacagcgtctgctccacagagcctttgtggtagaaacccagccctgcatgccccaaactccccatcgacccctcatcctcaagactggcagcaagttcaccgtccgaacaaggctgctggtgagactccaggaaggcaatgagtcactgactgtggaagtctccattgacaggaatcctcctcaattacaaggcttccggaagttcaacattctgacttcaaaccagaaaactttgacccccgagaaggggcagagtcagggtttgatttgggactttggttacctgactctggtggagcaacgttcaggtggttcaggaaagggcagcaataaggggccactaggtgtgacagaggaactgcacatcatcagcttcacggtcaaatatacctaccagggtctgaagcaggagctgaaaacggacaccctccctgtggtgattatttccaacatgaaccagctctcaattgcctgggcttcagttctctggttcaatttgctcagcccaaaccttcagaaccagcagttcttctccaacccccccaaggccccctggagcttgctgggccctgctctcagttggcagttctcctcctatgttggccgaggcctcaactcagaccagctgagcatgctgagaaacaagctgttcgggcagaactgtaggactgaggatccattattgtcctgggctgacttcactaagcgagagagccctcctggcaagttaccattctggacatggctggacaaaattctggagttggtacatgaccacctgaaggatctctggaatgatggacgcatcatgggctttgtgagtcggagccaggagcgccggctgctgaagaagaccatgtctggcacctttctactgcgcttcagtgaatcgtcagaagggggcattacctgctcctgggtggagcaccaggatgatgacaaggtgctcatctactctgtgcaaccgtacacgaaggaggtgctgcagtcactcccgctgactgaaatcatccgccattaccagttgctcactgaggagaatatacctgaaaacccactgcgcttcctctatccccgaatcccccgggatgaagcttttgggtgctactaccaggagaaagttaatctccaggaacggaggaaatacctgaaacacaggctcattgtggtctctaatagacaggtggatgaactgcaacaaccgctggagcttaagccagagccagagctggagtcattagagctggaactagggctggtgccagagccagagctcagcctggacttagagccactgctgaaggcagggctggatctggggccagagctagagtctgtgctggagtccactctggagcctgtgatagagcccacactatgcatggtatcacaaacagtgccagagccagaccaaggacctgtatcacagccagtgccagagccagatttgccctgtgatctgagacatttgaacactgagccaatggaaatcttcagaaactgtgtaaagattgaagaaatcatgccgaatggtgacccactgttggctggccagaacaccgtggatgaggtttacgtctcccgccccagccacttctacactgatggacccttgatgccttctgacttctaggaaccacatttcctctgttcttttcatatctcttgcccttcctactcctcatagcatgatattgttctccaaggatgggaatcaggcatgtgtcccttccaagctgtgttaactgttcaaactcaggcctgtgtgactccattggggtgagaggtgaaagcataacatgggtacagaggggacaacaatgaatcagaacagatgctgagccataggtctaaataggatcctggaggctgcctgctgtgctgggaggtataggggtcctgggggcaggccagggcagttgacaggtacttggagggctcagggcagtggcttctttccagtatggaaggatttcaacattttaatagttggttaggctaaactggtgcatactggcattggcccttggtggggagcacagacacaggataggactccatttctttcttccattccttcatgtctaggataacttgctttcttctttcctttactcctggctcaagccctgaatttcttcttttcctgcaggggttgagagctttctgccttagcctaccatgtgaaactctaccctgaagaaagggatggataggaagtagacctctttttcttaccagtctcctcccctactctgcccctaagctggctgtacctgttcctcccccataaaatgatcctgccaatctaatgtgagtgtgaagctttgcacactagtttatgctacctagtctccactttctcaatgcttaggagacagatcactcctggaggctggggatggtaggattgctggggatttttttttttttaaacagggtctcactctgttgcccaggctagagtgcaatggtgcaatcacagctcactgcagcctcaacctcctgggttcaagcaatcctcctacctcagcctcctgggtagctagcaccatggcatgcgccaccatgccctattttttttttttaaagacagggtcttgctatattgcccaggctggtcttgaactgggctcaagtgatcctcacgccttggcctcccaaagtgctgggattataggcatgagccactgtgcttggccaggatttttttttttttttttttgagatggagtttctctcttgttgtccaggctggagtgcaatggtgtgatctcggctcactgcaacctccgccttccgggttcaagtgactctcctgcctcagcctccccagtagctgggattacagatctgcaccaccatgcccagctaattttgtatttttagtagagacggggtttctccatgttggtcaggctggtctcgaactcctgacctcaagtgatctgtccacctcggcctcccagagtgctgggattacaggcgtgagccactgttcccagcaggaatttcttttttatagtattggataaagtttggtgtttttacagaggagaagcaatgggtcttagctctttctctattatgttatcatcctcccttttttgtacaatatgttgtttacctgaaaggaaggtttctattcgttggttgtggacctggacaaagtccaagtctgtggaacttaaaaccttgaaggtctgtcataggactctggacaatctcacaccttagctattcccagggaaccccagggggcaactgacattgctccaagatgttctcctgatgtagcttgagatataaaggaaaggccctgcacaggtggctgtttcttgtctgttatgtcagaggaacagtcctgttcagaaaggggctcttctgagcagaaatggctaataaactttgtgctgatctggaaaaaaaaaaaaaaaaaaaaaaaaaaaa

SEQ ID NO: 29608 - DNA, 5702 bp, Homo Sapiens
gccctggtgccaggcgctcagctcggcgctcccctgtgctcgcccggcgcccactcattcgcagcccggccttcgtcgccgccgcctccctgctgctcctcctcctttccccagcccgccgcggccatggcggacagcgccagcgagagcgacacggacggggcggggggcaacagcagcagctcggccgccatgcagtcgtcctgctcgtcgacctcgggcggcggcggtggcggcgggggaggcggcggcggtgggaagtcggggggcattgtcatctcgccgttccgcctggaggagctcaccaaccgcctggcctcgctgcagcaagagaacaaggtgctgaagatagagctggagacctacaaactgaagtgcaaggcactgcaggaggagaaccgcgacctgcgcaaagccagcgtgaccatccaagccagggctgagcaggaagaagaattcattagtaacactttattcaagaaaattcaggctttgcagaaggagaaagaaacccttgctgtaaattatgagaaagaagaagaattcctcactaatgagctctccagaaaattgatgcagttgcagcatgagaaagccgaactagaacagcatcttgaacaagagcaggaatttcaggtcaacaaactgatgaagaaaattaaaaaactggagaatgacaccatttctaagcaacttacattagaacagttgagacgggagaagattgaccttgaaaatacattggaacaagaacaagaagcactagttaatcgcctctggaaaaggatggataagcttgaagctgaaaagcgaatcctgcaggaaaaattagaccagcccgtctctgctccaccatcgcctagagatatctccatggagattgattctccagaaaatatgatgcgtcacatcaggtttttaaagaatgaagtggaacggctgaagaagcaactgagagctgctcagttacagcattcagagaaaatggcacagtatctggaggaggaacgtcacatgagagaagagaacttgaggctccagaggaagctgcagagggagatggagagaagagaagccctctgtcgacagctctccgagagtgagtccagcttagaaatggacgacgaaaggtattttaatgagatgtctgcacaaggattaagacctcgcactgtgtccagcccgatcccttacacaccttctccgagttcaagcaggcctatatcacctggtctatcatatgcaagtcacacggttggtttcacgccaccaacttcactgactagagctggaatgtcttattacaattccccgggtcttcacgtgcagcacatgggaacatcccatggtatcacaaggccttcaccacggagaagcaacagtcctgacaaattcaaacggcccacgccgcctccatctcccaacacacagaccccagtccagccacctccgcctccacctccgccacccatgcagcccacggtcccctcagcagccacctcgcagcctactccttcgcaacattcggcgcacccctcctcccagccttaatgcatgagcttagtctgaatttcaagttgggactcatccaatggagccgtctactcaacgccaaaggcttccttctctggcatatttggatatgacttatttgcactgaggttatctaggcttcactatccattgtgttgtaaatgtttgtcagaaatgcagccagtgttgtgggtctacaacactaaccagacgactttttccatcagtgttttacttgaatcttcatgtacgtccattccctggctggaaccttcgctgtttggtatttggtatttcagcagcagtgtgcaatttttgcttggcccagagcttcattctcctggcttttaggtttgtaaaagaaaaagggatatcttttttatatttttttccatgaatctgcagaaaattactgagctgttgttaccctcctctcattataatagtgtttaccaaacataccaataattcagcactacaattcagacctttgaaaatctggctttcagtgtagaacagaaagttagatgaatcagtgcccaagacatattttctgtttaacagaactttctacagatacattttttacaggttattttcattgtgttattgacatccatgtctctcgtaaaacagatggcccaaagtaatgaatcatgtggctgtaccttctccacataaatgggatggataattatcgtatattaagatgtgattctcttttttatccttaatgttaatctacttaacctggccccctctaacatgagtcgataaatgttgtcctactcaccggtggtttcaatggctaattagaatgtgttatttgatttctgctgcagaaggcagtgtgattgtaacaaaaacaatgcggcttccccctttcgtacttcatttgtgttctcttaaaatagagtttgaacaaatattttaaaggtgcaaaataccattagaaaatactatttgaaatggacattatcgcattatcttggcataatggccagaaaatattgtattgcttggcagaaaagaaaataaggtctaaaggaaagtagcacattagcattgatggctgttcatttcacccagtataagcaagtgcagtgtacaaagaagtatattctgaatacattatttccattcatttagcacaaataaatcatttggtttcactttgcagtggaacactgagtcactcttttcttaacacgtgcaacatcttaatttttgtttttcagcagttgctgttttgtactttggtagtgaagtgatttttaccacctgtgtttgcatatttatatatgctgtggatgaaaataacttactagagaatgtatattttatgacaagaatgtgtatctgttggatataatcagagaactgaaaagtaatttatcagtaatttttaagagtccatgttttgtgacaaccatctctaatagccaactctttattaaacacactcctaaaaataaggaaccatgacattgtagatatttaatattgtacagtatagaaacctccatttttgccttcgaatgcatatttaagagttaacagaatgaaaaaaaaaagtcttgttggataatagtgtttgactagcgttttaagaacttgagagtaaaagcaacaataagattttttcacctcttcctgcttccacccccaaactgagaacatcactcaattgtttggaagaaactgtaggtctatataaattttatttataatgtatgtgtaatatacataatcataatacagttctcagatgcagggaagaagtttggcatttaatcattgaggctttaggtttttgatgtgatcagactgggccatgtcaaacccggaattttcaccaacagttcactcaccctcctggtacattgccattccaaggaattctgagagtaggcaaacaaattttgccttcatggtacagttctcagtttttcttataggagaaatatggtatatgtttataagaatcttttatgagattatagatttcaatgctgtggatagtgtcttgcacccaaacaagaaagtccataatggaatgatcttccctcagcttcctatcgatttagttacctcttgaaagcacaaaaattaaaacattgccatatgttgaatttttaaaaagcacttggagtgagcgaacatttcctgataaatgccttttagagataggttcttgatattcagacatctgcagaaatgttctggttcccaaagtcatttcacttcgaaataaaacacagctccttcaaacagcactttttccacataaatctagttgcctctccctgtggacattcagaactgatagaacaaacactactcttttgaatttgatggttcgtgtcctttaaagtgtttgaggacctatgcagagcctgtaacacttgggtagtacctgctaggacaatttcttggcaattgtcttactactagggatcagtaagatttagattctgagcccataatggcaacagccccctcacctatgggaagctgacttccctcagtcgggcacttctcatgggggctgaacatggttcctgccattctgttacccactctcccaggtgagccctggattggctcccagaaggcctttgtaaaatcagtagccatcctgcaggcaggtgggagcaacaggggcttcagtagcttcattttcctgtcttgcagacagagacccttggctaccactgtgctgctaataggataagtactctgttgccagattaccatgccttttatacaaaaccaaattaacttacctaatacctgacacctctttgggctctgaactgctttctctcatcaagcatgctagcactctagacagaattctagaaatttggcagacagtggaagcctttaattgaacttactccttcgttgactgaaaggagttttaaattctgagctcctgagatactgactagcaaccatggaatgaatgtgtgaccagaaagtggctttgacaccaagtgctactgtccctttgtaattggcttctaacagattcaaccagaaataattgataatgtgaatttttgttaattgttcacttgtaggaaaatagaacatgtatcaccctttgttaggtagacatgaacttttcctgcacaaagccttgcttttagagaatgcccaataaggcaagaaaaagcatagtaacttgtgctttgagagctcaatatttgtatcttatcagtacagaagaaatatttctgtgtaacttgatcttctgtctagtacttgtcttataggtaaccaacactgaaaactttgtagtgatgactaccaaagaaatacatagtaaaacaaccttttatttccaaattgttaaagagccagccattgatgctgctacatgagttccatgctcaagagccattgtaagagattaaggggtttctaggtttttggtgattttttgtttgtttttttctttgttttttagggtttttttttcttctttaattttttgattaaaacatacacacagctgttagcataaagtcgtggggggcattttctggaatgctcagcagttctgattaactgccaagcccaggttgcctctcatgaggcaactgaaaaaatcctgtgtcttgatagcatgggtgctgtgtgtgtgcatgtgtgtgtctgcattcatgccttaactcgggttactgcacaactttagttcttgacttagtctgcaccgtcatctagattgtattgtacatctcggtctgaacttcatcctggcaaaaacaaagttgcaggcacaacagtttaagaatgcattcctccagaagagtatctggtcaggttgaccctgagccttctttggacttgatttggaacttagcctggaaagcgaaagtggactgtccaacagaaagatgtcaacaaggaaaagaggagagccaagcgctagcatgccttttgcctctgcatatctgtgcacactgtatgttgttcatgatagcttgtctacaacttgactaggttggagttctggtaatagtggcaatcttgacattcttggtcagagtttagagagatgtaagactttcaattaatgtcttatttactcctttatgttgattagtctttgatacatgtgctgaatcagaaacctaaataaagataattttttaaaatgt

SEQ ID NO: 29609 - DNA, 1693 bp, Homo Sapiens
acgggccaaggcggcgcgtctcgggggtggagcctggaggtgaccgcgccgctgcaacgcccccaccccccgcggtcgcagtggttcagcccgagaacttttcattcataaaaagaaaagactccgcacggcgcgggtgagtcagaacccagcagccgtgtaccccgcagagccgccagccccgggcatgttccgagacttcggggaacccggcccgagctccgggaacggcggcgggtacggcggccccgcgcagcccccggccgcagcgcaggcagcccagcagaagttccacctggtgccaagcatcaacaccatgagtggcagtcaggagctgcagtggatggtacagcctcatttcctggggcccagcagttaccccaggcctctgacctaccctcagtacagccccccacaaccccggccaggagtcatccgggccctggggccgcctccaggggtacgtcgaaggccttgtgaacagatcagcccggaggaagaggagcgccgccgagtaaggcgcgagcggaacaagctggctgcggccaagtgcaggaaccggaggaaggaactgaccgacttcctgcaggcggagactgacaaactggaagatgagaaatctgggctgcagcgagagattgaggagctgcagaagcagaaggagcgcctagagctggtgctggaagcccaccgacccatctgcaaaatcccggaaggagccaaggagggggacacaggcagtaccagtggcaccagcagcccaccagccccctgccgccctgtaccttgtatctccctttccccagggcctgtgcttgaacctgaggcactgcacacccccacactcatgaccacaccctccctaactcctttcacccccagcctggtcttcacctaccccagcactcctgagccttgtgcctcagctcatcgcaagagtagcagcagcagcggagacccatcctctgacccccttggctctccaaccctcctcgctttgtgaggcgcctgagccctactccctgcagatgccaccctagccaatgtctcctccccttcccccaccggtccagctggcctggacagtatcccacatccaactccagcaacttcttctccatccctctaatgagactgaccatattgtgcttcacagtagagccagcttggggccaccaaagctgcccactgtttctcttgagctggcctctctagcacaatttgcactaaatcagagacaaaatatttcccatttgtgccagaggaatcctggcagcccagagactttgtagatccttagaggtcctctggagccctaaccccttccagatcactgccacactctccatcaccctcttcctgtgatccacccaaccctatctcctgacagaaggtgccactttacccacctagaacactaactcaccagccccactgccagcagcagcaggtgattggaccaggccattctgccgccccctcctgaaccgcacagctcaggaggcgcccttggcttctgtgatgagctgatctgcggatctcagctttgagaagccttcagctccagggaatccaagcctccacagcgagggcagctgctatttattttcctaaagagagtatttttatacaaacctaccaaaatggaataaaaggcttgaagctgtgaaaaaaaaaaaaaaaaaaaaaaaaa

SEQ ID NO: 29610 - DNA, 2297 bp, Homo Sapiens
cgggaagcggcgcgcgctgcgcgggaggtgacggtgcctctgactgtccgggtccctccagcattttgcagctttctcctgtcttgaagaagtagaacggtgcccgagaaacgtttttccccttcgagactcaggaggatgaaagtcatcacttgtgaaatagcctggcacaacaaggagcccgtgtacagcctggacttccagcatgggacggctgggaggatccacagactggcgtctgccggcgtggacaccaatgtcaggatctggaaggtagaaaagggaccagatggaaaagccatcgtggaatttttgtccaatcttgctcgtcataccaaagccgtcaatgttgtgcgtttttctccaactggggaaattttagcatcgggaggagatgatgctgtcatcctattgtggaaggtgaatgataacaaggagccggagcagatcgcttttcaggatgaggacgaggcccagctgaacaaggagaactggacggttgtgaagactctgcggggccacttagaagatgtgtatgatatttgctgggcaactgatgggaatttaatggcttctgcctctgtggataacacagccatcatatgggatgtcagcaaaggacaaaagatatcaatttttaatgaacataaaagttatgtccaaggagtaacctgggaccctttgggtcaatatgttgctactctgagctgtgacagggtgctgcgagtatacagtatacagaagaagcgtgtggctttcaatgtttcgaagatgctgtctggaataggggctgaaggagaggcaagaagctaccggatgtttcacgacgacagcatgaagtctttcttccgtagactgagtttcactcccgacggatctttgcttctcacgccagctggatgtgtggaatctggtgaaaatgtaatgaataccacttatgttttctccaggaagaatcttaaaaggcccatcgctcatcttccatgtcctggaaaagccactcttgctgttcgctgctgtccggtctactttgaactgaggccagtggtggaaacaggtgtggagctgatgagtctgccctaccgcctggtgtttgctgtggcctcggaggattccgtgcttctgtatgacacccagcagtccttcccttttggttacgtgtctaatatacattaccacaccctcagtgacatttcatggtccagcgatggtgccttcctggccatttcttccacggacggttactgctcatttgtgacatttgagaaagatgaacttggaattcctttgaaagagaagccagttttgaacatgagaactcctgatacagcaaagaaaaccaagagtcagacacatcgagggtcttcgccaggacccagaccggtagagggaacccctgccagcagaacccaagaccccagcagccccggcacgactccccctcaggccagacaggccccagccccaacagtcatcagggaccctccctccatcactcctgctgtcaaaagccccttgccggggccttcggaggagaagaccctgcagcccagtagtcaaaacacaaaagcccacccatcccggagggtcactctgaacacactgcaagcctggagcaagacaacaccccggagaataaacttaacacccttaaagacggacactccaccaagttctgtaccaaccagtgtgatttccaccccttctacagaagaaattcagtcagagacgcctggagacgctcagggcagtcccccagagctaaagcggcccagactcgatgaaaacaaaggaggcacggaaagtctggacccttgatgggacctcggcttctgctcgaagcctaccaggctcccggtgtgtgcagggagacggtaaagctggaggtgcctgagaccagggcttccatggagcgggacacactgtaaatggatttctataacagaagtgacatgtgtactgatttttctccagaaatatggatgctgttgtattcagtatccatttttaacttgggacatgaacgttttaacgtagtaaatcctctttttgatgagtttctgaaactggagcggttcaacgttatccagtgtgaaaatcagtgagtcctccctggcatcctcgtgaaagtgcacacacttcatggagggactccttttcaataagaattaggaagatgagaaagtaatttgagattttactctgtcgaattttagagtatttgaagtgattgttagatttcacttctaaggagttgattgattaaactttggaaggtaaaaaaaaaaaaaaaaaaa

SEQ ID NO: 29611 - DNA, 4096 bp, Homo Sapiens
gggaggggtcgcgtaggcgcctcacctgaccctgcggctgtgcggttgctgctccggggcaggtctccttccaggccaggggcccggaatcatgtacataaagcaggtgattatccagggttttcgaagttacagagatcaaacaattgtagatcccttcagttcaaaacataatgtgattgtgggcagaaatggatctggaaaaagtaactttttttatgcaattcagtttgttctcagtgatgagtttagtcatcttcgtccagaacagcggttggctttattgcatgaaggtactggtcctcgtgttatttctgcttttgtggagattatttttgataattcagacaaccggttaccaatcgataaagaggaagtttcacttcgaagagttattggtgccaaaaaggatcagtatttcttagacaagaagatggtcacgaaaaatgatgtgatgaacctccttgaaagcgctggtttttctcgaagcaatccttattatattgttaaacaaggaaagatcaaccagatggcaacagcaccagattctcagagattaaagctattaagagaagtagctggtactagagtgtatgacgaacgaaaggaagaaagcatctccttaatgaaagaaacagagggcaaacgggaaaaaatcaatgagttgttaaaatacattgaagagagattacatactctagaggaagaaaaggaagaactagctcagtatcagaagtgggataaaatgagacgagccctggaatataccatttacaatcaggaacttaacgagactcgtgccaaacttgatgagctttctgctaagcgagagactagtggagaaaaatccagacaattaagagatgctcagcaggatgcaagagataaaatggaggatatcgaacgccaagttagagaattgaaaacaaaaatttcagctatgaaagaagaaaaagaacagcttagtgctgaaagacaagagcagattaagcagaggactaagttggagcttaaagccaaggatttacaagatgaactagcaggcaatagtgaacaaaggaaacgtttattaaaagagaggcagaagctgcttgaaaaaatagaagaaaagcagaaagaactggcagaaacagaacccaaattcaacagtgtgaaagagaaagaagaacgaggaattgctagattggctcaagctacccaggaaagaacggatctttatgcaaagcagggtcgaggaagccagtttacatcaaaagaagaaagggataagtggattaaaaaggaactcaagtctttagatcaggctattaatgacaagaaaagacagattgctgctatacataaggatttggaagacactgaagcaaataaagagaaaaatctggagcagtataataaactggaccaggatcttaatgaagtcaaagctcgagtagaagaactggacagaaaatattacgaagtaaaaaataagaaagatgaactacaaagtgaaagaaactacttgtggagagaagagaatgcagaacagcaagcacttgctgctaaaagagaagatcttgaaaagaagcaacaacttcttagagcagcaacaggaaaggccattttaaatggaatagacagcataaacaaagtgctagaccacttccgtcgaaaaggaataaaccagcatgttcaaaatggctatcatggtattgtaatgaataactttgaatgtgaaccagctttctacacatgcgtggaagtcactgctggaaacaggttattttatcacattgttgattcagatgaagtcagcacgaagattttaatggagtttaataaaatgaatcttcctggagaggttacttttctgcctcttaacaagttagatgtcagggatacagcctatcctgaaaccaatgatgctattcctatgatcagcaaactgaggtacaatcccagatttgacaaagctttcaaacatgtgtttggaaagactcttatttgtcgtagcatggaagtttcaacccagctggcccgtgctttcactatggactgtattactttggaaggtgaccaagtcagccatcggggtgctctaactgggggttattatgacacaaggaagtctcgacttgaattgcaaaaagatgttagaaaagcagaagaagaactaggtgaacttgaagcaaagctcaatgaaaacctgcgcagaaatattgaaaggattaataatgaaattgatcagttgatgaaccaaatgcaacagatcgagacccagcaaaggaaatttaaagcatctagagatagcatattatcagaaatgaagatgctaaaagagaagaggcagcagtcagagaaaaccttcatgcctaagcaacgtagcttacagagtttggaggcaagcttgcatgctatggagtctaccagagagtcattgaaagcagaactgggaactgatttgctttctcaactgagtttggaagatcagaagagagtagatgcactgaatgatgagattcgtcaacttcagcaggaaaacagacagttgctaaatgaaagaattaaattagaaggtattattactcgagtagagacttatctcaatgagaatctgagaaaacgcttggaccaagtagaacaggaacttaatgagctgagagagacagaagggggtactgttctcacagccacaacatcagaacttgaagccatcaataaaagagtaaaagacactatggcacgatcagaagatttggacaattccattgataaaacagaagctggaattaaggagcttcagaagagtatggagcgctggaaaaatatggaaaaagaacatatggatgctataaatcatgatactaaagaactggaaaagatgacaaatcggcaaggcatgctattgaagaagaaagaagagtgtatgaagaaaattcgagaacttggatcacttccccaggaagcatttgaaaagtaccagacactgagcctcaaacagttgtttcgaaaacttgagcagtgcaacacagaattaaagaagtacagccatgttaacaaaaaggctttggatcagtttgtaaatttctccgagcagaaagaaaagttaataaagcgtcaagaagagttagataggggttacaaatcgatcatggaactgatgaatgtacttgaacttcggaaatatgaagctattcagttaactttcaaacaggtatctaagaacttcagtgaagtattccagaagttagtacctggtggcaaagctactttggtgatgaagaaaggagatgtggagggcagtcagtctcaagatgaaggagaagggagtggtgagagtgagaggggttctggctcacaaagcagtgtcccatcagttgaccagtttactggagttggaattagggtgtcatttacaggaaaacaaggtgaaatgagagaaatgcaacagctttcaggtggacagaaatccttggtagcccttgctctgatttttgccattcagaaatgtgacccggctccattttacttgtttgatgaaattgaccaggctctggatgctcagcacagaaaggctgtgtcagatatgattatggaacttgctgtacatgctcagtttattacaactacttttaggcctgaactgcttgagtcagctgacaaattctatggtgtaaagttcagaaataaggttagtcatattgatgtgatcacagcagagatggccaaagactttgtagaagatgataccacacatggttaattggaaaatactacctactggtttgggagatgtatatagtaatatgattctcatacccaggaactgtaaatttaaacctaaatatttggccaatagttttcagacttaaagcatcatagtccttttatatttgtctttgtattttataagatactctgtaatgtcatgtttgtactgatagtttaagaatttaatttcctgtacaactttttgtaaaatgttctgctcctattttaaatgttttgaaacatgctaaatattctttcctaattattttatcacttatactaccttttttatagcttcaattaaataatcggttttatgactaaaaaaaaaaaaaaaaaaaaa

SEQ ID NO: 29612 - DNA, 3079 bp, Homo Sapiens
agtcccgcgggccgtgcgcggtgctgtgccgcgccctgccagacacaggtgcgcccgcctagcccgaactccgcggcggcggctgccctctcgccgcgcctccgcctccttcgcagccgccgcctcctccgcgccgcgctccgcccggatggccagggctgtgcccgagaatggcggagcgagaaagcggcggcctgggagggggggccgcgtccccgcccgccgcctccccgttcctggggctgcacatcgcttcgcctcccaatttcaggctcacccatgacatcagcctggaggagtttgaggatgaagacctctcggagatcactgatgagtgtggcatcagcttacagtgcaaagacaccctgtccttacggcccccgcgcgccgggctgctctctgcgggcggcggcggcgcggggagccggttgcaggccgagatgctgcagatggacctgatcgacgcgacgggggacactcccggggccgaggacgacgaggaggacgacgacgaggagcgcgcggcccggcggccgggagcggggccgcccaaggccgagtccggccaggagccggcgtcccgcggccagggccagagccaaggccagagccagggcccgggcagcggggacacgtaccggcccaagcggcccaccacgctcaacctctttccgcaggtgccgcggtctcaggacacactgaataataattctctgggcaaaaagcacagttggcaggatcgggtgtctcgatcatcctcacccctgaagacaggggagcagacaccaccgcatgaacacatctgcctgagcgatgagctgcccccccagagcggccccgcccccaccacagatcgaggcacctccaccgacagcccttgccgccgcagcacagccacccagatggcacctccgggtggtccccctgctgccccgcctgggggtcggggccactcgcatcgagaccgaatccactaccaggccgatgtgcgactagaggccactgaggagatctacctgaccccagtgcagaggcccccagacgctgcagagcccacctccgccttcctgccgcccactgagagccggatgtcagtcagctccgatccagaccctgccgcctacccctccacggcagggcggccgcacccctccatcagtgaagaggaagagggcttcgactgcctgtcgtccccagagcgggctgagcccccaggcggagggtggcgggggagcctgggggagccgccgccacctccacgggcctctctgagctcggacaccagcgccctgtcctatgactctgtcaagtacacgctggtggtagatgagcatgcacagctggagctggtgagcctgcggccgtgcttcggagactacagtgacgagagtgactctgccaccgtctatgacaactgtgcctccgtctcctcgccctatgagtcggccatcggagaggaatatgaggaggccccgcggccccagccccctgcctgcctctccgaggactccacgcctgatgaacccgacgtccatttctccaagaaattcctgaacgtcttcatgagtggccgctcccgctcctccagtgctgagtccttcgggctgttctcctgcatcatcaacggggaggagcaggagcagacccaccgggccatattcaggtttgtgcctcgacacgaagacgaacttgagctggaagtggatgaccctctgctagtggagctccaggctgaagactactggtacgaggcctacaacatgcgcactggtgcccggggtgtctttcctgcctattacgccatcgaggtcaccaaggagcccgagcacatggcagccctggccaaaaacagtgactgggtggaccagttccgggtgaagttcctgggctcagtccaggttccctatcacaagggcaatgacgtcctctgtgctgctatgcaaaagattgccaccacccgccggctcaccgtgcactttaacccgccctccagctgtgtcctggagatcagcgtgcggggtgtgaagataggcgtcaaggccgatgactcccaggaggccaaggggaataaatgtagccactttttccagttaaaaaacatctctttctgcggatatcatccaaagaacaacaagtactttgggttcatcaccaagcaccccgccgaccaccggtttgcctgccacgtctttgtgtctgaagactccaccaaagccctggcagagtccgtggggagagcattccagcagttctacaagcagtttgtggagtacacctgccccacagaagatatctacctggagtagctgtgcagccccgccctctgcgtcccccagccctcaggccagtgccaggacagctggctgctgacaggatgtggcactgcttgaggaggggcacctgccaccgccagaggacaaggaagtgggggccgctggcccagggtaggggagggtggggcaatggggagaggcaaatgcagtttattgtaatatatgggattagattcatctatggagggcagagtgggctgcctggggattgggagggacagggcttggggagcaggtctctggcagagaaggatgtccgttccaggagcacacggccctgccccatcctgggccttacctcccctgccagggctcgggcgctgtggctcctgccttgatgaagcccgtgtcctgccttgatgaagcctgtgccacctgcaagtgcccgccctgcccctgccccaacccccaccgaagagccctgagctcaggctgagcccagccacctcccaaggactttccagtgaggaaatggcaacacgtggaggtgaagtccctgttctcagctccgtcatctgcggggcttctgggtggctcctgccactgacctcaccggcatgctggcctgtggcaggcctaggacctcaggcggggaggaggagctgccgcaaggccctgtcccagcagaagagggaggcttcctgactgacacaggccagccccatcttggtcctgtcaccctggccccaactattaaagtgccatttcctgtctggaaaaaaaaaaaaaaaaaaaaaaaaaaaaaa

SEQ ID NO: 29613 - DNA, 3588 bp, Homo Sapiens
gcagcagcagagaatccaaaccctaaagctgatatcacaaagtaccatttctccaagttgggggctcagaggggagtcatcatgagcgatgttaccattgtgaaagaaggttgggttcagaagaggggagaatatataaaaaactggaggccaagatacttccttttgaagacagatggctcattcataggatataaagagaaacctcaagatgtggatttaccttatcccctcaacaacttttcagtggcaaaatgccagttaatgaaaacagaacgaccaaagccaaacacatttataatcagatgtctccagtggactactgttatagagagaacatttcatgtagatactccagaggaaagggaagaatggacagaagctatccaggctgtagcagacagactgcagaggcaagaagaggagagaatgaattgtagtccaacttcacaaattgataatataggagaggaagagatggatgcctctacaacccatcataaaagaaagacaatgaatgattttgactatttgaaactactaggtaaaggcacttttgggaaagttattttggttcgagagaaggcaagtggaaaatactatgctatgaagattctgaagaaagaagtcattattgcaaaggatgaagtggcacacactctaactgaaagcagagtattaaagaacactagacatccctttttaacatccttgaaatattccttccagacaaaagaccgtttgtgttttgtgatggaatatgttaatgggggcgagctgtttttccatttgtcgagagagcgggtgttctctgaggaccgcacacgtttctatggtgcagaaattgtctctgccttggactatctacattccggaaagattgtgtaccgtgatctcaagttggagaatctaatgctggacaaagatggccacataaaaattacagattttggactttgcaaagaagggatcacagatgcagccaccatgaagacattctgtggcactccagaatatctggcaccagaggtgttagaagataatgactatggccgagcagtagactggtggggcctaggggttgtcatgtatgaaatgatgtgtgggaggttacctttctacaaccaggaccatgagaaactttttgaattaatattaatggaagacattaaatttcctcgaacactctcttcagatgcaaaatcattgctttcagggctcttgataaaggatccaaataaacgccttggtggaggaccagatgatgcaaaagaaattatgagacacagtttcttctctggagtaaactggcaagatgtatatgataaaaagcttgtacctccttttaaacctcaagtaacatctgagacagatactagatattttgatgaagaatttacagctcagactattacaataacaccacctgaaaaatatgatgaggatggtatggactgcatggacaatgagaggcggccgcatttccctcaattttcctactctgcaagtggacgagaataagtctctttcattctgctacttcactgtcatcttcaatttattactgaaaatgattcctggacatcaccagtcctagctcttacacatagcaggggcaccttccgacatcccagaccagccaagggtcctcacccctcgccacctttcaccctcatgaaaacacacatacacgcaaatacactccagtttttgtttttgcatgaaattgtatctcagtctaaggtctcatgctgttgctgctactgtcttactattatagcaactttaagaagtaattttccaacctttggaagtcatgagcccaccattgttcatttgtgcaccaattatcatcttttgatcttttagtttttccctcagtgaaggctaaatgagatacactgattctaggtacattttttaactttctagaagagaaaaactaactagactaagaagatttagtttataaattcagaacaagcaattgtggaagggtggtggcgtgcatatgtaaagcacatcagatccgtgcgtgaagtaggcatatatcactaagctgtggctggaattgattaggaagcatttggtagaaggactgaacaactgttgggatatatatatatatatataattttttttttttaaattcctggtggatactgtagaagaagcccatatcacatgtggatgtcgagacttcacgggcaatcatgagcaagtgaacactgttctaccaagaactgaaggcatatgcacagtcaaggtcacttaaagggtcttatgaaacaatttgagccagagagcatctttcccctgtgcttggaaaccttttttccttcttgacatttatcacctctgatggctgaagaatgtagacaggtataatgatactgcttttcaccaaaatttctacaccaaggtaaacaggtgtttgccttatttaattttttactttcagttctacgtgaattagctttttctcagatgttgaaactttgaatgtccttttatgattttgtttatattgcagtagtatttattttttagtgatgagaattgtatgtcatgttagcaaacgcagctccaacttatataaaatagacttactgcagttacttttgacccatgtgcaaggattgtacacgctgatgagaatcatgcactttttctcctctgttaaaaaaaatgataaggctctgaaatggaatatattggttagaatttggctttgggagaagagatgctgccatttaaccccttggtactgaaaatgagaaaatccccaactatgcatgccaaggggttaatgaaacaaatagctgttgacgtttgctcatttaagaatttgaaacgttatgatgacctggcaacaaaaagtaatgaagaaaattgagacctgagtgaagataagaaatgatctttacgtggcaaaatgaacacatcttgagtatttaggaaatgggcagtgaaggctaagaacctggtgtgtttcttgggatcatggtacatttatcactgaattaagccatcagggaaaaaacaacaaaaaaagagaacacctccagcttttctttttctgtatatactcatgtcccccagattccaacatttctcactgaaagggggcatgtatgcaaacctcatctttctccttcattaatgatgatcttcagattaaaccctttggtgctaggagctgacaatttccaaagcagcctgtgaagtcctaggggctgggggccactcttgcggcaagcagaaggccatcctactccgcggagtgatcatggaaatgtattttagttaaactctgacagctcccaaacggaagactacagcatgacgtagtattatgattgcattgtatgaaagagcaagtgactttctaagtaggatgaatcatattcatatgcagatgtcttagcctcttgacgctggaagtgtggatttatagctatgaaaccactgctggcagtgggtgggccactgggactgacgggggttaaagggcattttactaaggcagctaagacatattcagacatcaacgttatccttctttttcatatttctacctgagtgaag

SEQ ID NO: 29614 - DNA, 2194 bp, Homo Sapiens
agctctgggctttcccagctccgaagtcaatactgagatcccagatgtgtccagagacatcctgaagaggctcgggggtggaggagccttagtgtgtccacaaagggactcctgaaactgactgagagccagtggatttgccagcagtctgagcttctaccgagtcttcccccacctcaatccctgttgctatggagactaccaatggaacggagacctggtatgagagcctgcatgccgtgctgaaggctctaaatgccactcttcacagcaatttgctctgccggccagggccagggctggggccagacaaccagactgaagagaggcgggccagcctacctggccgtgatgacaactcctacatgtacattctctttgtcatgtttctatttgctgtaactgtgggcagcctcatcctgggatacacccgctcccgcaaagtggacaagcgtagtgacccctatcatgtgtatatcaagaaccgtgtgtctatgatctaacacgagagggctgggacggtggaagaccaagacacctggggattgcgtctggggcctccagaactctgctgtggactgcatcaggtctcagtgtccctatctgtaagatcaacaagaaacacggttaagggaggtcgtcactggggtgggagaagaggggctggtagaccgaagccttgtgcataaggattttttcccaggaaaagatagactttataaacagtgggagcccatgaacaaacatataaaagtagcaacagataatgaccaataactggttcagtggctggagtattaggggcctggggattggagaacggagaagaagttgtagcagagggaaatgagacaggaagatgctctggggacacattttttatgtgttatcttcagccatgagaagcagtgatgactatcccatatcacagatatgatttaccaccaccaccctgcccccgctcccgtgaagaaagcagggcaagtgctgtgctgcccatttgggcctgcatagtgccatgattggaacccaggaactctggtctccttgcctagtgcttttcaaaactctgtgctacacaggagtggatccaggcctgaaggtcatacaattctggggactctctttaagaaaaagaattctaaaatatcttacttttgcaaacattatgaaaatatactgccacattaatatgttgctagggcccctgctaggaccttaagaaggagctcatgtgagtcaggaccctgaatgttaggcctcgttagctctatggttcatatgcttcttgaaccaagtcacagggcacttcccagccacattgccaggcaacaggactaaactacctccaaagcaagcagtcttttcagttttgactgagtgatgtgagaaacttcttttcttttcttttctttttttttttttgagacagtctccctatgtcacccaggctgtggtgcagtaagccaagatcacgccactgcactccagcctgggtgacagagcaaggctctgtctcaaaaaaaaacaaaaacaaaaacaaaaaagactgatatcgcacctaaattattattatattaaaagaagcagagtatgagagacaggtacatggtccagtaggaagagaagcagccctgattctaccacttaaggtgatgtatgatcttaggctggacacttctctccctcatccgttttcctcttcaacataatgaaatagacttgaaagtctctaaggctctatcagttctgacattctaggcttcatatacattaagttgagccatatgtaatcactgtgtttgtaggttagaaacagctgagtatcgtagtttcatatatggttccagctaatacatgcaatgtggctggtgaacacttctgaattcagaaactatcccagatctcagctagaaccatccactgttctgtttgtccagtttcaacttaagggatctccatgcggtccctggaagtacccattgaaacatgcgtatttgtgtatagcagaactctgaaataatattctgacagcagttatctctgaggaattgggttataggtgattttccctttccgcatgataaatttatgtaatatttgactgacttgaccgtaagtatgttacttgtataataaaaggaaaaaaggtaaaaaaaaaaaaaaaaaaaaaaaaaaaaaaaaaaaaaaaaaa

SEQ ID NO: 29615 - DNA, 2240 bp, Homo Sapiens
tgggactggtcgcctgactcggcctgccccagcctctgcttcaccccactggtggccaaatagccgatgtctaatcccccacacaagctcatccccggcctctgggattgttgggaattctctccctaattcacgcctgaggctcatggagagttgctagacctgggactgccctgggaggcgcacacaaccaggccgggtggcagccaggacctctcccatgtccctgcttttcttgggacagccatggctccaaagccgaagccctgggtacagactgagggccctgagaagaagaagggccggcaggcaggaagggaggaggaccccttccgctccaccgctgaggccctcaaggccatacccgcagagaagcgcataatccgcgtggatccaacatgtccactcagcagcaaccccgggacccaggtgtatgaggactacaactgcaccctgaaccagaccaacatcgagaacaacaacaagaagttctacatcatccagctgctccaagacagcaaccgcttcttcacctgctggaaccgctggggccgtgtgggagaggtcggccagtcaaagatcaaccacttcacaaggctagaagatgcaaagaaggactttgagaagaaatttcgggaaaagaccaagaacaactgggcagagcgggaccactttgtgtctcacccgggcaagtacacacttatcgaagtacaggcagaggatgaggcccaggaagctgtggtgaaggtggacagagccccagtgaggactgtgactaagcgggtgcagccctgctccctggacccagccacgcagaagctcatcactaacatcttcagcaaggagatgttcaagaacaccatggccctcatggacctggatgtgaagaagatgcccctgggaaagctgagcaagcaacagattgcacggggtttcgaggccttggaggcgctggaggaggccctgaaaggccccacggatggtggccaaagcctggaggagctgtcctcacacttttacaccgtcatcccgcacaacttcggccacagccagcccccgcccatcaattcccctgagcttctgcaggccaagaaggacatgctgctggtgctggcggacatcgagctggcccaggccctgcaggcagtctctgagcaggagaagacggtggaggaggtgccacaccccctggaccgagactaccagcttctcaagtgccagctgcagctgctagactctggagcacctgagtacaaggtgatacagacctacttagaacagactggcagcaaccacaggtgccctacacttcaacacatctggaaagtaaaccaagaaggggaggaagacagattccaggcccactccaaactgggtaatcggaagctgctgtggcatggcaccaacatggccgtggtggccgccatcctcactagtgggctccgcatcatgccacattctggtgggcgtgttggcaagggcatctactttgcctcagagaacagcaagtcagctggatatgttattggcatgaagtgtggggcccaccatgtcggctacatgttcctgggtgaggtggccctgggcagagagcaccatatcaacacggacaaccccagcttgaagagcccacctcctggcttcgacagtgtcattgcccgaggccacaccgagcctgatccgacccaggacactgagttggagctggatggccagcaagtggtggtgccccagggccagcctgtgccctgcccagagttcagcagctccacattctcccagagcgagtacctcatctaccaggagagccagtgtcgcctgcgctacctgctggaggtccacctctgagtgcccgccctgtcccccggggtcctgcaaggctggactgtgatcttcaatcatcctgcccatctctggtacccctatatcactcctttttttcaagaatacaatacgttgttgttaactatagtcaccatgctgtacaagatccctgaacttatgcctcctaactgaaattttgtattctttgacacatctgcccagtccctctcctcccagcccatggtaaccagcatttgactctttacttgtataagggcagcttttataggttccacatgtaagtgagatcatgcagtgtttgtctttctgtgcctggcttatttcactcagcataatgtgcaccgggttcacccatgttttcataaatgacaagatttcctcctcaaaaaaaaaaa

SEQ ID NO: 29616 - DNA, 4199 bp, Homo Sapiens
ccaagatggcggcgatcggcggcgttgaggcgggatccgggcgagccgagtgaagacctggtcctgtagacgggaaggagcctggacacagtgacacattctcaaaggccctgcaggaccaccatggcttatgatgactccgtgaagaaagaagattgttttgatggtgatcatacctttgaggacataggacttgcagctggccgaagccaacgagagaaaaaacgttcttacaaagattttttaagggaagaggaagaaattgctgctcaggtcaggaattcttccaagaagaagttgaaggatagtgaactttacttcttggggacggacacacacaagaagaagaggaagcactcctctgatgattactactatggaggacagtggttcttgttctgagtgccgataaaccagtgtgaaggaggagagaggtggagggctggtattttggaggattcagcatagaagaacagtctgcatttgtgatacaccagatatttcgtctttggaatcgtcacagaagaaaaagaaaaagtccagcccacagtctactgatacagctatggacctgttgaaagctatcacttccccactggcagcaggctccaagccctccaaaaagactggggagaaatcctctggctcttcaagccattcggagagtaaaaaggagcaccacaggaagaaagtcagtggaagcagtggggaactacccctagaggatggtggctcccacaaatcgaaaaaaatgaaacctctctatgtgaacacagagacactgacccttcgggagcctgatggtttaaaaatgaaacttattctgtcaccaaaggagaagggaagcagctctgttgatgaggagtcttttcaatatccctcccaacaagcgactgtgaaaaaatcctcaaagaaatcagctcgggatgagcagggtgctttactcctaggacatgagttacagagctttctgaaaacagcccggaaaaagcacaagtcatcctcagacgcacattcatctcctggccctgaaggctgtgggtctgacgcctcccagttcgcagagtcccacagtgctaaccttgatctttcagggcttgaacctattctggtagaatcagactcatcctctggtggggaactagaggctggggagttagtgatagatgattcttaccgagaaatcaagaagaaaaagaagtcaaagaagagcaaaaagaagaaagacaaggagaagcataaagagaagcgacactccaagtccaagagaagtttaggactttctgccgtgccagtgggagaggtcacagtgacatctggccctcctcccagcatcccatacgctggagcagcagcacctcccctgccacttcctggcctccacacagatgggcatagtgaaaaaaaaaagaaaaaagaagagaaggacaaagagagagagagaggagaaaagccaaaaaagaagaacatgtcggcctaccaggtgttctgtaaagagtatcgcgtgaccattgtggctgaccatccaggtatagattttggggaacttagtaaaaaactggctgaggtgtggaagcaattaccagaaaaagacaaactgatttggaagcaaaaagctcagtatctgcagcacaaacagaacaaagcagaagccacaactgtgaaaaggaaagcatccagctcagaaggttccatgaaagtcaaagcctcttctgtaggagtactgtcaccccagaagaagtccccacccaccaccatgctgttaccagcctcaccagccaaagcccctgagacagagcccattgatgttgctgctcatcttcagctgttgggagagtccctaagcctcattggacaccgtctgcaggaaactgagggtatggtggctgtgtctggcagtttgtcagtgcttctggattccattatctgtgcccttggccccttggcatgtctcaccacacaactacctgaattgaatggctgtcccaaacaggtcttgtcaaacacattagacaacattgcttacatcatgccgggactgtgacagcaaagaatcctgggacagaaaccttatcctacaccattgctggtttgtgtatatatgactgttgcagattccttcagtggcctctggctgtaggttttaaatttttatatctatacatacatatatacatatatatataatgtacaatatatacatagactgtaactactttgcttttaataattttatgaaatggcaaaggtttagccaagaggaaattttggcatgaatacaggcttgggattcttttttctcctgtggtggataaatctgccttaaaaatcaatgtaacttgggggctgggggcttgttctgggtgccaagcgcatctctttatggacagctaaaatgtgattattttccaagctcagttggacctccagacccatcactgaccatttgccttacctgtcttagtctgaaatgtaataggaaagataacgggaagatgccagttgactgaaaattcaaagcctttcaatttgaagtgacctaggtgggaggtgataaaatttgttccctttatagttatggaagtggcttaggtgaattgagtagagggttcattccaattcctactgtataggtgtctgtgtctcaaaatttattgtaatcattggtaccattggtggcctcaacagaggccaaggagttctgtgagccctggcagcaaaaaacaccttggggggtgaagctgtcaatgccaccagttggacctccatacattctgagctaacccagaatctttagtcggcagaattaagtgctggtgtctttcactggcagcatgaagttagccaccaagtcctcacaagccgtgctgcttagttgctcggtggttatggataaactttgcccagcatgatttttgggttcatcttatcagttcccctggtgggcagatacacagtgttctgcattccacatgtaagtgaattgcaaaaacaaaacaaaactcactctcttgtaggtttatttatgtgtgtgtgaatgtgtattttaattatgtgtatttaactctttaaaatctcttagattttaatttatcctgtaaatttctgtatatataatttaataacagaagcctccaccagcaacagcatgtggaagatacagatttgtcatttctcccttccgccctcccttctttccttccttccttccctgtttccttccctctttccttccttcctcctggtctgttccaaaaactctgaatcatctacattttaaggtattttacctcaaaaatgaatcattgtgttaggattctaattctttataaagaacttcatgggcttcaataatgtctagaaagtaaaataaagaggaatgttaccatccccagctgcccttatttccagagaaccagacgtttgtttcccagttggaaagaagacagttgagcacttcaggatggtttttaaatttggtatgagattctctgccaacaccaagctctgagttaactgtgctttcttctcctggccctgacagagcactacagcatcaaagtaaatctttggggacagtgtagcccatctgcatcctatttaatttcttcccttctccccaccagtgttgtcacagggctatgttgcttaaaggtagtctggctgctgaatccctttctcagctcagagcagttttaagatttaattgggaatacagagaaacaggattgtttgagaaccaaaatcaagaggaacagaaatcttaacttgatttcatgtgttagaacattgtaccatgcctcttctgtatctgtggaagtttcctgtttgacacagggtatctaggaggggcggggaagacatggatagtataggaagacattaatcctagcattgtcatttatatacattaatgaaatcctgatgaggacctgctttttgtttgttttcctttgaaacccagccctattgtatttgtatttaaaatttgtacacatttgtataataatctgtaccttgtggtatttggtactattagaggaaaaactttggattcagaccttcttgcagtttttatatcattgttttattttgttttttaaataaattctagtggtttgatccaaatcccattacagttgtataaagaaataaaattttgtacttatattattaaaaatcacatttttaatatttgt

SEQ ID NO: 29617 - DNA, 5297 bp, Homo Sapiens
caacaaactaagcagttgctcaatcgttgattgatcctcaggcacgtctagattttcccacttacataggtcttgttaagaaaccagtcctgccttcttgccactcgtgtctttcgatggctcccttcccgaagtcccgctgcctctaagcggagtgttaagcggggctctcggaagccggtggaccgagatttccccgggtggggcgggcgcggtgtagcggcccgcgggctgacttgctcccggctgtcccccggccccagcgaccatgccccgtaaaggcacccagccctccactgcccggcgcagagaggaagggccgccgccgccgtcccctgacggcgccagcagcgacgcggagcctgagccgccgtccggccgcacggagagcccagccaccgccgcagagactgcaagtgaggaacttgataatagaagtttagaagagattttgaacagcattcctcctcccccgcctccagcaatgaccaatgaagctggagctcctcggcttatgataactcatattgtaaaccagaacttcaaatcctatgctggggagaaaattctgggacctttccataagcgcttttcctgtattatcgggccaaatggcagtggcaaatccaatgttattgattctatgctttttgtgtttggctatcgagcacaaaaaataagatctaaaaaactctcagtattaatacataattctgatgaacacaaggacattcagagttgtacagtagaagttcattttcaaaagataattgataaggaaggggatgattatgaagtcattcctaacagtaatttctatgtatccagaacggcctgcagagataatacttctgtctatcacataagtggaaagaaaaagacatttaaggatgttggaaatcttcttcgaagccatggaattgacttggaccataatagatttttaattttacagggtgaagttgaacaaattgctatgatgaaaccaaaaggccagactgaacacgatgagggtatgcttgaatatttagaagatataattggttgtggacggctaaatgaacctattaaagtcttgtgtcggagagttgaaatattaaatgaacacagaggagagaagttaaacagggtaaagatggtggaaaaggaaaaggatgccttagaaggagagaaaaacatagctatcgaatttcttaccttggaaaatgaaatatttagaaaaaagaatcatgtttgtcaatattatatttatgagttgcagaaacgaattgctgaaatggaaactcaaaaggaaaaaattcatgaagataccaaagaaattaatgagaagagcaatatactatcaaatgaaatgaaagctaagaataaagatgtaaaagatacagaaaagaaactgaataaaattacaaaatttattgaggagaataaagaaaaatttacacagctagatttggaagatgttcaagttagagaaaagttaaaacatgccacgagtaaagccaaaaaactggagaaacaacttcaaaaagataaagaaaaggttgaagaatttaaaagtatacctgccaagagtaacaatatcattaatgaaacaacaaccagaaacaatgccctcgagaaggaaaaagagaaagaagaaaaaaaattaaaggaagttatggatagccttaaacaggaaacacaagggcttcagaaagaaaaagaaagtcgagagaaagaacttatgggtttcagcaaatcggtaaatgaagcacgttcaaagatggatgtagcccagtcagaacttgatatctatctcagtcgtcataatactgcagtgtctcaattaactaaggctaaggaagctctaattgcagcttctgagactctcaaagaaaggaaagctgcaatcagagatatagaaggaaaactccctcaaactgaacaagaattaaaggagaaagaaaaagaacttcaaaaacttacacaagaagaaacaaactttaaaagtttggttcatgatctctttcaaaaagttgaagaagcaaagagctcattagcaatgaatcgaagtagggggaaagtccttgatgcaataattcaagaaaaaaaatctggcaggattccaggaatatatggaagattgggggacttaggagccattgatgaaaaatacgacgtggctatatcatcctgttgtcatgcactggactacattgttgttgattctattgatatagcccaagaatgtgtaaacttccttaaaagacaaaatattggagttgcaacctttataggtttagataagatggctgtatgggcgaaaaagatgaccgaaattcaaactcctgaaaatactcctcgtttatttgatttagtaaaagtaaaagatgagaaaattcgccaagctttttattttgctttacgagataccttagtagctgacaacttggatcaagccacaagagtagcatatcaaaaagatagaagatggagagtggtaactttacagggacaaatcatagaacagtcaggtacaatgactggtggtggaagcaaagtaatgaaaggaagaatgggttcctcacttgttattgaaatctctgaagaagaggtaaacaaaatggaatcacagttgcaaaacgactctaaaaaagcaatgcaaatccaagaacagaaagtacaacttgaagaaagagtagttaagttacggcatagtgaacgagaaatgaggaacacactagaaaaatttactgcaagcatccagcgtttaatagagcaagaagaatatttgaatgtccaagttaaggaacttgaagctaatgtacttgctacagcccctgacaaaaaaaagcagaaattgctagaagaaaacgttagtgctttcaaaacagaatatgatgctgtggctgagaaagctggtaaagtagaagctgaggttaaacgcttacacaataccatcgtagaaatcaataatcataaactcaaggcccaacaagacaaacttgataaaataaataagcaattagatgaatgtgcttctgctattactaaagcccaagtagcaatcaagactgctgacagaaaccttcaaaaggcacaagactctgtcttgcgtacagagaaagaaataaaagatactgagaaagaggtggatgacctaacagcagagctgaaaagtcttgaggacaaagcagcagaggtcgtaaagaatacaaatgctgcagaggaatccttaccagagatccagaaagaacatcgcaatctgcttcaagaattaaaagttattcaagaaaatgaacatgctcttcaaaaagatgcacttagtattaagttgaaacttgaacaaatagatggtcacattgctgaacataattctaaaataaaatattggcacaaagagatttcaaaaatatcactgcatcctatagaagataatcctattgaagagatttcggttctaagcccagaggatcttgaagcgatcaagaatccagattctataacaaatcaaattgcacttttggaagcccggtgtcatgaaatgaaaccaaacctcggtgccatcgcagagtataaaaagaaggaagaattgtatttgcaacgggtagcagaattggacaaaattacttatgaaagagacagttttagacaggcatatgaagatcttcggaaacaaaggcttaatgaatttatggcaggtttttatataataacaaataaattaaaggaaaattaccaaatgcttactttgggaggggacgccgaactcgagcttgtagacagcttggatcctttctctgaaggaatcatgttcagtgttcgaccacctaagaaaagttggaaaaagatcttcaacctttcgggaggagagaaaacacttagttcattggctttagtatttgctcttcaccactacaagcccactcccctttacttcatggatgagattgatgcagcccttgattttaaaaatgtgtccattgttgcattttatatatatgaacaaacaaaaaatgcacagttcataataatttctcttcgaaataatatgtttgagatttcggatagacttattggaatttacaagacatacaacataacaaaaagtgttgctgtaaatccaaaagaaattgcatctaagggactttgttgaactttatgctgaagattcttcaagttgattcagtgtattactgatttttttctatttgtaaaggattatgagttgtataaaatacatactccctaaactagatcatgaaactggtttctgttttatgcagttgtcatttgtaaagtctaataaaatattctctataattgcttctagattacaaaaatatgacaatcttgtaagtagcagactatggagaaaaatgagttacctggagggtcaggtaacttgccaaactaaaaagtatgttagttgaggcaaagtcctaagcaaggttgtgctatcaaggctcagcataccttcgtgggcctttgatttaccaacactggaaatgcctgccaactaatcttggatagattctttaaggcattccacttagcttgccagttgagacaatcaccacagttattacccaaatactatgaacatatttttgtaaaccagtcattctgaattatagtgatgagaatttaaatatatgcttttctagaatttgatgtttgaccatttatgacttaattaccagagagccagtaaattaggacagtgtttcaacaagcctaggctatctcgtaagttgaaaaatatcccactatagttgcttcatgagtatgaagtaagatggcctctgatttacactggttcaatttacaaattttcaactttatgataggtttatccgggtactaaatgcatttcaacttgatagtttcaacttatgataggtttaccaggatgtagtcccactgttgaggagcatctatttaggggttaattactttagtaataagtggaaagtaagataccttgagtaatgtttgcctataaaattgtcagcgtatttttacactattggctcaagaatgttataatgctaagggacataagttggcaaccacttggtttttggaaggactttcggtattgtattagaagtctgccctagctgttaaatttctgggtatttatcctaaggaattaattaaagagttaattgttcctttcttcagtgggccattgttttagatatttaaaaaatccaacagtttctatcataatgtaactgtaaaaatgtaaacacattattagcatggacttttaaataaagatttaaagaaagcaaaaaaaaaaaaaaaaaaaa

SEQ ID NO: 29618 - DNA, 4748 bp, Homo Sapiens
cctcgcggggttgcggcgagcccggcccgcgaacgtcacgtccctgcgcgctccctgcactctcccgagctgcgctaggcgggcgccacggctgcccggcgaaggaaaccgaaaccgagtccgggcccgtccctccgcggccccatccgcccggtgcacccggggccgcgctcgccaggccgcggagcccagagctgcgcgcacgaaccgtgcgccgggagggcgtgggcgtggcgccgaagggtcccgggtcttcgacgcctctgcggcggctcctccctccttgcagttggatccctggcgggtgcggcccggcccggcccgtgagcggcgcacagaatgggccgatgctgcttctacacggcggggacgttgtccctgctcctgctggtgaccagcgtcacgctgctggtggcccgggtcttccagaaggctgtagaccagagtatcgagaagaaaattgtgttaaggaatggtactgaggcatttgactcctgggagaagccccctctgcctgtgtatactcagttctatttcttcaatgtcaccaatccagaggagatcctcagaggggagacccctcgggtggaagaagtggggccatacacctacagggaactcagaaacaaagcaaatattcaatttggagataatggaacaacaatatctgctgttagcaacaaggcctatgtttttgaacgagaccaatctgttggagaccctaaaattgacttaattagaacattaaatattcctgtattgactgtcatagagtggtcccaggtgcacttcctcagggagatcatcgaggccatgttgaaagcctatcagcagaagctctttgtgactcacacagttgacgaattgctctggggctacaaagatgaaatcttgtcccttatccatgttttcaggcccgatatctctccctattttggcctattctatgagaaaaatgggactaatgatggagactatgtttttctaactggagaagacagttaccttaactttacaaaaattgtggaatggaatgggaaaacgtcacttgactggtggataacagacaagtgcaatatgattaatggaacagatggagattcttttcacccactaataaccaaagatgaggtcctttatgtcttcccatctgacttttgcaggtcagtgtatattactttcagtgactatgagagtgtacagggactgcctgcctttcggtataaagttcctgcagaaatattagccaatacgtcagacaatgccggcttctgtatacctgagggaaactgcctgggctcaggagttctgaatgtcagcatctgcaagaatggtgcacccatcattatgtctttcccacacttttaccaagcagatgagaggtttgtttctgccatagaaggcatgcacccaaatcaggaagaccatgagacatttgtggacattaatcctttgactggaataatcctaaaagcagccaagaggttccaaatcaacatttatgtcaaaaaattagatgactttgttgaaacgggagacattagaaccatggttttcccagtgatgtacctcaatgagagtgttcacattgataaagagacggcgagtcgactgaagtctatgattaacactactttgatcatcaccaacataccctacatcatcatggcgctgggtgtgttctttggtttggtttttacctggcttgcatgcaaaggacagggatccatggatgagggaacagcggatgaaagagcacccctcattcgaacctaaacattgcctttgcttggtgaagaaactgtgtgagctgtcctgacctggacgatgacgtggggaaaccctccacctccttgcaggcttgttgcctgttgaaagaaggaaaaagacacggcgctggcaagtgataggaacattctggccagaggttaaagagcaggctgacatggctggccattaagctttataaaatcatgtgggctctgaaattgttcttttatgtgtctagcaagtatttaataaacccttgtatagtaattttgttgttgttgggtgctggtagctccagaattttgtgaccactattgtgggtaaaatgtctctgcatcacttgttaatgctactggtctaacttcattcagtatgcttcattcaccgaactttgtgctcaaaatgcgtatataccattttatgttgtattcctccatttcacttgcaaaacagaagtaaataagagttcgggacccagggtaaaatggtagcttcatccaatatatcattcaaatgcatctgatttctaaaacatattacattttatgctgatcttcagttcataattcttccaggaaaactcagtcttccaactgcaataaaatactgggtagaatcaaatgggaaaggggttgggtggggcaatacccatgagttgatagtgataagctcctaaggatttttaacttgtacttttgtgaacgaagagaatgcataaataatgttggtgaggataaagtacagatatttcatgtagaattaattgctagttatgatgcttgtggatagttaactgttttttttttagtcaaaatgatcatgctacgaaaagatgcttctgagagaatgtaatgagtaactgatttttcttcctgagtcgcccttgccaaatatgttactgtattaattaatctaatattgagtgattatttgtaaaattatgaatatgggaaatccatctatctacagcctaagttacacataagtttcagaaagtctgattagactaaagagatatttcttctgggacagccgccttcttggtaattttgaagttctttttacaagttccttcctcagtttcagttctttccagtgttttgtagctcactgtcactcactgaatagagaaacgtgtgccctatacttcctgtgacaatcattttgctgacagaatgatggatgtttaaaatattgcacaaagtactttaaagaaaggtctgttaggaccagaagcagagacaccacttttcaaaggacttcttggtttcagcataacctaagacagggaattgggagccatcatatgtcacagtgttcagaattcaagcatatttaagggcattttctttgattctcaaagttcagcattcattttgaattgagaagcctatacatttagctgacaaagtgcttatagaatttcttaacaactgaaccattcaaaaggattttttttgtttaaaactggatttcaatgtaagcaaatgaagaaaaaaatatagatttcatttccatagcttcttatccctgtattgaggtaataaattgttttactgacaatttttcctttttctacactaaaacaatatgtgatatatttcccctcttgaagaggcaattcattaaactctcaaattttctatagaatcaagatagaacctttagatactccaactcaccaaaatgtaaaaaaactaacaaaaatatttggtcttcaataatgctaaatatctacatttttagaatttatcaacatttaactagataattgggcatgtcttaattatgcatgtacttatccatactaataaaattgacaatgctagtgcatacttattggtttagtcctattatcaggatataatcatctgtgaggaggatattttaaatactgtaaatgataacagttaatgatatacacatttagactgagttgcacactggcagggagaccaaaaacattacttccatacttgtgtcatgattcttttttttttgagagagtctcactctgtcgccaggctggagtacagtggcatgatctcggctcactgcaacctctgcctcccgggttcaagcaattctcctgcctcagccacccaagtagctgggactacaggtgcgtgccaccacgcccagctaaattttgtatttttagtggagacggggtttcaccatgttggccaggatggtctcaatctcctgaccctgcgatctgcccacctcagcctcccaaagtgctgggattacaggcgtaagccaccgggcctggcctgttttatgattcttaatagttacttggtttaaatcacatttgatactatccttctgaaaagtctgagacagatctacaaactacagtcaaaattatagattaagaggaatgaatgcacctatttggctttaagttgaagatgaattatttctcatgctcattttcttgcggcagttatcttagaaagacccccaaaggctttgtgattgtaagcactgtcatgatcacagaatgcaagcttctggtaccatgatcctcaacttagagaggaagaaaccaagacagagagcttaactcacttctctcagggaaaattaggagttgagcacaggacaggaaatgggctttgccacttttagctccaggcttttctaaccagacttgatttcctcatgttctagaaagatcactaatggtcaagtggaacaagcactacacgactaacccctattggggtttttaacttaagggaggctaatttttaatttaaactgctcgagatatgagttctgcaaaaggtggtccgcatccttggccctctggacattatcactaaattgcttgtgcctgttaacaagaatactgaccagaatgctcttcatgtagcttatacagttggttcacttcatgcggttcttgacatgtttatttctacccttaatgcaatgaaatgtttcattaataaaaaaccactttatat

SEQ ID NO: 29619 - DNA, 11072 bp, Homo Sapiens
gagggaaggagggagggaagcagccgctgacccgtggcatgagctggatgcggtgtccgttgcaggactagggcgccgacatgaacctgcaccaggtgctgaccggggctgtgaaccctggcgaccactgcttctccgtgggcagcattggcgaccagcgcttcacggcttatgcatctggatgtgacattgtaatactgggaagcgattttgaaagattacagataatcccaggagctaaacatggaaatattcaagtgggatgtgtagactgttcaatgcaacaaggcaagattgcagcgtcttatggaaatgttatctccatttttgaaccagttaacctaccaaaacaaaagaaaaatttggaattatatagtcagtggcagaaaagtggccaattttttctggaatcaatagcacacaatataacctgggatcccacaggcagtcgtcttttaactggttccagctatttgcaactctggtccaatactaacttggagaagccaactgaagatgaaaatttaaataaaacagatcttaactttggagattggaaatgcatttggcattgcaaaactgcttcccaagttcatttaatgaaattttcaccagatggagaattttttgccactgctgggaaggatgactgtcttttgaaggtttggtataatgtagaaaactggcggacagctgttacttctccagatggaagttcagaaaaacaatcccaaggagaaattgacttttcttttgtgtatctggcccatcctcgagcagtaaatggattttcctggcgtaaaacaagcaaatatatgcctagggcttctgtatgtaatgtactgttgacttgctgcaaagataatgtgtgtcgtctttgggtagagacatttttaccaaatgattgtttgctatacggaggtgactgcagccattggactgaatcaattaatttaacaaataacttcaagagaaatgcttccagtaaagaacgagttcaaaatgctttagaagtaaatctgagacattttcgtagaggtcggaggagatcacttgctcttgtagcacatacgggatatctaccacatcagcaggatcctcatcatgttcacaggaacactccactgcatgccaatgcactttgccactttcatattgcagccagcatcaacccagccacagacattccacttcttccatctattacatctctgagtctaaatgaaaatgaagagaagaccggaccttttgttgtacactggctaaacaataaagaactgcattttactttgtccatggaagtttttttacagcaacttagaaaaagttttgaacaaccatcttctgaggccagtgtagaagattctaatcaggcagatgtaaaatctgatgaagaaactgatgatggtgttgatgatctgaaaataaatcccgaaaagaaggaattaggctgtgataaaatggtaccaaactcaagttttacatcattatcgtcagctgccattgatcatcagattgaagtacttctgtctgaatggagtaaaaatgcagatatgctatttagtattcatcccatggatggttctttgctagtttggcatgtggattggctggatgaataccagcctggtatgtttcgtcaagtacaggtgtcctttgtttccagaattccagtagctttccccacaggtgatgcaaactctctctgtaaaagcataatgatgtatgcctgtaccaagaatgttgacttggctattcagcaggggaaacaaaaaccttctggcctcacccgttccacatcaatgcttatttcttctggtcacaataaatcatctaatagtttaaaattaagtatttttacgcctaatgttatgatgatatcaaaacatgctgatggttctctgaatcagtggctggtcagttttgccgaggaatctgctttttctactgttctcagtatttcccacaaatccagatattgtggtcatcgttttcatcttaatgatttagcttgccactcagtattaccattattgctgacaacatcacaccataatgcattaaggacaccagatgttgataacccagagcaaccttttgatgctctaaatattgaagaatgctctttgacacaacaaaataaaagcactgttgacgtggcatttcaggatcccagtgcagtttacagtgagcttattctgtggagggttgacccagttgggccattgtctttttctggaggagtttctgagcttgcccggattaattctcttcatgtttctgccttttccaatgtggcatggctgcccactcttatacccagttattgtctgggtgcatactgcaactctcctagtgcatgctttgtagccagtgatggacaatatctgagattatatgaagcagttattgatgctaagaaacttttatctgagctttctaaccctgaaatttctaaatatgttggtgaagtctttaacatcgtcagtcaacaatcaacagccaggccaggatgcattattgcattagatcccattaccaaacttcatggcagaaaaacccaactgcttcatgtttttgaagaagacttcattttgaataaccttgagaagaaaagccttggcaaagacagcattttatctaatgcaggcagctcacctaatggattttctgagaagttctacctaattgtaatagaatgcactcaagacaaccgttcactgttacacatgtggaatttacatctaaagtcaattcctgtctcattagatgaaaaagtagatacaaaattatccgaagcggtttggcagccagaagaacattattcttcttctccagagaagatcctatctcctttttcacaaaagtatcaggcttgcagagcaaatctccagagtaccagcaggttgactctgttttcagaaatggtttatagccaagaattgcatttaccagaaggagttgagataataagtattaagccatcagcaggacatctgagttcatcttctatatatcctgcatgcagtgctccttatttattggcaacttcatgttcagatgagaaagtaagattctggagatgcagagtaacagatggagaatctgccacgtcaaagaatggaaaaattgatcttgcatacatttgggaagaatggccattacttattgaagatggacttcagagcaatagtagtataactgtacctggtaggcctgtagaagttagctgtgcacatacaaatcgtttagcagtagcttataagcagcctgcatctaatagtagatcttcccaggactttgtgatgcatgtaagtatttttgaatgtgagtcaacaggaggttcatgttgggtccttgagcagacaattcatttagatgagttaagcacagtattggattctggcattagtgttgatagcaatttagtggcctataataaacaagacatgtatttatctagtaaagagaatatcacatcaaacacaaagcatttagttcacttagattggatgtctagagaagacggttctcatatcctgactgtaggaattggatcaaaactttttatgtatggacccctggctggcaaggtacaagaccaaactggtaaggaaaccctggcatttcctctctgggagagtaccaaagttgtgcccctttctaaatttgtactattacgaagtgtggacctagtttcttctgtagatggctccccaccttttcctgtttctttatcgtgggtccgggatggcatccttgtggtaggaatggactgtgaaatgcatgtgtattgccaatggcaaccatcttctaaacaagaacctgttataacagattcgtacagtgggagcactccatctataacaagtttaataaaacagagtaactccagttctgggttacatcctccaaagaaaactctgactcgatccatgaccagtcttgcacagaaaatctgtggaaagaaaactgcattcgatccttcagtggatatggaagattcaggtctttttgaagcagctcatgtactttccccgactctacctcagtatcatcccttgcagcttttggaactcatggatcttggtaaagttcggagagccaaggccatcttgtcccatcttgttaagtgcattgctggggaagttgtggctctgaatgaagctgaatctaatcatgaacgccgccttaggtctctcacaatcagtgctagtggaagcactaccagagacccccaggcattcaacaaggctgaaaatacagattacacagaaatagattctgttcctccacttcctttatatgccttacttgcagcagatgatgatagctgttactcatctttggagaaatctagtaatgagagtacgttaagtaaatcaaaccaattatctaaagaaagttatgatgagctttttcagactcaacttctaatgactgatactcatatgttagagacagatgaagaaaatacaaagcctagagttattgacctttcacagtacagtccgacttactttggacctgagcatgctcaggttctttctggccacttacttcattctagtttaccaggactcagccggatggagcagatgtctttgatggccttagcagatacaattgcaactacaagcactgatattggagaaagccgagacagaagccaaggtggagaaactcttgatgaatgtgggttaaaatttcttttggctgttcgactccatacctttcttacaacttcccttccagcctatcgagctcaactccttcaccaaggcctgtctacaagtcattttgcttgggcatttcactcagtagcagaagaagaactgctgaacatgttgccagccatgcagaaagatgatcccacttggtctgaactaagagctatgggtgtggggtggtgggtccggaatacccgcatcttacgcaaatgcatagaaaaagtagctaaagcagccttttatagaaagaatgatcctttagatgctgccattttttaccttgcaatgaaaaagaaagctgtgatttggggattatatagagctgaaaaaaacaccaggatgacacagttttttggacacaattttgaggatgagaggtggcgtaaagcagctttaaagaatgctttttctttgctaggcaaacaaagatttgaacattctgcagcattttttcttttagctggttgcctcagagatgcaattgaggtatgtcttgagaaattgaatgacattcagttggctcttgtaatagcaagactctatgagtctgaatttgatacatctgcagcatataaatctattttacgtaaaaaagttttgggaatcgattctcctgtcagtgaactgtgttcattgaacataaatatgcatcatgatccttttcttcggagcatggcatattggattttggaagattatagtggtgctctggaaacattaataaagcaacctatcagagagaatgatgatcaagttttatcagccagtaatcctacagtttttaatttctacaattatctaagaacacatcctcttttgctgagacgtcattttggatcatctgatacattttccacacatatgagcctaacaggaaaaagtggactggcaggaacaattaatttaagtgaaagacgtttattttttaccactgccagtgctcatttaaaagctggctgcccaatgttggctttggaagtattatcaaagatgcctaaagtcatcaagaaaacaagacctttttatagggcttctagttttctggatactagtaaagactgttctccttcttctccattaaagttggatgcaagggaagataagtcttctgctgttgattggtcacagtcactgataaatggttttggatcttcttcagagggttcctcagagaagcaatcaaactccactctttcttttgactggagccaaccaagtgttgtgtttcaggatgactctttagagttaaaatgggacagtgataatgatgaagaaaatgaggatgtccctatttcaatgaaagaactaaaacctttacagagaaaaacagataaaaagttggatgacataagttctaactacacagaatctttcagcacactagatgaaaatgaccttttaaatccatcagaagatataattgcagttcagttaaaatttagagcatgtttaaagattctcacagtagaacttcgtactttatctactggctatgaaatagatggtggaaaattgcgttaccaactataccactggcttgaaaaagaggtgatagctcttcagaggacttgtgacttttgctcagatgctgaagaactacagtctgcatttggcagaaatgaagatgaatttggattaaatgaggatgctgaagatttgcctcaccaaacaaaagtgaaacaactgagagaaaattttcaggaaaaaagacagtggctcttgaagtatcagtcacttttgagaatgtttcttagttactgcatacttcatggatcccatggtgggggtcttgcatctgtaagaatggaattgattttgcttttgcaagaatctcagcaggaaacatcagaaccactattttctagccttctgtcagagcaaacctcagtgcctctcctctttgcttgtacagccaatgccaaaacagtagttgccaatccattattgcaccttagtaatctgacacatgatattctccatgccataataaactttgattcaccaccccaccctgatatccaaagcaataaagtgtatgtaatgcatactttagcagcttcactttctgcttgtatttatcagtgcctttgtggtagtcataactacagttcatttcagacgaatcagtttactggaatggtatatcagacagtactgcttcctcatcgaccttctttgaaaacaggaagcttagatgaagcattaactcccaatacgtcaccagctcaatggccaggaataacttgtctaattcgacttttgaattcttctggcgaggaagcccagtcagggcttacagtcttgctctgtgagattctcacagcagtgtatcttagtctcttcatccatggcctggccacacattcaagtaatgagctatttcggattgtggcccatcctctaaatgagaaaatgtggtctgctgtgtttggtggaggtgcacatgttcctagcaaagaacagacacattcaaaaactttacctgtttcttcactagttgaagaaggagaaaaacagaacaaacgttttaggccgtcaaaaatgtcttgcagagaatctgccccactgaccccttcctcggcaccagtaagccaggagtcactggcggttaaagaaaagttcatcccacctgagctcagtatctgggactatttcatagctaagccttttctaccctcttctcaaagtagagccgaatatgattcagaggagagtctgggaagtgatgatgatgacaatgatgatgatgatgatgttttagcatcagatttccatctccaggaacattctaattcaaattcatatagttggtccttgatgcggttggcgatggtgcaattggtgctcaacaatttgaagactttttatcccttcgcaggtcatgatcttgcagagcttccagttagttcacctctttgtcatgcggttctaaaaactcttcaatgttgggaacaagttcttctccgacgacttgaaatccatggtgggccacctcaaaattatatcgcaagtcataccgccgaagagagtttgtctgcaggtcctgcaattcttcgccacaaagctttactggaacctacaaacactcctttcaaatccaaacaccatctggcactgtctgtgaagaggctttggcagtatttggtgaagcaggaagaaattcaggaaacctttatcaaaaatatattcacaaagaaacggtgtctaaatgagatagaagcagatttgggatatcctggaggtaaagcaagaattattcataaggaatctgatatcattactgcgtttgctgttaataaggcaaatagaaactgcatagcaatcgcttccagtcatgatgttcaagaactggatgtttctggaattctggccacacaggtctacacttgggtagatgatgatatagaagtggaaaccaaaggatcagaagatttcttggttatacatgctcgtgatgatttaacagctgttcaaggtacaactccatatacacatagcaatcctggcactccaatcaacatgccatggcttggtagtacacagactggcagaggagcatctgtgatgattaagaaagccattaataatgttagaagaatgacttctcatccaactcttccttactatctgacaggagctcaagatggaagtgtcagaatgtttgaatggggccattctcaacaaataacctgttttcgatctggtggcaattcaagagttacaagaatgagatttaactatcagggaaataagtttggaatagttgatgctgatggatatttaagtttgtatcaaacaaactggaaatgttgtccagttactggaagcatgcctaagccatacctgacttggcagtgtcataacaaaacagccaatgattttgtcttcgttagttcctcctctctgatagctacagctggtctttcaactgacaatagaaacgtatgtttgtgggatactcttgtagcacctgccaatagtttagtccatgcatttacctgccatgacagtggagccacagttttagcatatgctccaaaacatcagctactaatatcaggtggcagaaaaggttttacatatgtatttgacctttgtcaacgacaacagaggcagcttttccagagccatgattctcctgttaaagccgttgctgttgatccaactgaagagtactttgttacaggatctgccgaaggcaatataaagatttggagtctctctacctttggtcttctccatacttttgtcagtgaacatgctcggcagtccatttttagaaatattggaactggagtgatgcaaattgagacagggcctgcaaatcacattttctcctgtggagctgatggaacaatgaaaatgagaatactgccagatcagtttagccctttaaatgaagtgttgaaaaatgatgtgaaatttatgctataacatttttacaataagatgtacaatttattacctatatggaagtggccaacagatataatatacagtgatcattctctatgccacaaattagctaatgctttcttgtttttatatttattttatggagctttgcccttgatgcactgatgccttaaaaattaacaaggtcattcagaagtagattacattgcctaaagtagaatgtgtaagtaatgctgtaataatacatatcatagtatattataatcagtatgtcatagtgttaaaggtgttttgttttcttaattgatacttttccacaggcatctctgcatgaatttcttccacagtaaaaatacgttttttgtaaaggcaattgtacataatactcatcacttaattcaccacactctcacttcctttattagccttatacatctcaaactcttctcttaattaatgataggtatttgagtaagaatgaaaaaaataatgaacatcttcattaaaattgtcattgagacgtcagtgataaatgagctagatggctcaatatgtaaggttttcagtagtttaccctccggaacccaagttatatgtatgtatacgtgtgtgtgtgtgtgtgtgtgtgtatcttacacatcttatttgaacttagttgtatatattagcgaaaactggtttttcatgtgtttttgtgccataacaactattgccaccagaataacttttttttgcaactgtgcttttcatttttaaaaaatttttgaattcccatcctaattttcaaataagtttcaaggagactatcaggattattattttaaagattagatttagtcaaataagtcttagcaggcaataaagtttctgtggtggcatatatcatgtaagacacttaaagtaagtttgtgaatttgtcaactttcgagcatcaaacaaatattttacttaaattttattttatcttatttttaggtgcttttaatctcaaaattctgaaaagcgaatagcagtgttttcagaaacaaatgtgaaagcagtcaaattaagtagatactatttagaaatgtaaaatactctccagatctaccattaatagaaaataaactaaaccttatattttatttttgccaaaatattttattataaaatatgaccaaaatatttaaaatgcacaatgcttttaacttaaatgtgctaaccctgtttctgtctgttttgtgctgtaccttttctgattcagaattatagaaaacttgataaatacttgattttaaccaatgagactacaggcagatgggactaagtgtttatgggacaattatgtactatttaacttaaatatattttgtttaataggaaatatataataatagcattttatgtaataaaatatgggcaacgattatcttggaaattaaagagtcaaagcaaagaaatgaagggctggtaaaatgaattttgtaatatcctcaggatacttttatcttaaaagtatgttgttaaagattttgtaaattgtatttcaacaattttaaatgtgttgagcaagttgcagtgcaaacactgtcattatgtagagagtttatatgcacataataacctgtacctataaatcgtgcaataaccatatgcgactattttgccatggagaaatctgacagcattgcaaacaatagtattgtttgatgtagttaaccttaagttatttttcagtaatttcttcacaaatcaagattcaaacagctttaaacacttccaatgagataaaatatttactattatgcttattagaacaaaaggtgtttaaggatgaactaaatattttaattgagcatttatatggataatcatacattatgtaagcccatatgtatttacatccagagtcataatattttaaataaacaatcatgcagaaacttt

SEQ ID NO: 29620 - DNA, 2061 bp, Homo Sapiens
aggaggcgccgggaccatggtcaccctcggctgagtttccggcggcgactttgattattggcaaataaccaccataacaataccgagcccccgggcttgcaccgcacgcactgactccgcgagcccgcacacggccgcgtcgcccgccaccgggccctgagcgccagccccaaacgagccgatggaaaaatccaaaaatttccgcatcgacgccctgctggcggtggaccccccacgagccgcctctgcgcagagcgcgccgctggccttggtcacgtcgctcgccgccgccgcatctggcaccggaggtggcggcggcggcggcggggcgagcggcgggactagcggcagctgcagccccgcgtcctcggagccgccggctgcgcccgccgaccgcctgcgcgccgagagcccgtcgccgccgcgcctgctggccgcgcactgcgcgctgctgcccaagccgggcttcctgggcgcgggcggcggcggcggcggcacgggcggcgggcacggggggccccaccaccacgcgcatccgggcgcacgggccgctgccgccgccgccgccgccgccgccgccgccgccgctgggggcctggcgctggggctgcaccctgggggcgcgcagggcggcgcgggcctcccggcgcaggcggcgctctacggccacccggtctacggctactccgcggcggcggcggcggctgcgctggcgggccagcacccggcgctctcctactcgtacccgcaggtgcaaggcgcgcaccccgcgcaccccgccgaccccatcaagctgggcgccggcaccttccagctggaccagtggctgcgcgcgtccaccgcgggcatgatcctgcctaagatgcccgacttcaactcccaggcgcagtcgaacctcctggggaagtgccgccggccgcgcaccgccttcaccagccagcagctgctggagctggagcaccagttcaagctcaacaagtacctgtcgcggcccaagcgcttcgaggtggccacctcgctcatgctcaccgagacccaggtgaagatttggttccagaaccggcggatgaaatggaaacgcagcaaaaaggccaaagagcaggcggcgcaggaagcggagaaacagaagggcggcggcgggggcgcggggaagggcggcgcggaggagccgggagccgaggagctgctggggccgccagcgcccggagacaagggcagcggacgccgcctgcgggacttgagggacagtgaccccgaggaggacgaggacgaggacgacgaggaccatttcccctacagcaacggcgccagcgtccacgccgcctcctccgactgctcctcggaggacgactcgccgcccccgcggcccagccaccagcccgcgccccagtaggagccccgcggcccagcaggtgcggcgcgcacggagcgccccggccggcggcttctcccggaggccccggcgcccgcacccacccggcccggccccgagagcaggctcgaccgccgccccatggacccctcgcccaggccggggctggagggattcggccgcggcctccggtcctgggcgcttcccttttaagcaagggcgcctcacctgctcttcaagaaacagcgagagggagacccagggggctgaaacttgaactctggttcttttaaaattaattttggttggtgttgggggaggcgcgagtgcgtgtgagaagaaccgacccaccccgcgcaaggggaagcctcctgtctcccctttccccgcgtccgagaaggcggaaacccacagtgttacctgacttatgaaacttgaaaccgcctctggagccgccattctgcagagtatttggaaaaagaaaaaagggtttatgcttacgtctctggggtcggggggattatgtcacgagcgttcaaactgctggaaatctcaaaactgtactgtctttatttttgtatattgtatttatatataaaaagaaacgtctacgtatgcatgctaaattattatttagcttctcccatcgcccacgatggaatgtaaaataaattggttttgtactggat

SEQ ID NO: 29621 - DNA, 1405 bp, Homo Sapiens
acaattcagaggctgctgcctgcttaggaggttgtagaaagctctgtaggttctctctgtgtgtcctacaggagtcttcaggccagctccctgtcggatggcttttatgaaaaaatatctcctccccattctggggctcttcatggcctactactactattctgcaaacgaggaattcagaccagagatgctccaaggaaagaaagtgattgtcacaggggccagcaaagggatcggaagagagatggcttatcatctggcgaagatgggagcccatgtggtggtgacagcgaggtcaaaagaaactctacagaaggtggtatcccactgcctggagcttggagcagcctcagcacactacattgctggcaccatggaagacatgaccttcgcagagcaatttgttgcccaagcaggaaagctcatgggaggactagacatgctcattctcaaccacatcaccaacacttctttgaatctttttcatgatgatattcaccatgtgcgcaaaagcatggaagtcaacttcctcagttacgtggtcctgactgtagctgccttgcccatgctgaagcagagcaatggaagcattgttgtcgtctcctctctggctgggaaagtggcttatccaatggttgctgcctattctgcaagcaagtttgctttggatgggttcttctcctccatcagaaaggaatattcagtgtccagggtcaatgtatcaatcactctctgtgttcttggcctcatagacacagaaacagccatgaaggcagtttctgggatagtccatatgcaagcagctccaaaggaggaatgtgccctggagatcatcaaagggggagctctgcgccaagaagaagtgtattatgacagctcactctggaccactcttctgatcagaaatccatgcaggaagatcctggaatttctctactcaacgagctataatatggacagattcataaacaagtaggaactccctgagggctgggcatgctgagggattttgggactgttctgtctcatgtttatctgagctcttatctatgaagacatcttcccagagtgtccccagagacatgcaagtcatgggtcacacctgacaaatggaaggagttcctctaacatttgcaaaatggaaatgtaataataatgaatgtcatgcaccgctgcagccagcagttgtaaaattgttagtaaacataggtataattaccagatagttatattaaatttatatcttatatataataatatgtgatgattaatacaatattaattataataaaggtcacataaactttataaattcataactggtagctataacttgagcttattcaggatggtttctttaaaaccataaactgtacaaatgaaatttttcaatatttgtttctta

SEQ ID NO: 29622 - DNA, 13793 bp, Homo Sapiens
gcccggagcgagcgagcgagagagcggcgcgggccgggccatggggtggcgggcgccgggcgcgctgctgctggcgctgctgctgcacgggcggctgctggcggtgacccatgggctgagggcatacgatggcttgtctctgcctgaggacatagagaccgtcacagcaagccaaatgcgctggacacattcgtacctttctgatgatgaggacatgctggctgacagcatctcaggagacgacctgggcagtggggacctgggcagcggggacttccagatggtttatttccgagccctggtgaatttcactcgctccatcgagtacagccctcagctggaggatgcaggctccagagagtttcgagaggtgtccgaggctgtggtagacacgctggagtcggagtacttgaaaattcccggagaccaggttgtcagtgtggtgttcatcaaggagctggatggctgggtttttgtggagctggatgtgggctcggaagggaatgcggatggggctcagattcaggagatgctgctcagggtcatctccagcggctctgtggcctcctacgtcacctctccccagggattccagttccgacgcctgggcacagtgccccagttcccaagagcctgcacggaggccgagtttgcctgccacagctacaatgagtgtgtggccctggagtatcgctgtgaccggcggcccgactgcagggacatgtctgatgagctcaattgtgaggagccagtcctgggtatcagccccacattctctctcctcgtggagacgacatctttaccgccccggccagagacaaccatcatgcgacagccaccagtcacccacgctcctcagcccctgcttcccggttccgtcaggcccctgccctgtgggccccaggaggccgcatgccgcaatgggcactgcatccccagagactacctctgcgacggacaggaggactgcgaggacggcagcgatgagctagactgtggccccccgccaccctgtgagcccaacgagttcccctgcgggaatggacattgtgccctcaagctgtggcgctgcgatggtgactttgactgtgaggaccgaactgatgaagccaactgccccaccaagcgtcctgaggaagtgtgcgggcccacacagttccgatgcgtctctaccaacatgtgcatcccagccagcttccactgtgacgaggagagcgactgtcctgaccggagcgacgagtttggctgcatgcccccccaggtggtgacacctccccgggagtccatccaggcttcccggggccagacagtgaccttcacctgcgtggccattggcgtccccgccccctttctcatcaattggaggctcaactggggccacatcccctctcagcccagggtgacagtgaccagcgagggtggccgtggcacactgatcatccgtgatgtgaaggagtcagaccagggtgcctacacctgtgaggccatgaacgcccggggcatggtgtttggcattcctgacggtgtccttgagctcgtcccacaacgagcaggcccctgccctgacggccacttctacctggagcacagcgccgcctgcctgccctgcttctgctttggcatcaccagcgtgtgccagagcacccgccgcttccgggaccagatcaggctgcgctttgaccaacccgatgacttcaagggtgtgaatgtgacaatgcctgcgcagcccggcacgccacccctctcctccacgcagctgcagatcgacccatccctgcacgagttccagctagtcgacctgtcccgccgcttcctcgtccacgactccttctgggctctgcctgaacagttcctgggcaacaaggtggactcctatggcggctccctgcgttacaacgtgcgctacgagttggcccgtggcatgctggagccagtgcagcggccggacgtggtcctcgtgggtgccgggtaccgcctcctctcccgaggccacacacccacccaacctggtgctctgaaccagcgccaggtccagttctctgaggagcactgggtccatgagtctggccggccggtgcagcgcgcggagctgctgcaggtgctgcagagcctggaggccgtgctcatccagaccgtgtacaacaccaagatggctagcgtgggacttagcgacatcgccatggataccaccgtcacccatgccaccagccatggccgtgcccacagtgtggaggagtgcagatgccccattggctattctggcttgtcctgcgagagctgtgatgcccacttcactcgggtgcctggtgggccctacctgggcacctgctctggttgcagttgcaatggccatgccagctcctgtgaccctgtgtatggccactgcctgaattgccagcacaacacggaggggccacagtgcaagaagtgcaaggctggcttctttggggacgccatgaaggccacggccacttcctgccggccctgcccttgcccatacatcgatgcctcccgcagattctcagacacttgcttcctggacacggatggccaagccacatgtgacgcctgtgccccaggctacactggccgccgctgtgagagctgtgcccccggatacgagggcaaccccatccagcccggcgggaagtgcaggcccgtcaaccaggagattgtgcgctgtgacgagcgtggcagcatggggacctccggggaggcctgccgctgtaagaacaatgtggtggggcgcttgtgcaatgaatgtgctgaccgctctttccacctgagtacccgaaaccccgatggctgcctcaagtgcttctgcatgggtgtcagtcgccactgcaccagctcttcatggagccgtgcccagttgcatggggcctctgaggagcctggtcacttcagcctgaccaacgccgcaagcacccacaccaccaacgagggcatcttctcccccacgcccggggaactgggattctcctccttccacagactcttatctggaccctacttctggagcctcccttcacgcttcctgggggacaaggtgacctcctatggaggagagctgcgcttcacagtgacccagaggtcccagccgggctccacacccctgcacgggcagccgttggtggtgctgcaaggtaacaacatcatcctagagcaccatgtggcccaggagcccagccccggccagcccagcaccttcattgtgcctttccgggagcaagcatggcagcggcccgatgggcagccagccacacgggagcacctgctgatggcactggcaggcatcgacaccctcctgatccgagcatcctacgcccagcagcccgctgagagcagggtctctggcatcagcatggacgtggctgtgcccgaggaaaccggccaggaccccgcgctggaagtggaacagtgctcctgcccacccgggtaccgtgggccgtcctgccaggactgtgacacaggctacacacgcacgcccagtggcctctacctgggtacctgtgaacgctgcagctgccatggccactcagaggcctgcgagccagaaacaggtgcctgccagggctgccagcatcacacggagggccctcggtgtgagcagtgccagccaggatactacggggacgcccagcgggggacaccacaggactgccagctgtgcccctgctacggagaccctgctgccggccaggctgcccacacttgttttctggacacagacggccaccccacctgtgatgcgtgctccccaggccacagtgggcgtcactgtgagaggtgcgcccctggctactatggcaaccccagccagggccagccatgccagagagacagccaggtgccagggcccataggctgcaactgtgacccccaaggcagcgtcagcagccagtgtgatgctgctggtcagtgccagtgcaaggcccaggtggaaggcctcacttgcagccactgccggccccaccacttccacctgagtgccagcaacccagacggctgcctgccctgcttctgtatgggcatcacccagcagtgcgccagctctgcctacacacgccacctgatctccacccactttgcccctggggacttccaaggctttgccctggtgaacccacagcgaaacagccgcctgacaggagaattcactgtggaacccgtgcccgagggtgcccagctctcttttggcaactttgcccaactcggccatgagtccttctactggcagctgccggagacataccagggagacaaggtggcggcctacggtgggaagttgcgatacaccctctcctacacagcaggcccacagggcagcccactctctgaccccgatgtgcagatcacgggcaacaacatcatgctagtggcctcccagccagcgctgcagggccctgagaggaggagctacgagatcatgttccgagaggaattctggcgccggcccgatgggcagccggccacacgcgagcacctcctgatggcactggccgacctggatgagctcctgatccgggccacgttctcctccgtgccgctggtggccagcatcagcgcagtcagcctggaggtcgcccagccggggccctcaaacagaccccgcgccctcgaggtggaggagtgccgctgcccgccaggctacatcggtctgtcctgccaggactgtgcccccggctacacgcgcaccgggagtgggctctacctcggccactgcgagctatgtgaatgcaatggccactcagacctgtgccacccagagactggggcctgctcgcaatgccagcacaacgccgcaggggagttctgcgagctttgtgcccctggctactacggagatgccacagccgggacgcctgaggactgccagccctgtgcctgcccactgaccaacccagagaacatgttttcccgcacctgtgagagcctgggagccggcgggtaccgctgcacggcctgcgaacccggctacactggccagtactgtgagcagtgtggcccaggttacgtgggtaaccccagtgtgcaagggggccagtgcctgccagagacaaaccaagccccactggtggtcgaggtccatcctgctcgaagcatagtgccccaaggtggctcccactccctgcggtgtcaggtcagtgggaggggaccccactacttctattggtcccgtgaggatgggcggcctgtgcccagcggcacccagcagcgacatcaaggctccgagctccacttccccagcgtccagccctcggatgctggggtctacatttgcacctgccgtaatctccaccgatccaataccagccgggcagagctgctggtcactgaggctccaagcaagcccatcacagtgactgtggaggagcagcggagccagagcgtgcgccccggagctgacgtcaccttcatctgcacagccaaaagcaagtccccagcctataccctggtgtggacccgcctgcacaacgggaaactgcccacccgagccatggatttcaatggcatcctgaccattcgcaacgtccagctgagtgatgcaggcacctacgtgtgcaccggctccaacatgtttgccatggaccagggcacagccactctacatgtgcaggcctcgggcaccttgtccgcccccgtggtctccatccatccgccacagctcacagtgcagcccgggcaactggcggagttccgctgcagcgccacagggagccccacgcccaccctcgagtggacagggggccccggcggccagctccctgcgaaggcacaaatccacggcggcatcctgcgcctgccagctgtcgagcccacggatcaggcccagtacttgtgccgagcccacagcagcgctgggcagcaggtggccagggctgtgctccacgtgcatgggggcggtgggcccagagtccaagtgagcccagagaggacccaggtccacgcaggccgcaccgtcaggctgtactgcagggctgcaggcgtgcctagcgccaccatcacctggaggaaggaagggggcagcctcccaccacaggcccggtcagagcgcacagacatcgcgacactgctcatcccagccatcacgactgctgacgccggcttctacctctgcgtggccaccagccctgcaggcactgcccaggcccggatccaagtggttgtcctttcagcctcagatgccagccaaccgccggtcaagattgagtcctcatcgccttctgtgacagaagggcaaacactcgacctcaactgtgtggtggcagggtcagcccatgcccaggtcacctggtacaggcgagggggtagcctgcctcaccacacccaggtgcacggctcccgtctgcggctcccccaggtctcaccagctgattctggagagtatgtgtgccgtgtggagaatggatcgggccccaaggaggcctccattactgtgtctgtgctccacggcacccattctggccccagctacaccccagtgcccggcagcacccggcccatccgcatcgagccctcctcctcacacgtggcggaagggcagaccctggatctgaactgcgtggtgcccgggcaggcccacgcccaggtcacgtggcacaagcgtgggggcagcctccctgcccggcaccagacccacggctcgctgctgcggctgcaccaggtgaccccggccgactcaggcgagtatgtgtgccatgtggtgggcacctccggccccctagaggcctcagtcctggtcaccatcgaagcctctgtcatccctggacccatcccacctgtcaggatcgagtcttcatcctccacagtggccgagggccagaccctggatctgagctgcgtggtggcagggcaggcccacgcccaggtcacatggtacaagcgtgggggcagcctccctgcccggcaccaggttcgtggctcccgcctgtacatcttccaggcctcacctgccgatgcgggacagtacgtctgccgggccagcaacggcatggaggcctccatcacggtcacagtaactgggacccagggggccaacttagcctaccctgccggcagcacccagcccatccgcatcgagccctcctcctcgcaagtggcggaagggcagaccctggatctgaactgcgtggtgcccgggcagtcccatgcccaggtcacgtggcacaagcgtgggggcagcctccctgtccggcaccagacccacggctccctgctgagactctaccaagcgtcccccgccgactcgggcgagtacgtgtgccgagtgttgggcagctccgtgcctctagaggcctctgtcctggtcaccattgagcctgcgggctcagtgcctgcacttggggtcacccccacggtccggatcgagtcatcgtcttcgcaagtggcagaggggcagaccctggacctgaactgcctcgttgctggtcaggcccatgcccaggtcacgtggcacaagcgcgggggcagcctcccggcccggcaccaggtgcatggctcgaggctacgcctgctccaggtgaccccagctgattcaggggagtacgtgtgccgtgtggtcggcagctcaggtacccaggaagcctcagtccttgtcaccatccagcagcgccttagtggctcccactcccagggtgtggcgtaccccgtccgcatcgagtcctcctcagcctccctggccaatggacacaccctggacctcaactgcctggttgccagccaggctccccacaccatcacctggtataagcgtggaggcagcttacccagccggcaccagatcgtgggctcccggctgcggatccctcaggtgactccggcagactcgggcgagtacgtgtgtcacgtcagtaacggtgcaggctcccgggagacctcgctcatcgtcaccatccagggcagcggttcctcccacgtgcccagagtctccccaccgatcaggatcgagtcgtcttcccccacggtggtggaagggcagaccttggatctgaactgcgtggtcgccaggcagccccaggctatcatcacatggtacaagcgtgggggcagccttccctcccgacaccagacccatggctcccacctgcggttgcaccaaatgtctgtggctgactcgggcgagtatgtgtgccgggccaacaacaacatcgatgccctggaggcctcaatcgtcatctccgtctcccctagcgccggcagcccctccgcccctggcagctccatgcccatcagaattgagtcatcctcctcacacgtggccgaaggggagaccctggatctgaactgcgtggtccccgggcaggcccatgcccaggtcacttggcacaagcgtgggggcagcctccccagttaccatcagacccgcggctcacggctgcggctgcaccatgtgtccccggccgactcgggtgaatacgtgtgccgggtgatgggcagctctggccccctggaggcctcagtcctcgtcaccatcgaagcctctggctcaagtgctgtccacgtccccgccccaggtggagccccacccatccgcatcgagccctcctcctcccgagtggcagaagggcagaccctggatctgaagtgcgtggtgcccgggcaggcccacgcccaggtcacgtggcacaagcgtggaggaaacctccctgcccggcaccaggtccacggcccactgctgaggctgaaccaggtgtccccggctgactctggcgagtactcgtgccaagtgaccggaagctcaggcaccctggaggcatctgtcctggtcacaattgagccctccagcccaggacccattcctgctccaggactggcccagcccatctacatcgaggcctcctcttcacacgtgactgaagggcagactctggatctgaactgtgtggtgcccgggcaggcccatgcccaggtcacgtggtacaagcgcgggggcagcctccccgcccggcaccagacccatggctcccagctgcggctccaccacgtctcccctgccgactcaggcgagtatgtgtgtcgtgcagccggcggcccaggccctgagcaagaagcctccttcacagtcaccgtcccgcccagtgaggggtcttcctaccgccttaggagcccggtcatctcgatcgacccgcccagcagcaccgtgcagcagggccaggatgccagcttcaagtgcctcatccatgacggggcagcccccatcagcctcgagtggaagacccggaaccaggagctggaggacaacgtccacatcagtcccaatggctccatcatcaccatcgtgggcacccggcccagcaaccacggtacctaccgctgcgtggcctccaatgcctacggtgtggcccagagtgtggtgaacctcagtgtgcacgggccccctacagtgtccgtgctccccgagggccccgtgtgggtgaaagtgggaaaggccgtcaccctggagtgtgtcagtgccggggagccccgctcctctgctcgttggacccggatcagcagcacccctgccaagttggagcagcggacatatgggctcatggacagccacacggtgctgcagatttcatcagctaaaccatcagatgcgggcacttatgtgtgccttgctcagaatgcactaggcacagcacagaagcaggtggaggtgatcgtggacacgggcgccatggccccaggggcccctcaggtccaagctgaagaagctgagctgactgtggaggctggacacacggccaccttgcgctgctcagccacaggcagccccgcgcgcaccatccactggtccaagctgcgttccccactgccctggcagcaccggctggaaggtgacacactcatcataccccgggtagcccagcaggactcgggccagtacatctgcaatgccactagccctgccgggcacgctgaggccaccatcatcctgcacgtggagagcccaccatatgccaccacggtcccagagcacgcttcggtgcaggcaggggagacggtgcagctccagtgcctggctcacgggacacccccactcaccttccagtggagccgcgtgggcagcagccttcctgggagggcgaccgccaggaacgagctgctgcactttgagcgtgcagcccctgaggactcaggccgctaccgctgccgggtcaccaacaaggtgggctcagccgaggcctttgcccagctgctcgtccaaggccctcccggctctctccctgccacctccatcccagcagggtccacgcccaccgtgcaggtcacgcctcagctagagaccaagagcattggggccagcgttgagttccattgtgctgtgcccagcgaccggggtacccagctccgttggttcaaggaagggggtcagctgcctcccggtcacagcgtgcaggatggggtgctccgaatccagaacttggaccagagctgccaagggacgtatatatgccaggcccatggaccttgggggaaggcccaggccagtgcccagctggttatccaagccctgccctcggtgctcatcaacatccggacctctgtgcagaccgtggtggttggccacgccgtggagttcgaatgcctggcactgggtgaccccaagcctcaggtgacatggagcaaagttggagggcacctgcggccaggcattgtgcagagcggaggtgtcgtcaggatcgcccacgtagagctggctgatgcgggacagtatcgctgcactgccaccaacgcagctggcaccacacaatcccacgtcctgctgcttgtgcaagccttgccccagatctcaatgccccaagaagtccgtgtgcctgctggttctgcagctgtcttcccctgcatagcctcaggctaccccactcctgacatcagctggagcaagctggatggcagcctgccacctgacagccgcctggagaacaacatgctgatgctgccctcagtccaaccccaggacgcaggtacctacgtctgcaccgccactaaccgccagggcaaggtcaaagcctttgcccacctgcaggtgccagagcgggtggtgccctacttcacgcagaccccctactccttcctaccgctgcccaccatcaaggatgcctacaggaagttcgagatcaagatcaccttccggcctgactcagccgatgggatgctgctgtacaatgggcagaagcgagtcccagggagccccaccaacctggccaaccggcagcccgacttcatctccttcggcctcgtggggggaaggcccgagttccggttcgatgcaggctcaggcatggccaccatccgccatcccacaccactggccctgggccatttccacaccgtgaccctgctgcgcagcctcacccagggctccctgattgtgggtgacctggccccggtcaacgggacctcccagggcaagttccagggcctggatctgaacgaggaactctacctgggtggctatcctgactatggtgccatccccaaggcggggctgagcagcggcttcataggctgtgtccgggagctgcgcatccagggcgaggagatcgtcttccatgacctcaacctcacggcgcacggcatctcccactgccccacctgtcgggaccggccctgccagaatggcggtcagtgccatgactctgagagcagcagctatgtgtgcgtctgcccagctggcttcaccgggagccgctgtgagcactcgcaggccctgcactgccatccagaggcctgtgggcccgacgccacctgtgtgaaccggcctgacggtcgaggctacacctgccgctgccacctgggccgctcggggttgcggtgtgaggaaggtgtgacagtgaccaccccctcgctgtcgggtgctggctcctacctggcactgcccgccctcaccaacacacaccacgagctacgcctggacgtggagttcaagccactcgcccctgacggggtcctgctgttcagcggggggaagagcgggcctgtggaggacttcgtgtccctggcgatggtgggcggccacctggagttccgctatgagttggggtcagggctggccgttctgcggacggccgagccgctggccctgggccgctggcaccgtgtgtctgcagagcgtctcaacaaggacggcagcctgcgggtgaatggtggacgccctgtgctgcgctcctcgcccggcaagagccagggcctcaacctgcacaccctgctctacctggggggtgtggagccttccgtgccactgtccccggccaccaacatgagcgctcacttccgcggctgtgtgggcgaggtgtcagtgaatggcaaacggctggacctcacctacagtttcctaggcagccagggcatcgggcaatgctatgacagctccccatgtgagcgccagccttgccaacatggtgccacgtgcatgcccgctggcgagtatgagttccagtgcctgtgtcgagatggaatcaaaggagacctgtgtgagcacgaggagaacccctgccagctccgtgaaccctgtctgcatgggggcacctgccagggcacccgctgcctctgcctccctggcttctctggcccacgctgccaacaaggctctggacatggcatagcagagtccgactggcatcttgaaggcagcgggggcaatgatgcccctgggcagtacggagcctatttccacgatgatggcttcctcgccttccctggccatgtcttctccaggagcctgcccgaggtgcccgagaccatcgagctggaggttcggaccagcacagccagtggcctcctgctctggcagggtgtggaggtgggagaggccggccaaggcaaggacttcatcagcctcgggcttcaagacgggcaccttgtcttcaggtaccagctgggtagtggggaggcccgcctggtctctgaggaccccatcaatgacggcgagtggcaccgggtgacagcactgcgggagggccgcagaggttccatccaagtcgacggtgaggagctggtcagcggccggtccccaggtcccaacgtggcagtcaacgccaagggcagcatctacatcggcggagcccctgacgtggccacgctgaccgggggcagattctcctcgggcatcacaggctgtgtcaagaacctggtgctgcactcggcccgacccggcgccccgcccccacagcccctggacctgcagcaccgcgcccaggccggggccaacacacgcccctgcccctcgtaggcacctgcctgccccacacggactcccgggccacgccccagcccgacaatgtcgagtatattattattaatattattatgaatttttgtaagaaaccgagcgatgccacgctttgctcgtaccgccctgggctggactggaggtgggcatgccaccctcacacacacagctgggcaaagccacaaggctggccagcaaggcaggttggatgggagtgggcacctcagaaagtcaccaggacttggggtcaggaacagtggctgggtgggcccagaactgcccccactgtccccctacccaccgatggagcccccagatagagctgggtggcctgtttctgcagcccttgggcagttctcactcctaggagagccaacctcggcttgtgggctggtgccccacagctacctgagacgggcatcgcaggagtctctgccacccactcaggattgggaattgtctttagtgccggctgtggagcaaaaggcagctcacccctgggcaggcggtccccatccccaccagctcgtttttcagcacccccacccacctccacccagcccctggcccc

SEQ ID NO: 29623 - DNA, 2886 bp, Homo Sapiens
tgcgctcgggggggcgcgggcagatcgctggcttggagaggactgtggcaggtgagaggacctgtgcgtcgttctctgcagacctggccgccccgggtgtcagagagaggtggcgagttcgtgtccgccgggaattgttggctgttggggaaactttcctgcgaggtcagtcaaggctttgggggctctgttttgaatgtggatcaccactcggagtttactaatgtttacaaggctgcgcagtagggaaacggaagagttgggtgggggcaaaaaaaaaaattgaccgctatccccgaaagtactagacgcctctgccgggaaggcgcccctgcgcgttctatccgagacgtagcttcgcagcgaattttataggaacttcattagcatattatggaacgtcccgcctcagccccccagtagttggctgtgatgtccttcgtggaatgtccttatcattcccctgcggaacgattggtcgctgaggcggatgaaggcgggcctagcgcaataactggtatgggtctgtgtttccgctgtcttcttttttctttttcggggaggagcggggtggagggtggacgagttgatttgaacgtcttcgggtcgctcggcctccagccttggattggttcttctcgctgctggggcgggccgtgctcttccgccctgcggtgtggttggttctcctcctggcctccgccctccaaatcggcgattcccataggcggcggctctcggggtgcggggcgagtctcccgctggcctcctccccattggctggaggcctggcgggtgtcgcccctgcccctctccccgctcagcccggccactttcgggcgcggatttatagcagtagcagtgatcccgggcctgtgggctcggggccggggctgcagttcggaccgcctcccgcgacccgcggggccggctcggagacagtttcaggccgcatctctgctgacccgagggtggggccgcgcgtggccgtggaaacagatcctgaaggagctagacgagtgctacgagcgcttcagtcgcgagacagacggggcgcagaagcggcggatgctgcactgtgtgcagcgcgcgctgatccgcagccaggagctgggcgacgagaagatccagatcgtgagccagatggtggagctggtggagaaccgcacgcggcaggtggacagccacgtggagctgttcgaggcgcagcaggagctgggcgacacagcgggcaacagcggcaaggctggcgcggacaggcccaaaggcgaggcggcagcgcaggctgacaagcccaacagcaagcgctcacggcggcagcgcaacaacgagaaccgtgagaacgcgtccagcaaccacgaccacgacgacggcgcctcgggcacacccaaggagaagaaggccaagacctccaagaagaagaagcgctccaaggccaaggcggagcgagaggcgtcccctgccgacctccccatcgaccccaacgaacccacgtactgtctgtgcaaccaggtctcctatggggagatgatcggctgcgacaacgacgagtgccccatcgagtggttccacttctcgtgcgtggggctcaatcataaacccaagggcaagtggtactgtcccaagtgccggggggagaacgagaagaccatggacaaagccctggagaaatccaaaaaagagagggcttacaacaggtagtttgtggacaggcgcctggtgtgaggaggacaaaataaaccgtgtatttattacattgctgcctttgttgaggtgcaaggagtgtaaaatgtatatttttaaagaatgttagaaaaggaaccattcctttcatagggatggcagtgattctgtttgccttttgttttcattggtacacgtgtaacaagaaagtggtctgtggatcagcattttagaaactacaaatataggtttgattcaacacttaagtctcagactgatttcttgcgggaggagggggactaaactcaacctaacacattaaatgtggaaggaaaatatttcatttagcttttttattttaatacaagtaatattattactttatgaacaattttttttaattggccatgtcgccaaaaatacagcctatagtaaatgtgtttcttgctgccatgatgtatatccatataacaattcagtaacaaaggtttaaagtttgaagattattttttaaaaaggtaaatggttaaattttacatgacagatattttatctattggcctgttccccaaatggccattttaaaatgcttgggtacacttctcttaagtggtctagtcaaggaacctcaagtcatgcttttgctatcaccaatcatagtgtacccatctttaatttatatcaggtgtataaatgtacatttccaaatgaacttgcacttgttatattataattggaagtgcagtcagcagatgctgttgtgaagctaatgtcacaattatgtgcaaaggtgtgcttcctgctgtatgtgagctgtaaaaatgttacgtgaagaaataaatgaaacttggccagtttgttcctctagtagtatatttaattttgacataagtaacttttaaaatttgtcttaaaaatttatacaccagcaatttagacaaagccttaagcaaattttgtattattgttctcacttattattaataatgaagtagaagttacttaattgccagcaaataaatacgtgtcaaaaaagaatctgtattcagaccctgggtcaggaaattactgcccacttgtcaagttcagcccaccatctgtttgaagattatatgaagtttaaattctagtgtccataaataaagtttcagcggaacacaaaaaaaaaaaaaaaaaaaaaaaaaaaaaaaaaaaaaaaaaaaa

SEQ ID NO: 29624 - DNA, 3351 bp, Homo Sapiens; identical to SEQ ID NO: 25226

SEQ ID NO: 29625 - DNA, 2595 bp, Homo Sapiens
gcggcgcaggcggccgagcgggactggctgggtcggctgggctgctggtgcgaggagccgcggggctgtgctcggcggccaaggggacagcgcgtgggtggccgaggatgctgcggggcggtagctccggcgcccctcgctggtgactgctgcgccgtgcctcacacagccgaggcgggctcggcgcacagtcgctgctccgcgctcgcgcccggcggcgctccaggtgctgacagcgcgagagagcgcggccctcaggagcaaggcgaatgtatgacaacatgtccacaatggtgtacataaaggaagacaagttggagaagcttacacaggatgaaattatttctaagacaaagcaagtaattcaggggctggaagctttgaagaatgagcacaattccattttacaaagtttgctggagacactgaagtgtttgaagaaagatgatgaaagtaatttggtggaggagaaatcaaacatgatccggaagtcactggagatgttggagctcggcctgagtgaggcacaggttatgatggctttgtcaaatcacctgaatgctgtggagtccgagaagcagaaactgcgtgcgcaggttcgtcgtctgtgccaggagaatcagtggctacgggatgaactggccaacacgcagcagaaactgcagaagagtgagcagtctgtggctcaactggaggaggagaagaagcatctggagtttatgaatcagctaaaaaaatatgatgacgacatttccccatccgaggacaaagacactgattctaccaaagagcctctggatgaccttttccccaatgatgaagacgacccagggcaaggaatccagcagcagcacagcagtgcagccgcggctgcccagcagggcggctacgagatccccgcgcggctgcggacgctccacaacctggtgatccagtacgcctcgcaggggcgctacgaggtagctgtgcccctctgcaagcaggccctggaggacctggagaagacttcaggacacgaccacccggacgtggccaccatgctcaacatcctggccttggtgtacagggatcagaataaatacaaagatgcagctaacctactgaatgatgccttggctattcgtgagaaaactttgggcaaagatcatcctgcggtggcggcgactttgaataaccttgcagtcctttatggtaaaagagggaagtacaaagaagcagagccgttgtgtaaaagagctctggaaatccgagaaaaggttttggggaaggatcaccccgatgttgccaagcagttaaataacttggccttactgtgccagaaccagggcaagtatgaagaagtagaatattattatcaaagagccctcgagatctaccagacaaaactgggacctgatgaccccaacgtggctaagacgaaaaataacctggcatcctgctatttgaaacaaggaaagttcaagcaagcagaaacactgtacaaagagattctcactcgtgcacatgaaagggagtttggttctgtagatgatgaaaataaacccatctggatgcatgctgaagaaagagaagaatgcaaaggaaagcaaaaggatgggacatcttttggagagtatggcggctggtacaaagcctgcaaagttgatagtccaactgttacaaccactctaaaaaaccttggggcactttacagacgtcaaggcaaatttgaagctgcagaaacgttagaagaagctgctatgaggtctcgtaaacagggtcttgacaatgttcacaaacagagggtggcagaagtgctcaatgaccctgagaacatggagaagcgcaggagccgtgagagcctcaacgtggacgtggtcaagtacgagagtggccctgacggaggggaggaagtgagtatgagcgtagagtggaacgggatgaggaaaatgaagctcgggctggttaactgacttgctcagcgtcccatggcctagccgcccgtgactctcacactgtctcctgcatgacgggtggcgcctcccgcagcttcccttctctctccagtgctgcccgctgtgtctagcagcctctaggatcttgtcagagctgcacctctctgtgaactggccattcctttcggtgctgctgtcctttttgggggggttcctgatttctgtatacatgtagctttgccagatatgtacttagtaatataaactgtattaataaaatccatttactgtgtaatacacgagtttaaaaattaagagcgattagctgttcactttggtaacaggtagttaagtgtcacacaaggtgttgttgcaatggcatgacggtgacctgttgacgtaactaagccttagagcaaggcatgtgccgcacgtgctccgtggtacttagagccctgggggccccgctcggactccgggtctccctaggatatgccccagtagcatttgctgtgtagtctgtgtgtgaaatttgggcattctgcttttctctactaatcttgaagtgctcagtgatttgtgtatttgtgtctttctaacttctaataaactcactccgactgaaaaaaaaaaaaaaaaaaaaaaaaaaaaaaaaaaaaaa

SEQ ID NO: 29626 - DNA, 2869 bp, Homo Sapiens
ggtccacccagtgcttgcggcctcgcggccgggccggcctgggctgcaatcaatgcggctttgtctgggacgcccacatcccagaggccattcccgggtcggcaaatcggagcgcggccggggcgcgcgggggtgagataagcggccatgtgatcccacctgggctggaaggggaggggcgccaggtgaggcggcggccggcggggcgcgggcggccacgcggggctcctgcagcatggctgtcagcaggaaggactggtccgcgctgtccagccttgcccggcagaggactctggaggatgaggaggaacaggagcgcgagcgcaggcggcggcaccgcaacctgagctccaccacggacgatgaggctcccaggctcagccagaatggagaccggcaggcctctgcttctgagagactaccgagcgtggaagaagcagaggtgcccaagccactgcccccagcctccaaagatgaggacgaggacatccagagcatcctcagaacacggcaggagcggaggcagaggcggcaggtggtggaggctgcacaggcccccatccaggagaggctggaggcagaggaggggaggaacagcttgagccctgtgcaggccacacagaaacccctagtctccaagaaggaactggaaatcccacctcgccggagactgagtcgggaacagcggggcccctgggccctggaggaggagagcttggtgggcagggagccagaagagaggaagaaaggggttccagaaaagtccccagtcttggagaagtcctccatgccaaagaagacggcacctgaaaagagcctggtctccgataaaacctccatctctgagaaggtgctggcctcagagaagacatctctatcagagaagatagcagtgtcagagaaaagaaacagctcagagaagaagtctgttctagaaaaaaccagtgtctctgagaagtcgctggccccagggatggcactgggctcaggaaggaggctggtgtctgagaaagcttccatctttgagaaggcactggcctcagagaagagcccaactgcagatgctaagccggccccaaagagggccacagcctcagagcagcccctggcgcaggagccgccagcctctgggggaagcccagccaccaccaaggagcagagaggaagggccctccctgggaagaacctgccctctttggcaaagcagggggcttcagaccctccgactgtggcctcccgcctcccacccgtcacactccaggtgaaaatccccagcaaggaggaagaggcagatatgtcctcacccacacagcgaacctacagcagctccctcaaacgctccagccccaggaccatctcctttcggatgaaacccaagaaagaaaactcggaaacaaccctaactcgcagtgccagcatgaagctcccagacaacacagtgaagttgggagagaagctggagagataccacacggccatacggagatcagaatctgtcaagtctcggggtctgccttgcactgagttattcgtggctcctgtgggtgtagccagcaagcgccacctctttgagaaggaactggcgggccagagccgagcagaaccagcctccagccggaaggagaacttgaggctctcaggggttgtgacatcaaggctcaacctgtggatcagcaggacccaggaatctggagatcaggacccccaggaggcacagaaagcatcatctgcaaccgagaggactcagtggggacagaaatctgactcctcgctggacgctgaggtgtgacaagccccgccaagacagacctgcaagtcttcgtctcaagggacctccctcatgccaggcccctgcctctcacagcagcaccctttcctctcattgtccctgttccctttttgcctgtggatctgtttggccagggtccctggggtcaggaatatttgcaagactcagccagctccttcccagcccagcctcttggggctgggactttctcaccctgcggcaggcacaacagatgctgggacccagtctctgcccaggtcacagcacaagtgcacatcagcactatggggcctatgtcctgcccagagacctctgctccttcctgctcacatccacagtcagggcacggcgcccctcaagaactccagagtcacctgtctcatcggctcccagcaagtgcctctttgtctatgatgtcccccttctctgaggcctggacccacccatctttgtccctggggcctgctcccagccactgaggcccgctctggccaggggagaaggagctgccgtgcgtcttccctgtgccccgtctccctgcttggttctcccctcccttccctggccggctgccatggccaggagctaagtgcctttttgtgtgcaaccacttaccctttctctgaaaaacctgttctcaggaaggatctgataaactcatttactctcaggtgtaagagactgatgagaccttagaagcgaattcctctctggaggccttgctttctagcagaggtcacctgaagtgtgtgaggaggatcatcattttcctcatcccccctcttctcacattaaggtggtggcttgccactcagcagtcctagcttggtgactgggaactgccacatacagggccaggcctaccctccttccccacaagccccctccaacccccacccccatgctctggacctcatggctcctatgagcttggagcatggtgaaccatcagagaatctagaaccaaccaagctaggaacatcagcctggtgccctgttaaccccttaaagctgtggtttacaacttttcaaaaatttaaatcattagaaaaaaaaaaaaaaaaaaaaaaaaaaaaaaaa

SEQ ID NO: 29627 - DNA, 2472 bp, Homo Sapiens
gaagagaccatatttgttcgcagaggaagccgttgctttctgggatctggctacgccagaaaagacatcggctccaacaggggtgttccacagggtagctgggagttggaagagccaagaacgcctccgagctctggatttgagcttctctgcccatgggtgaagcgcccatgctcagcttgtgagcttcttcccgggagagcagccatggcactgaggaatgtgccctttcgctcagaggtcctgggctgggaccccgacagccttgctgactatttcaagaagctcaactataaggactgtgagaaggcagtgaagaagtaccacatcgatggggctcgcttcttgaacctgacagaaaatgacatccagaagttccccaagctccgggtgccgattctcagtaagttaagtcaggaaatcaacaagaacgaagagaggaggagcatcttcacacgcaaaccccaagtcccgcggtttcctgaagagacagaaagccacgaagaggacaatgggggctggtcgtcctttgaagaagacgattatgaaagtcccaatgatgaccaggatggggaggatgatggagactatgagtcccccaatgaggaggaagaggcacccgtggaagatgacgcggattatgagccgccaccctccaatgacgaggaagctctgcagaactccatcctgcctgccaagcctttccccaactccaactccatgtacatcgaccggcccccctctgggaaaaccccccagcagcctcctgtgcccccccagagaccgatggccgccctcccgcccccaccagccggccggaatcactcgccactgcccccaccccagaccaaccacgaagaacccagcagaagcagaaaccacaaaacggcaaagctccctgctccttcaatagacagaagcacgaaacctcccctagatcgttcattagctccgtttgatagagaacccttcacactaggaaagaaaccaccattttctgacaagccctcgattccagcgggaaggtcactcggggagcatttacccaagattcaaaagcctcctttaccaccgaccacggaaagacatgaaaggagcagccccctgccagggaagaagccacctgtgccaaagcatggatggggaccagacagaagagagaatgatgaagatgatgtgcatcagagacctttgccccagccagcactacttcctatgagctccaacactttcccttcaagatctactaagccaagtcccatgaaccctctcccatcctctcacatgcctggagcattctcagaaagtaacagcagttttccacagagtgcctccctgccaccatacttctctcaaggccctagcaacagaccacctatcagagccgaaggcagaaacttccccttgccacttccaaacaaacctcggcccccatcccccgcggaggaagagaattcattaaatgaagagtggtacgtttcttatattacccgaccagaggcagaagctgctcttagaaagataaaccaggatggcacatttctggtcagagacagctctaaaaaaacaacaaccaatccatatgtcctcatggtgttgtacaaagataaagtttacaacatccagatccgttatcagaaggaaagtcaagtttacttgttgggaactggactccgagggaaagaggactttctgtctgtgtcagatattattgactacttcaggaaaatgccacttctgctcattgatgggaaaaaccgaggttccagataccagtgcacattaacgcatgctgcagggtacccatagcaagttatagccgagcaaatgaaccgtcctcctgcctctgttgccaacacgagatcaatcagccttggtcaatggacaaacacttaggactgaactgaacccctccccatgaacacaagggttttatcctttcctttaaaaacagtgtttgaaatgaagactgtcaactatcccataatttatttattcttcttcaatgtttgtaaagtgcatgagtcatgttcacacttgaagtctagtagtgcactgtaataattcattttttaaaagattatttaatgcccatttcaaaatacagtagtttacacagctacagaaacaatttggggcaagttttaaaacactgaaacagtaatagttattggtgtcacataaaactgatttgttttttacagccaaacctctgtcagtcagaggcattcattagttttatacatgtaatttgaaaatcactaaacctcgttttctcagcagcaataatttaagaggcttcaaaaatataatttcactcttatttagtattttttcctgggggcatttttacgtaatttttttatgaaaagacaaatgcatgttgagataacttctgggattaaaatagtcttttgctttaaaaaaaaaaaaaaaaaaaaaaaaaaaaaaaaaaaaaaaaaaaaaaaaaaa

SEQ ID NO: 29628 - DNA, 5656 bp, Homo Sapiens
  misc_feature (4528)..(4528): n is a, c, g, or t
gtcacttttatttgggggtgtggacagctgctttcccaggggagtacttcttacagtgggatttcaagacaagatcggcctgaagaaaaattatatttgtatattttttaaaaagtgggaactttgaggctcagagacagagcagaagacagaacctggtcttctgattccctgtgttctgcttttttcattgttccactggacgctcatcagagggaagatctttttcctcaattgattccaacaatgtctcacccatcttggctgccacccaaaagcactggtgagcccctcggccatgtgcctgcacggatggagaccacccattcctttgggaaccccagcatttcagtgtctacacaacagccacccaaaaagtttgccccggtagttgctccaaaacctaagtacaacccatacaaacaacctggaggtgagggtgattttcttccacccccacctccacctctagatgattccagtgcccttccatctatctctggaaactttcctcctccaccacctcttgatgaagaggctttcaaagtacaggggaatcccggaggcaagacacttgaggagaggcgctccagcctggacgctgagattgactccttgaccagcatcttggctgaccttgagtgcagctccccctataagcctcggcctccacagagctccactggttcaacagcctctcctccagtttcgaccccagtcacaggacacaagagaatggtcatcccgaaccaaccccctctaacagcaaccaagaagtctacattgaaaccacagcctgcaccccaggctggacccatccctgtggctccaatcggaacactcaaaccccagcctcagccagtcccagcctcctacaccacggcctccacttcttcaaggcctacctttaatgtgcaggtgaagtcagcccagcccagccctcattatatggctgccccttcatcaggacaaatttatggctcagggccccagggctataacactcagccagttcctgtctctgggcagtgtccacctccttcaacacggggaggcatggattatgcctacattccaccaccaggacttcagccggagcctgggtatgggtatgcccccaaccagggacgctattatgaaggctactatgcagcagggccaggctatgggggcagaaatgactctgaccctacctatggtcaacaaggtcacccaaatacctggaaacgggaaccagggtacactcctcctggagcagggaaccagaaccctcctgggatgtatccagtcactggtcccaagaagacctatatcacagatcctgtttcagccccctgtgcgccaccattgcagccaaagggtggccattcagggcaactggggccttcgtcagttgccccttcattccgcccagaggatgagcttgagcacctgaccaaaaagatgctgtatgacatggaaaatccacctgctgacgaatactttggccgctgtgctcgctgtggagaaaacgtagttggggaaggtacaggatgcactgccatggatcaggtcttccacgtggattgttttacctgcatcatctgcaacaacaagctccgagggcagccattctatgctgtggaaaagaaagcatactgcgagccctgctacattaatactctggagcagtgcaatgtgtgttccaagcccatcatggagcggattctccgagccaccgggaaggcctatcatcctcactgtttcacctgcgtgatgtgccaccgcagcctggatgggatcccattcactgtggatgctggcgggctcattcactgcattgaggacttccacaagaaatttgccccgcggtgttctgtgtgcaaggagcctattatgccagccccgggccaggaggagactgtccgtattgtggctttggatcgagatttccatgttcactgctaccgatgcgaggattgcggtggtctcctgtctgaaggagataaccaaggctgctaccccttggatgggcacatcctctgcaagacctgcaactctgcccgcatcagggtgttgaccgccaaggcgagcactgacctttagattcagtcacctgttcagccggcactgagaagaacgaacacaagaaaaagataagaaatactagagtaaaggccatcaaactacgcgatagtctctgttcttcatctgctattaaccttgccttagaaacacataaattatgagatttttttttaaaagttgttaccaaatacacatttcacattgaatcatgtaggatcttgatgggcctttgttcccaaggacttccacatttttgcacagattatgctccatcccttcacttctgcattcctgtaacttttaatccctatgtttgtctcacttttcatctggttgaatggcttttcttagtgtggtatttgctgtcacatagttttttcctgggtgagtctgccaactcacaggtgcttttaggcttgaaatctccatcctatcatttccgttttgcctgtgactgtaaagagtagccattcttttcccatgtattgaagaggatattcttctcttgctttatactactcacgtccttggggagggaaatgcacaatttttttttgttaggctgtaaagaatttaagctgtaaattacataagttagaacaagcccaaatttaatttgcaaccatcagaattcagaatctatagtgaccagtgatcaaggctaattggaaaagagttatcggcccatagctaataagtagtgacagacaaccaagcttcaatatttttctaaagaaattacaggtgggatatgctagaaaaggcattttggggttatgtttaaaaaaacattattgtcccacaatattaccttaagatttttcttttccgcactacctgaacattgtaatacagacaaacttgatttcttctagaagataacattttcaatactgtcccacttctcatcttaaaaatattgtcatgtttattctaatatccaacgcaactatcaaaattgcctttttctctagaggatgaaggctgtgaaaaaaccgttcaaattctcttctttttcttttttattaccaggtccattttgcctgacaattgcaaatcagagcatacaaaataaaactgtgcagttttgtttggtttactttcaaaagagtagaaagcttgaaaagattctgaaaccacagtttcattattctcataatccttctgcaactgaaattacatattgcaggagacattttcatatcatcaatgtgacatttacaccacactttcaaagacaatcactgaaacaaaaattgtctttatgagctaaaaatatgcagaatctctgcctagaatctttattcaaacttttattagccagtgaaacacttgcttgccaactgccaagccatacttattaagttcgaacatgtttcacttaaggagagacacctagcttagtcatggcaagttgccattttgtaaactaaggattttggactgagatttcttaaatctttcttcaaatctcccacaagtatatacttttaaattatggagtattttaagtctacaaaaaggtataaataataatataatgaattcctatatacctaatacccagtttaagacaccaaatataacaagtataattacatcctccaatgtaccgtttccttattccacagatatctttttcattattgtgaagtgatgttcagatttctagtttttttttctagtttttaattttaacatcagaactgaaataaaaaattatggatacgtgttttgaattgcaaactattcctcaggaattccaattaaatttattttacttgaataggaatgatcataaaagtgattctttttttgtgactagaaattcttaagccgatggtcactatagctcatccttaatgtatggctcatttgcttttgtcactaaacggttttgtgttagaaccaccaaaattatagcttttaagagcttcctttgaccactgtctttttcttaccctacttctcttatctttgatcgtatatttctcataatgtgaaatatgatgagattcacttaggggcagcatgttagttttgggaggcaatgtcaactgtgtctctgaattcctgtcttccaaattgaagccagaccatgctgatgacctcaagtagcactgactatttgacaatagggctgataatgtaatcggcttgaattttgacttagtaactttttatgtaatactttcggagaaattctctttaggacaaagcagagagtccaatttattgagggatagattgtatctcttaaagtggtcatattattattaattttgcaaaaagaagaagaatttattgaatatttatactataaaatgcagtaacattctacttgcttattacatttaaacccttgtgtaaccgaatgtttacatgtcaagaggaaaagctgtaagaaaatgctgtcacagacccatccctgtggcatcgtcagcaggatactgcttgcttncccctttattatgcattcttataacataacctcagagtatctttaccaaaggtttttaaagtaaatctctttttaagatagacttattcttttataataatgaatgtgcactcatacatatgtagaaacatttagatttagagttttttttttctttcacaaggtataataaggaaaggatcctacaatattttattctagggtttcttaaatatatgatttatattactgtcttttctattaatcatttgatttaaacaatgccaagtcactcttttttagttgcatgaaattttgcctgcaacagagagaaaaagattgtattactttaatgattataatcatactgtctgctgatataatatcataattgttgtggtttaaatacataaatagtagaaaaatcagagtctataacagaaagtttgtaaaaatatactgattttgaaaagtatcaggaatataaatatttggtaattctgtgtaacaagagagacatggaaaaggaaaaaaatccactatatcatgggctctgcagaacatatcaaaataggatttcttaaatttttcaacccccagaccatactgactcaacatggagtctcactggccaagaaaattgcctttaaaactcgaaaataaggccaggtgtggtgactcacacttgtaatcccagcaatttgggaggctgagacaggaggattgcctgaggccaggagtttgacaccagcctgggcaacatagtgagaccttgtctctacaaaaaataaaataaaataaaaaaccaaattagccagacatggtggcatgcgcttgtttaaaaaaacaaataaataaataatcgactcaaaaataagtcatgtgtcccagcataaggcatcaggttgttagatgctggcatctctgcagctcaaagatgtgggttctttttcttgtcattaacacattgttatttctgtaggaccaacttctctgatcaaaattacttttctgggtatgtgctgattaagggggtggacttatcaacactataattgttccctatgaaagattccacagagatgtttatggtgaggtttaaaggatatgaaactctacatttaaaacaagtattttatatttgggcac

SEQ ID NO: 29629 - DNA, 1510 bp, Homo Sapiens
cagcctggcccttatctgcactgggccagcatcctccggccgctgcgccgccaggggtgagagggaggaaaccgggccgccgggggcggggagaaggcgggccggcccgggagccgctcactttccctgggggggacctacgcggagacctcggctatcctggccttccgaggcccacgaggaggcgcggcccaacgccggggcctggagcattgaggccggaccctcgcgagacagcagagcctggcctgacgctggaaaccacaccctggcccagactgccagccctgacgggacagagccagggcactcaccaggctgcaagaacagtgctggggtgagtacccccacgtcggggtccatgtgcccgcctcaggcacaggcagaggtgggccccaccatgactgagaaggcagagatggtgtgtgcccccagcccagcgcctgccccaccccctaagcctgcctcgcctgggcccccgcaggtggaggaggtgggccaccgaggaggctcctcgccccccaggctgccacctggtgtaccagtgatcagcctgggccacagcaggcccccaggggtagccatgcccaccacagagctgggcactctgcggcccccgctgctgcaactctccaccctgggaactgccccgcccactttggccctgcactaccaccctcaccccttcctcaacagtgtctacattgggccagcaggaccttttagcatcttccctagcagccggttgaagcggagaccaagccactgtgagctggacctggctgaggggcaccagccccagaaggtggcccggcgcgtgttcaccaacagccgggagcgctggcggcagcagaacgttaacggcgccttcgccgagctgaggaagctgctgccgacgcacccgcccgaccggaagctgagcaagaacgaggtgctccgcctagccatgaagtacatcggcttcctggtgcggctgctgcgcgaccaagccgcagctctggccgcaggccccacccctcccgggcctcgcaaacggccggtgcaccgggtcccagacgacggcgcccgccggggatccggacgcagggccgaggcggcagcgcgctcgcagcccgcgcccccggccgaccccgacggcagccccggtggagcggcccggcccatcaagatggagcaaaccgctttgagcccagaggtgcggtgaccgcacgcggcagcacctctgagccggagggcaccagggactcggcccagggccgtcaaggaaagggcagtggacgtgctgcgcatgttcgggagcgaactcccccgaagaaggaccagtgaagacgtcaggggcaaggtctcgggggtccggaagggtgatcatcgacccccaagggacccgcagacccttaaaaaaatcacccacaaccctctggaagtggccttgcccggtccccttcccaggggcgaggtcggcaaagcaacatggcagagcagtcataggaaaaaaaaaaaaaaaaaaaaa

SEQ ID NO: 29630 - DNA, 2169 bp, Homo Sapiens
gtccccgccgtgcgcccttcgccgctgagctcgcagcctccggcgcccacctccacctccagtgtcccgcctcgggccgtcgccctccagcggctcgcgagcgtgggagacgtacctgggcaggcactgtccagcccaggcccaggcacagccgtgaggggcgaggcacggggacatcctggcggccaccatggtggccacgtgcctgcaggtggtgggcttcgtcacgagcttcgtgggctggatcggggtcatcgtgaccacctccaccaatgactgggtggtgacctgcggctacaccatccccacctgccgcaagctggatgagctgggctccaaggggctgtgggccgactgcgtcatggccacggggctgtaccactgcaagcccctggtggacatcctcatcctgccgggctacgtgcaggcctgccgcgccctgatgattgctgcctcggtcctgggtctgccggccattttactgctgctgactgttcttccctgcatccggatgggccaggagcccggtgtggctaagtacaggcgggcccagctggctggtgttttgctcattctgctggctctctgcgcccttgttgccaccatctggttccctgtgtgcgcccaccgtgagaccaccatcgtgagctttggctactccctgtatgcaggctggattggtgctgtgctgtgcctcgtgggtggctgtgtcatcctctgctgcgctggagatgcccaggcctttggtgaaaaccgtttctactacactgcgggctctagctccccgactcatgcgaagagtgcccacgtataagagggctgcccggctgcccacagaggtgctgtagatgctgggcccagggccctaggtttgctcgtcacagtgtggggaagcccattcctctgccaggctctaaagccaaaggtctagaaaagcatcctgtctggcattttgtagtcttaacttctccccatttcccccatcttttggttgccttaaaagaaatctctagctcagataatgcccagacatttttttcccttggtgttgcccctattagctcttttcttgggcattcttttgctgtttattaaaaatatattatatatattttgtttctttaaatttcaaatgttttgcaaacatcactgagttaggtgggggtggggaagagaaatacaagatacttttttttttttttttttttttttttttttaaatagggcctcactctgttgctcaggctggagtgcggtggtgtgatctcggctcatgtagcctcaacctccccggctcaagtgatcctcctgcctcagcctcccaagtagctgggactacaggcgttcactactacacccagctaatttttaagttttttatagagatgagggctccctatgttgcccaggttggtctcgaactcctggactcaaagtatcctcccgcctcggcctcccaaagtgttgggattataggagtgagccaccacaccaggccaagatgcttttcaaactgatacagatgacaatgggagcctcataaagatggcttttgtttcttcccttcaaggtcatttacttgtacgagacagaaaaagatagcattggggacatgggatgggggagggagggcaatagtggaacgaactttccatgggaaactttcccttttgtaagttgagggccaggggtagggatattttttagtttgtgattttacatttatctgtacatactttttcaagattgatcatttttataaccatggttttcctgaaatcctcaattcatcaatatgaaggaaatgaaccacatagactttatgcaataaataacagtgcaagtgagtataactctaactgatgttccacaaaacatttttgatttcaggtttgtatgatgtagtttttaatcgtacattttcatatgcttcaaactaacacatttttaaagctttcccccacttttctctctatttgtattgttagccatcttgaagtgatgttgtttaacataaattgtactgttgaatttggctttacgggtgtaaacactgatggtatatcagtatctgagaccccaaactctccaaatactgatggtgcattttattcttgaagtgaaatctgtgcaataaaataacagactgtctgcaaaaaaaaaaaaaaa

SEQ ID NO: 29631 - DNA, 3756 bp, Homo Sapiens; identical to SEQ ID NO: 22764

SEQ ID NO: 29632 - DNA, 2221 bp, Homo Sapiens
cacgagggcccgggccgcgagcagccgcggctgtcccggtcgccacccttagcagcggtcgaggtcggtgccgaagcggtgttccccgccttagccgctggcgcctcccaagagagcggccggtgggccctcgtcctgtcagtggcgtcggaggccggcgctgcggtggccgcgcccttctggtgctcggacaccgctgaggagccggggccgggcacggctggctgacggctccgggcagctaaggctgcccgaggagaaggcggcggccgcggcgtaggcgcacgtccggcgggctcctggagcctggaggaggccgaggggaccatgtccgggaggcgcttccacctctccaccaccgaccgcgtcatcaaagctgtcccctttcctccaacccaacggcttactttcaaggaagtatttgagaatgggaaacctaaagttgatgttttaaaaaaccatttggtaaaggaaggacgactggaagaggaagtagccttaaagataatcaatgatggggctgccatcctgaggcaagagaagactatgatagaagtagatgctccaatcacagtatgtggtgatattcatggacaattctttgacctaatgaagttatttgaagttggaggatcacctagtaacacacgctacctctttctgggtgactatgtggacagaggctatttcagtatagagtgtgtgctgtatttatggagtttaaagattaatcatcccaaaacattgtttctgcttcggggaaatcatgaatgcaggcatcttacagactatttcaccttcaaacaggaatgtcgaatcaaatattcggaacaggtgtatgatgcctgtatggagacatttgactgtcttcctcttgctgccctcttaaaccagcagtttctctgtgtacatggaggaatgtcacctgaaattacttctttagatgacattaggaaattagacaggtttacggaacctcccgcctttggacctgtgtgtgacctgctttggtctgatccctcagaggattatggcaatgagaagaccttggagcactatacccacaacactgtccgagggtgctcttatttctacagttaccctgcagtttgtgaatttttgcagaacaataatttactatcaattatcagagcccatgaagcccaagatgctgggtatcgaatgtacaggaagagccaagccacaggctttccatcacttattacaattttctctgcccccaattacctagatgtctataacaataaagctgctgtgttgaaatatgaaaacaatgtcatgaatatcaggcagtttaactgttctccacacccctactggcttccaaactttatggatgttttcacatggtctttgccttttgttggggaaaaagtcacagagatgctggtaaatgtgctcaacatatgctctgatgacgaactgatttctgatgatgaagcagaaggaagcactacagttcgtaaggagatcatcaggaataagatcagagccattgggaagatggcacgggtcttttcaattcttcggcaagaaagtgagagtgtgctgactctcaagggcctgactcccacaggcacactccctctgggcgtcctctcaggaggcaagcagactatcgagacagccacagtagaagcggtagaggcccgggaagccatcagagggttctcgcttcagcacaagatccggagttttgaagaagcgcgaggtctggaccgaattaatgagcgaatgccaccccgaaaggatagcatacacgctggtgggccaatgaaatctgtaacctcagcacactcacatgctgcgcacaggagcgaccaagggaagaaagcccattcatgacttagagtcctgccgtggctcaggtggatctaaaactcaagaacaaattctatttatttattattggaaaatgaaaagcaactcaaaacaacttcaacctggaggtgcatttataattcagtctgcatttattctgtaaaaaggtgactgttttataaattcttttaatttatgttcaatatatataaaaagtgcatctgttttgtttttcccttttttctccataattttaagaaatgaatctgattgttgtcaacacatttgtgaagtcttgtgctataaaggggaacttcccctaataaaagggccttggaaacctcaaaaaaaaaaaaaaaaaaaaaaaaaaaaaaaaaaa

SEQ ID NO: 29633 - DNA, 4442 bp, Homo Sapiens
gaccactgtgagcccgcggcgtgaggcgtgggaggaagcgcggctgctgtcgcccagcgccgccccgtcgtcgtctgccttcgcttcacggcgccgagccgcggtccgaagtcttgctgtgtcacccaggctgccaggctggagtggagtggcatgatctcggctgactgcaacctctgcctcccagaatatgacagatacctagcatctagcaaaataatggcagctgcttaccttgaccccaacttgaatcacacaccaaattcgagtactaagactcacctgggtactggtatggaacgttctcctggtgcaatggagcgagtattaaaggtctttcattattttgaaagcaatagtgagccaaccacctgggccagtattatcaggcatggagatgctactgatgtcaggggcatcattcagaagatagtggacagtcacaaagtaaagcatgtggcctgctatggattccgcctcagtcacctgcggtcagaggaggttcactggcttcacgtggatatgggcgtctccagtgtgagggagaagtatgagcttgctcacccaccagaggagtggaaatatgaattgagaattcgttatttgccaaaaggatttctaaaccagtttactgaagataagccaactttgaatttcttctatcaacaggtgaagagcgattatatgttagagatagctgatcaagtggaccaggaaattgctttgaagttgggttgtctagaaatacggcgatcatactgggagatgcggggcaatgcactagaaaagaagtctaactatgaagtattagaaaaagatgttggtttaaagcgattttttcctaagagtttactggattctgtcaaggccaaaacactaagaaaactgatccaacaaacatttagacaatttgccaaccttaatagagaagaaagtattctgaaattctttgagatcctgtctccagtctacagatttgataaggaatgcttcaagtgtgctcttggttcaagctggattatttcagtggaactggcaatcggcccagaagaaggaatcagttacctaacggacaagggctgcaatcccacacatcttgctgacttcactcaagtgcaaaccattcagtattcaaacagtgaagacaaggacagaaaaggaatgctacaactaaaaatagcaggtgcacccgagcctctgacagtgacggcaccatccctaaccattgcggagaatatggctgacctaatagatgggtactgccggctggtgaatggaacctcgcagtcatttatcatcagacctcagaaagaaggtgaacgggctttgccatcaataccaaagttggccaacagcgaaaagcaaggcatgcggacacacgccgtctctgtgtcagaaacagatgattatgctgagattatagatgaagaagatacttacaccatgccctcaaccagggattatgagattcaaagagaaagaatagaacttggacgatgtattggagaaggccaatttggagatgtacatcaaggcatttatatgagtccagagaatccagctttggcggttgcaattaaaacatgtaaaaactgtacttcggacagcgtgagagagaaatttcttcaagaagccttaacaatgcgtcagtttgaccatcctcatattgtgaagctgattggagtcatcacagagaatcctgtctggataatcatggagctgtgcacacttggagagctgaggtcatttttgcaagtaaggaaatacagtttggatctagcatctttgatcctgtatgcctatcagcttagtacagctcttgcatatctagagagcaaaagatttgtacacagggacattgctgctcggaatgttctggtgtcctcaaatgattgtgtaaaattaggagactttggattatcccgatatatggaagatagtacttactacaaagcttccaaaggaaaattgcctattaaatggatggctccagagtcaatcaattttcgacgttttacctcagctagtgacgtatggatgtttggtgtgtgtatgtgggagatactgatgcatggtgtgaagccttttcaaggagtgaagaacaatgatgtaatcggtcgaattgaaaatggggaaagattaccaatgcctccaaattgtcctcctaccctctacagccttatgacgaaatgctgggcctatgaccccagcaggcggcccaggtttactgaacttaaagctcagctcagcacaatcctggaggaagagaaggctcagcaagaagagcgcatgaggatggagtccagaagacaggccacagtgtcctgggactccggagggtctgatgaagcaccgcccaagcccagcagaccgggttatcccagtccgaggtccagcgaaggattttatcccagcccacagcacatggtacaaaccaatcattaccaggtttctggctaccctggttcacatggaatcacagccatggctggcagcatctatccaggtcaggcatctcttttggaccaaacagattcatggaatcatagacctcaggagatagcaatgtggcagcccaatgtggaggactctacagtattggacctgcgagggattgggcaagtgttgccaacccatctgatggaagagcgtctaatccgacagcaacaggaaatggaagaagatcagcgctggctggaaaaagaggaaagatttctgaaacctgatgtgagactctctcgaggcagtattgacagggaggatggaagtcttcagggtccgattggaaaccaacatatatatcagcctgtgggtaaaccagatcctgcagctccaccaaagaaaccgcctcgccctggagctcccggtcatctgggaagccttgccagcctcagcagccctgctgacagctacaacgagggtgtcaagcttcagccccaggaaatcagcccccctcctactgccaacctggaccggtcgaatgataaggtgtacgagaatgtgacgggcctggtgaaagctgtcatcgagatgtccagtaaaatccagccagccccaccagaggagtatgtccctatggtgaaggaagtcggcttggccctgaggacattattggccactgtggatgagaccattcccctcctaccagccagcacccaccgagagattgagatggcacagaagctattgaactctgacctgggtgagctcatcaacaagatgaaactggcccagcagtatgtcatgaccagcctccagcaagagtacaaaaagcaaatgctgactgctgctcacgccctggctgtggatgccaaaaacttactcgatgtcattgaccaagcaagactgaaaatgcttgggcagacgagaccacactgagcctcccctaggagcacgtcttgctaccctcttttgaagatgttctctagccttccaccagcagcgaggaattaaccctgtgtcctcagtcgccagcacttacagctccaacttttttgaatgaccatctggttgaaaaatctttctcatataagtttaaccacactttgatttgggttcattttttgttttgtttttttcaatcatgatattcagaaaaatccaggatccaaaatgtggcgtttttctaagaatgaaaattatatgtaagcttttaagcatcatgaagaacaatttatgttcacattaagatacgttctaaagggggatggccaaggggtgacatcttaattcctaaactaccttagctgcatagtggaagaggagagcatgaagcaaagaattccaggaaacccaagaggctgagaattcttttgtctaccatagaattattatccagactggaatttttgtttgttagaacacccttcagttgcaatatgctaatcccactttacaaagaatataaaagctatattttgaagacttgagttatttcagaaaaaactacagccctttttgtcttacctgccttttactttcgtgtggatatgtgaagcattgggtcgggaactagctgtagaacacaactaaaaactcatgtcttttttcacagaataatgtgccagttttttgtagcaatgttatttctcttggaagcagaaatgctttgtaccagagcacctccaaactgcattgaggagaagttccagaaccatcccctttttccatttttatataatttataaagaaagattaaagccatgttgactattttacagccactggagttaactaacccttccttgtatctgtcttcccaggagagaatgaagcaaaacaggaatttggttttcttttgatgtccagttacaccatccattctgttaattttgaaaaaatataccctccctttagtttgttgggggatataaattattctcaggaagaatataatgaactgtacagttactttgacctattaaaaaggtgttaccagtaaa

SEQ ID NO: 29634 - DNA, 3663 bp, Homo Sapiens
ggcggcggcggcggcgcggactgggtgcgcggcgcagcgtcctgtgttggaatgtgcggctgccgcgagctcgcggcgcagcagcggagcgagcgccgccgaggcccggggccccagaccctggcggcggctgcggcagccgagacggcagggcgaggcccggaggcctgagcaccctctgcagccccactcctgggccttcttggtccacgacggccccagcacccaactttaccaccctcccccacctctcccccgaaactccagcaacaaagaaaagtagtcggagaaggagcggcgactcagggtcgcccgcccctcctcaccgaggaaggccgaatacagttatggccacccaggtaatggggcagtcttctggaggaggagggctgtttaccagcagtggcaacattggaatggccctgcctaacgacatgtatgacttgcatgacctttccaaagctgaactggccgcacctcagcttattatgctggcaaatgtggccttaactggggaagtaaatggcagctgctgtgattacctggtcggtgaagaaagacagatggcagaactgatgccggttggggataacaacttttcagatagtgaagaaggagaaggacttgaagagtctgctgatataaaaggtgaacctcatggactggaaaacatggaactgagaagtttggaactcagcgtcgtagaacctcagcctgtatttgaggcatcaggtgctccagatatttacagttcaaataaagatcttccccctgaaacacctggagcggaggacaaaggcaagagctcgaagaccaaaccctttcgctgtaagccatgccaatatgaagcagaatctgaagaacagtttgtgcatcacatcagagttcacagtgctaagaaattttttgtggaagagagtgcagagaagcaggcaaaagccagggaatctggctcttccactgcagaagagggagatttctccaagggccccattcgctgtgaccgctgcggctacaatactaatcgatatgatcactatacagcacacctgaaacaccacaccagagctggggataatgagcgagtctacaagtgtatcatttgcacatacacaacagtgagcgagtatcactggaggaaacatttaagaaaccattttccaaggaaagtatacacatgtggaaaatgcaactatttttcagacagaaaaaacaattatgttcagcatgttagaactcatacaggagaacgcccatataaatgtgaactttgtccttactcaagttctcagaagactcatctaactagacatatgcgtactcattcaggtgagaagccatttaaatgtgatcagtgcagttatgtggcctctaatcaacatgaagtaacccgccatgcaagacaggttcacaatgggcctaaacctcttaattgcccacactgtgattacaaaacagcagatagaagcaacttcaaaaaacatgtagagctacatgtgaacccacggcagttcaattgccctgtatgtgactatgcagcttccaagaagtgtaatctacagtatcacttcaaatctaagcatcctacttgtcctaataaaacaatggatgtctcaaaagtgaaactaaagaaaaccaaaaaacgagaggctgacttgcctgataatattaccaatgaaaaaacagaaatagaacaaacaaaaataaaaggggatgtggctggaaagaaaaatgaaaagtccgtcaaagcagagaaaagagatgtctcaaaagagaaaaagccttctaataatgtgtcagtgatccaggtgactaccagaactcgaaaatcagtaacagaggtgaaagagatggatgtgcatacaggaagcaattcagaaaaattcagtaaaactaagaaaagcaaaaggaagctggaagttgacagccattctttacatggtcctgtgaatgatgaggaatcttcaacaaaaaagaaaaagaaggtagaaagcaaatccaaaaataatagtcaggaagtgccaaagggtgacagcaaagtggaggagaataaaaagcaaaatacttgcatgaaaaaaagtacaaagaagaaaactctgaaaaataaatcaagtaagaaaagcagtaagcctcctcagaaggaacctgttgagaagggatctgctcagatggaccctcctcagatggggcctgctcccacagaggcggttcagaaggggcccgttcaggtggagctgccacctcccatggagcatgctcagatggagggtgcccagatacggcctgctcctgacgagcctgttcagatggaggtggttcaggaggggcctgctcagaaggagctgctgcctcccgtggagcctgctcagatggtgggtgcccaaattgtacttgctcacatggagctgcctcctcccatggagactgctcagacggaggttgcccaaatggggcctgctcccatggaacctgctcagatggaggttgcccaggtagaatctgctcccatgcaggtggtccagaaggagcctgttcagatggagctgtctcctcccatggaggtggtccagaaggagcctgttcagatagagctgtctcctcccatggaggtggtccagaaggaacctgttaagatagagctgtctcctcccatagaggtggtccagaaggagcctgttcagatggagttgtctcctcccatgggggtggttcagaaggagcctgctcagagggagccacctcctcccagagagcctccccttcacatggagccaatttccaaaaagcctcctctccgaaaagataaaaaggaaaagtctaacatgcagagtgaaagggcacggaaggagcaagtccttattgaagttggcttagtgcctgttaaagatagctggcttctaaaggaaagtgtaagcacagaggatctctcaccaccatcaccaccactgccaaaggaaaatttaagagaagaggcatcaggagaccaaaaattactcaacacaggtgaaggaaataaagaagcccctcttcagaaagtaggagcagaagaggcagatgagagcctacctggtcttgctgctaatatcaacgaatctacccatatttcatcctctggacaaaacttgaatacgccagagggtgaaactttaaatggtaaacatcagactgacagtatagtttgtgaaatgaaaatggacactgatcagaacacaagagagaatctcactggtataaattcaacagttgaagaaccagtttcaccaatgcttcccccttcagcagtagaagaacgtgaagcagtgtccaaaactgcactggcatcacctcctgctacaatggcagcaaatgagtctcaggaaattgatgaagatgaaggcatccacagccatgaaggaagtgacctaagtgacaacatgtcagagggtagtgatgattctggattgcatggggctcggccagttccacaagaatctagcagaaaaaatgcaaaggaagccttggcagtcaaagcggctaagggagattttgtttgtatcttctgtgatcgttctttcagaaagggaaaagattacagcaaacacctcaatcgccatttggttaatgtgtactatcttgaagaagcagctcaagggcaggagtaatgaaactttgaacaaggtttca

SEQ ID NO: 29635 - DNA, 3772 bp, Homo Sapiens
gggctgaagacaacttggattgcgaggctagggcttggggagtcgtgcatcccgttccgggcctccgcagcccaacatgggccccgggttccaaagtttgcgaagttgggcgccgaggggccggggcgcgcggagcgtccgggggggcccgggcccggattctctgggcgcacaggtcgcctgagccgcctccgcggccgccgaggtcgtgcgtgtggccggggggctccgaggagcaggcgggggcgccggggcttttgctgagttggcggggttggccatggccgctgcccgcccagcgcgggggccggagctcccgctcctggggctgctgctgctgctgctgctgggggacccgggccggggggcggcctcgagcgggaacgcgaccgggcctgggcctcggagcgcgggcgggagcgcgaggaggagcgcggcggtgactggccctccgccgccgctgagccactgcggccgggctgccccctgcgagccgctgcgctacaacgtgtgcctgggctcggtgctgccctacggggccacctccacactgctggccggagactcggactcccaggaggaagcgcacggcaagctcgtgctctggtcgggcctccggaatgccccccgctgctgggcagtgatccagcccctgctgtgtgccgtatacatgcccaagtgtgagaatgaccgggtggagctgcccagccgtaccctctgccaggccacccgaggcccctgtgccatcgtggagagggagcggggctggcctgacttcctgcgctgcactcctgaccgcttccctgaaggctgcacgaatgaggtgcagaacatcaagttcaacagttcaggccagtgcgaagtgcccttggttcggacagacaaccccaagagctggtacgaggacgtggagggctgcggcatccagtgccagaacccgctcttcacagaggctgagcaccaggacatgcacagctacatcgcggccttcggggccgtcacgggcctctgcacgctcttcaccctggccacattcgtggctgactggcggaactcgaatcgctaccctgctgttattctcttctacgtcaatgcgtgcttctttgtgggcagcattggctggctggcccagttcatggatggtgcccgccgagagatcgtctgccgtgcagatggcaccatgaggcttggggagcccacctccaatgagactctgtcctgcgtcatcatctttgtcatcgtgtactacgccctgatggctggtgtggtttggtttgtggtcctcacctatgcctggcacacttccttcaaagccctgggcaccacctaccagcctctctcgggcaagacctcctacttccacctgctcacctggtcactcccctttgtcctcactgtggcaatccttgctgtggcgcaggtggatggggactctgtgagtggcatttgttttgtgggctacaagaactaccgataccgtgcgggcttcgtgctggccccaatcggcctggtgctcatcgtgggaggctacttcctcatccgaggagtcatgactctgttctccatcaagagcaaccaccccgggctgctgagtgagaaggctgccagcaagatcaacgagaccatgctgcgcctgggcatttttggcttcctggcctttggctttgtgctcattaccttcagctgccacttctacgacttcttcaaccaggctgagtgggagcgcagcttccgggactatgtgctatgtcaggccaatgtgaccatcgggctgcccaccaagcagcccatccctgactgtgagatcaagaatcgcccgagccttctggtggagaagatcaacctgtttgccatgtttggaactggcatcgccatgagcacctgggtctggaccaaggccacgctgctcatctggaggcgtacctggtgcaggttgactgggcagagtgacgatgagccaaagcggatcaagaagagcaagatgattgccaaggccttctctaagcggcacgagctcctgcagaacccaggccaggagctgtccttcagcatgcacactgtgtcccacgacgggcccgtggcgggcttggcctttgacctcaatgagccctcagctgatgtctcctctgcctgggcccagcatgtcaccaagatggtggctcggagaggagccatactgccccaggatatttctgtcacccctgtggcaactccagtgcccccagaggaacaagccaacctgtggctggttgaggcagagatctccccagagctgcagaagcgcctgggccggaagaagaagaggaggaagaggaagaaggaggtgtgcccgctggcgccgccccctgagcttcacccccctgcccctgcccccagtaccattcctcgactgcctcagctgccccggcagaaatgcctggtggctgcaggtgcctggggagctggggactcttgccgacagggagcgtggaccctggtctccaacccattctgcccagagcccagtccccctcaggatccatttctgcccagtgcaccggcccccgtggcatgggctcatggccgccgacagggcctggggcctattcactcccgcaccaacctgatggacacagaactcatggatgcagactcggacttctgagcctgcagagcaggacctgggacaggaaagagaggaaccaataccttcaaggctcttcttcctcaccgagcatgcttccctaggatcccgtcttccagagaacctgtgggctgactgccctccgaagagagttctggatgtctggctcaaagcagcaggactgtgggaaagagcctaacatctccatggggaggcctcaccccagggacagggccctggagctcagggtccttgtttctgccctgccagctgcagcctggttggcagcatctgctccatcggggcagggggtatgcagagcttgtggtggggcaggaacggtggaggcagaggtgacagttcccagagtgggctttggtggccagggaggcagcctagcctatgtctggcagatgagggctggctgccgttttctgggctgatgggtgccctttcctggcagtctcagtccaaaagtgttgactgtgtcattagtcctttgtctaagtagggccagggcaccgtattcctctcccaggtgtttgtggggctggaaggacctgctcccacaggggccatgtcctctcttaataggtggcactaccccaaacccatcttttgttctcctatatcctccttctcctgttccatttcagttcagtttcagcggtgccaacctctttgcgtttcctttttgttgatgaggacccagagctgctgcacacactcacctctaaccccctcccctcgctgctgggccccatctccacaggagagactggttcggctctagggcctcagtctggagtgggataggagcagtgagtgacaaagcctctgaaagatgcatcatctcttcctcacacccatttagtgggggatgggtcctctagacttgaggggctaccctgggaagctgccgtagcttcagccaggcaagaaagcttccttcaacctgcatagccggtgggtgaggagattcccaccttccatagcctccaaacatgttcccaaggccccactttcaagaatcagacagcaggaagccatagatgctggctgggttccaggttatggggagaagaaatacagtcaataaaaggtttttgtataaaaaaaaaaaaaaaaaaaaaaaaaaaaaaaaaaaaa

SEQ ID NO: 29636 - DNA, 2919 bp, Homo Sapiens
tggatgggcggcaacatgtctgtggctttcgcggccccgaggcagcgaggcaagggggagatcactcccgctgcgattcagaagatgttggatgacaataaccatcttattcagtgtataatggactctcagaataaaggaaagacctcagagtgttctcagtatcagcagatgttgcacacaaacttggtataccttgctacaatagcagattctaatcaaaatatgcagtctcttttaccagcaccacccacacagaatatgcctatgggtcctggagggatgaatcagagcggccctcccccacctccacgctctcacaacatgccttcagatggaatggtaggtgggggtcctcctgcaccgcacatgcagaaccagatgaacggccagatgcctgggcctaaccatatgcctatgcagggacctggacccaatcaactcaatatgacaaacagttccatgaatatgccttcaagtagccatggatccatgggaggttacaaccattctgtgccatcatcacagagcatgccagtacagaatcagatgacaatgagtcagggacaaccaatgggaaactatggtcccagaccaaatatgagtatgcagccaaaccaaggtccaatgatgcatcagcagcctccttctcagcaatacaatatgccacagggaggcggacagcattaccaaggacagcagccacctatgggaatgatgggtcaagttaaccaaggcaatcatatgatgggtcagagacagattcctccctatagacctcctcaacagggcccaccacagcagtactcaggccaggaagactattacggggaccaatacagtcatggtggacaaggtcctccagaaggcatgaaccagcaatattaccctgatggaaattcacagtatggccaacagcaagatgcataccagggaccacctccacaacagggatatccaccccagcagcagcagtacccagggcagcaaggttacccaggacagcagcagggctacggtccttcacagggtggtccaggtcctcagtatcctaactacccacagggacaaggtcagcagtatggaggatatagaccaacacagcctggaccaccacagccaccccagcagaggccttatggatatgaccagggacagtatggaaattaccagcagtgaaaaagtacttacattccagtagccagtatctattagcagccatattgtcacctcagcactgtggacacctccctgtgaagagatccttccattccatctagtttttggaaaaaccttgtggataagtggctgtttcatcagtaagcagcctttgtggtttagttataaaaggctttagtagctcaaaaatactcttgatttcacatttctactctagatggcaacattggacagaaaatgcaatgacataaccaatttgtaatgattttggaactgtgtttcaaatggactgttacagactgaaaggtgtgaacagctttgtatgtttatgaagggtaagggaatttaatacttttccacagatttttttgtaaggggaagagggaaatgtacactttttacagcagcaatattttgtatattatgtttatttcatgtggtgaatatgcaaggcggtacactacgcactggacagcatcagaaatcctctgttaatgtggactggagcatggtagatgcttgattgttttggtctcaaaatggtgtgctataaagataaaggtgaggggaagacaaagcacaccatatgtccactgttctgttctcatagaggaaattcaaatcccttttatctattagataatcaagggcactgtgatacagttttgagtaaaaagacattttttaaaagccttccagttttgtggattaaacctttttataaagatcatttataatactgttttaaaatgtgaggcaataagaattactttgtgttggatctgaggaggctttggtaaaacagtttcatctaaatgaaagtggtaatcctcttctaaaatagcaataactgaaaatgaaagtgttaattttaccttgtttgagttatcagggaacttagtaagtaatatcaaagcattttataaatgatatcaaagaagagtcaacattgatccagtcattttattttgtaatattgagggataattggttattaaactgaatagttcaggagactttacaaacctttgtttcaactttcttatctggaaataatatcatttataaagggacacttttatgtttttcccttttttatgttggttgatataacacaaagagatatttaggaaaatgcttattgatgaggtttattctatctgtttttaaagcaccgaggttgcattctagataaccttgtttattagcatggcatattttaatcattatttgagactgtcctgtgcctgattattttagctaaattcagggagattgcgtggggcaggaaagcatgcattgaaaaatttctaaccacggttatttaagcataatctgaaaacatctagcccaaaggtaagttgctattttcatcacagttgcctatgcccagggaataagatgtattctttataattgaattggtttttcccacgtctaactggaaacaaaacagaaggggcgtcataaatttgaataagcagaacatactgttctcaacatactgtaatcaaaaggaggaatttcagtgggtctctgtgtgtgtatgagagagagagtgtgtgtttgtgtgtttcaaggtcagaacaggtttttttgtttttgttttttgttctttgtttttttttttgagatggagtcttgctcttgtcgcccaggctggagtgcagtggcgcaatctcagctcactgcaacctccgcctcccaggttcaagcagttctcctgcctcagcctcctga

SEQ ID NO: 29637 - DNA, 7407 bp, Homo Sapiens
gggcctctgattcatctttattccctccatcatctagacttgattttatttgtaccaaggagatgcgtgtctaatgtttttctttcttctatttctaggagggctgttggcctgctgctgtgctgctgaacagtatgcagtcctttcgggagcaaagcagttaccacggaaaccagcaaagctacccacaggaggtacacggctcatcccggctagaagagttcagccctcgtcaggcccagatgttccagaattttggaggtacaggtggcagtagtggcagcagtggcagtggcagtggtggtggacgacgaggagcagcagctgctgcggcagcgatggctagcgagacctctggccatcaaggttaccagggtttcaggaaagaggctggagatttttactacatggcaggcaacaaagaccccgtgactacaggaaccccacagcctcctcagcgaaggccttctgggcctgtgcagagctatggacccccccaggggagcagctttggcaatcagtatgggagtgagggtcatgtgggccagtttcaagcacagcactctggccttggcggtgtgtcacattatcagcaggattacactgggcctttctctccagggagtgctcagtaccaacagcaggcttccagccagcagcagcagcagcaagtccagcagttgagacaacagctttaccagtcccatcagcccctgccacaggccactggccaaccagcatccagctcatcccatctacagccaatgcagcggccctcaactctgccatcctctgctgctggttaccagttaagagtgggtcagtttggccaacactatcagtcttctgcttcctcctcctcctcctcctccttcccttcaccacagcgttttagccagtctggacagagctatgatggcagttacaatgtgaatgctggatctcagtatgaaggacacaatgtgggttctaatgcacaggcttatggaacacaatccaattacagctatcagcctcaatctatgaagaattttgaacaggcaaagattccacaagggacccaacaggggcagcagcagcagcaaccgcagcaacaacaacacccttctcagcatgtgatgcagtatactaacgctgccaccaagctgcccctgcaaagccaagtggggcagtacaaccagcctgaggttcctgtgaggtcccccatgcagtttcaccagaacttcagccccatttctaacccttctccagctgcctctgtggttcagtctccaagctgtagttctaccccatctcctctcatgcagactggggagaatctccagtgtgggcaaggcagtgtgcctatgggttccagaaacagaattttacagttaatgcctcaactcagtccaaccccatcaatgatgcccagtcctaattctcatgctgcaggcttcaaagggtttggactagaaggggtaccagaaaagcgactgacagatcctgggttgagtagtttgagtgctctgagtactcaagtggccaatcttcctaacactgtccagcacatgttactttctgatgccctgactcctcagaagaagacctccaagaggccctcatcttccaagaaagcagatagctgcacaaattctgaaggctcctcacaacctgaagaacagctgaagtcccctatggcagagtcattagatggaggctgctccagcagttcagaggatcaaggcgagagagtgcggcaactaagtggccagagcaccagctctgacaccacctacaagggtggagcctctgagaaagctggctcctcaccggcacaaggtgctcagaatgaaccccccagactcaatgctagtcctgccgcaagagaagaggccacctcaccaggcgctaaggacatgccattgtcatccgacgggaacccaaaggttaatgagaagactgttggggtgattgtctcccgggaagccatgacaggtcgggtagaaaagcctggtggacaagataaaggctcccaagaggatgatcctgcagccactcaaaggccacctagcaatggtggggcaaaggaaaccagtcatgcatcacttccccagccagagcctccaggaggaggagggagcaaaggaaacaagaatggcgataacaactccaaccataatggagaaggaaatggccagagtggccactctgcagcgggccctggttttacgagcagaactgagcctagcaaatctcctggaagtctgcgctatagttacaaagatagtttcgggtcagccgtgccacgaaatgtcagtggctttcctcagtatcctacagggcaagaaaagggagatttcactggccatggggaacgaaagggtagaaatgaaaaattcccaagcctcctgcaggaagtgcttcagggttaccaccaccaccctgacaggagatattctaggagtactcaagagcatcaggggatggctggtagcctagaaggaaccacaaggcccaatgtcttggttagtcaaaccaatgaattagctagcaggggccttctgaacaaaagcattgggtctctattagaaaatccccactggggcccctgggaaaggaaatcaagcagcacagctcctgaaatgaaacagatcaatttgactgactatccaattcccagaaagtttgaaatagagcctcagtcatcagcacatgagcctgggggttccctctctgaaagaagatcagtgatctgtgatatttctccactaagacagattgtcagggacccaggggctcactcactgggacacatgagtgccgacaccagaattgggaggaatgaccgtctcaatccaactttaagtcagtcggtcattcttcctggtggtttggtgtccatggaaaccaagctgaaatcccagagcgggcagataaaagaggaagactttgaacagtctaaatctcaagctagtttcaacaacaagaaatctggagaccactgccatcctcctagcatcaagcatgagtcttaccgcggcaatgccagccctggagcagcaacccatgattccctttcagactatggcccgcaagacagcagacccacgccaatgcggcgggtccctggcagagttggtggtcgggagggcatgaggggtcggtccccttctcaatatcatgactttgcagaaaaattgaaaatgtctcctgggcggagcagaggcccagggggagaccctcatcacatgaatccacacatgaccttttcagagagggctaaccggagttctttacacactcccttttctcccaactcagaaaccctggcctctgcttatcatgcaaatactcgggctcatgcttatggggaccctaacgcaggtttgaattctcagctgcattataagagacagatgtaccaacagcaaccagaggagtataaagactggagcagcggttctgctcagggagtaattgctgcagcacagcacaggcaggaggggccacggaagagtccaaggcagcagcagtttcttgacagagtacggagccctctgaaaaatgacaaagatggtatgatgtatggcccaccagtggggacttaccatgaccccagtgcccaggaggctgggcgctgcctaatgtctagtgatggtctgcctaacaagggcatggaattaaagcatggctcccagaagttacaagaatcctgttgggatctttctcggcaaacttctccagccaaaagcagcggtcctccaggaatgtccagtcaaaaaaggtatgggccgccccatgagactgatggacatggactagctgaggctacacagtcatccaaacctggtagtgttatgctgagacttccaggccaggaggatcattcttctcaaaaccccttaatcatgaggaggcgtgttcgttcttttatctctcccattcccagtaagagacagtcacaagatgtaaagaacagtagcactgaagataaaggtcgcctccttcactcatcaaaagaaggcgctgataaagcattcaattcctatgcccatctttctcacagtcaggatatcaagtctatccctaagagagattcctccaaggaccttccaagtccagatagtagaaactgccctgctgttaccctcacaagccctgctaagaccaaaatactgcccccacggaaaggacggggattgaaattggaagctatagttcagaagattacatccccaaatattaggaggagcgcatcttcgaacagtgcggaggctgggggagacacggttacgcttgatgatatactgtctttgaagagtggtcctcctgaaggtgggagtgttgctgttcaggatgctgacatagagaagagaaaaggtgaggtggcttcggacctagtcagtccagcaaaccaggagttgcacgtagagaaacctcttccaaggtcttcagaagagtggcgtggcagcgtggatgacaaagtgaagacagagacacatgcagaaacagttactgccggaaaggaaccccctggtgccatgacatccacaacctcacagaagcctggtagtaaccaagggagaccagatggttccctgggtggaacagcacctttaatctttccagactcaaagaatgtacctccagtgggcatattggcccctgaggcaaaccccaaggctgaagagaaggagaacgatacagtgacgatttcaccgaagcaagagggtttccctccaaagggatatttcccatcaggaaagaagaaggggagacccattggtagtgtgaataagcaaaagaaacagcagcagccaccgcctccaccccctcagcccccacagataccagaaggttctgcagatggagagccaaagccaaaaaaacagaggcaaaggagggagagaaggaagcctggggcccagccgaggaagcgaaaaaccaaacaagcagttcccattgtggaaccccaagaacctgagatcaaactaaaatatgccacccagccactggataaaactgatgccaagaacaagtctttttacccttacatccatgtagtaaataagtgtgaacttggagccgtttgtacaatcatcaatgctgaggaagaagaacagaccaaattagtgaggggcaggaagggtcagaggtcactgacccctccacctagcagcactgaaagcaaggcgctcccggcctcgtcctttatgctgcagggacctgttgtgacagagtcttcggttatggggcacctggtttgctgtctgtgtggcaagtgggccagttaccggaacatgggtgacctctttggacctttttatccccaagattatgcagccactctcccgaagaatccacctcctaagagggccacagaaatgcagagcaaagttaaggtacggcacaaaagtgcttctaatggctccaagacggacactgaggaggaggaagagcagcagcagcagcagaaggagcagagaagcctggccgcacaccccaggtttaagcggcgccaccgctcggaagactgtggtggaggccctcggtccctgtccagggggctcccttgtaaaaaagcagccactgagggcagcagtgaaaagactgttttggactcgaagccctccgtgcccaccacttcagaaggtggccctgagctggagttacaaatccctgaactacctcttgacagcaatgaattttgggtccatgagggttgtattctctgggccaatggaatctacctggtttgtggcaggctctatggcctgcaggaagcgctggaaatagccagagagatgaaatgttcccactgccaggaggcaggcgccaccttgggctgctacaacaaaggctgctccttccgataccattacccgtgtgccattgatgcagattgtttgctacatgaggagaacttctcggtgaggtgccctaagcacaagcctccccttccgtgccctctcccccccttgcagaacaagaccgcgaaaggcagcctcagcacagagcagtcggagcgggggtgaggggggcagtgtgctcgtgggaatggaaaggacagcaagcacaggtgagactgtggagatgagaaggtggtggacactcgtgatggaatggaaatcgtcctaccgtgcagccacaccctgccctgccccgccccgccccgcccgcgtgcctgcccatgccagcacttccttaagttctcacatcacactcaaaccagtgacaccacaggaaagaaagacccaagacgttggaatggctgtttccatggacacaatctccatagtgacaatgtggggggaggggggaggggtgggatgatggggaaagggtggggggaattaaaagggagggataaatatatatatataaatctatttttagtctggaaagactttgtttaaatgaaaggtgcgctatcccttttgattctgttttaaaattatctcgttaaagatctccaaatttgttccgatgacaagtgaaatttaaatgtgagattgaactgaacaaaccctcatctcatgaaggacggggtgtgtgtgtggcgttgatctttagcctgtctcacaccagttcagaaaacactagacccaggattgaaaaagcaaaccacagcagaaccatccttttgtcattaatttgtctcaaagtgggaaggttttgggggagggggaaatacagggatggtccatgttttcaagagtaggggaatgatgtttaaacacaaaaataaattttttttcatttccagaaacactatttatttatggttttttttttttaattttttctttttgggggtgaaattggcagatgcctgaggtcatagctgtgtcctgggtcactgtggctggtgaggacctcaaggaccccatcaagtgtacacagcagcagcaaaatcaagggatgaccctcctctggggccccctgtcctcagcacattccaggcagctgtgccctgacccacagggacccgtggggatgggaggaggtccaggcctgtgttgccagagctggcagtgtgagctgtaggcagggacggggagggactgtcgctgtgatcagagtgggttaagctgaccaggaacacccatttaacccctttttctttttgctttcatttttataaaggaaaagaggacctgtcagataggcagccccatgctacgtgattctttatgttgtgttgttttgttttgtaaattgtataatttttaaatatctgagttttaaaaaaagaaaaaagtacaaaaaaatcttgttatggccttaagaaggggttagtgcatctttcaggggtcactctgccatggggataaaatagctgtttcacaaacagttttatttaaaaaaacaaaaaacaaaaaaaatcaaaaaatcaaaaaaataataaacttcattttaaccttg

SEQ ID NO: 29638 - DNA, 2263 bp, Homo Sapiens
tagcgagggacgcgtaggtgtcttcataagatgccggggcagcggcgcgcgctttcccccaagatggcgtccatgcgggagagcgacacgggcctgtggctgcacaacaagctgggggccacggacgagctgtgggcgccgcccagcatcgcgtccctgctcacggccgcggtcatcgacaacatccgtctctgcttccatggcctctcgtcggcagtgaagctcaagttgctactcgggacgctgcacctcccgcgccgcacggtggacgagatgaagggcgccctaatggagatcatccagctcgccagcctcgactcggacccctgggtgctcatggtcgccgacatcttgaagtcctttccggacacaggctcgcttaacctggagctggaggagcagaatcccaacgttcaggatattttgggagaacttagagaaaaggtgggtgagtgtgaagcgtctgccatgctgccactggagtgccagtacttgaacaaaaacgccctgacgaccctcgcgggacccctcactcccccggtgaagcattttcagttaaagcggaaacccaagagcgccacgctgcgggcggagctgctgcagaagtccacggagaccgcccagcagttgaagcggagcgccggggtgcccttccacgccaagggccgggggctgctgcggaagatggacaccaccaccccactcaaaggcatcccgaagcaggcgcccttcagaagccccacggcgcccagcgtcttcagccccacagggaaccggacccccatcccgccttccaggacgctgctgcggaaggaacgaggtgtgaagctgctggacatctctgagctggatatggttggcgctggccgagaggcgaagcggagaaggaagactctcgatgcggaggtggtggagaagccggccaaggaggaaacggtggtggagaacgccaccccggactacgcagccggcctggtgtccacgcagaaacttgggtccctgaacaatgagcctgcgctgccctccacgagctaccttccctccacgcccagcgtggttcccgcctcctcctacatccccagctccgagacgcccccagccccatcttcccgggaagccagccgcccaccagaggagcccagcgccccgagccccacgttgccagcgcagttcaagcagcgggcgcccatgtacaacagcggcctgagccctgccacacccacgcctgcggcgcccacctcgcctctgacacccaccacacctccggctgtcgcccctaccactcagacacccccggttgccatggtggccccgcagacccaggcccctgctcagcagcagcctaagaagaacctgtccctcacgagagagcagatgttcgctgcccaggagatgttcaagacggccaacaaagtcacgcggcccgagaaggccctcatcctgggcttcatggccggctcccgagagaacccgtgccaggagcagggggacgtgatccagatcaagctgagcgagcacacggaggacctgcccaaggcggacggccagggtagcacaaccatgctggtggacacagtgtttgagatgaactatgccacgggccagtggacgcgcttcaagaagtacaagcccatgaccaatgtgtcctagaaccacctgcctcacagctggccgtcacttgtgggggtccacgggacgatggctttgccagcttaaagtaaccggatggcggacacctggcccccgaggtcccccggccgccgccctgctgctgacccagcctgttttaagttctggatgcatttctctggggtatttggggcttatttttaaaattttaatatgggttcttttttgtgtgatttaaagacactttttggactcaacgttacatttttgaatgtagtaagtaaattaaccaaaaaagttacaacttcctaattttagtgacagctctgcctgtttgttagactcttactttttaaaatcttttctattttccctcgctggggcagtgccctcctacccccagggttgaggggaccaaggtggcacggtggtactgggggtgcggcagggacacccgaccacaccagagcgtgggagacggtgggccttgtcccctgcctgtgcctgcctgggagttttgtattcatcttttgtatagttgtggacatttaagacagtctttgggtacctattttcattgtaaaactatctgaaccattaaagtcgagcttttctaaagaaaaaaaaaaaaaaa

SEQ ID NO: 29639 - DNA, 3925 bp, Homo Sapiens
gtccaaaccggaagaccgtgggtagctgcggcggggctgacccgtcccgagtgccaaagctggggttctacttgagatttccctcgtggtgccagggtccggcgagcatcacgccgaggcccattttccagacgaccacgacgaggccggggtcacgaactctggcgccccttaccagcttccagtctctcgaggtggccagtgtggtgcttggtccttgtttccaggatggacttccccagctccctccgccctgcattgtttctgaccggcccccttggtctgagcgacgtccctgacctctctttcatgtgcagctggcgagacgcactgactctgccagaggcccagccccagaactcagagaatggggcactgcatgtgaccaaggacctgctgtgggagccggcaacccctgggcctctccccatgctgcctcccctcatcgatccctgggaccctggcctgactgcccgggacctgcttttccgcggagggtgccggtatcggaagcggccccgagtcgtgctggatgtgactgagcagatcagccggttcctcttggatcatggagacgtagcctttgcgcccctggggaagctgatgctggagaatttcaagctggagggagcggggagccgcactaagaagaagacagtggtcagtgtgaagaagctgctccaggacctcggtggacaccagccctgggggtgtccctgggcttacctcagcaaccgacagcgccgcttctctatcctcgggggccccatcctgggcacgtcggtggcgagccacttggcagagctgctgcacgaggagctggtgctgcggtgggagcagctgcttctggatgaggcctgcactgggggcgcgctggcctgggttcctggaaggacaccccagttcgggcagctggtctaccctgctggaggcgcccaggacaggctgcatttccaagaggtcgttctgaccccaggtgacaatccccaattccttgggaaacctggacgcatccagctccagggacctgtccggcaagtggtgacatgcaccgtccagggagaaagtaaggcccttatatacactttcctccctcactggctgacctgctacctgacccctggccctttccatccctcctcagctctgctggccgtccgctctgactaccactgtgccgtgtggaagtttggtaaacagtggcagccaacccttctgcaggcaatgcaggtggagaaaggggccacggggatcagcctcagccctcacctgcccggggagctggccatctgcagccgctcgggagccgtctgcctgtggagccctgaggatgggctgcggcaaatctacagggaccctgagaccctcgtgttccgggactcctcttcgtggcgttgggcagacttcactgcgcaccctcgggtgctgaccgtgggtgaccgcaccggagtgaagatgctggacactcagggcccgccgggctgtggtctgttgctttttcgtttgggggcagaggcttcgtgccagaaaggggaacgtgtcctgcttacccagtacctggggcactccagccccaaatgcctcccccctactcttcatctcgtctgtacccagttctctctctacctagtggacgagcgccttcccctggtgccgatgctgaagtggaaccatggcctcccctccccgctcctgctggcccgactgctgcctccgccccggcccagctgcgtgcagcccctgctcctcggaggccagggtgggcagctgcagctgctgcacctggcaggagaaggggcgtcggtgccccgcctggcaggccccccccagtctcttccttccaggatcgactccctccctgcatttcctctgctggagcctaagatccagtggcggctgcaggagcgcctgaaagcaccgaccataggtctggctgccgtcgtcccgcccttgccctcagcgcccacaccaggcctggtgctcttccagctctcggcggcgggagatgtcttctaccagcagctccgcccccaggtggactccagcctccgcagagatgctgggcctcctggcgacacccaacctgactgccatgcccccacagcttcctggacctcccaggacactgccggctgcagccagtggctgaaggccctgctaaaagtgcccctggctcctcctgtgtggacagcacccaccttcacccaccgccagatgctgggcagcacagagctgcggagggaggaagaggaagggcagcggctgggtgtgctccgcaaggccatggcccgagggcagctcctgctgcagagagacctgggctccctccctgcggcagagccaccccctgcacccgagtcaggcctagaggacaagctcagtgagcgcctgggggaagcctgggcaggccgaggggctgcctggtgggagaggcagcagggcaggacctcggagcccgggagacagaccaggcggcccaagcgccggacccagctgtccagcagcttttcgctcagtggccatgtggatccctcagaggacaccagctcccctcatagccctgagtggccacctgctgatgctctgcccctgccccccacgaccccgccctcccaggagttgactccggatgcatgcgcccagggcgtcccatcagagcagcggcagatgctccgtgactacatggccaagctaccaccccagagggacaccccaggctgtgccaccacacctccccactcccaggcctccagcgtccgggccactcgctcccagcagcacacacccgtcctctctagctctcagcccctccggaagaagcctcgaatgggcttctgaggacacaaggtgggctgccctcaagccccagagagcccctcatccttcctctgggaccagatgtgccttccacagttgaaacttgagaagcagagctcgccaccttctggaggccactgtgatgatgagccaagcaatttggagccaagttgaagggacagggcaacaaaatacagtagtagtttcttttgtattttgtatattcgcctgaagatcatcccgcaaggcaggctggaggtgccggtgggcctgtgttgctgggattttagtctgtgctgggaggcagggctccgctgcgcctcagctgtgggggcctcaggcaggtccctcagttctcacgccttcctgtccagtggaatgggggccaggagtgctggctcctcgtgtttggtgagggtggagtgaggcccctgcagagctgctgatgaggtgggcacagcggccgttggcagctgctgttgtgggttgctttgtcaatctctgccccggtctgatgtttcctacagggagatgccttggatccaggttcagggactaaatacacttggcagctgaagatgaattggaatggtcacgttttttaggctggacagcgtcccgccacagctactacctgacactgagctcatgcagagagatgatggctgatgttccttctcccttgggacatgggtctggcacctgtgggctgtcgatagtgccctctgagcagagggtcacggtcatgtcagtttgggggaattctctgttgtgcctcacagactcccccctttctttcctccctccccttctcattttgatgtctaaagcatcaagtccctcttcctcggagtttctctagctgcagtggaagattctgttttcctgtggggaaaatgctcacttgagattttgcagggacccgggtctgtctggtttctgatgacatagtaagagaaaggtcttttttcaggttggctggtgaaaggaattgcatgtgactcacacaaacaggagctagcccaatcatacactgactcgcgtgggtgttaaaatgtttatcatgcctaagggagacatttatgattaaaccatttatgctacataa

SEQ ID NO: 29640 - DNA, 4088 bp, Homo Sapiens
cgcctcgcagcagcgagccgcgagcgcccttctccagtcccggcttggaactgaactgtgtgagcacgggtcctggaacccgggcccagaaccggcgagcccaggtctgagcccagagctcagcggtcagcctcgtaggccctgactcggaatcgagccgaggcgctgaggttggagccggagagcgtgagagccgaagagcagggagggcgggccggctgcgcgtccgacgagtcgcagagcaggaccgcggaaggcagggagacggccgcaagcccagggcagagggcagagggcagagagcggcctggctcggcggagagggcgccgcccggccggaaccaagctcgccgcccgggacggcgggccccgtggggcgcggacccagggtggccgtgggtccgcagcgactccccggccgacggcggggggcgtgccccctcccagcccagcctccccaacccggcccgcccgccgcgtcgcgggggcatgtgagcgggaagcctaggctgccagccgcgaggaccgcacggaggaggagcaggagcgcggagccgcgagccccgagccccgagcccggcgcctggctgagtagatgtccatgaggagccccatctctgcccagctggccctggatggcgttggcaccatggtgaactgcaccatcaagtcagaggagaagaaagagccttgccacgaggccccccagggctcagccactgccgctgaacctcagcctggagacccagcccgggcctcccaggatagtgctgacccccaagctccagcccaggggaatttcaggggctcctgggactgtagctctccagagggtaatgggtccccagaacccaagagaccaggagtgtcggaggctgcctctggaagccaggagaagctggacttcaaccgaaatttgaaagaagtggtgccagccatagagaagctgttgtccagtgactggaaggagaggtttctaggaaggaactctatggaagccaaagatgtcaaagggacccaagagagcctagcagagaaggagctccagcttctggtcatgattcaccagctgtccaccctgcgggaccagctcctgacagcccactcggagcagaagaacatggctgccatgctgtttgagaagcagcagcagcagatggagcttgcccggcagcagcaggagcagattgcaaagcagcagcagcagctgattcagcagcagcataagatcaacctccttcagcagcagatccagcaggttaacatgccttatgtcatgatcccagccttccccccaagccaccaacctctgcctgtcacccctgactcccagctggccttacccattcagcccattccctgcaaaccagtggagtatccgctgcagctgctgcacagcccccctgccccagtggtgaagaggcctggggccatggccacccaccaccccctgcaggagccctcccagcccctgaacctcacagccaagcccaaggcccccgagctgcccaacacctccagctccccaagcctgaagatgagcagctgtgtgccccgcccccccagccatggaggccccacgcgggacctgcagtccagccccccgagcctgcctctgggcttccttggtgaaggggacgctgtcaccaaagccatccaggatgctcggcagctgctgcacagccacagtggggccttggatggctcccccaacacccccttccgtaaggacctcatcagcctggactcatccccagccaaggagcggctggaggacggctgtgtgcacccactggaggaagccatgctgagctgcgacatggatggctcccgccacttccccgagtcccgaaacagcagccacatcaagaggcccatgaacgccttcatggtgtgggccaaggatgagcggaggaagatcctgcaagccttcccagacatgcacaactccagcatcagcaagatccttggatctcgctggaagtccatgaccaaccaggagaagcagccctactatgaggaacaggcgcggctgagccggcagcacctggagaagtatcctgactacaagtacaagccgcggcccaagcgcacctgcatcgtggagggcaagcggctgcgcgtgggagagtacaaggccctgatgaggacccggcgtcaggatgcccgccagagctacgtgatccccccgcaggctggccaggtgcagatgagctcctcagatgtcctgtaccctcgggcagcaggcatgccgctggcacagccactggtggagcactatgtccctcgtagcctggaccccaacatgcctgtgatcgtcaacacctgcagcctcagagaggagggtgagggcacagatgacaggcactcggtggctgatggcgagatgtaccggtacagcgaggacgaggactcggagggcgaagagaagagcgatggggagttggtggtgctcacagactgatcccggctgggtgggcctggccccttctcctctggggaagaccttgtcccaactcgatgggcacagccagccaacctaagactatgttggtacttggacttgttcgtgccccagagatgggcaaagctgtgcacttgcagatacattcatgaggggagaggcgccctcccttcctgaggagctgttggcctgggtgggcaggaactgcagtatggccatgggctgagcaggctgagcacctcagcctttagggcttatggccaggggacactgtatgactctcctctcctgcaggtgtctatccacctggggtatggcatctaccgacctgtctccctggggtcacatgctttgtttccattcttgtcctggctggaccagccactgtgggaccaacacccctcccacactcccccagactgctcgtctatcaccaggatcgctttgtactttgtgcaaaagggtctggctgtcccttgctgttttcatctctgccaagcctattgtgcctctggctgctgtatgtgtgcgcgtgcacgtgtgtgtgtttcatctgttcattcactgcacaagatatttattgagtgcccactacgtgccaggcactgttgctgagttcctgtgggtgtgtctctcgatgccactcctgcttctctgggggcctctttctgtgcttctctttgtccccaaattgctacctctttgtcagtctgggtgtctcaggttctgtgtgtccttgtgtgcatttctgtctctctctgtcctcgtctctctgcaaggccctctatttctctctttcttggtgtctgtcctttgccccctgtgccctctggattctctgggtctatgtaggcccctggtctgccctgggctcatcagccttcctgacctcctcctgccctccccttcactccctccctggctctgccagtcggttcccacggagccatttttagctctgatcagcatgggaatgtgcctcggcctccaaggggctttgtcctggtgcccccgcccctggtcccaacctgatcccacgagggagttgggacaggaggattgatggtgctccccttcctgccagcgtcagaggccctggagaggggctgtccatggcagctggtctttattcctccctcatgagcacagggtcgggggggtccccattcttggaagaggttgagaagactcctgggcttcagcctctcccacccagccctgcccctcacctgcctgccctcccctcccccactctatactagggactggatctcagcctctgatcagtttcacaaagtttgttccctaaggaaatcaaatcccattgtcacctaactctgaagatctaaatagcccttggatcagtatgggaaccccaaatcccacagggccagatgtggagtctgtgtctgcccccgtcttctctccatcctcaaagcccccacttctctccaggctgtttctttttttatgactgtaaacatagatagtgctttattttgttaataataagataatgatgagtaacttaaccagcacatttctcctgtttacactcgggggatttttttgttttctgatgacataataaagacagatcatttcagaaaaaaaaaaaaaaaaa

SEQ ID NO: 29641 - DNA, 4650 bp, Homo Sapiens
atgagcctttcattttgtggtaacaacatttcttcatataatatcaacgatggtgtactacaaaattcctgctttgtggatgccctcaacctggtccctcatgtctttctgttgtttatcacttttccaatattgtttattgggtgggggagccaaagctcaaaagtacaaattcaccacaacacatggcttcattttccgggacataacctgagatggattcttacattcgctctcctgtttgtgcatgtctgtgaaatagcagaaggcattgtttcagactcgcggcgggaatcaaggcacctccacctctttatgccagccgtgatgggattcgttgccactacaacatcgatagtgtattatcataatatcgaaacatcaaattttcctaaattacttttagccctgttcctgtattgggtaatggcctttattacaaaaacaataaaattggttaagtactgtcagtctggcttggacatatcaaacctgcgtttctgcatcacaggcatgatggtcatcttgaatgggctcttgatggctgtggagatcaatgtcattcgagtcaggagatatgtatttttcatgaatcctcagaaagtaaagcctcctgaagacctccaggatctgggagtgagatttcttcaaccatttgtgaatttgctgtcaaaagcaacatactggtggatgaacacacttattatatctgctcacaaaaagcctattgatctgaaggcaattggaaaattgccaatagcaatgagagcagtaacaaattatgtttgcctgaaagatgcatatgaagaacaaaagaaaaaagttgcagatcatccaaatcggactccatctatatggcttgcaatgtacagagcttttgggcgaccaattctacttagtagcacattccgctatctggctgatttactgggttttgctggacctctttgtatttctggaatagttcagcgtgtgaatgaaacccagaatgggacaaataacacaactggaatttcagaaaccctctcatcaaaggaatttcttgaaaacgcttacgttctagcagttcttctcttcttggctcttattctgcaaaggacatttttgcaggcttcctactatgtaaccatagagactggcattaacctccgtggagctctgctggccatgatttataataaaatccttaggctctctacgtctaacttatccatgggggagatgactctggggcagatcaacaacttagtcgccattgaaactaatcaactcatgtggtttttgttcctgtgtcccaatctatgggctatgcctgttcagatcataatgggcgtgattctgctctataatttacttggatcaagtgcattggtcggtgcagctgtcattgtgctccttgcgccaattcagtactttattgctacaaagttggcagaggctcagaaaagtacacttgattattccactgagagactcaagaaaacaaatgaaatattgaaaggcatcaaacttctaaaattgtatgcctgggaacacattttctgcaaaagtgtggaggaaacaagaatgaaagaactatctagtctcaaaacctttgcactatatacatcactctccatcttcatgaatgcagcaattcccatagcagctgttcttgctacatttgtgacccatgcgtatgccagtggaaacaatctgaaacctgcagaggcctttgcttcactgtctctcttccatatcctggtcacaccactgtccctgctcttcacggtggtcagatttgcagtcaaagccatcataagtgttcaaaagctgaatgagtttctcttgagtgatgagattggtgacgacagttggcgaactggtgaaagttcgcttccttttgagtcctgtaagaagcacactggagttcagccaaaaactataaacaggaaacagcctggaagatatcacctggacagctatgagcaatcaacacggcgtctacgtcccgcagaaacagaggacattgcaataaaggtcacaaatggatacttttcatggggcagtggtttagctacattatccaatatagatattcgaattccaacaggtcagttaaccatgattgtgggccaagtaggatgtgggaagtcctctcttctccttgccatcctcggtgagatgcagacattggaaggaaaagttcactggagcaatgtaaatgaatctgagccttcttttgaagcaaccagaagtaggaacaggtactctgtggcatatgcagctcaaaagccttggctattaaatgctacagtagaagaaaatattacttttggaagtccttttaacaaacagaggtacaaagctgtcacagatgcctgttctcttcagccagatattgacttattaccatttggagatcaaactgaaattggagagaggggcatcaacctgagtgggggacagaggcagagaatctgtgtggcacgagcgctgtatcaaaacaccaacattgtctttttggatgatccattctcagccctggacattcacttgagtgatcatttaatgcaggaggggattttgaaattcctgcaagatgacaaaaggacactcgttcttgtgactcacaaattacagtatctgacgcatgctgactggatcatagccatgaaagatggaagtgtcctaagagaaggaactttgaaggacattcaaaccaaagatgttgagctttatgaacactggaaaacacttatgaatcggcaagatcaagaattagaaaaggatatggaagctgaccaaactactttagagaggaaaactctccgacgggccatgtattcaagagaagccaaagcccagatggaggacgaagacgaagaggaagaagaggaggaagatgaggatgataacatgtccactgtaatgaggctcaggactaaaatgccatggaaaacctgctggcgctacctgacatctggaggattcttcctgctcatcctgatgattttctctaagcttttgaagcattcggtcattgtagctatagactattggctggccacatggacatcggagtacagtataaacaatactggaaaagctgatcagacctactatgtggctggctttagcatactctgtggagcaggcattttcctttgccttgttacatccctcactgtagaatggatgggtctcacagctgccaaaaatcttcaccacaaccttctcaataagataatccttggaccaataaggttttttgataccacacccctgggactgattctcaatcgcttttcagctgatactaatatcattgatcagcacatccctccaaccttggaatctctaactcgctcaacactgctctgcctgtctgccattgggatgatttcttatgctactcctgtgttcctggttgctctcctgccccttggtgttgccttttattttatccagaaatactttcgggttgcctctaaggacctccaggaactcgacgatagtacccagctccctctgctctgtcacttctcagaaacagcagaaggactcaccaccattcgggcctttaggcatgaaaccagatttaaacaacgtatgctggaactgacggatacaaacaacattgcctacttatttctctcagctgccaacagatggctggaggtcaggacggattatctgggagcttgcattgtcctcactgcatctatagcatccattagtgggtcttccaattctggattggtaggcttgggtcttctgtatgcacttacgataaccaattatttgaattgggttgtgaggaacttggctgacctggaggtccagatgggtgcagtgaagaaggtgaacagtttcctgactatggagtcagagaactatgaaggcacaatggatccttctcaagttccagaacattggccacaagaaggggagatcaagatacatgatctgtgtgtcagatatgaaaataatctgaaacctgttcttaagcacgtcaaggcttacatcaaacctggacaaaaggtgggcatatgtggtcgcactggcagtgggaaatcatcgttatctctggctttcttcagaatggttgatatatttgatggaaaaattgtcattgatgggatagacatttccaaattaccactgcacacactacgttctagactttcaatcattctgcaggatccaatactattcagtggttccattagatttaatttagatccagagtgcaaatgcacagatgacagactctgggaagccttagaaattgctcagctgaagaatatggtcaaatctctacctggaggtctagatgcggttgtcactgaaggtggggagaattttagcgtgggacagagacagctattttgccttgccagggcctttgtccgcaaaagcagcattcttattatggatgaggcaacagcttccattgacatggccacagagaatattttgcaaaaagtagtaatgacagcctttgcagaccggaccgtggtgacaatggctcaccgtgtctcttctattatggatgcaggccttgttttagtcttttctgagggtattttagtggagtgtgatactgtcccaaatttgttcgcccacaagaatggccccttttccactttggtgatgaccaacaagtag

SEQ ID NO: 29642 - DNA, 5637 bp, Homo Sapiens
aattccgggcgccagtcccgctccgcgccgcgccgctccgctccggctcgggctccggctcgcctcgggctgggctcgggctccgggggcggcgtccccgccgccgggccccgggacgggcggcgacgctccaaccatggcccgtgcccaggcgctcgtgctggcactcaccttccagctctgcgcgccggagaccgagactccggcagctggctgcaccttcgaggaggcaagtgacccagcagtgccctgcgagtacagccaggcccagtacgatgacttccagtgggagcaagtgcgaatccaccctggcacccgggcacctgcggacctgccccacggctcctacttgatggtcaacacttcccagcatgccccaggccagcgagcccatgtcatcttccagagcctgagcgagaatgatacccactgtgtgcagttcagctacttcctgtacagccgggacgggcacaggccgggcaccctgggcgtctacgtgcgcgttaatgggggccccctgggcagtgctgtgtggaatatgactggatcccacggccgtcagtggcaccaggctgagctggctgtcagcactttctggcccaatgaatatcaggtgctgtttgaggccctcatctccccagaccgcaggggctacatgggcctagatgacatcctgcttctcagctacccctgcgcaaaggccccacacttctcccgcctgggcgacgtggaggtcaacgcgggccagaacgcgtcgttccagtgcatggccgcgggcagagcggccatgcgccaacgcttcctcttgcaacggcagagcggggccctggtgccggcggcgggcgttcggcacatcagccaccggcgcttcctggccactttcccgctggctgccgtgagccgcgccgagcaggacctgtaccgctgtgtgtcccaggccccgcgcggcgcgggcgtctctaacttcgcggagctcatcgtcaaggagcccccaactcccatcgcgcccccacagctgctgcgtgctggccccacctacctcatcatccagctcaacaccaactccatcattggcgacgggccgatcgtgcgcaaggagattgagtaccgcatggcgcgcgggccctgggctgaggtgcacgccgtcagcctgcagacctacaagctgtggcacctcgaccccgacacagagtatgagatcagcgtgctgctcacgcgtcccggagacggcggcactggccgccctgggccacccctcatcagccgcaccaaatgcgcagagcccatgagggcccccaaaggcctggcttttgctgagatccaggcccgtcagctgaccctgcagtgggaaccactgggctacaacgtgacgcgttgccacacctatactgtgtcgctgtgctatcactacaccctgggcagcagccacaaccagaccatccgagagtgtgtgaagacagagcaaggtgtcagccgctacaccatcaagaacctgctgccctatcggaacgttcacgtgaggcttgtcctcactaaccctgaggggcgcaaagagggcaaggaggtcactttccagacggatgaggatgtgcccagtgggattgcagccgagtccctgaccttcactccactggaggacatgatcttcctcaagtgggaggagccccaggagcccaatggtctcatcacccagtatgagatcagctaccagagcatcgagtcatcagacccggcagtgaacgtgccaggcccacgacgtaccatctccaagctccgcaatgagacctaccatgtcttctccaacctgcacccaggcaccacctacctgttctccgtgcgggcccgcacaggcaaaggcttcggccaggcggcactcactgagataaccactaacatctctgctcccagctttgattatgccgacatgccgtcacccctgggcgagtctgagaacaccatcaccgtgctgctgaggccggcacagggccgcggtgcgcccatcagtgtgtaccaggtgattgtggaggaggagcgggcgcggaggctgcggcgggagcgaggtggacaggactgcttcccagtgccattgaccttcgaggcggcgctggcccgaggcctggtgcactacttcggggccgaactggcggccagcagtctacctgaggccatgccctttaccgtgggtgacaaccagacctaccgaggcttctggaacccaccacttgagcctaggaaggcctatctcatctacttccaggcagcaagccacctgaagggggagacccggctgaattgcatccgcattgccaggaaagctgcctgcaaggaaagcaagcggcccctggaggtgtcccagagatcggaggagatggggcttatcctgggcatctgtgcaggggggcttgctgtcctcatccttctcctgggtgccatcattgtcatcatccgcaaagggagagaccactatgcctactcctactacccgaagccggtgaacatgaccaaggccaccgtcaactaccgccaggagaagacacacatgatgagcgccgtggaccgcagcttcacagaccagagcaccctgcaggaggacgagcggctgggcctgtccttcatggacacccatggctacagcacccggggagaccagcgcagcggtggggtcactgaggccagcagcctcctggggggctccccgaggcgtccctgtggccggaagggctccccataccacacggggcagctgcaccctgcggtgcgtgtcgcagaccttctgcagcacatcaaccagatgaagacggccgagggttacggcttcaagcaggagtatgagagcttctttgaaggctgggacgccacaaagaagaaagacaaggtcaagggcagccggcaggagccaatgcctgcctatgatcggcaccgagtgaaactgcacccgatgctgggagaccccaatgccgactacattaatgccaactacatagatggttaccacaggtcaaaccacttcatagccactcaagggccgaagcctgagatggtctatgacttctggcgtatggtgtggcaggagcactgttccagcatcgtcatgatcaccaagctggtcgaggtgggcagggtgaaatgctcacggtactggccggaggactcagacacctacggggacatcaagattatgctggtgaagacagagaccctggctgagtatgtcgtgcgcacttttgccctggagcggagaggctactctgcccggcacgaggtccgccagttccacttcacagcgtggccagagcatggcgtcccctaccatgccacggggctgctggctttcatccggcgcgtgaaggcctccaccccacctgatgccgggcccattgtcatccactgcagcgcgggcaccggccgcacaggttgctatatcgtcctggatgtgatgctggacatggcagagtgtgagggcgtcgtggacatttacaactgtgtgaagactctctgctcccggcgtgtcaacatgatccagactgaggagcagtacatcttcattcatgatgcaatcctggaggcctgcctgtgtggggagaccaccatccctgtcagtgagttcaaggccacctacaaggagatgatccgcattgatcctcagagtaattcctcccagctgcgggaagagttccagacgctgaactcggtcaccccgccgctggacgtggaggagtgcagcatcgccctgttgccccggaaccgcgacaagaaccgcagcatggacgtcctgccgcccgaccgctgcctgcccttcctcatctccactgatggggactccaacaactacattaatgcagccctgactgacagctacacacggagtgcggccttcatcgtgaccctgcacccgctgcagagcaccacgcccgacttctggcggctggtctacgattacgggtgcacctccatcgtcatgctcaaccagctgaaccagtccaactccgcctggccctgcctgcagtactggccagagccaggccggcagcaatatggcctcatggaggtggagtttatgtcgggcacagctgatgaagacttagtggctcgagtcttccgggtgcagaacatctctcggttgcaggaggggcacctgctggtgcggcacttccagttcctgcgctggtctgcataccgggacacacctgactccaagaaggccttcttgcacctgctggctgaggtggacaagtggcaggccgagagtggggatgggcgcaccatcgtgcactgcctaaacgggggaggacgcagcggcaccttctgcgcctgcgccacggtcctggagatgatccgctgccacaacttggtggacgttttctttgctgccaaaaccctccggaactacaaacccaacatggtggagaccatggatcagtaccacttttgctacgatgtggccctggagtacttggaggggctggagtcaagatagcggggccctggcctggggcacccactgcacactcagggccagacccaccatcctggactggcgaggaagatcagtgcctcctgctctgcccaaacacactcccatggggcaagcactggagtggatgctgggctatcttgctcccccttccactgtgggcagggcctttcgcttgtcccatgggcgggtggtgggccaaggaggagcttagcaagtctgcagcccagccccacctccatagggtcctgcaggcctgtgctgagaggcctggtgctgcctggcagagtgacaaaggctcaggacggctggctctgggggactcaggccaagccccttggcaccatcctggcttttggcagggatgagtgaggccctgcagagagcatcccaggccaaggttcccactcagcctgccccctctgcatgtgggtagaggatgtactgggacttggcatttaggattccatctggcccagcccctgaaggtcctggggaagcaggtctcaattctgaatagccagtggggcacactgactgtcctccccaggggaactgcagcgccctcctccccactgccccctgcagcccctgagatattttgctcactatccctccccacttgcttccctgatatgtgctctgagcttccctgaaccaggatctgcctattactgctgtgccccatggggggctccttccctgcctgacccactgttgcagaatgaagtcacctcgcccccctcttcctttaatcttcaggcctcactggcctgtcctgctcagcttgggccagtgacaatctgcaaggctgaacaacagcccctggggttgaggcccctgtggctcctggtcaggctgcccgttgtggggaggggcagtgttagagcagggctggtcataccctctggagttcagaggaagaggtaggaccagtgcttttttgtttcttttgttatttttggttgggtgggtgggaaggtctctttaaaatggggcaggccacacccccattccgtgcctcaatttccccatctgtaaactgtagatatgactactgacctacctcgcagggggctgtggggaggcataagctgatgtttgtaaagcgctttgtaaataaacgtgctctctgaatgccaaaaaaaaaaaaaaaaaaaaaa

SEQ ID NO: 29643 - DNA, 4196 bp, Homo Sapiens
cggccctcccatgtgcagcccggccagccgggctctcctcctcgcggcggatgggtgaccttttcctggcacgggcaggctgtgggaggcagcggagcaggcgatgaagaagaagcagcagcatcccggcggcggcgcggatccctggccccatggggcccctatggggggcgcccctccgggcctgggcagctggaagcgtcgggtgcccctgctgcctttcctgcgcttctccctccgggactacggcttctgcatggccaccctgctggtcttctgcctgggctccctcctctatcagctcagcgggggaccccctcgcttcctgctcgacctgcggcagtacttgggaaattccacttacttggatgaccatggaccacctcctagtaaggtactacctttcccaagccaggtggtgtacaacagggtaggcaagtgtgggagccgtactgtggtcttgcttctgagaatcttgtcggagaagcacggatttaatttggtcacatcagacattcacaacaaaaccaggcttactaaaaatgaacaaatggaactgattaaaaatataagtactgccgaacaaccctatttattcactcgacatgttcatttcctcaacttctcaaggtttggaggagaccagcctgtctacatcaacatcattagagaccccgtcaaccggttcttatccaactattttttccgtcgctttggagactggagaggggaacaaaatcacatgatccgcacccccagcatgaggcaggaggagcgctacctggatatcaatgagtgtattcttgaaaactatcccgagtgctccaaccccaggttattttacatcattccgtacttttgtggacagcatcccagatgcagggagcctggtgaatgggcccttgagagagcaaagctgaacgtgaatgaaaacttcctgctcgtggggattcttgaagagttggaagatgtgctgctgttactggaaagatttttacctcattacttcaagggcgtgctcagtatctacaaagacccagagcacaggaagcttggaaacatgactgtgacggtgaagaagactgtcccctctcctgaggctgtgcagatcctctaccagcggatgagatacgagtacgagttttaccactacgtcaaagagcagttccacctgctgaagcgcaagtttggacttaagtctcacgtcagcaagccccccctgaggccacacttctttatcccaactccactggaaaccgaggagccaatcgacgatgaagaacaggatgatgaaaagtggctggaagatatttataagaggtgatgtgactgtgttgcctctatggctttatctcccttttccagaaagttctttgtttggggaagtaaaatccttaagggactaaattaatgcttgggtgcattaaaaagaacaaaacattcccacatgttggggtcattgggagatgcccggttttgcgggttttatttgtttaattttattctgtgttttctcttggctctttgggtctttcccgggtacactagatggctccatcccaaggcatcttgtcataaaacagctttcccccaccccatatcatgggaaaagggggagaaatatagcccctagcctaataacttatcatttgtaaaatgacttataaaaatattacctcaatggtaggagacatccagacttgtatatttcagtggaaatacaaaaccacttcagagaccagggtatctcctctggaaggatctaagagaaggtaagacagattaggacatcgaaaaggaggatggagccaggtgccatggcttgagcctataatccgaggctgaggtgggaggatcacttgagcccaggagtttgaggttgcagtgagctgtgatcacaccactgcactccagcctgggtgacagagtgagactctgtctcaattaattttttttttttaaaggaggaggatctccatgggtaagtggtttctacccgcatgggtagagttctgcctctggtccttctcagggggcactttcaccaagagcagtgtaattatctctgaaagagcaagtcagcttgtgccgcatccccaaccaatccacagcctggagtacctttcaaggtcaaagtgcatggccagctccattgagacattccatttcaaagcaccgtgctgacagatatcaaagtactctagcagggaaaataatttgtttgctgtgtaaggaagaatgtagacaagacagataaatctgaaggtcatgtggcatcagggaaagggcatggctgtgtcttttgcacccaatatgaaacatcttctcccaacactgctttaatggaagttctaggaaccaatttagctcaggcatttgactcctacagcagaagttctgagcctgaccacagatggtgtgtaatctatcaaacacacccctggccaagttgggtcctataggacctggtactatgtactattgtaacttctagttccctaagaggtacctgttttcagtaaaaaggggtcctgagttctgtgcaggtggaagagctacccgagaactacctgagttctgtgcaggtagagtcccatttcttatgggacctgtgtgctcctgagaactcttacttgagacatcaaaaagaagcagcaagagcttctgggacagagactgcttggccagctttgtaagtaagtggctgcctccaatgtgatgtgagtacatgttgggcagtctcactgtcctaaggtatgtcttctttccacctcccactgcccctcccctgccacctatcaatgatgccttggttcagtcattagaaatctgttgctttgagttctgaaatattttcaccttaaaaaaaatgctgaaaatacacattctcctgggaagacgataaacagctagctaagaagccgaggttcagtggtggcagcaggaaggacactgccacaaattttgtctatttcatatttgtcccctagagccagccctagcaaatgtgtgagttgggagtagttaatagtaaataagactctgactttacacaagctacacattttatacttttcataaaccacaaagtctctctagaattttttctgccttcactaaaattggactgtagccaagatataaagcaagtcatttggaacctgccgagtgagcactgaagctactttatcatgagatgtgtgttaagaaggctgcagcccacaggagtccagggaaggcggggaccacagaggcacagagtccagcacttggccgctcatgggccttctttctgcctcagaggacgggggcagagaagtgatgaagggaaatgttcttagaggaggaaatatcctttgtcctgttcagagagaccagggccctaccattaggcatactttcagaagcaacctggagaacagctatcaatcatattcaaaaccagtacaagaactgctgcctggtaccctgtgagtcatttctatgaaattccatataaagaatgatgataagtttacacactgtgcaatctcacaatctgaaaataaagttgagttggctgtgttttctctgctcttgtcagaacattgggacaattggtcgttcaaaaacattcatcctcttactgcaagtttatctgggtacttttacctgtgtgttcaaaggcatttcttttcagcagtgatcattataacttcacaaaaaaagatgctgacggatttacttacagggccttaatgttattttgtcccagccaacaccctctaggtcctaaaagtcaaggtacttcagtttatttggcaaacatgacaacatttttttggccctgggcccaacagtttgtacttcatgaaacatattgtacattttacatagtttaatttaaaaaataccttttaagctagttgatctttgactgtcttatttattataacctttcagcacattccaaggttttagttactcaggaaggagttaattaaaatgattttattttggtctgatggatgttttttaaaaggaaaattattattatgaaccttcagcctactttcttgagtgccgtaaaagtgcttgtaaatctttttttttttttaagaagaaagaaaaaaatggtgtttgacgttgatggaaattcaaaaatatatatggaactgaaacattaacttagctaaaataaaagcaatctgtgtttg

SEQ ID NO: 29644 - DNA, 3179 bp, Homo Sapiens
ggggactggggatcccgccgccgggccgcagcatggggcgcttccgcgggggcctgcggtgcatcaagtacctgctgcttggcttcaacctgctcttctggctggctggatcggccgtcattgcttttggactatggtttcggttcggaggtgccataaaggagttatcatcagaggacaagtccccagagtatttctatgtggggctgtatgttctggttggagccggggccctgatgatggccgtggggttcttcggatgctgcggagccatgcgggagtcgcaatgtgtgcttggatcattttttacctgcctcctggtgatatttgctgctgaagtaaccactggagtatttgcttttataggcaagggggtagctatccgacatgttcagaccatgtatgaagaggcttacaatgattaccttaaagacaggggaaaaggcaatgggacactcatcaccttccactcaacatttcagtgctgtggaaaagaaagctccgaacaggtccaacctacatgcccaaaggagcttctaggacacaagaattgcatcgatgaaattgagaccataatcagtgttaagctccagctcattggaattgtcggtattggaattgcaggtctgacgatctttggcatgatattcagcatggtcctctgctgtgcgatacgaaactcacgagatgtgatatgaagctacttctacatgaaaattgcaatctaaagctttcataccaaatgtcacaggagctgtctcccagctcatttttaacactgaaatgacattaggatctaaaataatttgctgtcaattgtacatttgcatgagtacgtatgtttggctcattactggtttaccccttgagtgaatgcctgtttatgatgactgagagcatattcatgtgtgatctgcgtgtttctggaatatgctttatacgtaatgaaatctgtttgctgggaattcctgattcttgttatataagaagaacaacctatttcgctcccagaaaaaaaaagatcaaagagctttcagaaactttgagaacttggctatttagaaaaagtgataatgggtcagtttctcagactgtagccattgaaaattagatgcagagaattcagagatttcttcttaatggaagtaataagctgtaagaattgagagatcacaatggagtgttaaaactgactgtgtctaagttgggtgtaagggtttcctgggtttttttatatacatgctctccccagaatacagtaaaccacagttttagaactaaacacatctgtaaaactaaatatagcatggaaaatccaatttgaataagtcatgctttcctagaatttaaaaataaaaaagtcttcctctggaaagagaagtcacacagacaatcatgtgccctataaaagtgagtgtttataggactaaaaaacttttaacaactttttaaggaaatatttttgttcttatacaaaaacatgtaaatattgctttattactttcattttctgaccctgctgtaaactactgcaaccctcacatcctcaaagggacttttatgtcaaactcttctgtttctccaaatataaggaaaaaagactaaagcaagagatctggcagttgaaaattgtgggaaagagaatttgtatgggcactgtatctatgaaatacctcataacttacgtttacatgttttcctaactttttgtatttttcttgtatagccacctagagaattcttcatagattaagaactacagttttcaccacttaacataagtaaaacaaagtccttcataatttaaccattagcatctttggccaaaccaaaataaagaaaagcatcttctcctagttgtgtgtgggcaacagaaacaagttaaggaaacaaaaatacttatatatacacagaacaaaaataatgttctttttatgcaaatcccctgtgaaaataaaattttcaatgtttttttggtcttaacgcttcattttaacttagtaaacccaaatttaggatttacattggcaaatttttcagtgatttttaacgtgttacatttagtaaaccatagattttttaaaaactacattttgtaaggccacacataagtgaaaatacggaaggctttggaaacccccagatgaacttctatacatgtgaaaacacaagtctttgagtgtgcactaaaagtgtcacactcccaaaaaactcacaaaacattttgctaaaaagatatgactgcttgaaatagtctctctcccatggagaaccacatttctctttctgccatacttgctactgctactgattttggaggaaatttttctagaagaacaaaggtcatatttgaggcaagctaaaaacttaattatacatggctactttactgtgtctgtagctaaagaaaaattattttacaaaaattacttcatgaaatatagtttgtaccccagtagttgagaaatgtgaccttttaggcaaagaacaggcagtccatctctcttagctttagtttatctctctgcctgaagacaggaaacaggcccaagtgcatactcgggttctttccaactcagaatcatctctgattccacaaaagtgagtttagtttcctatctgaattaacaactttaaaggagactataatagttaaaagtggaagaatagaaataaataaatttaaaatgaaattaattaaagtagaagagaagggttctgttccatgtacgattaatgtgccccttttggagataagctttccaaaatatgcgtatgagtaaaattagagaattccaccactaagcaacagtagattttatatgtgtgtgtggatatatatacacacacacacagaaagatgaatatatatatatatatatctgtataaatagacacacatataatatatatagatatataatccctatatatcttgaatctacaaatatctttatatgtatataatttgaatatatacatgtatgtatatacagatgtgtgtgtatatatatatatacatacacatatacataaattttcagctatttctgttcccctgaactaatttgagattagacccaaacatgcttttaaatgtctcatgccaaggcactgaattaagacttcttaatgttgaaatattttaagtgatttcatattaaattttctatatactg

SEQ ID NO: 29645 - DNA, 2213 bp, Homo Sapiens
gcgggactcggccttctgggcgcgcgcgacgtcagtttgagttctgtgttctccccgcccgtgtcccgcccgacccgcgcccgcgatgctggcgctgcgctgcggctcccgctggctcggcctgctctccgtcccgcgctccgtgccgctgcgcctccccgcggcccgcgcctgcagcaagggctccggcgacccgtcctcttcctcctcctccgggaacccgctcgtgtacctggacgtggacgccaacgggaagccgctcggccgcgtggtgctggagctgaaggcagatgtcgtcccaaagacagctgagaacttcagagccctgtgcactggtgagaagggcttcggctacaaaggctccaccttccacagggtgatcccttccttcatgtgccaggcgggcgacttcaccaaccacaatggcacaggcgggaagtccatctacggaagccgctttcctgacgagaactttacactgaagcacgtggggccaggtgtcctgtccatggctaatgctggtcctaacaccaacggctcccagttcttcatctgcaccataaagacagactggttggatggcaagcatgttgtgttcggtcacgtcaaagagggcatggacgtcgtgaagaaaatagaatctttcggctctaagagtgggaggacatccaagaagattgtcatcacagactgtggccagttgagctaatctgtggccagggtgctggcatggtggcagctgcaaatgtccatgcacccaggtggccgcgttgggctgtcagccaaggtgcctgaaacgatacgtgtgcccactccactgtcacagtgtgcctgaggaaggctgctagggatgttagacctcggccaggacccaccacattgcttcctaatacccacccttcctcacgacctcatttctgggcatctttgtggacatgatgtcacccaccccttgtcaagcattgcctgtgattgcccagcccagattcatctgtgccttggacatggtgatggtgatgggttgccatccaagtgaaagtcttttccttgaccaagggggacagtcagttttgcaaaaggactctaatacctgtttaatattgtcttcctaattgggataatttaattaacaagattgactagaagtgaaactgcaacactaacttccccgtgctgtggtgtgacctgagttggtgacacaggccacagaccccagagcttggcttttgaaacacaactcagggcttttgtgaaggttcccccgctgagatctttcctcctggttactgtgaagcctgttggtttgctgctgtcgtttttgaggagggcccatgggggtaggagcagttgaacctgggaacaaacctcacttgagctgtgcctagacaatgtgaattcctgtgttgctaacagaagtggcctgtaagctcctgtgctccggagggaagcatttcctggtaggctttgatttttctgtgtgttaaagaaattcaatctactcatgatgtgttatgcataaaacatttctggaacatggatttgtgttcaccttaaatgtgaaaataaatcctattttctatggaagactggtacctggtttctggaagaggggtctgtgacttggagctgatctttactgagctcgccgtggcagatgccatgctcaggacgttcatgtggatggtttcatgtcatcgtgctggcaacttgtcctccctgccttagagatgaggctcagacaaacgaccttagcacccatagcctatgccatgagcactggctccaccctgaatcccagctcctccccttagtgaccccaagtctgtttccctcagctgcataaggaggcgatatagtttgaatatttgtccccagccaaatctcatgttgaactgtaatccccagtgctggaggtggggcctgctacgaggtgtttggatcatggggacgggtatttcatggcttggtgctgttttcttgatggtgaattattgcaagatacggtcatttaaaattgtgtggcacctccccctgcccccttcttgctcctgctttcaccatgtgacatgcctgatcccccttcaccttttgccatggtcataagcttcctgaggcctccctggaagctgagcagatgccagcaccatgcttcctgtacatcctgcagaaccataagccaattaaacctttttaataataaaaaaaaaaaaaaa

SEQ ID NO: 29646 - DNA, 5891 bp, Homo Sapiens
ccaggagagcggcgtggacgcgtgcgggcctagaggcccacgtgatccgcagggcggccgaggcaggaagctgtgagtgcgcggttgcggggtcgcattgtggctacggctttgcgtccccggcgggcagccccaggctggtccccgcctccgctctccccaccggcggggaaagcagctggtgtgggaggaaaggctccatcccccgccccctctctcccgctgttggctggcaggatcttttggcagtcctgtggcctcgctccccgcccggatcctcctgaccctgagattcgcgggtctcacgtcccgtgcacgccttgcttcggcctcagttaagcctttgtggactccaggtccctggtgagattagaaacgtttgcaaacatgtcccggatcgaaaagatgagcattctgggcgtgcggagttttggaatagaggacaaagataagcaaattatcactttcttcagcccccttacaattttggttggacccaatggggcgggaaagacgaccatcattgaatgtctaaaatatatttgtactggagatttccctcctggaaccaaaggaaatacatttgtacacgatcccaaggttgctcaagaaacagatgtgagagcccagattcgtctgcaatttcgtgatgtcaatggagaacttatagctgtgcaaagatctatggtgtgtactcagaaaagcaaaaagacagaatttaaaactctggaaggagtcattactagaacaaagcatggtgaaaaggtcagtctgagctctaagtgtgcagaaattgaccgagaaatgatcagttctcttggggtttccaaggctgtgctaaataatgtcattttctgtcatcaagaagattctaattggcctttaagtgaaggaaaggctttgaagcaaaagtttgatgagattttttcagcaacaagatacattaaagccttagaaacacttcggcaggtacgtcagacacaaggtcagaaagtaaaagaatatcaaatggaactaaaatatctgaagcaatataaggaaaaagcttgtgagattcgtgatcagattacaagtaaggaagcccagttaacatcttcaaaggaaattgtcaaatcctatgagaatgaacttgatccattgaagaatcgtctaaaagaaattgaacataatctctctaaaataatgaaacttgacaatgaaattaaagccttggatagccgaaagaagcaaatggagaaagataatagtgaactggaagagaaaatggaaaaggtttttcaagggactgatgagcaactaaatgacttatatcacaatcaccagagaacagtaagggagaaagaaaggaaattggtagactgtcatcgtgaactggaaaaactaaataaagaatctaggcttctcaatcaggaaaaatcagaactgcttgttgaacagggtcgtctacagctgcaagcagatcgccatcaagaacatatccgagctagagattcattaattcagtctttggcaacacagctagaattggatggctttgagcgtggaccattcagtgaaagacagattaaaaattttcacaaacttgtgagagagagacaagaaggggaagcaaaaactgccaaccaactgatgaatgactttgcagaaaaagagactctgaaacaaaaacagatagatgagataagagataagaaaactggactgggaagaataattgagttaaaatcagaaatcctaagtaagaagcagaatgagctgaaaaatgtgaagtatgaattacagcagttggaaggatcttcagacaggattcttgaactggaccaggagctcataaaagctgaacgtgagttaagcaaggctgagaaaaacagcaatgtagaaaccttaaaaatggaagtaataagtctccaaaatgaaaaagcagacttagacaggaccctgcgtaaacttgaccaggagatggagcagttaaaccatcatacaacaacacgtacccaaatggagatgctgaccaaagacaaagctgacaaagatgaacaaatcagaaaaataaaatctaggcacagtgatgaattaacctcactgttgggatattttcccaacaaaaaacagcttgaagactggctacatagtaaatcaaaagaaattaatcagaccagggacagacttgccaaattgaacaaggaactagcttcatctgagcagaataaaaatcatataaataatgaactaaaaagaaaggaagagcagttgtccagttacgaagacaagctgtttgatgtttgtggtagccaggattttgaaagtgatttagacaggcttaaagaggaaattgaaaaatcatcaaaacagcgagccatgctggctggagccacagcagtttactcccagttcattactcagctaacagacgaaaaccagtcatgttgccccgtttgtcagagagtttttcagacagaggctgagttacaagaagtcatcagtgatttgcagtctaaactgcgacttgctccagataaactcaagtcaacagaatcagagctaaaaaaaaaggaaaagcggcgtgatgaaatgctgggacttgtgcccatgaggcaaagcataattgatttgaaggagaaggaaataccagaattaagaaacaaactgcagaatgtcaatagagacatacagcgcctaaagaacgacatagaagaacaagaaacactcttgggtacaataatgcctgaagaagaaagtgccaaagtatgcctgacagatgttacaattatggagaggttccagatggaacttaaagatgttgaaagaaaaattgcacaacaagcagctaagctacaaggaatagacttagatcgaactgtccaacaagtcaaccaggagaaacaagagaaacagcacaagttagacacagtttctagtaagattgaattgaatcgtaagcttatacaggaccagcaggaacagattcaacatctaaaaagtacaacaaatgagctaaaatctgagaaacttcagatatccactaatttgcaacgtcgtcagcaactggaggagcagactgtggaattatccactgaagttcagtctttgtacagagagataaaggatgctaaagagcaggtaagccctttggaaacaacattggaaaagttccagcaagaaaaagaagaattaatcaacaaaaaaaatacaagcaacaaaatagcacaggataaactgaatgatattaaagagaaggttaaaaatattcatggctatatgaaagacattgagaattatattcaagatgggaaagacgactataagaagcaaaaagaaactgaacttaataaagtaatagctcaactaagtgaatgcgagaaacacaaagaaaagataaatgaagatatgagactcatgagacaagatattgatacacagaagatacaagaaaggtggctacaagataaccttactttaagaaaaagaaatgaggaactaaaagaagttgaagaagaaagaaaacaacatttgaaggaaatgggtcaaatgcaggttttgcaaatgaaaagtgaacatcagaagttggaagagaacatagacaatataaaaagaaatcataatttggcattagggcgacagaaaggttatgaagaagaaattattcattttaagaaagaacttcgagaaccacaatttcgggatgctgaggaaaagtatagagaaatgatgattgttatgaggacaacagaacttgtgaacaaggatctggatatttattataagactcttgaccaagcaataatgaaatttcacagtatgaaaatggaagaaatcaataaaattatacgtgacctgtggcgaagtacctatcgtggacaagatattgaatacatagaaatacggtctgatgccgatgaaaatgtatcagcttctgataaaaggcggaattataactaccgagtggtgatgctgaagggagacacagccttggatatgcgaggacgatgcagtgctggacaaaaggtattagcctcactcatcattcgcctggccctggctgaaacgttctgcctcaactgtggcatcattgccttggatgagccaacaacaaatcttgaccgagaaaacattgaatctcttgcacatgctctggttgagataataaaaagtcgctcacagcagcgtaacttccagcttctggtaatcactcatgatgaagattttgtggagcttttaggacgttctgaatatgtggagaaattctacaggattaaaaagaacatcgatcagtgctcagagattgtgaaatgcagtgttagctccctgggattcaatgttcattaaaaatatccaagatttaaatgccatagaaatgtaggtcctcagaaagtgtataataagaaacttatttctcatatcaacttagtcaataagaaaatatattctttcaaaggaacattgtgtctaggattttggatgttgagaggttctaaaatcatgaaacttgtttcactgaaaattggacagattgcctgtttctgatttgctgctcttcatcccattccaggcagcctctgtcaggccttcagggttcagcagtacagccgagactcgactctgtgcctccctccccagtgcaaatgcatgcttcttctcaaagcactgttgagaaggagataattactgccttgaaaatttatggttttggtatttttttaaatcatagttaaatgttacctctgaatttacttccttgcatgtggtttgaaaaactgagtattaatatctgaggatgaccagaaatggtgagatgtatgtttggctctgcttttaactttataaatccagtgacctctctctctgggacttggtttccccaactaaaatttgaagtagttgaatggggtctcaaagtttgacaggaaccttaagtaatcatctaagtcagtacccaccaccttcttctcctacatatcccttccagatggtcatccagactcagagctctctctacagagaggaaattctccactgtgcacacccacctttggaaagctctgaccacttgaggcctgatctgcccatcgtgaagaagcctgtaacactcctctgcgtctatcctgtgtagcatactggcttcaccatcaatcctgattcctctctaagtgggcattgccatgtggaaggcaagccaggctcactcacagagtcaaggcctgctccctgtagggtccaaccagacctggaagaacaggcctctccatttgctcttcagatgccacttctaagaaaagcctaatcacagtttttcctggaattgccagctgacatcttgaatccttccattccacacagaatgcaaccaagtcacacgcttttgaattatgctttgtagagttttgtcattcagagtcagccaggaccataccgggtcttgattcagtcacatggcatggttttgtgccatctgtagctataatgagcatgtttgcctagacagcttttctcaactgggtccagaagagaattaagccctaaggtcctaaggcatctatctgtgctaggttaaatggttggcccccaaagatagacaggtcctgatttctagaacccgtgactgttactttatacagcaaaggaaactttgcagatgtgattaaagctaaggaccttaagacagagtatcctgggggtggtggtggggtgggggggggtcctaaatgtaatcacgagtaagattaagagcaaatcaattctagtcatatattaaacatccacaataaccaagatatttttatcccaagaatgcaagatttcagaaaatgaaaaatctgttgataaatccatcactataataaaaccgaaggtgaaaaaaattctgaaaaaaaaaaaaaaaaaaaaaaaaaaaa

SEQ ID NO: 29647 - DNA, 4024 bp, Homo Sapiens
gtgaggctgccgagcggacagcgactcccggggaagcccgcgctccgggagcgggagcgggagcaggagcaggagcagcgccgtcccaggccagaggcgagcgccgggcgccgggagagcggagagcccgggcagctgccggagcgcgggggcgcggcccgaggaaaccacagagcgagcccaggcctggggagggcgccgaacatctgaggcggcttcgcgggagacaaagccgcgcgtagagacgcgatgcccgccgatcgcgagcccggccggcgagggcgcggggactgcggcgtctgagcgcgccaagccgtgcgcccgcggggacgccgagccccggggccggtgcgggcggcggcgggcggggcccaggtgcgcccggccgcgtcgggcccgtgactgctcggggggcggcgccctcccgccgcagccgcagtggctggcgccgcagccaggagccatgggcaacatctcctctaacatctcggccttccagtccctgcatatcgtcatgttgggcttggactcggccggcaagaccacggtgctctaccggctcaagttcaacgagttcgtgaacacggtgcccaccatcggcttcaacaccgagaagatcaagctgagcaacggcacggccaagggcatcagctgccacttctgggacgtgggcggccaggagaagctgcggccgctgtggaagtcctacagccgctgcacggacggcatcatctacgtggtggactcggtggacgtggaccggctggaggaggccaagacggagctgcacaaggtgaccaagttcgccgagaaccagggcacgccgctgctggtcatcgccaacaagcaggacctgcccaagtcgctgccggtggcagagattgagaagcagctggcgctgcacgagcttatcccggccaccacctatcacgtccagccggcgtgcgccatcatcggcgagggcctcaccgagggcatggacaagctctatgagatgatcctgaaacgcaggaagtccctcaagcagaagaagaagcggtaatgcgcccggagcgaccggggagcgagcgagtgcgtcaagaaagaatgaatggatggatggatggttggatggatggatggatggatgagcgagaacccgcgcccgcgaacaaagagcgaaccaaagcgatgcttcgaatttttaaaacggaatctctgcacccaaatgcaggactggtgacttaaggagctgcgaagtctgatttaccggcctactctcgacctgccccccacccccagctcaggggaccttttgtctgaacgccagagctactgaccaggtcggggggccgcggtggggagtggaagagccggtcctgctgtccgccctcccagccccaggtggaaggctcagttgtcggaaagacaaaagcgatttcttcccactcctgcagggccagaagttcaggctgccccgcctccactgggggatcgcacctgtgaattacctgaggtatgcatttcccagaaccgtgggcgtacccaccttggggggcatgttggttctggggggaccacctctccttgcattcaggggctgtgaagctgagtaattttcggtcacagggcaggcccctgttgaaatttcatttgtcctgctctgggcccaaaggtggtggtggtttgggtcatcagaggactgcctgggacggttcagcgggcacggagcgctgtgctggcctggctggggatggccgcggaggtgcccttttcctggtgctttgtggtggctgcagaagaccagttttgttgagaactgcttttcagcctggaatcagacatcttccagatggtttggaccctgtccatgtgtaggtcattatcacacaaagagaccaataaaaataaaaaaaataaaaaaaaaaaaagacgaactattggaggtggtggccaatgatgcatttactgtttgcaggatagttaaaggtgtttaaagggtaaggcttttggtgtaaatgctggatggggtgtgtgtgtgtgtggatatagggacctccctctgtactgtgtactgtgtaatcggcattaatacctagactcatatgtatggaattttaaattctcttagcctactgattggtttggatgagcacaccagctgcaggtgtgtgctgaattgcaagatggtatttttttttttaaccaagggatgtctcttgtaatactaaccgcgtgataatgggttttcagacatgatgaaaaaaaaaaacttttacaaatgaatacttaccttagaaatattcaccttaggaaaaaagactttgctctgcccttttatattcctttatgctgcaagtggtgacatgttcagatttctaatttggttcattgtggcctatctggtttaagtctttcattaaaaatgtctcgttagagtatttgatgtcatgcaccaaaaaaataaaaccccaccttgttgcaaaagctgacctcgttgcatggaattaaaagagaaggaaaaacacaaggatgaagtctttccgaattcattcttgtgggaactggccttcggagccagccagcactttgggcaaatgcaaacaacaatgagtgcttgagataaaagaaagtgtgacgtcatggtcactggtactcaggcacttcacagtttacttgaaagaggctttggaaaatagataaagtgaaagaagaataaatacatatttttaataatgtaattttaaaaatcctttataatcaggactgagtcttggtttgcagaagctgtcacttaccctgaaacacagtatcaaaagggaaacttaaaacatactgtttgatttttttatttcctcttacaatccatgttttcaggtagaattatgactttccccccattgttacacatttctttacaaaggaggcctgtagaaattggacacgatcatgcttgagcatgtgagttagtcaaattatgagtccctgcctattgtccattacacaccgaatgttaatttaagaaccagaggcagaagttctggcttcctgcttgaaacccaattcttatatgaaattttttaaaagcagaaacctagcagcccatctgctttttctcttttgtcggtgtatttggtacccctccaatgctggtctttttgtagaaactcagtagagaaagtctagctaagcagtgttgaaaagcctgcaagatttcagtttacatatcgacagcatatccactgatttctaaatgggctggtcccatcatctgaagattctgtatagaattattaaaaaaaaaatccatctttctttattttcttcacatgcgacaatttcttaagcactttgacattttggtagttccacactattgagagaataatatatttattttgtgacattgcagatgccaaatactgtaaccttctcatgataacaatacttaggttcaagatcactgttcaaaccctgtcatgctttaaaactgatgcgagatgattttgttttttgcataatcaatacttaagggtgcaatcaactgttagtaattgtgcagtaaagtaaagccctgtggtgtatcaactactagttaagagtctcagttgatttctgtaatgtttgacctaataatagcccgtttcgtctctgacccaacagaggaagcacagatcaaatcaccttggagtggtcaccagggggacagggagccccccaccaatgtatcaatgggtgatttatgatgccttctgccctttggcgagtgaatgggtttcccataggggaagttggcctccctccgtgagctttggaaatgttttctaatagacacagggaggccagttctgtttcagagcaattatcttcccaaattctctgttctggtgttggaactgtgtgccctggtttctgttttcctttctactgctgtaattctctgtctcatcatccttctcttttgtttccatagccttttataatgcatatatgatgctgtgaacagaaataaattatttatacaatcaaaaaaaaaaaaaaaaaa

SEQ ID NO: 29648 - DNA, 3162 bp, Homo Sapiens
gcagcctggcggcgacctgaccgcccgaggctccccttcacctgcagcggctgctcggctccctctgggaacgccgccttttctaacttaagggcaacaggtggtgccggtggaccgagagagagctcagctccgccgcgctgggagcggcagttaccctcaccaattagggagcgggggcgggagttgcatggcttccctgatgcgggtgaccaatgggatttgggatcatgagtggaccgggaggagtgggcgtggtcggagtctgagtccaaggtttctcgtgcggcaactgccagagctgcttggagagctaagctggaagggtgcttatccctgcgtagaaacgcctgccaatgctttctcatttggacccagactccagatcgggagcagtcttatagctggatcagctaccaagagaagttgtaaaccaagaagagaaaagcatttcaatttgggacatttatttgcacctggaaatggggaatgggctgtcagaccagacttctatcctgtccaacctgccttcatttcagtctttccacattgttattctgggtttggactgtgctggaaagacaactgtcttatacaggctgcagttcaatgaatttgtaaataccgtacctaccaaaggatttaacactgagaaaattaaggtaaccttgggaaattctaaaacagtcacttttcacttctgggatgtaggtggtcaggagaaattaaggccactgtggaagtcatataccagatgcacagatggcattgtatttgttgtggactctgttgatgtcgaaaggatggaagaagccaaaactgaacttcacaaaataactaggatatcagaaaatcagggagtccctgtacttatagttgctaacaaacaagatttgaggaactcattgtcactttcagaaattgagaaattgttagcaatgggtgaactgagctcatcaactccttggcatttgcagcctacctgtgcaatcataggagatggcctaaaggaaggacttgagaaactacatgatatgatcattaaaagaagaaaaatgttgcggcaacagaaaaagaaaagatgaatatcaatacctattatatctgtgtggagtaggttttctctggtctgattttgacaaatagaagagtgtctacagcgtggtttgcctgtctgccctcctggatgctattaaagctttgttttgttgaacaatcagatgcccaactctgttgccttgtggaagatgagtaaatgcagtgcttcttaaagtggtctcttctccctaccccacaaatcttttggtactaccatttggggaagccaagcaaggatagtaaattgaccagaacacagttgtgggaatttggtctgaagttagtgaaataaaactttaaagagtgtctgcctagtgttttgtgcttacatctttcggggggaagcctttgcaagaaaattgcatacaaggctttgtaacgatcaagtgctaatcgatggaaatgttaaggtagattaacatatatgcagttatattgatcacattggtccaaccagtccttttttgaagtaagggacaaggagtaagtattttcttttttaagtttctgccaaatgatttttgacgctttctggaatcaagtaatttaatagtatagcttaattctagacaatgtttaagttggtctacctttattaaaaataagatatttggggtatattcaagtgcatggattagttttcctgacaaagcatgttttggtgtgtagtcttactttttagaaatagctatgcatcgttctacacaggtttaaaacaacttttttggggatttagggctattataggaatagtttgttgtcagaagcactttcacttgaagaacctaaaatgattgactcattcatagtaaatatgggcatgtaaactaataaatatgcactggatacatatatggatttatgaagaaggcgatttagtcaagaggatgtaattaaaatatgtggtctctaaaatattccagttacaagatatttgttttattaatatttgctggctaaaaacaaatgtggtttttatatatttttgtagtgtgttgagaagagcaaaagctttataaatatacctgatgcgctgtagaatgaaaatgtaaaagataacctgtatgtgttccgagctttaattttttgtttacaaattgaacagtgttacatgggctgtccagtcctgattatagagaggaagaaatggtaacagtatggcagataagaattacaattatagaaaatgaggggaaaataacaaacctgttttatgaaaattcactggtgctgtttacattggaataaaaagctctataaggaggaaaggcctttatctaattcttatctacagacacttacttccagtgaccatattttactaaatcagcttattttttatgtctaaagcaacagctgttctgaaaaatcaccaaaagaaatgcactttgctagcaggatttgttttggctttgggttttgtttttttgttttttttttttttcagtggcataacagtttttggaaccttgattcttgtgtcacacaaaatgaatgaagtagcttgatgtggagccttcatatgttaaatattcctgcactagtgatggtcacttagaatgtttatagaaatgtggataataactaccaataaactacttgaggcactaggagaacagtatttgactttgaattttaatgtatttccacttttgctgaagcttttaatcagatgtgtaaaaacaattgaccagctaggctatttagtcccatagtagttcagatctgcttagatgtgacaggcattgaaggctgtttttttttttttctcccttcactgatactgaaatcatggtatctgctgcaaacatgagtagatccatgatggattaataaagcttgctgaaaaaaaaaatctgtgtatcagttagatttaccagtttgcctgtactttctgtctacctactatgtaaaatagtgctgtttttaagtatttcaaaagcttgtgtgttgaccctttgtagcctaagtacgtaaacaaattaatgttatctaagtttttcatatttcatggacaacaaaagagaaaatggtatgaacactgtacaaactttgatttataaa

SEQ ID NO: 29649 - DNA, 1399 bp, Homo Sapiens
cgggccaaccgcccggacctcggcgctttcttctaggatccgcatgaatcgctttgggctatcggaagagctatccccagttctcgggagaaagagtccgcgaccagcgtctgacctctcactcagagtccccagtcctgccttagtttccccagcgaccctgaatttggagttgctgtctctaagtgaaagctgaacctgcaaccccttgagggtttcagccgcagaggggcgggagaaagggcctggttggtaggcgggctcagcggttcgcgcccagttagccccgagcttcggagacccgagagaccagaggatggctgacacgaaggggcacccgagacagcgcctgggctttttcccgcccgcggttccaccgctctgaaaccgatttctaacagagagagacatagtcttgctctgttacccatgctggagtacggtggcgagatcacgactcactacaactttgaattcctggattcaagcaatcctcccatctcagcctcctgagtagctaaggactacagggcgactttgtcagtaccccaaactgtccccgcatgaggtcactctgcacggtcacgtgctcgagcccgcgggagcgccacatcgccagccgcacccctccacccccaccctgcccacgtgacccggcctagtttctccaggcccgtccctacgtctcactcgggaagccccgccccacgctgagcgctccgcctgcgaccctccgccacttacccaccccggctcaagcacgacccgtggatccacgtgctttttcttgtccaatgggagccggctcccgggcgcgaaggggcggggaggaaaggaacgactgtgctacgttgccagaaggggcgggacctgcaacgtccgacagaacgaggggacgtaacggaggcaggttggagccgctgccgtcgccatgacccgcggtaaccagcgtgagctcgcccgccagaagaatatgaaaaagcagagcgactcggttaagggaaagcgccgagatgacgggctttctgctgccgcccgcaagcagagggactcggagatcatgcagcagaagcagaaaaaggcaaacgagaagaaggaggaacccaagtagctttgtggcttcgtgtccaaccctcttgcccttcgcctgtgtgcctggagccagtcccaccacgctcgcgtttcctcctgtagtgctcacaggtcccagcaccgatggcattccctttgccctgagtctgcagcgggtcccttttgtgcttccttcccctcaggtagcctctctccccctgggccactcccgggggtgagggggttaccccttcccagtgttttttattcctgtggggctcaccccaaagtattaaaagtagctttgtaaaaaaaaaaaaaaaaaaaa

SEQ ID NO: 29650 - DNA, 6776 bp, Homo Sapiens
gggagagggaagggggcggagctagccggagccgcgagtccattttggggctgtgcttggcgcgtaccgtgcggtccctgtagttggaggacgggcggtcgcgcggcctttcccactagccggagtagcctctagttcgttagtcaaaacgtgaaaaaaaagacctgctttgccctgggaaatagtaaccctgccaaatacatcagcttgtaggagacagaggatgtgatggagctgcttgaagaagatctcacatgccctatttgttgtagtctgtttgatgatccacgggttttgccttgctcccacaacttctgcaaaaaatgcttagaaggtatcttagaagggagtgtgcggaattccttgtggagaccagctccattcaagtgtcctacatgccgtaaggaaacttcagctactggaattaatagcctgcaggttaattactccctgaagggtattgtggaaaagtataacaagatcaagatctctcccaaaatgccagtatgcaaaggacacttggggcagcctctcaacattttctgcctgactgatatgcagctgatttgtgggatctgtgctactcgtggggagcacaccaaacatgtcttctgttctattgaagatgcctatgctcaggaaagggatgcctttgagtccctcttccagagctttgagacctggcgtcggggagatgctctttctcgcttggataccttggaaactagtaagaggaaatccctacagttactgactaaagattcagataaagtgaaggaattttttgagaagttacaacacacactggatcaaaagaagaatgaaattctgtctgactttgagaccatgaaacttgctgttatgcaagcatatgacccagagatcaacaaactcaacaccatcttgcaggagcaacggatggcctttaacattgctgaggctttcaaagatgtgtcagaacccattgtatttctgcaacagatgcaggagtttagagagaaaatcaaagtaatcaaggaaactcctttacctccctctaatttgcctgcaagccctttaatgaagaactttgataccagtcagtgggaagacataaaactagtcgatgtggataaactttctttgcctcaagacactggcacattcattagcaagattccctggagcttttataagttatttttgctaatccttctgcttggccttgtcattgtctttggtcctaccatgttcctagaatggtcattatttgatgacctggcaacttggaaaggctgtctttcaaacttcagttcctatctgactaaaacagccgatttcatagaacaatcagttttttactgggaacaggtgacagatgggtttttcattttcaatgaaagattcaagaattttactttggtggtactgaacaatgtggcagaatttgtgtgcaaatataaactattataaaatctgtttcaagtatgcagttttcttttgttagaaattgttagagaatagagagtggtaattcagatttggtcaacgattctagtcacatattttcctccaaaagtattccttccaaaaataatctatacatgttcaaattaggtagcataaagataaaagtgaaatttagtagtataggcctgaacctttttttgtttaaaagagtgcttttgaaataagcatccaccccaaatgttggttgtatttatgctgtgataaaaataggtgagagatcatatgatctaatattgtattgatggaagtataggtagtatagtagtgattgttcttcaagcatgcagtaaagatcacttttttttttttttttttttttgagatggagtcttgctctgtcgcccaggctggagtgcagtgatgcaatcttggctcactgcagcctctacctcccaggttcaagtgattatcctgccttagcctcctgagtagctgggattacaggcgcgtgccaccacgcccagctaattttttgtatttttagttgagacagggtttcactgtcccttaagaccatcctgttagccaagatggtcttgatctcctgacctcgtgatccgcctgcctcggcctcccaaagtgctgggattacaggtgtgagccaccgtgcccagccaaagactgctcttaaagcacctttttgacagtgaacatggtctaaaaaagggaagatattgtagaagatttcacacacacacgcgtgtgtgggagacaactaaaggtattgaaggtactaattaattagatttccaaaattttctacagagagttaattatcaccaaaatgtgaatggtacatacaaaacctggcattttcttgtgataagtttacatttttaggagagtggagctttcaatctgcccttttctcctttgtttttgtagttttcaccaaagatgatcaactagaaatgttaagtggctatgcaagcaaaagcatagataggttaaaaaaaaggatcagctggctgggcagggtggctcatgtctataatctcagcattctaggacagtgatgtgggaggattatttgaggctaggagttccagttcgaaaccagcttcgtaaacatagcaagacccagtctctaccaaaaaaaaaaaaaaaaaaaaaaaaaaaaaaaatatatatatatatatacacacacacacacacatatgtacacatacatatatatacatatatatgtatatatagaacacatggcaagagcaggaaatgggaagactaccttttttctggcagctatgtgttgttttgttcgaaagatggcaagtgtacaaccaaaccaatccacttgcttacagaaagaatgtttagtgtagttaagactaatttgacaacagataaaacagtctgtcagctattacaaagtaatcagctgaacactaatgctgttctgtctgctcacaagagataaagataccctctcatggaataaacaccttgcttagaattcatataacaaagaagtaaccttataactgctctctagtctgccttatttgtgtcatagagtaagatattccttgaaagcccattaagtggaatagactttctgaaaataagagttctttacctcagtcctcctctaatttggttgagaggaggtaatgaaaatggggacaggataaaaggtggcaactaaatttaaagcacagaagaaatgatttccttctagctatgagaatagtcaaattgagcttgccaggctgtctcattcctaacatgtaattcatgatttagccactaaatttctaaggagatcataagaaattaagaaaaacgtttaagtctagcctctgcgtggtagacaggtatggggagggagaatgcttttcccctcccagtaataaaaaaaaaaaaaaaaaaaatatatatatatatatatatatatatatatatatatatatatatatatatatatatagttttactaggttttcatggataagtttttaaatgtaagacaggaaagggatctatttgatgtctatcttcagatatattggcagttttccttaagctatttagttcctcatctgttgctttttcattttgtatactgcaagttcccaggcaactcgaatttgcaaacacagccatggatacactatttaccttacagtagtttcctgggaatctaagtctggtttttgttattcttccctcccctccactgcataatcatgtataactagcaacatttatggttataggttgatttcctaagtgtggctgatggtagcctctagtttgaagtgagggaagaatgagtagtcaggaactggtcactttgaatgtgggagggaagatattcacgacaaggttttctacgataaagcagtttcctgcttctcgtttggcacgcatgttagatggcagagaccaagaattcaagatggttggtggccagatttttgtagacagagatggtgatttgtttagtttcatcttagattttttgagaactcaccagcttttattacccactgaattttcagactatcttaggcttcagagagaggctcttttctatgaacttcgttctctagttgatctcttaaacccatacctgctacagccaagacctgctcttgtggaggtacatttcctaagccggaacactcaagcttttttcagggtgtttggctcttgcagcaaaacaattgagatgctaacagggaggattacagtgtttacagaacaaccttcagcgccgacctggaatggtaactttttccctcctcagatgaccttacttccactgcctccacaaagaccttcttaccatgacctggttttccagtgtggttctgacagcactactgataaccaaactggagtcaggtattttgtactttgcagtatttctcttgtataccagtttgtgatgttttctctaaaaacttgaagttcctcaggcctgtaacttctggaaaagatgattattcaaaataatgttttggggtaaccagtggagttgggtagaatgaccaaataattattttccaaactgggatactttttagagtgaaaggggctattattaggtgggacaaaaggaataaatgaagactgcccagaaaaaactgagactatggacattcaaatcatgggagaaaataattttgtagattatgttccattgctaatgaatttgacttagaaaagaattgccttatttttaagagattgtttcagtggttcacataaaggctcgctcactggtttctcttgagttccttacacactatataagttgttctttcagttttatgattcaactactgtttttccttcagctgactttatttttaaacacccttaaagacagatatatctcatggcaaatttggtatcctgttacagccttggctcttaaacaactcaaaatattgggataggctgtcagtatgttaaggatagttgctcctgagtcaattcttcacttactccctctgttgttcttggctggatcctaacgctgatttccactctgctgtcacaaacatttttccccccgtaaaatgtcttaatgctgtcctaccattattttaccaactgtgaaagctggctttaatttttaggaggaaaagaaaagcctgcatgtgttctttattggtatcatttaaaatatacttttttttttttttttggtaaaggtaggcgtattttaagatattttcttaacttgagcagtagccaacaggaaggataccagtgtctctctctcttagcgacacactccttggtcttgcttaccaactggaggacactaggtagaataaccgagtatgacaattcttaattgtttacattttataacttcctgtccttcaaaagagtttgaaatgtcattttgggaaaagagagccagtcaagctagtaggctgattgtgaagaaaatctaataccttatctttatctcaaacctctgtacaactttattttcattgatgggatactttaacaaaaatgaaattttttttggtttttaaaatatgagtgattatgacctctttggggatcatgcttcaaaaagtcagaaacctagagacaaaactgtcattgatttttaagaagaaacacactaggtcaaaagaagatgtcctggaaatatgaagtactctttaaaaaccatgcatttggagaaagtaattgtttccttgaaaaacatgattaaaaactaaaactgggatgttcctgtgtgtacacagtgccaaatggttttccctttttatgttgtgttttagaaacagcacgaaagttttttccattttaaagtgagaaaacattatatttagacttccataattccaaaatcagaagctatttttaaaattagcattttcttgcatcaccaaatggtattcaattgtttgaagctcaaaatttttaccattccataaatgtttgtgaatttttagacagtgccaatttaaaagtagagatagccaatctgaatacggtgaaattatggggatctctggtgattgggatgaaaactctggccttaaaaggtccacttttagtatataattgcctaattagcaatcatttttattttttgctcactccctggtctgaatctatctgtctattcagatattttttggtaggtttggaaaatggagaagtgagcctaattggtgcctaattgtctggtgtatcattcactttattcagtttgttctatcaatatgatttacccctcaaggttaacctagcaggttgctcagttattatctctcaaggtcacagtactagaaatacttggcttgcatctttcagatgccattcatgttatcaagctcaaattatagttggtcacaggattctaaagtctttatttgacttctcctttttgaactggctcaaatggaaaagtgtagttgcttttaaatgttaaaaataagtttaaactttatatttcccattggtttcccctattttgtcctttctttgtgtgcttgaaatattttatttttcagtttgtcctcatagggaatcaagtattttagctaggtgatgtcttgcaagtacgttccactttgttacaatctactatctgtatatactatttgtatcttaattcttttatgagatgttctgtaacatttttctcactttgacaaatgtttttagactgtacagtcaagatctggcgcttgggggtaagtggaatgatttgctaatattgagaatctgttgtatcaaacataataaactttttttgagatgtgaaaaaaaaaaaaaaaaaaaaa

SEQ ID NO: 29651 - DNA, 4163 bp, Homo Sapiens
gagggagtgaaatgcttaattcaggaatggattttggagtttctgggtgctgaagaaatagggcctttccgcctgcgggcccagtgagtcgacacggtgggggcccgcgatccccgggacttaccactgaataaatccagtccagcgtgcgacgacttactggcttcatggggtcgcagccgccgctggggtctccgctgtctcgcgaggagggtgaagcgcccccgcctgctcccgcttcggagggtaggcggagaagtcgccgggtacgccttcgcggatcctgccgacaccgacctagctttctgggctgccgggagctcgcggcgagcgccccagccaggcctgcgccggcatcctccgagataatggcatcagctgctaaggaatttaaaatggacaacttttcacctaaagctggcactagcaaattgcaacagacagtaccagctgatgcatctcctgattctaagtgtcctatatgcttggatagatttgataatgtgtcttacttagatcgctgcttacataagttctgttttcgctgtgtacaggagtggtcaaaaaacaaagctgaatgcccactatgtaaacagccctttgattctattttccattctgtgagggcagaagatgacttcaaggagtatgtcctaaggccttcgtataatggttcttttgtcacccctgatcgacgatttcgctaccgtacaactctgacaagggaacgaaatgcttctgtgtattcacctagtggtcctgtgaacagaagaacaacaactccaccggatagtggagtactgtttgaagggttaggcatttcaacaagacctagagatgttgaaattcctcagtttatgagacagattgcagtaaggaggccaactacggcagatgaaagatctttgcggaaaattcaagaacaagatattattaattttagacgaactctttatcgtgctggtgctcgagttagaaatattgaagatggtggccgctacagggatatttcagctgaatttttccgtagaaatccagcttgccttcacagattagtcccctggttaaaacgtgaacttacagttctttttggagctcatggatctttagtgaatattgtccagcatattatcatgagtaatgttactcgctatgacttggagagtcaggcatttgtgtctgatttaagaccatttttacttaatcgaactgagcattttatacatgaatttatcagttttgcccgatctccttttaacatggcagcctttgaccagcatgccaattatgattgccctgctccttcatacgaagaaggcagccattctgattcttcagtcataacaatatctccagatgaggctgagacccaagagctggatattaatgtagccactgttagtcaggcaccatgggatgatgaaactccaggaccatcttactcaagctcagagcaggtacacgttactatgtcttctcttttaaatacttctgacagttcagatgaagaacttgtcacaggaggagccacgtctcagatacaaggagtacaaaccaatgacgacctaaataatgacagtgatgattcttcagataattgtgtcattgttgggtttgttaaaccactagctgagaggaccccagaacttgttgaactgtcctctgattctgaggacttaggttcttatgagaaaatggagacagtgaagacacaagaacaggagcaatcttacagttctggtgatagcgatgttagtagatgctcatctccacactctgtccttggaaaggatgaacaaataaataaaggtcattgtgattctagtacaagaatcaaatcaaagaaggaagagaaacgatctacatcattgtcatctcccagaaacctgaactcatctgtaagaggagacagagtatattctccatataaccatagacacagaaagaggggaagatcaagaagttcagattcacgttctcagagtagaagtgggcatgatcagaagaatcatagaaagcatcatgggaagaaaagaatgaaaagtaaacgatccagaagcagggaaagtagcagacctagagggagaagagacaaaaagagatcaagaactagagatagcagttggtccagaagaagccaaactctgtctctaagtagtgaaagcacaagcagatcaaggtctcgtagcagtgatcatggtaaaagaagatcacggagcagaaatagagatcgttattatttaagaaataattatggaagcagatacaaatgggagtatacttattacagtagaaacaaggacagggatgggtacgaatcatcttacaggaggaggactctgtccagagctcattattctagacagtcttcaagtccagaatttagagttcagtccttttctgaaagaacaaatgctaggaaaaaaaataatcacagtgagaggaagtattactactatgaaaggcacagatcaaggagcctgtctagtaacagatcaaggactgcatctaccgggactgaccgggtgagaaatgaaaagcctggagggaaacgaaaatacaaaacacggcatttggagggtactaacgaagtggctcagccatctcgtgaatttgcttctaaagcaaaggacagtcattaccaaaaatcttcatcaaaattggatggaaactacaaaaatgagagtgataccttttcagacagccgatcatcagacagagagacaaaacacaaaaggagaaaaaggaagacccggagcctaagtgtagagatagtttatgaaggaaaagctactgatacaactaaacaccataaaaagaaaaagaagaaacataagaagaagcataagaaacaccatggagataatgcttcacgttccccagttgtaattaccattgacagtgacagtgataaggattctgaagtaaaggaggatacagaatgtgacaatagtggtcctcaagaccctctacaaaatgagtttttggctccttccttggaaccatttgaaactaaagatgtagttacaatagaagctgaatttggtgtgctggacaaggaatgtgatattgccacacttagtaacaacttgaataatgccaacaaaactgtagataatattccacctctggcagcttcagttgaacaaactctcgatgtaagagaagagagcacctttgtttctgatttggagaaccagcccagtaacattgtgtctcttcaaactgagccatcaaggcaattgccatcgccacggacatcattaatgtcagtatgtcttggtagagactgtgatatgtcttaaaactgccaaagcatttcattgagaattatgatgttataaaaaggaaaaaggaagaatgtcgtctactgcagtctatttaaagatgacatttggtgaaaactctcttcctccttacaatattttaaatgattttttttttggtgttaatttgtaaaaatcattatttgttcaaaatgtatgtcccaccctcaaagatatgcacttttaagtgaagaaaatgatactgctagcagcttatttaaaacttggggtcctttttaaataagaaaaattatataaattttagaagttatttcataaagccatacggtattgacatatttttaaggtagtcaatgagtatttttgaattttttttttttgagagttattctggaaatgtgttataagctaggagaatccctttggacagtctttatttttcttcttaaaaatttatatgattcaaaaccatttcttcaggttaaattgaggcattttaatctgcacagtttatcttctgccaaaataaaaatttactatttcctttatatacttgtttatctggactgccagtaaaacaaatgtgtattcaacaaaagaaaaaaaataaaacagtaacactttaaaacaagaatcagacattttcctatgcagtatttttttttaaagtttattttagtaaagttaaaatcttgaaagtagctaagggcataattatgtcataaatactgaacttcaggtgaacaaatactttatagttttaattattttctttgattttgaggagtatcttatttgctttctatcatcagtaaaaacagcatttaacttgctaaataaacatgaaaaacccttgtcataaaaaaaaaaaaaaaa

SEQ ID NO: 29652 - DNA, 4763 bp, Homo Sapiens
  misc_feature (3847)..(3847): n is a, c, g, or t
cccctcaccccactcaactgccccgggcccccgcgcgcgcggccgcccctccactcaccctgtgtcggccccgctcccctctcccccaccaggcgagcaggcgagcgggcagagcccgcggcggaggtcggcgcggctccggggttcatggtgacgaggcggcggccgctcgagcccagcggcggcgggcggcgggagctggggcgcgggcccgggccgcctctcccagagcgcggggccgggcggcgggcgcgcccaggcagcggctgcgagcgcccccccgcgccgcgcccccgcgccccccgcgccgcgcccccgcgcgcttggcttgcggggggccgggcctgcgggcggccgccgcgccgcgcacccatggacggcccggccatcatcacccaggtgaccaaccccaaggaggacgagggccggttgccgggcgcgggcgagaaagcctcccagtgcaacgtcagcttaaagaagcagaggagccgcagcatccttagctccttcttctgctgcttccgtgattacaatgtggaggcccctccacccagcagccccagtgtgcttccgccactggtggaggagaatggtgggcttcagaagccaccagctaagtaccttcttccagaggtgacggtgcttgactatggaaagaaatgtgtggtcattgatttagatgaaacattggtgcacagttcgtttaagcctattagtaatgctgattttattgttccggttgaaatcgatggaactatacatcaggtgtatgtgctgaagcggccacatgtggacgagttcctccagaggatggggcagctttttgaatgtgtgctctttactgccagcttggccaagtatgcagaccctgtggctgacctcctagaccgctggggtgtgttccgggcccggctcttcagagaatcatgtgtttttcatcgtgggaactacgtgaaggacctgagtcgccttgggcgggagctgagcaaagtgatcattgttgacaattcccctgcctcatacatcttccatcctgagaatgcagtgcctgtgcagtcctggttcgatgacatgacggacacggagctgctggacctcatccccttctttgagggcctgagccgggaggacgacgtgtacagcatgctgcacagactctgcaataggtagccctggcctctgcctgcctcccgcctgtgcactctggaacctctggcctcaggggacctgcctgtcctcagctccctgggagctgaaagtgaggatactccgtgctccaggccacagggtgaatgtggccatgcctacctgttttgtttttttaagaacagaaacaactattttaaaagaactcttttaagaaatttcataaagggacatgcattttactgggtttgcttttcttaaaacataccaaaaaagaaaaaaatagaaaaaaaaaaaaaaaaagctgatctctatcagactcttcaactgtcctccctccaagcagaccacctgtccccttctatcccagctcagagcagctgacccaactcagaatctctttcctacaggatgaaagtgccttttgaatgttatttttaagccgagagttaatttttctacacaacatatttccagacatcttttagtcttttattgtcttagatactataagaagatgaacatgacaattttctagaacctggtagcgtgtgtgtgtggttggcggggggtgctgagggaggggagtgagtcacaggagcctgtcccccaacaggtgtgactgctctgacaacctgtggcatgctgcagggtcaggctcctgataggaggatttcatgactatgtcattgtctccactcatttttgacccagtttggaatgtatctgcaattgtgtggctcaacactttaggaaacatagattattttatattattatttctgatggtgacaagtttgtcttgaggtcacattttctccttgaaaagtgacatcctgtcacttctgctctcacactactgccatacatttgtgtttttttgttgttattgtttgggtagagcagttacaagaaaccctaaaacccttggatataaaagaaatctgtttattgatttttaaatctttcctttccaaaagctggatacacatggagctgtttgggaattttccttgctgctaccgcgctgccaccaaatggaattgaccagcggctgttacactgttctttgccactgtgcctatgctcagaatatgctcactgctaagctacaaactcggacagggtcagaaacagaggtgtcccatcccattgcagcctccaccacctgtaaccccttcctggcattggccactgaagggtacaaaggcaaaaggaccacagcaccacttaggtgtagcatggattttaaactgcagtcagtatcagatcctgtttgataaataagctgactgttctctcttgagaacctgtggcctcaaccagccaccaagctgatgtggcccaagctccatctcttggtcttctcctttgaagcacagcctatttctgagccaagggttggggaagcctgtctagatgtgggactcattgccccaaaccagggagaggaagagctcccacagggagagcccaggctctctttgcagcctttcccagtttggtgtttaaagcagtgccatgttccttgtttgacaacaagacagtctgtaaagtattgctcttaaaaacaattaaaaagaaccctttcatattggcaccattgccttagtcctctgtgggttggtcttcagccagcattctggtgggagtgactggcattaacaagactggaaatcgggggtcaaagtaaaatatctttgttttgctttcattcacaaagtaatgaagccagctgccaattacatcctcccaacagcactttggtctgtgactgctgtgtgatattcagaagggaagtagtattcagggggtaaacaggtctcccagcattctgagtgttccaaaccagtaatccacatgccaattcaaatagaacagccccttgctagatattaccacagataatgacagtacatggtagaactgcccatgccacaaatatttatttggaaaagtagtcattaaatgaacccactgccttaaatgtcttgaatgttgcagtcaagtgtctgtcatgtgttgatatccacacagaattaggccctaatgagagccttagaccctcaaccatgcccccttcgttggcatcacagggccttatttggaagagcggggcaaagaggatggaaatcataaaatatttcatgggaatcgaacctagggatagtgctccacttctgacgatggagtgaagacacttggcagacttgagccagacacttcacctagtagttcctgaaactgtgagcaccactgcactaagccagtgcggagctgttagggacgggcccagctcctgcacacggacacagaatgtctggagagggcagcaggcctctgagggttctggaatctgtgccaccttatttgaccacactccaaaattctgtttttattttaacccttgaatctgctttatgtacataatcaaaatatctatatctatatctatatctatatctatatatttttaatcatctacatgtaaatgaagcaatagaattctaacataaggccaagaaatgagacgaatgtttggggtttatgttttttaaggtaaatacgggtattgtttttaattattaccatgtattaaattgtgggctttgaaacctaatgaaacctgttagccacttctctgtgccatatacttcccatgttaccaaaatacgcccaactctttagccaaaagagaacnctgacctcctgagtttccatgctcctttctgtcaggtttaaatgtagtcttctggagaagtatttttgacattgagctctgggacaggacaccttgggtttgtggactgcagcccactatgatgttattacttctctggccaggcctccagtggaagtgcacaggcactcccaatgttgttaatgctctgtcttccatttgttctggaatcctacgtgttggtctgtggttccatgcattagctgtttgtaaataatgcatttgcatactgaaaaaggaatgccacctgccacagttgatggtgagaagctcctttgacgtggtgcaattttgatgagatgtctctggggacacgaggatgccctaatgatgctgacttgtcatggttgcagcatttgaacttttggtgttaaaaaaaaaaacctgtaagtctgtaacctggcaacattttacaaccctgtatttttaaagatggctttctaataaaaaatccagaaccacacagccctatggtcaaacaatcctacgtttgtgcctctgcttttaaaggtgctgtgctggacagttggcatgccagggttcgagaagagtgaatggcttgacgtccttgcagttaactgtgcaaaattggctggctgcctctgttcctactgtactgtaactttgatcatgtctgttcctattccattctcccaggagcttctctgcagactgacacaccctcccccaccccgggtagtggagatgctggtgtctgggtagtcatggatttctgctgacatttgaatgtgataaacaatccagcattacttaggaaatgctacatgcggaatgtgcacgtttccaggggcgagtattgtcaatcaaaaggtttgcaatgatttccttcctgccaaaaataaacatgtgaaactgc

SEQ ID NO: 29653 - DNA, 1662 bp, Homo Sapiens
tctccgccccccagtacctccctcccctcccctccagcatggtgctcgcggccccgctgctgctgggcttcctgctcctcgccctggagctgcggccccggggggaggcggccgagggccccgcggcggcggcggcggcggcggcggcggcggcagcggcgggggtcgggggggagcgctccagccggccagccccgtccgtggcgcccgagccggacggctgccccgtgtgcgtttggcggcagcacagccgcgagctgcgcctagagagcatcaagtcgcagatcttgagcaaactgcggctcaaggaggcgcccaacatcagccgcgaggtggtgaagcagctgctgcccaaggcgccgccgctgcagcagatcctggacctacacgacttccagggcgacgcgctgcagcccgaggacttcctggaggaggacgagtaccacgccaccaccgagaccgtcattagcatggcccaggagacggacccagcagtacagacagatggcagccctctctgctgccattttcacttcagccccaaggtgatgttcacaaaggtactgaaggcccagctgtgggtgtacctacggcctgtaccccgcccagccacagtctacctgcagatcttgcgactaaaacccctaactggggaagggaccgcagggggagggggcggaggccggcgtcacatccgtatccgctcactgaagattgagctgcactcacgctcaggccattggcagagcatcgacttcaagcaagtgctacacagctggttccgccagccacagagcaactggggcatcgagatcaacgcctttgatcccagtggcacagacctggctgtcacctccctggggccgggagccgaggggctgcatccattcatggagcttcgagtcctagagaacacaaaacgttcccggcggaacctgggtctggactgcgacgagcactcaagcgagtcccgctgctgccgatatcccctcacagtggactttgaggctttcggctgggactggatcatcgcacctaagcgctacaaggccaactactgctccggccagtgcgagtacatgttcatgcaaaaatatccgcatacccatttggtgcagcaggccaatccaagaggctctgctgggccctgttgtacccccaccaagatgtccccaatcaacatgctctacttcaatgacaagcagcagattatctacggcaagatccctggcatggtggtggatcgctgtggctgctcttaaggtgggggatagaggatgcctcccccacagaccctaccccaagacccctagccctgcccccatccccccaagccctagagctccctccactcttcccgcgaacatcacaccgttccccgaccaagccgtgtgcaatacaacagagggaggcaggtgggaattgagggtgaggggtttggggaaaggggaagcaggggcatagtcagggtggggagtgtttgaagtttgcagatgagaaggtttgacaaaaagacagagagatgtagagacagtgatagagacagaggaacaaaaagagcagcagtgagaaggcaaagagagaggcagaagagacagacgaggcagagacaaaacactgagaaagagactgaaatggagtaataaatgaaagccccacaaa

SEQ ID NO: 29654 - DNA, 2640 bp, Homo Sapiens
ccacgcgtccgctggaagttctgaggcagcctttgtctggctggaacacgcattggcagcgggagctgtcggtaggacctgggacaccgcggaagtcgggaaatggcctcagtggctttagaggatgtggctgtgaacttcacccgagaagagtgggctttgctgggtccttgtcagaagaatctctacaaagatgtgatgcaggaaaccatcaggaacctggattgtgtagtaatgaaatggaaagaccagaacattgaagatcaatatagatatcccaggaaaaatctaagatgtcgtatgttagagagatttattgaaagtaaagatggaactcaatgtggagaaacatctagccagattcaagatagtattgtgaccaagaacactcttcctggagtaggtccttgtgaaagcagtatgagaggagaaaaagtcatgggtcattcatcccttaattgttacatcagagttggtgctgggcacaaaccacatgagtatcatgaatgtggagagaagccagatacgcataaacaacgtgggaaagccttcagttaccacaactcatttcaaacacatgagaggcttcacactggaaagaaaccatatgattgtaaagaatgtgggaagtccttcagttctttgggaaaccttcaaagacacatggcagtgcagcgtggagatggaccttataaatgtaagttgtgtgggaaagcgtttttttggcccagtttattacatatgcatgaaagaacgcacactggagagaaaccatatgaatgtaagcagtgttctaaagccttttctttttacagttcctatctaagacatgaaagaacacatactggggagaaaccgtatgaatgtaaacagtgttctaaagcctttcctttttacagttcctatctaagacatgaaagaacacatactggggagaaaccatataaatgtaagcagtgttctaaagccttccctgattccagttcttgtctaatacatgaaagaactcacactggagagaaaccctatacatgtaaacaatgtgggaaagccttcagtgtttccggttcccttcaaagacatgaaaccactcacagtgcagagaaaccctatgcatgtcagcaatgtgggaaagcgtttcatcatctgggaagctttcaaagacacatgataaggcacactggaaatggacctcataaatgtaagatatgtgggaaaggctttgattgtcctagttcactgcaaagtcatgaaagaactcacactggagagaaaccctatgaatgcaagcagtgtgggaaagcattatctcatcgctcaagctttcgaagtcatatgataatgcacactggagatggacctcataaatgcaaggtatgtgggaaagcctttgtttatcccagtgtatttcaaagacatgaaaggactcacactgcagagaaaccctataaatgtaaacaatgtggcaaagcctaccgtatttccagttcccttcgaaggcatgaaacaactcatactggagagaaaccctataaatgcacacttgggaaagcctttattgatttctgttcctttcaaaatcacaaaacaactcacactggagagaagccatatgagtgtaaggaatgtgggaaagcattcagtcgtttcagatacctttctcgacataaaaggactcacacaggagagaaaccttatgagtgtaaaacatgtaggaaagccttcggtcattatgataacttaaaggtacatgaaagaattcactctggagagaagccgtatgaatgtaaggaatgtgggaaagcattctcttggctcacttgctttctacgacatgaaagaattcacatgagagagaaatcctatgaatgtccacaatgtggtaaagccttcactcattcccgttttcttcaaggacatgaaaaaactcatactggagagaacccgtatgaatgtaaggaatgtgggaaagcatttgcttctctcagttccttgcatagacataaaaagactcactggaaaaaaactcacactggagagaacccatatgaatgtaaggaatgtgggaaagcatttgcttctctcagttccttgcatagacataaaaagactcactagcattctctctaaatgtatggaatgtgggaaagcatttattaattttatttcatttcagatacttgtacgaaacacattggagatagaccctgtgaatgtaagcacttggtaaagccttaagtagtttcagtttctttccagtacagtcatcccttgatacctgctgggtattggttccagcactctgtgagccatgtccagtcccttttataaaatgacatgtttgtatgtaacttacccacatcctcttgtatagtctcaattatgtctagattacttaaaatacctcatgcattataaaagctatgcaaatagttgttctattgtattgtttagggactcatgataaggaaaagagtctatgtattttcagtatagatgcagtaattgtcagcctatcaacatagtgtagtcagccagaacattaaagtttctttgtttcaactctcaaaaaaaaaaaaaaaaaaaaaaaaaaaaaaaaaaaaaaaaaaaaaaaaaaaaaaaaaaaaaaaaaaaaaaaaa

SEQ ID NO: 29655 - DNA, 2002 bp, Homo Sapiens
tataacgtgagggctgaatgcagcccattctctggagaacttcctcacacaccgcagcaaagagaagactgaaagacaaacctgggtgcagccagagaggtccagatagatgagcttgtggcatccattccccaagttcagcctagggactccacgtaccccagctgggtctcattgttccagaactgcattagttaagattacccagacttggatttcaaaggaatactttcattgttccgtctgtaacacgaagtaattggggccagctggatgtcaggatgcgtgtggttaccattgtaatcttgctctgcttttgcaaagcggctgagctgcgcaaagcaagcccaggcagtgtgagaagccgagtgaatcatggccgggcgggtggaggccggagaggctccaacccggtcaaacgctacgcaccaggcctcccgtgtgacgtgtacacatatctccatgagaaatacttagattgtcaagaaagaaaattagtttatgtgctgcctggttggcctcaggatttgctgcacatgctgctagcaagaaacaagatccgcacattgaagaacaacatgttttccaagtttaaaaagctgaaaagcctggatctgcagcagaatgagatctctaaaattgagagtgaggcgttctttggtttaaacaaactcaccaccctcttactgcagcacaaccagatcaaagtcttgacggaggaagtgttcatttacacacctctcttgagctacctgcgtctttatgacaacccctggcactgtacttgtgagatagaaacgcttatttcaatgttgcagattcccaggaaccggaatttggcgaactacgccaagtgtgaaagtccacaagaacaaaaaaataaaaaactgcggcagataaaatctgaacagttgtgtaatgaagaagaaaaggaacaattggacccgaaaccccaagtgtcagggagacccccagtcatcaagcctgaggtggactcaactttttgccacaattatgtgtttcccatacaaacactggactgcaaaaggaaagagttgaaaaaagtgccaaacaacatccctccagatattgttaaacttgacttgtcatacaataaaatcaaccaacttcgacccaaggaatttgaagatgttcatgagctgaagaaattaaacctcagcagcaatggcattgaattcatcgatcctgggtctttgagatgaaaccctgcaagtagacttacgtgaatgatttttgctgtgccgcttttttagggctcacacatttagaagaattagatttatcaaacaacagtctgcaaaactttgactatggcgtattagaagacttgtattttttgaaactcttgtggctcagagataacccttggagatgtgactacaacattcactacctctactactggttaaagcaccactacaatgtccattttaatggcctggaatgcaaaacgcctgaagaatacaaaggatggtctgtgggaaaatatattagaagttactatgaagaatgccccaaagacaagttaccagcatatcctgagtcatttgaccaagacacagaagatgatgaatgggaaaaaaaacatagagatcacaccgcaaagaagcaaagcgtaataattactatagtaggataaggtagaaattgttctgattgtaattagttttgtattttctatactggtgttagaaaacatatgtttacatttgattaactgtgttgcctatttatgcagggtaatccagctaaaggaagctttctttaattataagtattattgtgactattatagtaatcaagagaatgctatcatcctgcttgcctgtccatttgtggaacagcatctggtgatatgcaattccacactggtaacctgcagcagttgggtcctaatgatggcattagactttcataatgtcctgtataaatgtttttactgcttttagaaaataaagaaaaaaaacttggttcatgttta

SEQ ID NO: 29656 - DNA, 1186 bp, Homo Sapiens
gatgtccggctggagctgtcgcctccgccgccgctgctgccggtgccggttgtgagcgggtctccagtcggctcctctgggcgtctcatggcctctagcagctccctggtgcccgaccggctgcgcctgccgctctgcttcctgggtgtctttgtctgctatttttactatgggatcctgcaggaaaagataacaagaggaaagtatggggaaggagccaagcaggagacgttcacctttgccttaactttggtcttcattcaatgtgtgatcaatgctgtgtttgccaagatcttgatccagttttttgacactgccagggtggatcgtacccggagctggctctatgctgcctgttctatctcctatctgggtgccatggtctccagcaattcagcactacagtttgtcaactacccaactcaggtccttggtaaatcctgcaagccaatcccagtcatgctccttggggtgaccctcttgaagaagaagtacccgttggccaagtacctgtgtgtgctgttaattgtggctggagtggcccttttcatgtacaaacccaagaaagttgttgggatagaagaacacacagtcggctatggagagctactcttgctattatcgctgaccctggatggactgactggtgtttcccaggaccacatgcgggctcattaccaaacaggctccaaccacatgatgctgaacatcaacctttggtcgacattgctgctgggaatgggaatcctgttcactggggagctctgggagttcttgagctttgctgaaaggtaccctgccatcatctataacatcctgctctttgggctgaccagtgccctgggtcagagcttcatctttatgacggttgtgtattttggtcccctgacctgctccatcatcactacaactcgaaagttcttcacaattttggcctctgtgatcctcttcgccaatcccatcagccccatgcagtgggtgggcactgtgcttgtgttcctgggtcttggtcttgatgccaagtttgggaaaggagctaagaagacatcccactaggaagagagagactacctccacatcaagaatatttaagttattatctcaaacagtgacatctcttgggaaaatggacttaataggaatatgggactgagttccagtcttttttaataaaataaaatcaagc

SEQ ID NO: 29657 - DNA, 9038 bp, Homo Sapiens
acaacttaccctgctgagctttctttgggaaatacgtccatcaagatttagatctgcctgtaaaatctatacaaagtatatgccactacaggtttgactcgccccctcccccgtttttttgttttgttttgttttgttttgttttgttttgtgttttctctgctgtgtcaaagaacaagacagaactatctctgtttctggctccactgcctgccagtgaaggagttttcattcagactttccgaagagaggtggagaaacctaaagactgaggagaagagatcctttgagccagatggggcattagttcttctgcttttctcagcatggataaaccatttcctcaaggattttctcatgtgccctgaaatccatgtaactacaagggctcctctttatcaccataagtgccaccctgacttaaaaccactcagagctaaaaaatcaaggcaaaatggatgctgcggtgacagatgattttcaacaaattctgcctattgaacagctgcgctctactcatgctagcaatgactacgtggaacggcctccagccccctgtaaacaggccctctccagcccttcccttattgtgcaaacccacaagtctgattggtctctggctaccatgcctacttctctcccccgcagtctcagccagtgccatcaactgcagcccttgcctcagcatctgagccaatctagcattgccagctcaatgtcccatagcaccactgcctctgatcaaaggctcttggccagcattacaccctcaccttcaggccaatccatcatccgaacccaacctggagcaggggtccacccaaaggctgatggtgctctgaagggagaagctgagcaatctgcagggcaccctagtgagcacctcttcatctgtgaggaatgtgggcgctgcaagtgcgtcccctgcacagcagctcgccctctcccctcctgctggctgtgcaaccagcgctgcctttgctctgctgagagcctcctcgattatggcacttgtctctgctgtgtcaagggcctcttctaccactgctccactgatgatgaagacaactgtgctgatgagccctgctcttgtgggcctagttcttgctttgtccgctgggcagccatgagcctcatctccctcttcctaccctgcctgtgctgctacctgcctacccgtggatgcctccatctgtgccaacagggctatgatagcctccggcgaccaggctgccgctgcaagaggcacaccaacactgtgtgcagaaagatctcttctggtagtgcacccttccccaaggcccaggaaaagtctgtatgaccttccaacaaggtggatccagagcttttctccttcgagtccccaacagcaaagcataggcctcatctttggagagggggaggagtgataaactagccaaagttagggcctctcttttgttcctgcagtgtcaggggaatgaccaagtacatcctggtgcaggatgccttgttctttctcacagtatctatcccactcctcttcagtctttacaccctgccagctcagcctttatggttgtcatggcaaattcaggtgatatatgggtatgaggtttgaacactgaggactgacagggccagcaacgtggaggtttaggggctccccaatgtaatacctctcgatgcaggctctgatcgtcactctgttttctgctgtgcctttggaagctttcttctaagatggttttcacaggtacatgtggaacagcgttcaaccttccagggaatacgaccccttctccctgttactgcccttctcttctttattcctctctcctctttcattattctgttctgtattcctttccccttcattctcaccctgtctgcttttactttttctctttcttcctccctttctccttctcccctccttctttttcagactgatcctttctctgcctgtatttctatctcatttgatctatatttgtctctctctacctgtccctttttctctaacatgtccaaaagtgctgtttttccatagatgtttccttagatgccaaactttgctatgctatactatttactaatttttattaagggaaatggattactgtaatgaactgatcactagcaatagtgtgtatcccgatgtgtgtgtgtgctcacaaccactctcacctgttcgtgagcgcatgaggcgaagttatcttatatttccaggtttaactagttggagtttttctccctttctcaataatcaacttatagtgctgacagattccactagcatgctgagtaggatagtaaatcaggatgctcataactttgtatgtctgacccaagtgccaaaggcagacgtgctttatagctaaatgaacaaagcaaaggatacagaggtatgttctctcttagaagctaacttccctgagactgcatggctcaggcgttaataatggacataaaaagtcataaaacgttagagctggaaggaatcttaactattaatctagttcaatgcccttattttacagatgggaaaactgaggcctggaggtaggaagggacttgcccccaaggccgcacactgagttaacagcagaattgagactggaatataggccttctgactcctagttcagtattcttacccctgtaccacattgagtcatgggactttttcctagggctctattaacagtgacagaaagccattcccattcaattacttttcaggaaccatgcctagttagtgtggtggtctttctccagtgcatggtgggtagctaattaactatcaggtgttgaggctgcccccagtggacatcacctttggctctgtcaccttgtagaagctcaagtgtggaaaagaaaagcttaaagaagccctaaccaagctgtatcttcgccattgcatctactctttgctgcacacactgtgcttgctcctggctttgtctgcaatggcagctgcctgagaacctaaatttcagcaacagtgaaaaactgagatgaaagatgtataatgtagagaactgacttctctcttaaaaagtacagagagcctgtgctgtgaacccccttcaatgggaaaaagctgcagtggtgatggcaggctcctaaagactgctgctaaaagacacaagaattatacagtttccctctataagtgaatccaaaattcactgacgaattcagagattgagggcacttgcttgaaatcaaggtgctccaacttagtttaagacctccagactctaactttatagatcatctcttctagagtgtgcatggatgtgtgttgcagggtggagaagtggggagaagtgtatagtagtacacggggggaagaggggacctccatgtccctttgttggatacatattacagaaatatgtgccactcactttttgttggttctgaatcttcctgaagtgtactgacatttgggctgcacagagccccacaccttcacttacacctcctcttctagaattgctttgctctatttttgtatatataaatatgttatgatgattattaataatgttaatgatattgctgcaaatggtgccatatataaggttaggcttcttggaacatttataaacccaaaccaatacctgtaacctcttatgttgctttcagatccttcaattttaagtaactttttaatcttacaagtctgcttgattgtactttacacttatctaccctgaaaagctctgcccagttctctgggtcaagctggatggtgatgagtagcaacacacacttctctgcttctgcctgaaatgtgcttagagctcagttatctaaggattctctgacactagtgcattgttcctggagctaaattattctatggatgtttgcttattagtttcaggccccaaaataacacgagcccctccaccttgatagctccttgatatcccaatcttgcagtcctaactcaggcaaattgtgcactgccagaggggccctgggttctgccatatacccagaggagcctttctcagtgtgtttctaaatggccttacacttggtagaagaaattgaagggttactcaaatacagttgcaatctgcaatctgctgttgagtcagggctttcacttgtgtccaagttggcctgatatggactgcatctgctttacgtatagatgggtcctgttgggatatgcgcatggacgtgtgagtgagtgtgcgtatgtatcccttctgtgattatatatattcacacatctctatatattttaatgtattgcacatgtatatttaaaatatatacgaaagaactctaaatcctgcagggaggctctgttttcattatttttctactttgtgtcatgtcctgtataaacaggaatatttagagggtgtttcctgcttagcatttttttgcagttaaatcatctgttagcccctaactctactgccttccacatattggttccttgatacatttcatatgatatcagccaagagttttcctgtggttccagcccatcttccctaatcacaatagcaataataaatatagtgaatacttacatagtgcttactatatgctaagcactatttttagcatgttatttatattagctcattcattcctcacaattctacaacataggtatcattccaacctctattttacagatgagaaaactgaagcacagagaagttaagtgacttgccaaaaggtaacaattgtaaatggtagagctaagatttgaacccagggtgtctgactcccaggtccatgctccagagtcagatatagaaggctggagcacagtgtaaaccattctggagtaacaagcctcaaatggtgaataattctttccctaactctggtccacctgcaacctaggagttaaaataagtatcttgctatgttaagagtaaagcaatagttacaggcatcatatattagctgtcttgctcccaaaatggtgacattacaaacttttccactattccctttgaaaacatgcttgcagccagttaccatttcttagcttatgatgtagagctattaagggagtattttcacttgtgccaaagagggtaagcgtttattagccttatctttattggccagggaaaactaattcaatttttttttgaacaaagtataactgagactatttttggagcttaagatttgttagagctgttaacattcaaccttattgattatattgagagcgctcttctgattcaaatgtaagcaaaccactgatgaccactggtccgtataacacattttaccaacagctccttcacactgaatcctttaacttggccaaaggacccttaaagaacatctagtccaatgtcaacattttatagctggagaaagggatgcacagagagggaaaataacctgtccaaagtcacacagttctgaaaattgagtggaattatgactttataccagagttcctaatttccaggtatcttagcctcagtttcttaaaaaatagagtttgaagcaaaagctatgtgcgatccagggtagtatgagtaaggaaagggttaatgagggagggaagaaagaagaacaaataaaaagcatgtcactgagttggccacggtctgttccttggcaagctaatttcgcaattttttgtgacagaccatataaaactactacatctccatacagcccacgtggtggaggaaaggaggtgaattcatctgctagctctcatctcattagtcaaattcttccccatgtgatatttacccttctacatttttgggtagtgcgtgatgggcacttaaatatgtaccttggcatttcatgcttcagcaataatgggaaggattgtggctccactataaacagtaaggcaagtatatgaatatagggagattaaatttaaagtgctacactagggtggtgcttttaccttatgtctttaatcacattccttcgaagtaagttagagataacctaccacctttaaagtaaataaagctttattgtggctcttagaactgtactatgtttgccttcctgagcctatttattctctagcttgctttaaagggcttcttttttatatggaaattaattccctgttcaattaaaggagtaacaaactctcaaaatatctttcttcttaatataaaaaggaatttcacattattgaactcctcaaaaagcatgtgtaagtcaaaatatgtatgtgaaggcacatatgttcttttaggttccatgagcataatagcaggaaaactggttaagtcaataaatgctggggaaaaaatggctaaacaaggtattctgtaacatgaaaataaagcaatgagttggttggctggctttttaaaaaatatttcagccactaattatgacacagacacattataagaattatgctaccttttattcacatatacaatagttccctgtgtcctatagatcattgtcacataaagcaaaagcattagtgccccatttggacctttggccgaaggtttgataagattttgtaggactgaaattcttggtccctttatcctagtttaggcccatatccttattttcactctcaaagataagatcatgacactaccagtgttgctgctgttaaaggccaggatggacaagataaggaaaggcattttgggaatgacactgactaatgttaggaatcttgctgtcattacaatccaagttatatatgtttgctcccatatgtatttgttggccaatctcctgaaaaagaagaaggtaattctaacccacacattgtcattcccaaactaacctggcaatccttttgaccataccaggtaatagtcatccctctgatggtaaaagacagagatgtcaaggctctggaagctcccaggtccttgaagaactaactaaactgctgaacacagaagtggtaatgtaggcaagccacaggtatgttctcttgtaacaagatggggttgaccatatgtgaaccctgaagagtcattttgaacctgtgtcctaaggcctagagtactttaatcctcatcttcaaagtcttaccactctgataacaaaaagaaacactacaaagaaactgcaaggaaagggacagtcattttttttaatatctaccaattatttagttattcatatatgcatttctttatatagaaaagtatttatatgaagtttccaaaagactctgatattcagctttatagtcttggatagaaaatcatgtgtccttggatggggattcgcacaccaaggcttaacagaattagtttggggaatactcatttttactctagagattagttggcttaaacaactttactcgtgaatttttttcttaatggaggtgaagacctcccaaagaggagaaggccccaggcctttcttaatatataaaccatattgaaagaaagaaagaaaaaagtaatgggaagtaatagtaaatgtggatccagaaagaaaaacaaaggttaagaaaatgatgtatgtgaaagaaaaaaagctctataatcagtgtgtttctctcacctaaaacaccatttactaactacttggttcagttgtaccctttaactctattttgtccttgacttatatcaacactcttcttttccaaactcctatagctctccatctggaatgattctatggggtggggggtcgggggaggagaaagggagacagcagaagaaagaaagagagagaaagatagagagagagagagagatgggtggagacttggcctctctcctagaggttcaaagttagaatatgccactaacactatctgcctttcaaactcccttctaggacatgctccatagtacttagatcttatatcaaatgacaaggtttctctccttcagagagaaataccagactggatttgtggtttccctggattggttttttctgagtcaaagtggtgttgtagaaatcacagtaccctgagaccaattaagtcagaatctttggaggtgttgaggaatggatttttaaagttcccagatgattataatatgcaaacagatttgagaaaattgaatcactttattccataaatgcagatagtgaggctaagagagggaaagtgacttactcataaccacaccgtgagttagtgaccaagtcaggataagaatccaggtctgctgactcctaggccagaattcttgtctttatactacactgcttctatctctaccctattccccctctgagcctttgcttttctcatctgtaaaatgacgataataaagcctagagagtgtatgagaatcattaaagcagaagcatttttcttaatgtacaaggttctatacaaatgcaagggaattaatgtataacatatatgtggggctaagtctctaaaacaacataataaaagttgtttttattttagtcaatcttttaggtattgtgtctacctgatagcatgtaacaagattgaacacttgtgtaggtcgtatgtgcctttaatctgaggttggcctcagtgacaatcaaaattagcagttgaggaaaaaggtcatacatttttctcttgcccttgctggaatagggatcaagaggaatataaaagcagtgggatatctggatttcttatactcagtcaaccacaacatggccttagtactgaactagcccagggtttcaatggaactcgtagatctcattcccaaggctggtcctggttgaagggagaaggtcaaaaaaggacgtgtcttctgaaaggcattacccatggaaagccaagggggagggttgcccactaggaggagcttcttttgtagaagccagaatggaggaaaggggctttctgacttggagcatctgaggaaatagattatttgaggatctagtactcccagaataatctgtaaccacaagaaacacatttcttgaactccagcgccccagaacaggatatccatatccaatcccatcgtatccatcctggatgttatgaatttccagagagggccacttctacccccctaggagtcatacatctggctacttatttgttaaaaataaaattctgtaccatttat

SEQ ID NO: 29658 - DNA, 2126 bp, Homo Sapiens
gtaaggccgttttcttttcccattcgctcatctgccaggaaaagggacttgccgttggcgcttcggcctcttgttcattgagaaaaaagaggaaatactccgcgtgcgcttgtagaaggggagtcgtctccagctccgaaccccggagtgttcatcagcggggaatctggctccgaattctctttttttctcccgccgattgctcggaagttggtctaaagcagaggttggaaagaaaggaaaaaagtttgcatcgagactggatttatttgcacatcgcagaaagaagagaatccaagggagaggggttggtgcaaagccgcgatcacggagttcagatgtgttctaagcctgctggagtgaccacacttccaagacctgatggaggccagagctcagagtggcaacgggtcgcagcccttgctgcagacgccccgtgacggtggcagacagcgtggggagcccgaccccagagacgccctcacccagcaggtacatgtcttgtctctggatcagatcagagccatccgaaacaccaatgagtacacagaggggcctactgtcgtcccaagacctgggctcaagcctgctcctcgcccctccactcagcacaaacacgagagactccacggtctgcctgagcaccgccagcctcctaggctccagcactcgcaggtccattcttctgcacgagcccctctgtccagatccataagcacggtcagctcagggtcgcggagcagtacgaggacaagtaccagcagcagctcctctgaacagagactgctaggatcatccttctcctccgggcctgttgctgatggcataatccgggtgcaacccaaatctgagctcaagccaggtgagcttaagccactgagcaaggaagatttgggcctgcacgcctacaggtgtgaggactgtggcaagtgcaaatgtaaggagtgcacctacccaaggcctctgccatcagactggatctgcgacaagcagtgcctttgctcggcccagaacgtgattgactatgggacttgtgtatgctgtgtgaaaggtctcttctatcactgttctaatgatgatgaggacaactgtgctgacaacccatgttcttgcagccagtctcactgttgtacacgatggtcagccatgggtgtcatgtccctctttttgccttgtttatggtgttaccttccagccaagggttgccttaaattgtgccaggggtgttatgaccgggttaacaggcctggttgccgctgtaaaaactcaaacacagtttgctgcaaagttcccactgtcccccctaggaactttgaaaaaccaacatagcatcattaatcaggaatattacagtaatgaggattttttctttctttttttaatacacatatgcaaccaactaaacagttataatcttggcactgttaatagaaaggtgggatagtctttgctgtttgcggtgaaatgctttttgtccatgtgccgttttaactgatatgcttgttagaactcagctaatggagctcaaagtatgagatacagaacttggtgacccatgtattgcataagctaaagcaacacagacactcctaggcaaagtttttgtttgtgaatagtacttgcaaaacttgtaaattagcagatgacttttttccattgttttctccagagagaatgtgctatatttttgtatatacaataatatttgcaactgtgaaaaacaagttgtgccatactacatggcacagacacaaaatattatactaatatgttgtacattcggaagaatgtgaatcaatcagtatgtttttagattgtattttgccttacagaaagcctttattgtaagactctgatttccctttggacttcatgtatattgtacagttacagtaaaattcaacctttattttctaattttttcaacatattgtttagtgtaaagaatatttatttgaagttttattattttataaaaaagaatatttattttaagaggcatcttacaaattttgccccttttatgaggatgtgatagttgctgcaaatgaggggttacagatgcatatgtccaatataaaatagaaaatatattaacgtttgaaattaaaaaaaaaaaaaaaaaa

SEQ ID NO: 29659 - DNA, 2722 bp, Homo Sapiens
aagccgaacaccatggccgtctggcttgcccagtggctgggccctctgctcttggtttccctctggggactcttggctccagcctcccttcttaggcgcctgggtgagcacattcagcagtttcaggagagctctgcccagggcctgggcctgagcctggggccaggtgctgcagccctcccaaaagtggggtggctggagcaactgctggaccccttcaacgtgtccgacagacgatccttcctacagcgttactgggtgaatgaccaacattgggttggccaggatggacccatattcctgcatctagggggtgagggcagccttgggcctggctcagtgatgagaggccatcccgcagccttggccccagcctggggcgccctggtgataagcctggaacacagattttatggcctgagtatacctgctggaggcctggaaatggcccagctccgcttcttgtccagccgccttgcgctggctgatgtggtctctgcccgcctggcactttcccgcctctttaacatctcctcctccagcccctggatctgcttcggaggctcctatgccggctccttggccgcctgggcccggctgaagttcccccatctcattttcgcgtcggtcgcctcctccgccccggtgcgggccgtgctggatttctccgagtataatgacgtggtatcccgaagcctaatgagcaccgcgatcggcgggtccctggagtgccgggcggcggtgtccgtcgccttcgctgaagtggagcggcggctgcgctcgggtggggcggctcaagcagcattgcggacggagctgagcgcttgcgggcccctgggccgcgctgaaaaccaggcggagctgttgggggcgctgcaggcactggtgggaggtgtagtgcagtatgatgggcagacgggagcgccgctaagcgtgcgacagctctgcggacttctcctcgggggcgggggcaaccgcagccactccacgccctactgcgggcttcgtcgggcggtgcagattgtcttgcacagcctgggccagaagtgtttaagcttttcccgagcagagacagtggcacagctgaggagcacagaacctcaactgtctggtgtgggtgaccggcagtggttgtatcagacatgtaccgagttcggcttctatgtcacctgtgagaatcccagatgtcctttctcccagctcccagcactgccctcccagctagacctatgtgagcaggtgtttgggctctcagccttgtcagtagcccaggctgtggctcagacgaactcctactacggtggccagacccctggggctaacaaagtgctgtttgttaatggggacacagacccctggcatgtgctaagtgtaacacaggctttaggatcctcagaatcaactcttcttatccgcactggctcccactgcttggacatggcacctgagaggccctcagactcccccagcctccgcctagggcgccagaacatcttccagcagctacagacctggctcaagctggcaaaggagagccagattaagggtgaagtctgaatctcataccctttccactccctgcatggtcacctcagtcctggacatacttgttcactgaacaaaagaaagcagcttgttttgaaagaagaaactcccaggaattggaattcagcacctgttccgcacgtaattggcatgtgtctgcaaacatccttattcccaacttaaagtgctttattgcagagagttatggaaatataagtggatgattattctcattgtaaatattggtattttgaatgttaaatgtcaaacaaatgtgacttatgctggtgccctcgccctgctgatcagattctggttcaaattctgccactccagctcctgggttaggggctttgctgtaagtttctttttctggactttagatcctgaacctgtccttgcttctcagtttctctcactgtacccctttccctcagtctcttcctctctctttcccctgtcactatttgtctttctaatctccttctgtttctctgaatatcttcatttctatctctgtgtttctgtctatttctctgtttatctttctgtccttcaatctgtgtttttgtttctggctctccgtcagtgtctttttctctcctctctctcttgctctgccatggctatttccactgctctatttctgactctcatttttggtctctgtgtgtctcctagtcactttctttctcactctgtctctgtctctatttctgtctctcctctgctgtgtcctcaatctctctgtctccctgaggctctatttctgtctctcctctgctgtgtcctcaatctctctgtctccctgaggctctatttctgtctctgatgctcttcttctgtgtctctatttctcttcctgtcacttaatcttttccttctctatctctcttatttagtcttccttccacacccttcactcaccatcttttcccacaatcaaatatcactccctggtacttccagcttccaactctagggattcatgattctggtggagattccttcttccagggcctgggaggatagggctaatcccaagggtgcctgcttaggctatgttagctgtgacaggaacctgccatagatttgcactgttctttcctaaagatcaattattttcagcaataaatacttctcagctttttgtatgtctttgtatgcaaaaaaaaaa

SEQ ID NO: 29660 - DNA, 2033 bp, Homo Sapiens
cctccttccagtgcccggcgttcctcccttccccctcgccgccgaccgagttcttccttttcagaccgggtcgccttgctgtcgtcgcggtgattttcctgctactgctactgctgctgctgccaccgccactaccactgggctcatttgccccgaccccttcccgccgccccgcccccagccccacacaagatgtcagaggatttagcaaagcagctggcaagctacaaagctcagctccagcaagttgaagctgcattatctggaaatggagaaaatgaagatttgctaaaattgaagaaagatttacaagaagttatagaactaaccaaagaccttctgtcaactcaaccttctgagacgcttgcaagttcagacagttttgcttctactcaacctactcattcatggaaagtaggagacaagtgtatggcagtctggagtgaagatggacagtgttatgaagcggagattgaggagatagatgaagaaaatggcaccgctgcaatcacctttgctggttatggcaatgctgaagtgactccactgttgaacctcaagcctgtagaagaaggaaggaaggcaaaggaggacagtggcaacaaacccatgtcaaaaaaagaaatgattgcccagcagcgtgaatataaaaagaagaaagctttgaaaaaagctcagagaataaaagaacttgagcaggaaagagaggaccagaaagtgaaatggcaacaattcaacaacagagcctattctaaaaacaaaaaaggccaggtaaagaggagtatttttgcttcacctgagagtgtgactggtaaagttggagtaggaacctgtggaattgctgataaacctatgacacaatatcaagatacctctaaatacaatgtcaggcatttgatgcctcaataatcagaaaaactgttggatttcatctctgcagggctttacatttacctttttatccttatatttttctaaaggtaaattatttgttagatgagtaagcaagataccattgtcgtcattggttggcttcagtagaatgaaacgtgaagaaattgcatttgataactgctattcatttaacttttctcattatcagtaccacggttccctcaaagtttgttgaataaagcaacttttgtagatgctgtttcatacagcacttagatgaattattgatcttcctaatatcaggcgcctacttaacctatggtgtgtactttttgtaagttgtaacttgaaattttcagatgctttgaacttgacacatactctagcaattcattggaacaccaaggcaaaaacaccaacctgctaaaagagatcttttcatttttcttattttcagctttaaaacttagctgtcgttcagttaagcttaaagataggttaatttgtaaatggcaaagtttgttttgaggtttttcctcaataacttgtttcccaggcctattaggccatctctaaaattgatctagctgttttatttttatgtactcttagttttatgtaagaaaccttaggatgagctcccttttctaaggtgtttttgttttttgtatgtttgcttttttcctgttttttgttttttccatttacggcagtggtaccatgttttggatgtgtgatgtttatatgggagaacaaaaagctgatgtatagccctgtatacagtgtagatactatttttgtaaaaacacaaggctaaattaatgaacaagaatactgaatatttcatcattaaaaatttcttgtatttcttgtgcattaatctgacgataatttccctgtatattatgttcatttagctgtttgtaatttttgttaattagatcaggttgtctgcatttgttggtgtaagtgaacatcatcacagttatcctgagttgagtttaagccaaatacatgcatagaaaagggtcttcctattaatggaagaaggtaatttttaggatgtgtattatttcagttttgtatgtttaacttttattaaataaagtgtttttaaaatctccaaaaaaaaaaaaaaa

SEQ ID NO: 29661 - DNA, 4611 bp, Homo Sapiens
gtgtcgctcgctttctgtcagcctctctccctctccctctcccctctccttcctctcgcttcctctctcgcacctgagcgtacgcacctgcccgggcccggctccctcctcctctcccctccctctttccccgcccggccgcgggagcctcgtggctgcgtcaccgccgcccccccagacaagatggacaccgcggaggaagacatatgtagagtgtgtcggtcagaaggaacacctgagaaaccgctttatcatccttgtgtatgtactggcagtattaagtttatccatcaagaatgcttagttcaatggctgaaacacagtcgaaaagaatactgtgaattatgcaagcacagatttgcttttacaccaatttattctccagatatgccttcacggcttccaattcaagacatatttgctggactggttacaagtattggcactgcaatacgatattggtttcattatacacttgtggcctttgcatggttgggagttgttcctcttacagcatgccgcatctacaagtgcttgtttactggctccgtgagctcactactgacgctgccattagatatgctgtcaacggaaaatttgttggcagattgtttgcagggttgttttgtggtgacgtgcacactgtgtgcattcatcagcctggtgtggttgagagagcagatagtccatgggggagcaccaatttggttggagcatgctgccccaccgttcaatgctgcggggcatcaccaaaatgaggctccagcaggaggaaatggtgcagaaaatgttgctgctgatcagcctgctaacccaccagctgagaacgcagtggtgggggaaaaccctgatgcccaggatgaccaggcagaagaggaggaggaggacaatgaggaggaagatgacgctggtgtggaggatgcggcagatgctaataacggagcccaggatgacatgaattggaatgctttagaatgggaccgagctgctgaagagcttacatgggaaagaatgctaggacttgatggatcactagtttttctggaacatgtcttctgggtggtatctttaaatacactgttcattcttgtttttgcattttgcccttaccatattggtcatttctcccttgttggtttgggatttgaagaacacgtccaagcatctcattttgaaggcctaatcacaaccatagttgggtatatacttttagcaataacactgataatttgtcatggcttggcaactcttgtgaaatttcatagatctcgtcgcttactgggagtctgctatattgttgttaaggtctctttgttagtggtggtagaaattggagtattccctctcatttgtggttggtggctggatatctgttccttggaaatgtttgatgctactctgaaagatcgagaactgagctttcagtcggctccaggtactaccatgtttctgcattggctagtgggaatggtatatgtcttctactttgcctccttcattctactactgagagaggtacttcgacctggtgtcctgtggtttctaaggaatttgaatgatccagatttcaatccagtacaggaaatgatccatttgccaatatataggcatctccgaagatttattttgtcagtgattgtctttggctccattgtcctcctgatgctttggcttcctatacgtataattaagagtgtgctgcctaattttcttccatacaatgtcatgctctacagtgatgctccagtgagtgaactgtccctcgagctgcttctgcttcaggttgtcttgccagcattactcgaacagggacacacgaggcagtggctgaaggggctggtgcgagcgtggactgtgaccgccggatacttgctggatcttcattcttatttattgggagaccaggaagaaaatgaaaacagtgcaaatcaacaagttaacaataatcagcatgctcgaaataacaacgctattcctgtggtgggagaaggccttcatgcagcccaccaagccatactccagcagggagggcctgttggctttcagccttaccgccgacctttaaattttccactcaggatatttctgttgattgtcttcatgtgtataacattactgattgccagcctcatctgccttactttaccagtatttgctggccgttggttaatgtcgttttggacggggactgccaaaatccatgagctctacacagctgcttgtggtctctatgtttgctggctaaccataagggctgtgacggtgatggtggcatggatgcctcagggacgcagagtgatcttccagaaggttaaagagtggtctctcatgatcatgaagactttgatagttgcggtgctgttggctggagttgtccctctccttctggggctcctgtttgagctggtcattgtggctcccctgagggttcccttggatcagactcctcttttttatccatggcaggactgggcacttggagtcctgcatgccaaaatcattgcagctataacattgatgggtcctcagtggtggttgaaaactgtaattgaacaggtttacgcaaatggcatccggaacattgaccttcactatattgttcgtaaactggcagctcccgtgatctctgtgctgttgctttccctgtgtgtaccttatgtcatagcttctggtgttgttcctttactaggtgttactgcggaaatgcaaaacttagtccatcggcggatttatccatttttactgatggtcgtggtattgatggcaattttgtccttccaagtccgccagtttaagcgcctttatgaacatattaaaaatgacaagtaccttgtgggtcaacgactcgtgaactacgaacggaaatctggcaaacaaggctcatctccaccacctccacagtcatcccaagaataaagtagttgtctcaacaacttgaccttcccctttacatgtccttttttgtggacttctctctttggagatttttcccagtgatctctcagcgttgtttttaagttaaatgtatttgacttgtgttctcagcattcagagagcagcggtgtaagattctgctgttctccctggatcttctgacattactgctgtctgagatttgtatatgtgtaaatacaagttccttgataccctaaaaccttggattaaacagaatgtgcattgtacatctttaaacaaaatgtatattaatttattaaatctagttgtcactttattttggacctgctgtgatctcgacaggaaacgtgccacagagcagtagtgcgcaggcaagacttttcagtgacgccttgtggaacgcagttcatgatgtcctagcagctctcactaagggaactgtacattctttctttcttggctattcagaccttaccaagaacgttaaaggaaacaagtagaaatcagcagtggagtgtctgtggtaagaaaacatgaactttatgcttcactgttagttgtttgtggaagttattttgtataacaccaaagctgttgtacatttcctactgcctgatttttttcatgtgtctgtgtttgtaatattgtatagtatcttgtgctaggtgaggaaattatttttaattttgataatttaatattcctagtgtgatcagcattgggagttgggtttcagtggggcatgtctatacttagagaaaaaaagtccaaatgaagattttcatgagtcagcccccccgcccgcccccaccccacacccacatcctctcttttccacacacaactatctgtttattttttgtagcagtggccgaaagtcctgcaaggtcataaatctttcagagtgacatcaccaactgtactgcatcttactggatttaggacttctgagatgcttgtgaagtatagatgtggttgtggtcttagattgacagcattagagaagactggttagaacatctggtctcgctggttagtgcctcgttggctgaggactaggtgtgcatttctcctagcttttcatcaggaaatcccaaagtttccaaagctttttgtttacagaataaaacttcaaataaaaccaattcattatttgtccagaaggaagcttggctgagctggccttttaacataggaatgtatttcgttggaaacattctgaaaaatctcagagaactgaacccttacaaactttgttttccctcataaccaaagcttcaggttagaagtttagaaaaatagaatggttgggtacatgatctaaatgtttaatgctaaaggtatatcgtaagggtagtgtttgtttttgaacgataatttagaagttctcatagaaagcgtataacataggtcttcagaaactataaaagaattttcatatagtattaaaatccatagactaaaatctgagaattttttaacatatgcaagtcagccaaacataagctaccaaaataaagagcaatgtgttctggctgttttatacttcaacaattttttccctaagtggtaagcaattactttaaaacatatttttaaaaacatcggtatcgggagctgcggtggctccggccggttgtcctggcacacaaggaggcgaggctatgcgttcgaggccaacctaggcaaaattgg

SEQ ID NO: 29662 - DNA, 4139 bp, Homo Sapiens
agtgctcgcggggccgcggcggagtgtaccgtgctgctctactcgctgccattcgcccgcaggtcggcgcgctcgcccacctgagccgcgccggggctgcgggaccgtgggacagcgcgctcagcccagcctaggaaagaggcagcagtctcagcgcggagatggggagcgggcgaagttgacgagtctcccgcccacgctgcgcccctcctgcccagaggggctgcagccagcggtctgtcgcgcgtgcctgtgtgcccgaggagccgccccggggagaagacccggcgcggagttgttcccccagggaggatccgcagcccagccgagggggtcgggcggcctggctacgcaggacccagccccgcagccgcggactcccagcggcggcgaagtttggctgctgagcggcgcggcgccggaccactggacagcgggagcgatgcccgtggggggcctgttgccgctcttcagcagccccgcgggcggcgtcctgggcggggggctcggcggcggcggtggcaggaaggggtcgggccccgccgccctccgcctgacggagaagttcgtgctgctgctggtattcagcgccttcatcacgctctgcttcggggcgatcttcttcctgccagactcctccaagctgctcagcggggtcctgttccactccagccccgccttgcagccggccgccgaccacaagcccgggcccggggcgcgcgccgaggacgcggccgaggggcgagcccggcgccgcgaggagggggcacccggggacccggaggccgccctggaggacaacttggccaggatccgcgaaaaccacgagcgggctctcagggaagccaaggagaccctgcagaagctgcccgaggagatccaaagagacatcctactggagaagaagaaggtggcccaggaccagctgcgtgacaaggcgccgttcagaggcctgcccccggtggacttcgtgcccccaatcggggtggagagccgggagcccgccgacgccgccatccgcgagaaaagggcaaagatcaaagagatgatgaaacatgcttggaataattataaaggttatgcctggggattaaatgaactcaaacctatatcaaaaggaggccattcaagcagtttgtttggtaacatcaaaggagcaactatagtagatgccctggatacactttttattatggaaatgaaacatgaatttgaagaagcaaaatcatgggttgaagaaaatttagattttaatgtgaatgctgaaatttctgtctttgaagtaaatatacgctttgttggtggactactctcagcctactatctgtctggagaagagatttttcgaaagaaagcagtggaacttggggtaaaattgctacctgcatttcatactccctctggaataccttgggcattgctgaatatgaaaagtggtattggaaggaactggccctgggcctctggaggcagcagtattctggcagaatttggaaccctgcatttggagtttatgcacttgagccacttatcaggaaaccccatctttgctgaaaaggtaatgaatattcgaacagtactgaacaaactggaaaaaccacaaggcctttatcctaactatctgaatcccagtagtggacagtggggtcaacatcatgtatcagttggaggacttggagacagcttctatgagtatttgctgaaggcctggttaatgtctgacaagacagatctggaagctaagaagatgtattttgatgctgttcaggctatcgagactcatttgatccgcaagtctagcagcggactaacttatatcgcagagtggaaagggggcctcctggagcacaagatgggccacctgacctgcttcgcggggggcatgttcgcactcggggctgatgcagctcccgaaggcatggcccaacactaccttgaactcggggctgaaattgcccgtacttgtcatgaatcatataatcgaacatttatgaaactgggaccagaagctttcagatttgatggtggtgttgaagccatcgctacaagacaaaatgaaaaatactacatcttacggccagaagttatggagacttacatgtatatgtggagactgactcatgatccaaagtacaggaaatgggcctgggaagccgtagaggccttggaaaaccattgcagagtgaatggaggctattcaggcctaagggatgtttaccttcttcatgagagttatgatgatgtgcagcagagtttcttcctggcagagacattgaaatatttgtacctaatattttctgacgacgatcttcttccactggagcattggatcttcaatagcgaggcacatcttctccctatcctccctaaagataaaaaggaagttgaaatcagagaggaataaaaagacattttatattttattctgctccattcccttcactgtataccttaataattccttttctggtaatcaggcacatgatgaactttgattagtaggtctgtgattaagttcttaaattgttttgcagtcttttatgtttattatcataggtataggtggacctaaattccttatcatatcctttattaattcagccagtgtatccaccagttttttgtttatgtttttaagtaacctattatctctggatttcatgaaggtgtaatatcgtttttgttaaactgaatagaattgtatagcgatgacctcttaattataatttgatttgactgcaaaactttttcctcctctaagaggagatgatgtctgctttaagctgtaatgttttgccatgttgcaaaaagccataataataagtataaaaaagctttttcctttacaatttcatgttaatctggtttgtctgtccaccagagacagatcttctgtgacagcctccttatgcaggtctatcattatttgatagaatgtcttctaaaatacttcactcacattgtaattcaaattagaaagtcattccaaaaggatcatgtcatgttgacctcatttcatcggaactgcagtatatttttgttggttaattatattagtgttttctattttgtaaatgtgtcctttaattttactttaaatgccctgtgtcatttctggattatatactagttaatttcttccattccctactacacagagaggtgagctttcaaattttgcagagctctgctatcactgaattacatttatctgaagaaaatagtacaacttaatggattagcttttgggtttaactgaatatatgaagaaattgggtctgtctaaagagagggtatttcatatggcttttagttcacttgtttgtatttcatcttgatttttttctttggaaaataaagcattctatttggttcagatttctcagatttgaaaaaggctctatctcagatgtagtaaattatttcctttcagtttgtgaaagcaggatttgactctgaaagaagctttgccaattttacttattcgtgatcaatcaaggaaaatctaataaattttaggccaaataagaatatagcatatttagtatggttatagtcaacacagagatcacaacttagaagaaatataaagaaatggccactccccatcccccacagtcctggagtaaatcaaaatcaatatatgattcttttaaacattaagtttgaaataggaatggttttctcaagaatagatttggtgtgataccttgtgtttgcttacattggcccactatatatacatatatatttatgtagatatacttccatgaaagggctaatacgatgcatatactgaagggcaaggactttgaccatgtcaattttcagccgagaatggtcagaaagatcagtacaaccccatggattaggctgaaacatatgaaattgctgcatttgtagtttaaaaactgtcagcagtttcatatggttccacctaatattattgaagacaattattttcttagctatcaataggcttaatagttttagttattttagcttttgaaagtgttttaaaagatttcctttatcggacaggaccatctttatgacctgctttctgtttttcaatatcatacattggtgtatgtcaaagaataaattagtaaaattagtaaaaaaaaaaaaaaaaaaaa

SEQ ID NO: 29663 - DNA, 3769 bp, Homo Sapiens
aaagctgcagcgtctggaaaaaagcgacttgtggcggtcgagcgtggcgcaggcgaatcctcggcactaagcaaatatggacctcgcggcggcagcggagccgggcgccggcagccagcacctggaggtccgcgacgaggtggccgagaagtgccagaaactgttcctggacttcttggaggagtttcagagcagcgatggagaaattaaatacttgcaattagcagaggaactgattcgtcctgagagaaacacattggttgtgagttttgtggacctggaacaatttaaccagcaactttccaccaccattcaagaggagttctatagagtttacccttacctgtgtcgggccttgaaaacattcgtcaaagaccgtaaagagatccctcttgccaaggatttttatgttgcattccaagacctgcctaccagacacaagattcgagagctcacctcatccagaattggtttgctcactcgcatcagtgggcaggtggtgcggactcacccagttcacccagagcttgtgagcggaacttttctgtgcttggactgtcagacagtgatcagggatgtagaacagcagttcaaatacacacagccaaacatctgccgaaatccagtttgtgccaacaggaggagattcttactggatacaaataaatcaagatttgttgattttcaaaaggttcgtattcaagagacccaagctgagcttcctcgagggagtatcccccgcagtttagaagtaattttaagggctgaagctgtggaatcagctcaagctggtgacaagtgtgactttacagggacactgattgttgtgcctgacgtctccaagcttagcacaccaggagcacgtgcagaaactaattcccgtgtcagtggtgttgatggatatgagacagaaggcattcgaggactccgggcccttggtgttagggacctttcttataggctggtctttcttgcctgctgtgttgcgccaaccaacccaaggtttggggggaaagagctcagagatgaggaacagacagctgagagcattaagaaccaaatgactgtgaaagaatgggagaaagtgtttgagatgagtcaagataaaaatctataccacaatctttgtaccagcctgttccctactatacatggcaatgatgaagtaaaacggggtgtcctgctgatgctctttggtggcgttccaaagacaacaggagaagggacctctcttcgaggggacataaatgtttgcattgttggtgacccaagtacagctaagagccaatttctcaagcacgtggaggagttcagccccagagctgtctacaccagtggtaaagcgtccagtgctgctggcttaacagcagctgttgtgagagatgaagaatctcatgagtttgtcattgaggctggagctttgatgttggctgataatggtgtgtgttgtattgatgaatttgataagatggacgtgcgggatcaagttgctattcatgaagctatggaacagcagaccatatccatcactaaagcaggagtgaaggctactctgaacgcccggacgtccattttggcagcagcaaacccaatcagtggacactatgacagatcaaaatcattgaaacagaatataaatttgtcagctcccatcatgtcccgattcgatctcttctttatccttgtggatgaatgtaatgaggttacagattatgccattgccaggcgcatagtagatttgcattcaagaattgaggaatcaattgatcgtgtctattccctcgatgatatcagaagatatcttctctttgcaagacagtttaaacccaagatttccaaagagtcagaggacttcattgtggagcaatataaacatctccgccagagagatggttctggagtgaccaagtcttcatggaggattacagtgcgacagcttgagagcatgattcgtctctctgaagctatggctcggatgcactgctgtgatgaggtccaacctaaacatgtgaaggaagctttccggttactgaataaatcaatcatccgtgtggaaacacctgatgtcaatctagatcaagaggaagagatccagatggaggtagatgagggtgctggtggcatcaatggtcatgctgacagccctgctcctgtgaacgggatcaatggctacaatgaagacataaatcaagagtctgctcccaaagcctccttaaggctgggcttctctgagtactgccgaatctctaaccttattgtgcttcacctcagaaaggtggaagaagaagaggacgagtcagcattaaagaggagcgagcttgttaactggtacttgaaggaaatcgaatcagagatagactctgaagaagaacttataaataaaaaaagaatcatagagaaagttattcatcgactcacacactatgatcatgttctaattgagctcacccaggctggattgaaaggctccacagagggaagtgagagctatgaagaagatccctacttggtagttaaccctaactacttgctcgaagattgagatagtgaaagtaactgaccagagctgaggaactgtggcacagcacctcgtggcctggagcctggctggagctctgctagggacagaagtgtttctggaagtgatgcttccaggatttgttttcagaaacaagaattgagttgatggtcctatgtgtcacattcatcacaggtttcataccaacacaggcttcagcacttcctttggtgtgtttcctgtcccagtgaagttggaaccaaataatgtgtagtctctataaccaatacctttgttttcatgtgtaagaaaaggcccattacttttaaggtatgtgctgtcctattgagcaaataactttttttcaattgccagctactgcttttattcatcaaaataaaataacttgttctgaagttgtctattggatttctttctactgtaccctgattattacttccatctacttctgaatgtgagactttccctttttgcttaacctggagtgaagaggtagaactgtggtattatggatgaggtttctatgagaaggagtcattagagaactcatatgaaagctagaggccttagagatgactttccaaggttaattccagttgtttttttttttttttaagtttataaaagtttattatacttttttaaaattactctttagtaatttattttacttctgtgtcctaagggtaatttctcaggattgttttcaaattgcttttttaggggaaataggtcatttgctatattacaagcaatccccaaattttatggtcttccaggaaaagttattaccgtttatgatactaacagttcctgagacttagctatgatcagtatgttcatgaggtggagcagttcctgtgttgcagcttttaacaacagatggcattcattaaatcacaaagtatgttaaaggtcacaaaagcaaaataactgtctgaggctaaggcccacgtgggacagtctaatacccatgagtactcaacttgccttgatgtctgagctttccagtgcaatgtgaatttgagcagccagaaatctattagtagaaagcaagacagattaatataggttaaaacaatgatttaaatatgtttctcccaataattatctctttccctggaatcaacttgtatgaaaccttgtcaaaatgtactccacaagtatgtacaattaagtattttaaaaataaatggcaaacattaaaaacaaaaaaaaaaaaaaaaaaaa

SEQ ID NO: 29664 - DNA, 5215 bp, Homo Sapiens
cgagcgcggcgcccttgagctgcaccgcggcgcaggtttgcgagccgacttgtcagccggccaagaaaaggaagctccgtcccttcccgctcacccggcttccccaccccttgtactctaaactctgcagagggcgagcggcgcggccacggaggcgccgaggaggagcgagccgccgccgggcagcggcgtgccctcgggggagagggcgccggagaggaggcggcggcgcggcggcgagggcgcggcgcgcgatggcagctgcttagcccggcgggcgcggagcagccccgagctgtggctggccaggcggtgcggctgggcgggggacgccgccgccgttgctgcccggcccggagagatgagcacggaggcggacgagggcatcactttctctgtgccacccttcgccccctcgggcttctgcaccatccccgagggcggcatctgcaggaggggaggagcggcggcggtgggcgagggcgaggagcaccagctgccaccgccgccgccgggcagcttctggaacgtggagagcgccgctgcccctggcatcggttgtccggcggccacctcctcgagcagtgccacccgaggccggggcagctctgttggcgggggcagccgacggaccacggtggcatatgtgatcaacgaagcgagccaagggcaactggtggtggccgagagcgaggccctgcagagcttgcgggaggcgtgcgagacagtgggcgccaccctggaaaccctgcattttgggaaactcgactttggagaaaccaccgtgctggaccgcttttacaatgcagatattgcggtggtggagatgagcgatgccttccggcagccgtccttgttttaccaccttggggtgagagaaagtttcagcatggccaacaacatcatcctctactgtgatactaactcggactctctgcagtcactgaaggaaataatttgccagaagaatactatgtgcactgggaactacacctttgttccttacatgataactccacataacaaagtctactgctgtgacagcagcttcatgaaggggttgacagagctcatgcaaccgaacttcgagctgcttcttggacccatctgcttacctcttgtggatcgttttattcaacttttgaaggtggcacaagcaagttctagccagtacttccgggaatctatactcaatgacatcaggaaagctcgtaatttatacactggtaaagaattggcagctgagttggcaagaattcggcagcgagtagataatatcgaagtcttgacagcagatattgtcataaatctgttactttcctacagagatatccaggactatgattctattgtgaagctggtagagactttagaaaaactgccaacctttgatttggcctcccatcaccatgtgaagtttcattatgcatttgcactgaataggagaaatctccctggtgacagagcaaaagctcttgatattatgattcccatggtgcaaagcgaaggacaagttgcttcagatatgtattgcctagttggtcgaatctacaaagatatgtttttggactctaatttcacggacactgaaagcagagaccatggagcttcttggttcaaaaaggcatttgaatctgagccaacactacagtcaggaattaattatgcggtcctcctcctggcagctggacaccagtttgaatcttcctttgagctccggaaagttggggtgaagctaagtagtcttcttggtaaaaagggaaacttggaaaaactccagagctactgggaagttggattttttctgggggccagcgtcctagccaatgaccacatgagagtcattcaagcatctgaaaagctttttaaactgaagacaccagcatggtacctcaagtctattgtagagacaattttaatatataagcattttgtgaaactgaccacagaacagcctgtggccaagcaagaacttgtggacttttggatggatttcctggtcgaggccacaaagacagatgttactgtggttaggtttccagtattaatattagaaccaaccaaaatctatcaaccttcttatttgtctatcaacaatgaagttgaggaaaagacaatctctatttggcacgtgcttcctgatgacaagaaaggtatacatgagtggaattttagtgcctcttctgtcaggggagtgagtatttctaaatttgaagaaagatgctgctttctttatgtgcttcacaattctgatgatttccaaatctatttctgtacagaacttcattgtaaaaagttttttgagatggtgaacaccattaccgaagagaaggggagaagcacagaggaaggagactgtgaaagtgacttgctggagtatgactatgaatatgatgaaaatggtgacagagtcgttttaggaaaaggcacttatgggatagtctacgcaggtcgggacttgagcaaccaagtcagaattgctattaaggaaatcccagagagagacagcagatactctcagcccctgcatgaagaaatagcattgcataaacacctgaagcacaaaaatattgtccagtatctgggctctttcagtgagaatggtttcattaaaatcttcatggagcaggtccctggaggaagtctttctgctctccttcgttccaaatggggtccattaaaagacaatgagcaaacaattggcttttatacaaagcaaatactggaaggattaaaatatctccatgacaatcagatagttcaccgggacataaagggtgacaatgtgttgattaatacctacagtggtgttctcaagatctctgacttcggaacatcaaagaggcttgctggcataaacccctgtactgaaacttttactggtaccctccagtatatggcaccagaaataatagataaaggaccaagaggctacggaaaagcagcagacatctggtctctgggctgtacaatcattgaaatggccacaggaaaacccccattttatgaactgggagaaccacaagcagctatgttcaaggtgggaatgtttaaagtccaccctgagatcccagagtccatgtctgcagaggccaaggcattcatactgaaatgttttgaaccagatcctgacaagagagcctgtgctaacgacttgcttgttgatgagtttttaaaagtttcaagcaaaaagaaaaagacacaacctaagctttcagctctttcagctggatcaaatgaatatctcaggagtatatccttgccggtacctgtgctggtggaggacaccagcagcagcagtgagtacggctcagtttcacccgacacggagttgaaagtggaccccttctctttcaaaacaagagccaagtcctgcggagaaagagatgtcaagggaattcggacactctttttgggcattccagatgagaattttgaagatcacagtgctcctccttcccctgaagaaaaagattctggattcttcatgctgaggaaggacagtgagaggcgagctacccttcacaggatcctgacggaagaccaagacaaaattgtgagaaacctaatggaatctttagctcagggggctgaagaaccgaaactaaaatgggaacacatcacaaccctcattgcaagcctcagagaatttgtgagatccactgaccgaaaaatcatagccaccacactgtcaaagctgaaactggagctggacttcgacagccatggcattagccaagtccaggtggtactctttggttttcaagatgctgtcaataaagttcttcggaatcataacatcaagccgcactggatgtttgccttagacagtatcattcggaaggcggtacagacagccattaccatcctggttccagaactaaggccacatttcagccttgcatctgagagtgatactgctgatcaagaagacttggatgtagaagatgaccatgaggaacagccttcaaatcaaactgtccgaagacctcaggctgtcattgaagatgctgtggctacctcaggcgtgagcacgctcagttctactgtgtctcatgattcccagagtgctcaccggtcactgaatgtacagcttggaaggatgaaaatagaaaccaatagattactggaagaattggttcggaaagagaaagaattacaagcactccttcatcgagctattgaagaaaaagaccaagaaattaaacacctgaagcttaagtcccaacccatagaaattcctgaattgcctgtatttcatctaaattcttctggcacaaatactgaagattctgaacttaccgactggctgagagtgaatggagctgatgaagacactataagccggtttttggctgaagattatacactattggatgttctctactatgttacacgtgatgacttaaaatgcttgagactaaggggagggatgctgtgcacactgtggaaggctatcattgactttcgaaacaaacagacttgactgttgctcaatctaatcttcgatggaaattctaaaaattaatacagagctgatcttcttgggggtgggaaaatcgaagggagaggagaaaggcgctgcactttaaatccagtatttgtttactcatgttaaaaaaaaaaaaaacagacaaaacacactgaaatttcctaactacatctatttctataatttttaaggactcttcataaggactcttaaaataatcctgaacattagaaccctaatgttcaggaagattttaatctaagcatttttatggaaatatttttaatgcagcagctattgcacttcagccaaatgtttatttcacacaaaacggatgtaacatttcatgtgatcgtgcaccactggaacaaaaccaaaatgtgaccataactgtttaggcttctgtgtgtttgtaatatgctctaataatctgagtagaaatgcgtaatttcaattactgtataaagtttatgtttttttaagtgtgcagaatctgagagcaatggtttttacttctctgtgttaattgtaatattgactctattttgtaacttaagtttctgacctgtcgtacatttgtttgagtcgtttatgtactactgaactgtaccagttgcacatgcttgaactgtagtaatgttagcttgttctaaagctatccattgtgtcatatttactctaaaaattaaagagactctcaacaaaaaaaaaaaaaaaaaaaaa

SEQ ID NO: 29665 - DNA, 1934 bp, Homo Sapiens
agaaccccgcggggtctgagcagcccagcgtgcccattccagcgcccgcgtccccgcagcatgccgcgcccccgcctgctggccgcgctgtgcggcgcgctgctctgcgcccccagcctcctcgtcgccctggatatctgttccaaaaacccctgccacaacggtggtttatgcgaggagatttcccaagaagtgcgaggagatgtcttcccctcgtacacctgcacgtgccttaagggctacgcgggcaaccactgtgagacgaaatgtgtcgagccactgggcatggagaatgggaacattgccaactcacagatcgccgcctcatctgtgcgtgtgaccttcttgggtttgcagcattgggtcccggagctggcccgcctgaaccgcgcaggcatggtcaatgcctggacacccagcagcaatgacgataacccctggatccaggtgaacctgctgcggaggatgtgggtaacaggtgtggtgacgcagggtgccagccgcttggccagtcatgagtacctgaaggccttcaaggtggcctacagccttaatggacacgaattcgatttcatccatgatgttaataaaaaacacaaggagtttgtgggtaactggaacaaaaacgcggtgcatgtcaacctgtttgagacccctgtggaggctcagtacgtgagattgtaccccacgagctgccacacggcctgcactctgcgctttgagctactgggctgtgagctgaacggatgcgccaatcccctgggcctgaagaataacagcatccctgacaagcagatcacggcctccagcagctacaagacctggggcttgcatctcttcagctggaacccctcctatgcacggctggacaagcagggcaacttcaacgcctgggttgcggggagctacggtaacgatcagtggctgcaggtggacctgggctcctcgaaggaggtgacaggcatcatcacccagggggcccgtaactttggctctgtccagtttgtggcatcctacaaggttgcctacagtaatgacagtgcgaactggactgagtaccaggaccccaggactggcagcagtaagatcttccctggcaactgggacaaccactcccacaagaagaacttgtttgagacgcccatcctggctcgctatgtgcgcatcctgcctgtagcctggcacaaccgcatcgccctgcgcctggagctgctgggctgttagtggccacctgccacccccaggtcttcctgctttccatgggcccgctgcctcttggcttctcagcccctttaaatcaccatagggctggggactggggaaggggagggtgttcagaggcagcaccaccacacagtcacccctccctccctctttcccaccctccacctctcacgggccctgccccagcccctaagccccgtcccctaacccccagtcctcactgtcctgttttcttaggcactgagggatctgagtaggtctgggatggacaggaaagggcaaagtagggcgtgtggtttccctgcccctgtccggaccgccgatcccaggtgcgtgtgtctctgtctctcctagcccctctctcacacatcacattcccatggtggcctcaagaaaggcccggaagccccaggctggagataacagcctcttgcccgtcggccctgcgtcggccctggggtaccatgtgccacaactgctgtggccccctgtccccaagacacttccccttgtctccctggttgcctctcttgccccttgtcctgaagcccagcgacacagaagggggtggggcgggtctatggggagaaagggagcgaggtcagaggagccggcatgggttggcagggtgggcgtttggggccctcatgctggcttttcaccccagaggacacaggcagcttccaaaatatatttatcttcttcacggg

SEQ ID NO: 29666 - DNA, 2377 bp, Homo Sapiens
ccggctgctgcggacctcctcggacccggacccagccccagcccggccccagccagccccgacggcgccatgcggggtccgagcggggctctgtggctgctcctggctctgcgcaccgtgctcggaggcatggaggtgcggtggtgcgccacctcggacccagagcagcacaagtgcggcaacatgagcgaggccttccgggaagcgggcatccagccctccctcctctgcgtccggggcacctccgccgaccactgcgtccagctcatcgcggcccaggaggctgacgccatcactctggatggaggagccatctatgaggcgggaaaggagcacggcctgaagccggtggtgggcgaagtgtacgatcaagaggtcggtacctcctattacgccgtggctgtggtcaggaggagctcccatgtgaccattgacaccctgaaaggcgtgaagtcctgccacacgggcatcaatcgcacagtgggctggaacgtgcccgtgggctacctggtggagagcggccgcctctcggtgatgggctgcgatgtactcaaagctgtcagcgactattttgggggcagctgcgtcccgggggcaggagagaccagttactctgagtccctctgtcgcctctgcaggggtgacagctctggggaaggggtgtgtgacaagagccccctggagagatactacgactacagcggggccttccggtgcctggcggaaggggcaggggacgtggcttttgtgaagcacagcacggtactggagaacacggatgggaagacgcttccctcctggggccaggccctgctgtcacaggacttcgagctgctgtgccgggatggtagccgggccgatgtcaccgagtggaggcagtgccatctggcccgggtgcctgctcacgccgtggtggtccgggccgacacagatgggggcctcatcttccggctgctcaacgaaggccagcgtctgttcagccacgagggcagcagcttccagatgttcagctctgaggcctatggccagaaggatctactcttcaaagactctacctcggagcttgtgcccatcgccacacagacctatgaggcgtggctgggccatgagtacctgcacgccatgaagggtctgctctgtgaccccaaccggctgcccccctacctgcgctggtgtgtgctctccactcccgagatccagaagtgtggagacatggccgtggccttccgccggcagcgcctcaagccagagatccagtgcgtgtcagccaagtccccccaacactgcatggagcggatccaggctgagcaggtcgacgctgtgaccctaagtggcgaggacatttacacggcggggaagaagtacggcctggttcccgcagccggcgagcactatgccccggaagacagcagcaactcgtactacgtggtggccgtggtgagacgggacagctcccacgccttcaccttggatgagcttcggggcaagcgctcctgccacgccggtttcggcagccctgcaggctgggatgtccccgtgggtgcccttattcagagaggcttcatccggcccaaggactgtgacgtcctcacagcagtgagcgagttcttcaatgccagctgcgtgcccgtgaacaaccccaagaactacccctcctcgctgtgtgcactgtgcgtgggggacgagcagggccgcaacaagtgtgtgggcaacagccaggagcggtattacggctaccgcggcgccttcaggtgcctggtggagaatgcgggtgacgttgccttcgtcaggcacacaaccgtctttgacaacacaaacggccacaattccgagccctgggctgctgagctcaggtcagaggactatgaactgctgtgccccaacggggcccgagccgaggtgtcccagtttgcagcctgcaacctggcacagataccaccccacgccgtgatggtccggcccgacaccaacatcttcaccgtgtatggactgctggacaaggcccaggacctgtttggagacgaccacaataagaacgggttcaaaatgttcgactcctccaactatcatggccaagacctgcttttcaaggatgccaccgtccgggcggtgcctgtcggagagaaaaccacctaccgcggctggctggggctggactacgtggcggcgctggaagggatgtcgtctcagcagtgctcgggcgcagcggccccggcgcccggggcgcccctgctcccgctgctgctgcccgccctcgccgcccgcctgctcccgcccgccctctgagcccggccgccccgccccagagctccgatgcccgcccggggagtttccgcggcggcctctcgcgctgcggaatccagaaggaagctcgcga

SEQ ID NO: 29667 - DNA, 11910 bp, Homo Sapiens
  misc_feature (89)..(89): n is a, c, g, or t
atggcgcacagctgtcggtggcgcttccccgcccgacccgggaccaccgggggcggcggcggcggggggcgccggggcctagggggcgncccgcggcaacgcgtcccggccctgctgcttccccccgggcccccggtcggcggtggcggccccggggcgcccccctcccccccggctgtggcggccgcggcggcggcggcgggaagcagcggggctggggttccagggggagcggccgccgcctcagcagcctcctcgtcgtccgcctcgtcttcgtcttcgtcatcgtcctcagcctcttcagggccggccctgctccgggtgggcccgggcttcgacgcggcgctgcaggtctcggccgccatcggcaccaacctgcgccggttccgggccgtgtttggggagagcggcgggggaggcggcagcggagaggatgagcaattcttaggttttggctcagatgaagaagtcagagtgcgaagtcccacaaggtctccttcagttaaaactagtcctcgaaaacctcgtgggagacctagaagtggctctgaccgaaattcagctatcctctcagatccatctgtgttttcccctctaaataaatcagagaccaaatctggagataagatcaagaagaaagattctaaaagtatagaaaagaagagaggaagacctcccaccttccctggagtaaaaatcaaaataacacatggaaaggacatttcagagttaccaaagggaaacaaagaagatagcctgaaaaaaattaaaaggacaccttctgctacgtttcagcaagccacaaagattaaaaaattaagagcaggtaaactctctcctctcaagtctaagtttaagacagggaagcttcaaataggaaggaagggggtacaaattgtacgacggagaggaaggcctccatcaacagaaaggataaagaccccttcggtctcctcattaattctgaactggaaaagccccagaaagtccggaaagacaaggaaggaacacctccacttacaaaagaagataagacagttgtcagacaaagccctcgaaggattaagccagttaggattattccttcttcaaaaaggacagatgcaaccattgctaagcaactcttacagagggcaaaaaaagggggctcaaaagaaaattgaaaaagaagcagctcagctgcagggaagaaaggtgaagacacaggtcaaaaatattcgacagttcatcatgcctgttgtcagtgctatctcctcgcggatcattaagacccctcggcggtttatagaggatgaggattatgaccctccaattaaaattgcccgattagagtctacaccgaatagtagattcagtgccccgtcctgtggatcttctgaaaaatcaagtgcagcttctcagcactcctctcaaatgtcttcagactcctctcgatctagtagccccagtgttgatacctccacagactctcaggcttctgaggagattcaggtacttcctgaggagcggagcgatacccctgaagttcatcctccactgcccatttcccagtccccagaaaatgagagtaatgataggagaagcagaaggtattcagtgtcggagagaagttttggatctagaacgacgaaaaaattatcaactctacaaagtgccccccagcagcagacctcctcgtctccacctccacctctgctgactccaccgccaccactgcagccagcctccagtatctctgaccacacaccttggcttatgcctccaacaatccccttagcatcaccatttttgcctgcttccactgctcctatgcaagggaagcgaaaatctattttgcgagaaccgacatttaggtggacttctttaaagcattctaggtcagagccacaatacttttcctcagcaaagtatgccaaagaaggtcttattcgcaaaccaatatttgataatttccgaccccctccactaactcccgaggacgttggctttgcatctggtttttctgcatctggtaccgctgcttcagcccgattgttttcgccactccattctggaacaaggtttgatatgcacaaaaggagccctcttctgagagctccaagatttactccaagtgaggctcactctagaatatttgagtctgtaaccttgcctagtaatcgaacttctgctggaacatcttcttcaggagtatccaatagaaaaaggaaaagaaaagtgtttagtcctattcgatctgaaccaagatctccttctcactccatgaggacaagaagtggaaggcttagtagttctgagctctcacctctcacccccccgtcttctgtctcttcctcgttaagcatttctgttagtcctcttgccactagtgccttaaacccaacttttacttttccttctcattccctgactcagtctggggaatctgcagagaaaaatcagagaccaaggaagcagactagtgctccggcagagccattttcatcaagtagtcctactcctctcttcccttggtttaccccaggctctcagactgaaagagggagaaataaagacaaggcccccgaggagctgtccaaagatcgagatgctgacaagagcgtggagaaggacaagagtagagagagagaccgggagagagaaaaggagaataagcgggagtcaaggaaagagaaaaggaaaaagggatcagaaattcagagtagttctgctttgtatcctgtgggtagggtttccaaagagaaggttgttggtgaagatgttgccacttcatcttctgccaaaaaagcaacagggcggaagaagtcttcatcacatgattctgggactgatattacttctgtgactcttggggatacaacagctgtcaaaaccaaaatacttataaagaaagggagaggaaatctggaaaaaaccaacttggacctcggcccaactgccccatccctggagaaggagaaaaccctctgcctttccactccttcatctagcactgttaaacattccacttcctccataggctccatgttggctcaggcagacaagcttccaatgactgacaagagggttgccagcctcctaaaaaaggccaaagctcagctctgcaagattgagaagagtaagagtcttaaacaaaccgaccagcccaaagcacagggtcaagaaagtgactcatcagagacctctgtgcgaggaccccggattaaacatgtctgcagaagagcagctgttgcccttggccgaaaacgagctgtgtttcctgatgacatgcccaccctgagtgccttaccatgggaagaacgagaaaagattttgtcttccatggggaatgatgacaagtcatcaattgctggctcagaagatgctgaacctcttgctccacccatcaaaccaattaaacctgtcactagaaacaaggcaccccaggaacctccagtaaagaaaggacgtcgatcgaggcggtgtgggcagtgtcccggctgccaggtgcctgaggactgtggtgtttgtactaattgcttagataagcccaagtttggtggtcgcaatataaagaagcagtgctgcaagatgagaaaatgtcagaatctacaatggatgccttccaaagcctacctgcagaagcaagctaaagctgtgaaaaagaaagagaaaaagtctaagaccagtgaaaagaaagacagcaaagagagcagtgttgtgaagaacgtggtggactctagtcagaaacctaccccatcagcaagagaggatcctgccccaaagaaaagcagtagtgagcctcctccacgaaagcccgtcgaggaaaagagtgaagaagggaatgtctcggcccctgggcctgaatccaaacaggccaccactccagcttccaggaagtcaagcaagcaggtctcccagccagcactggtcatcccgcctcagccacctactacaggaccgccaagaaaagaagttcccaaaaccactcctagtgagcccaagaaaaagcagcctccaccaccagaatcaggtccagagcagagcaaacagaaaaaagtggctccccgcccaagtatccctgtaaaacaaaaaccaaaagaaaaggaaaaaccacctccggtcaataagcaggagaatgcaggcactttgaacatcctcagcactctctccaatggcaatagttctaagcaaaaaattccagcagatggagtccacaggatcagagtggactttaaggaggattgtgaagcagaaaatgtgtgggagatgggaggcttaggaatcttgacttctgttcctataacacccagggtggtttgctttctctgtgccagtagtgggcatgtagagtttgtgtattgccaagtctgttgtgagcccttccacaagttttgtttagaggagaacgagcgccctctggaggaccagctggaaaattggtgttgtcgtcgttgcaaattctgtcacgtttgtggaaggcaacatcaggctacaaagcagctgctggagtgtaataagtgccgaaacagctatcaccctgagtgcctgggaccaaactaccccaccaaacccacaaagaagaagaaagtctggatctgtaccaagtgtgttcgctgtaagagctgtggatccacaactccaggcaaagggtgggatgcacagtggtctcatgatttctcactgtgtcatgattgcgccaagctctttgctaaaggaaacttctgccctctctgtgacaaatgttatgatgatgatgactatgagagtaagatgatgcaatgtggaaagtgtgatcgctgggtccattccaaatgtgagaatctttcagatgagatgtatgagattctatctaatctgccagaaagtgtggcctacacttgtgtgaactgtactgagcggcaccctgcagagtggcgactggcccttgaaaaagagctgcagatttctctgaagcaagttctgacagctttgttgaattctcggactaccagccatttgctacgctaccggcaggctgccaagcctccagacttaaatcccgagacagaggagagtataccttcccgcagctcccccgaaggacctgatccaccagttcttactgaggtcagcaaacaggatgatcagcagcctttagatctagaaggagtcaagaggaagatggaccaagggaattacacatctgtgttggagttcagtgatgatattgtgaagatcattcaagcagccattaattcagatggaggacagccagaaattaaaaaagccaacagcatggtcaagtccttcttcattcggcaaatggaacgtgtttttccatggttcagtgtcaaaaagtccaggttttgggagccaaataaagtatcaagcaacagtgggatgttaccaaacgcagtgcttccaccttcacttgaccataattatgctcagtggcaggagcgagaggaaaacagccacactgagcagcctcctttaatgaagaaaatcattccagctcccaaacccaaaggtcctggagaaccagactcaccaactcctctgcatcctcctacaccaccaattttgagtactgataggagtcgagaagacagtccagagctgaacccacccccaggcatagaagacaatagacagtgtgcgttatgtttgacttatggtgatgacagtgctaatgatgctggtcgtttactatatattggccaaaatgagtggacacatgtaaattgtgctttgtggtcagcggaagtgtttgaagatgatgacggatcactaaagaatgtgcatatggctgtgatcaggggcaagcagctgagatgtgaattctgccaaaagccaggagccaccgtgggttgctgtctcacatcctgcaccagcaactatcacttcatgtgttcccgagccaagaactgtgtctttctggatgataaaaaagtatattgccaacgacatcgggatttgatcaaaggcgaagtggttcctgagaatggatttgaagttttcagaagagtgtttgtggactttgaaggaatcagcttgagaaggaagtttctcaatggcttggaaccagaaaatatccacatgatgattgggtctatgacaatcgactgcttaggaattctaaatgatctctccgactgtgaagataagctctttcctattggatatcagtgttccagggtatactggagcaccacagatgctcgcaagcgctgtgtatatacatgcaagatagtggagtgccgtcctccagtcgtagagccggatatcaacagcactgttgaacatgatgaaaacaggaccattgcccatagtccaacatcttttacagaaagttcatcaaaagagagtcaaaacacagctgaaattataagtcctccatcaccagaccgacctcctcattcacaaacctctggctcctgttattatcatgtcatctcaaaggtccccaggattcgaacacccagttattctccaacacagagatcccctggctgtcgaccgttgccttctgcaggaagtcctaccccaaccactcatgaaatagtcacagtaggtgatcctttactctcctctggacttcgaagcattggctccaggcgtcacagtacctcttccttatcaccccagcggtccaaactccggataatgtctccaatgagaactgggaatacttactctaggaataatgtttcctcagtctccaccaccgggaccgctactgatcttgaatcaagtgccaaagtagttgatcatgtcttagggccactgaattcaagtactagtttagggcaaaacacttccacctcttcaaatttgcaaaggacagtggttactgtaggcaataaaaacagtcacttggatggatcttcatcttcagaaatgaagcagtccagtgcttcagacttggtgtccaagagctcctctttaaagggagagaagaccaaagtgctgagttccaagagctcagagggatctgcacataatgtggcttaccctggaattcctaaactggccccacaggttcataacacaacatctagagaactgaatgttagtaaaatcggctcctttgctgaaccctcttcagtgtcgttttcttctaaagaggccctctccttcccacacctccatttgagagggcaaaggaatgatcgagaccaacacacagattctacccaatcagcaaactcctctccagatgaagatactgaagtcaaaaccttgaagctatctggaatgagcaacagatcatccattatcaacgaacatatgggatctagttccagagataggagacagaaagggaaaaaatcctgtaaagaaactttcaaagaaaagcattccagtaaatcttttttggaacctggtcaggtgacaactggtgaggaaggaaacttgaagccagagtttatggatgaggttttgactcctgagtatatgggccaacgaccatgtaacaatgtttcttctgataagattggtgataaaggcctttctatgccaggagtccccaaagctccacccatgcaagtagaaggatctgccaaggaattacaggcaccacggaaacgcacagtcaaagtgacactgacacctctaaaaatggaaaatgagagtcaatccaaaaatgccctgaaagaaagtagtcctgcttcccctttgcaaatagagtcaacatctcccacagaaccaatttcagcctctgaaaatccaggagatggtccagtggcccaaccaagccccaataatacctcatgccaggattctcaaagtaacaactatcagaatcttccagtacaggacagaaacctaatgcttccagatggccccaaacctcaggaggatggctcttttaaaaggaggtatccccgtcgcagtgcccgtgcacgttctaacatgttttttgggcttaccccactctatggagtaagatcctatggtgaagaagacattccattctacagcagctcaactgggaagaagcgaggcaagagatcagctgaaggacaggtggatggggccgatgacttaagcacttcagatgaagacgacttatactattacaacttcactagaacagtgatttcttcaggtggagaggaacgactggcatcccataatttatttcgggaggaggaacagtgtgatcttccaaaaatctcacagttggatggtgttgatgatgggacagagagtgatactagtgtcacagccacaacaaggaaaagcagccagattccaaaaagaaatggtaaagaaaatggaacagagaacttaaagattgatagacctgaagatgctggggagaaagaacatgtcactaagagttctgttggccacaaaaatgagccaaagatggataactgccattctgtaagcagagttaaaacacagggacaagattccttggaagctcagctcagctcattggagtcaagccgcagagtccacacaagtaccccctccgacaaaaatttactggacacctataatactgagctcctgaaatcagattcagacaataacaacagtgatgactgtgggaatatcctgccttcagacattatggactttgtactaaagaatactccatccatgcaggctttgggtgagagcccagagtcatcttcatcagaactcctgaatcttggtgaaggattgggtcttgacagtaatcgtgaaaaagacatgggtctttttgaagtattttctcagcagctgcctacaacagaacctgtggatagtagtgtctcttcctctatctcagcagaggaacagtttgagttgcctctagagctaccatctgatctgtctgtcttgaccacccggagtcccactgtccccagccagaatcccagtagactagctgttatctcagactcaggggagaagagagtaaccatcacagaaaaatctgtagcctcctctgaaagtgacccagcactgctgagcccaggagtagatccaactcctgaaggccacatgactcctgatcattttatccaaggacacatggatgcagaccacatctctagccctccttgtggttcagtagagcaaggtcatggcaacaatcaggatttaactaggaacagtagcacccctggccttcaggtacctgtttccccaactgttcccatccagaaccagaagtatgtgcccaattctactgatagtcctggcccgtctcagatttccaatgcagctgtccagaccactccaccccacctgaagccagccactgagaaactcatagttgttaaccagaacatgcagccactttatgttctccaaactcttccaaatggagtgacccaaaaaatccaattgacctcttctgttagttctacacccagtgtgatggagacaaatacttcagtattgggacccatgggaggtggtctcacccttaccacaggactaaatccaagcttgccaacttctcaatctttgttcccttctgctagcaaaggattgctacccatgtctcatcaccagcacttacattccttccctgcagctactcaaagtagtttcccaccaaacatcagcaatcctccttcaggcctgcttattggggttcagcctcctccggatccccaacttttggtttcagaatccagccagaggacagacctcagtaccacagtagccactccatcctctggactcaagaaaagacccatatctcgtctacagacccgaaagaataaaaaacttgctccctctagtaccccttcaaacattgccccttctgatgtggtttctaatatgacattgattaacttcacaccctcccagcttcctaatcatccaagtctgttagatttggggtcacttaatacttcatctcaccgaactgtccccaacatcataaaaagatctaaatctagcatcatgtattttgaaccggcacccctgttaccacagagtgtgggaggaactgctgccacagcggcaggcacatcaacaataagccaggatactagccacctcacatcagggtctgtgtctggcttggcatccagttcctctgtcttgaatgttgtatccatgcaaactaccacaacccctacaagtagtgcgtcagttccaggacacgtcaccttaaccaacccaaggttgcttggtaccccagatattggctcaataagcaatcttttaatcaaagctagccagcagagcctggggattcaggaccagcctgtggctttaccgccaagttcaggaatgtttccacaactggggacatcacagaccccctctactgctgcaataacagcggcatctagcatctgtgtgctcccctccactcagactacgggcataacagccgcttcaccttctggggaagcagacgaacactatcagcttcagcatgtgaaccagctccttgccagcaaaactgggattcattcttcccagcgtgatcttgattctgcttcagggccccaggtatccaactttacccagacggtagacgctcctaatagcatgggactggagcagaacaaggctttatcctcagctgtgcaagccagccccacctctcctgggggttctccatcctctccatcttctggacagcggtcagcaagcccttcagtgccgggtcccactaaacccaaaccaaaaaccaaacggtttcagctgcctctagacaaagggaatggcaagaagcacaaagtttcccatttgcggaccagttcttctgaagcacacattccagaccaagaaacgacatccctgacctcaggcacagggactccaggagcagaggctgagcagcaggatacagctagcgtggagcagtcctcccagaaggagtgtgggcaacctgcagggcaagtcgctgttcttccggaagttcaggtgacccaaaatccagcaaatgaacaagaaagtgcagaacctaaaacagtggaagaagaggaaagtaatttcagctccccactgatgctttggcttcagcaagaacaaaagcggaaggaaagcattactgagaaaaaacccaagaaaggacttgtttttgaaatttccagtgatgatggctttcagatctgtgcagaaagtattgaagatgcctggaagtcattgacagataaagtccaggaagctcgatcaaatgcccgcctaaagcagctctcatttgcaggtgttaacggtttgaggatgctggggattctccatgatgcagttgtgttcctcattgagcagctgtctggtgccaagcactgtcgaaattacaaattccgtttccacaagccagaggaggccaatgaaccccccttgaaccctcacggctcagccagggctgaagtccacctcaggaagtcagcatttgacatgtttaacttcctggcttctaaacatcgtcagcctcctgaatacaaccccaatgatgaagaagaggaggaggtacagctgaagtcagctcggagggcaactagcatggatctgccaatgcccatgcgcttccggcacttaaaaaagacttctaaggaggcagttggtgtctacaggtctcccatccatggccggggtcttttctgtaagagaaacattgatgcaggtgagatggtgattgagtatgccggcaacgtcatccgctccatccagactgacaagcgggaaaagtattacgacagcaagggcattggttgctatatgttccgaattgatgactcagaggtagtggatgccaccatgcatggaaatcgtgcacgcttcatcaatcactcgtgtgagcctaactgctattctcgggtcatcaatattgatgggcagaagcacattgtcatctttgccatgcgtaagatctaccgaggagaggaactcacttacgactataagttccccattgaggatgccagcaacaagctgccctgcaactgtggcgccaagaaatgccggaagttcctaaactaa

SEQ ID NO: 29668 - DNA, 1974 bp, Homo Sapiens
ggttccgcggggctggcgggcgagcgggcggccgggatcggcggcggcggcggcggcggcggcgcttgacagacaatgagggcggcggggcggcgttgagcggcggcggcggcggcggcggcggcgagcgacgcggggcccgggggcggggcggggcgccagccatggacaatcagtgcaccgtccaggtgaggttagagctggggcatcgcgcccaactgcgcaagaagcccaccacggaggggttcactcacgactggatggtgtttgtccgcggccccgagcaatgtgacatccagcacttcgtggagaaggtggtcttctggctgcacgacagcttccccaagcccagacgcgtgtgcaaggagcccccctacaaagtagaggagtcggggtacgctggcttcatcatgcccatcgaggtgcacttcaaaaacaaggaggagccgaggaaggtctgcttcacctacgacctgttcctgaacctggaaggcaacccgcccgtgaaccacctgcgctgcgagaagctcaccttcaacaaccccaccacggagttccggtacaagctcctgcgggccggcggggtgatggtaatgcccgaaggagcagacacggtgtccaggcccagtcccgactaccccatgttacccacaattccactctctgccttctctgaccccaagaagaccaaaccatcccacggctccaaggacgccaacaaggagagcagcaagacctccaagccacacaaggtgaccaaggagcaccgggagcggccccgcaaagactccgagagcaagagctcctccaaggagctggagcgtgagcaggccaaaagctccaaggacacctcgcggaagctgggcgagggccggctgcccaaggaggagaaggcgccaccgcccaaggctgccttcaaggaacccaagatggccctgaaagagaccaagctggaaagcacgtcccccaagggtgggcccccacccccacccccacccccaccccgggcttccagcaagcggccggccaccgccgactcgccaaagcccagcgccaagaagcagaagaagagcagctcgaaggggtcccggagtgctccaggcacctcgccccgcacctcctcctcctcctccttctcggacaagaagccggccaaggacaagagcagcaccagaggggagaaggtgaaggccgagagtgagccccgggaggccaaaaaggccctggaggtggaggagtccaactcagaggacgaggcctccttcaagtccgagtctgcccagtcaagcccgtccaactccagctccagctcagactccagctcagactcagacttcgagccatcccagaaccacagccaaggacccctgcgctccatggtggaggacctgcagtccgaggagtccgacgaggacgactcttcgtcaggcgaggaggctgccggcaagaccaacccggggagggactccaggttgagcttcagcgacagcgagagtgacaacagcgccgactcctccctgcccagccgtgagcccccacccccccagaagccacccccgcccaacagcaaggtgtcaggccggaggagccccgagtcctgcagcaagcctgagaagatcctcaagaagggcacctacgacaaggcctacacggatgagctggtggagctacaccggaggctgatggcgctgcgggagcgcaacgtgctgcagcagattgtgaatctgatcgaggagactggccacttcaatgtcaccaacaccaccttcgacttcgacctcttctccctggacgagaccaccgtgcgcaaactgcagagctgcctggaggccgtggccacatgaccctgggccgcgtgccgggcccccaccgccggggtcctgggaggctgcagccaggcctcgcctgccctcctctcccgtctcgcctgcttcatttggatatcagagctatggctcagaaaagcaagcatct

SEQ ID NO: 29669 - DNA, 4839 bp, Homo Sapiens
atgtcggcgggcggccgtgacgaggagcggcggaagctggccgacatcatccaccactggaacgccaaccggctggacctgttcgagatcagccagccgaccgaggatttggagttccatggagtgatgagattttattttcaagataaagctgctggaaactttgcaacaaaatgtattcgggtctctagtactgccaccactcaagatgtaatcgaaacgctcgcggagaaatttcgacctgatatgcgaatgctgtcctctcccaagtattcactctatgaagtgcatgtcagcggagaaagaagattggatatagatgagaaacctctagttgtacaactgaattggaacaaagatgatcgggaaggcagatttgttcttaagaatgagaatgacgccattcctcctaaggctcaaagtaatggacctgaaaagcaggaaaaagaaggggttatccagaacttcaagagaactctctcaaagaaagaaaagaaggaaaaaaagaagagagaaaaagaggcattgcgacaggcatctgataaagatgatagacctttccaaggggaggatgttgaaaattctcgactggctgctgaggtttacaaagacatgccggaaaccagctttactcgaaccatttctaatcctgaggtggttatgaaacgacggaggcagcaaaaattggaaaagagaatgcaggaatttcggagctcagatgggcggcctgattcaggtggaacattgagaatttatgcagatagtttaaaaccaaatattccctacaagacaatcctgctgtctactacagatcctgcagactttgctgtggctgaagctttagagaagtatggtctggaaaaagaaaaccctaaggattactgcatcgcccgggttatgcttcctcctggagcccagcattctgatgaaaagggtgctaaagaaattattcttgatgatgatgagtgtcctttacaaatcttcagggaatggccaagtgacaaagggattttagtctttcagttgaagaggaggccaccagaccacatcccaaagaaaaccaagaaacacttggaaggcaagacacccaagggaaaggagagagctgacgggtctgtctatggctccacccttcctccggagaagctgccctatttagtagagttaagcccagatggttctgactctagagataagccaaagctttaccgccttcagttaagtgttactgaagttgggacagaaaagttggatgacaactctatccagttgtttggcccaggaattcagccccatcactgtgaccttaccaacatggatggagtggtcactgtgacgcccagaagtatggacgcagaaacctacgtggaaggccagcgcatctcagaaaccaccatgctgcagagtggcatgaaagtgcagtttggggcgtcccatgtatttaagtttgtggaccccagtcaggatcatgctcttgcaaaaagatctgtggatggaggcctgatggttaagggcccaagacataaacctggaattgttcaggagacaacttttgatttgggaggagatattcatagtgggacagcattaccgacaagcaagagcaccactaggctggacagcgacagagtgtcgtctgcctctagcacagccgagcggggaatggtgaagccgatgatcagagtagaacagcagccagattatcgcaggcaagaaagcagaacacaggatgcttctgggcctgagctgatactacctgcaagcattgaattcagggaaagttctgaagattcatttttgtctgccattataaattatactaatagctctacagtccactttaagttgtcccctacatatgtattatatatggcatgccggtatgtattgtccaaccagtacagacctgacatcagccctacagagcgcacacataaagtcattgcagtcgtcaacaagatggtgagcatgatggagggtgtcatccagaaacagaagaatattgcaggggcacttgccttctggatggcaaatgcatctgaacttctcaacttcattaagcaagaccgagaccttagtcggatcacactggatgctcaagatgttttagcacatttggttcaaatggcatttaaatacttggttcactgtcttcaatcagaacttaataattacatgccagcctttctagatgaccctgaagagaacagtctgcaacgaccaaaaatagatgatgtgctgcacacgctcacaggagccatgtccttgctacgacgctgcagagtcaatgccgccctgaccatccagctcttctctcagctcttccacttcatcaatatgtggctgttcaatagattggtgaccgacccagattcggggctgtgctcccattactggggtgcgattatccgtcagcagttgggccatattgaagcctgggctgagaagcaggggctggaactggctgcggactgtcatctgagcaggatcgtgcaggcaacgactttgcttaccatggataagtatgcacctgatgacattccaaatataaacagcacctgctttaagttaaattcattacaacttcaagccttattacagaactatcactgtgcacctgatgagccttttatcccaacggatcttatagaaaatgtagtgactgtggctgaaaacactgccgatgagctggcccgcagtgatggaagggaagtgcagttggaggaggatcctgatctgcagctgccgtttcttttgccagaagatggttattcttgtgatgttgtcagaaacattccaaatggtttacaagaatttttagaccctctgtgccagagaggattttgcaggttaattcctcacacacgttcaccaggtacttggacaatatattttgaaggtgcagattatgaaagtcaccttctgcgtgagaacacagagctggctcagcctctgaggaaagaacctgaaataatcactgtgaccctaaaaaagcagaatggaatgggccttagcattgttgcagcaaagggtgctggtcaagataaactaggaatctacgtgaagtcggttgtgaaaggaggtgctgcagatgtggatggacgtctagctgcaggtgatcagctcctcagtgtggatggacgaagtctggttggactctctcaggaaagggcggcagaactcatgacaagaacaagctctgtggtgacactggaagtagcaaagcagggtgccatctaccacggtctggccacccttctcaatcagccatcccccatgatgcagagaatttcagatcgtcgtggctcaggtaaaccccgaccaaagagtgaaggctttgagctctataataattcaactcaaaatgggtctcctgagagtcctcagctgccttgggcagaatatagtgaaccaaagaaattgcctggtgatgacagactgatgaaaaatagagctgatcaccgttccagccccaacgtagcaaatcagcctcctagtcctggagggaaaagtgcatatgcctctggaacaacagcgaagataacatctgtctctactggaaacctctgcactgaggagcagacgcctccgcctagacctgaagcctaccccattcccactcagacgtacaccagagagtattttaccttcccagcttccaaatcccaggatcggatggctcctcctcagaaccagtggccaaattatgaggaaaagccacatatgcacacagatagtaatcattccagtattgcaattcagcgtgttacacgttcccaagaagaacttcgagaagataaagcttaccaacttgagcggcatcgaatagaggcagctatggaccgaaagtctgatagtgatatgtggataaatcagagctcctcactggactccagtacctctagccaggagcatctgaaccattcctctaagtcggtcacccctgcttccacactgaccaaaagtggccctggccgttggaaaacaccagcagccataccggccacccctgtggccgtctcccagccaatccgaacagacctgcctccgccacccccgccacctccagtccactatgccggtgatttcgatggaatgtccatggatttgcctctcccaccacccccttccgccaaccagatagggctgccgtctgcgcaggtggctgctgctgaacggagaaagagagaagaacatcagcgttggtatgagaaggagaaggcccccctggaggaggagcgggagaggaagcggagagagcaggagaggaagttgggccagatgcgcactcagtccttaaaccctgctccgttttctcccctgactgcacagcagatgaagcccgaaaagccttccacactccagcggccacaggaaacagtcattcgggagctgcagcctcagcagcagccccgcacgatcgagcgcagagacttgcagtacattacagtcagcaaagaggagctttcctcgggggacagtctgtcccccgacccgtggaagcgggacgccaaggagaagctggagaagcagcagcagatgcacatcgtggacatgctgagcaaggagatccaggagctccagagcaaaccggaccgcagcgccgaggagagcgaccggctgcgcaagctcatgctggagtggcagttccagaagagactccaggagtcgaagcagaaggacgaagatgacgaggaggaggaggacgatgatgtggacaccatgctgatcatgcagcgcctggaggctgaacgaagagcgagggtaaaggggggagtgctttggctgtgcccatctgtggtccctattttagcttctgcgtgtttcccatggggatag

SEQ ID NO: 29670 - DNA, 6099 bp, Homo Sapiens; identical to SEQ ID NO: 27789

SEQ ID NO: 29671 - DNA, 7619 bp, Homo Sapiens
actgaggcgctggatctgtggtcgcggctggggacgtgcgcccgcgccaccatcttcggctgaagaggcaattgcttttggatcgttccatttacaatggcgcagagaactggactcgaggatccagagaggtatctctttgtggacagggctgtcatctacaaccctgccactcaagctgattggacagctaaaaagctagtgtggattccatcagaacgccatggttttgaggcagctagtatcaaagaagaacggggagatgaagttatggtggagttggcagagaatggaaagaaagcaatggtcaacaaagatgatattcagaagatgaacccacctaagttttccaaggtggaggatatggcagaattgacatgcttgaatgaagcttccgttttacataatctgaaggatcgctactattcaggactaatctatacttattctggactcttctgtgtagttataaacccttacaagaatcttccaatttactctgagaatattattgaaatgtacagagggaagaagcgtcatgagatgcctccacacatctatgctatatctgaatctgcttacagatgcatgcttcaagatcgtgaggaccagtcaattctttgcacgggtgagtcaggtgctgggaagacagaaaatacaaagaaagttattcagtaccttgcccatgttgcttcttcacataaaggaagaaaggaccataatattcctggggaacttgaacggcagcttttgcaagcaaatccaattctggaatcatttggaaatgcgaagactgtgaaaaatgataactcatctcgttttggcaaatttattcggatcaactttgatgtaactggctatatcgttggggccaacattgaaacataccttctggaaaagtctcgtgctgttcgtcaagcaaaagatgaacgtacttttcatatcttttaccagttgttatctggagcaggagaacacctaaagtctgatttgcttcttgaaggatttaataactacaggtttctctccaatggctatattcctattccgggacagcaagacaaagataatttccaggagaccatggaagcaatgcacataatgggcttctcccatgaagagattctgtcaatgcttaaagtagtatcttcagtgctacagtttggaaatatttctttcaaaaaggagagaaatactgatcaagcttccatgccagaaaatacagttgcgcagaagctctgccatcttcttgggatgaatgtgatggagtttactcgggccatcctgactccccggatcaaggtcggccgagactatgtgcaaaaagcccagaccaaagaacaggcagattttgcagtagaagcattggcaaaagctacctatgagcggctctttcgctggctcgttcatcgcatcaataaagctctggataggaccaaacgtcagggagcatctttcattggaatcctggatattgctggatttgaaatttttgagctgaactcctttgaacaactttgcatcaactacaccaatgagaagctgcagcagctgttcaaccacaccatgtttatcctagaacaagaggaataccagcgcgaaggcatcgagtggaacttcatcgatttcgggctggatctgcagccatgcatcgacctaatagagagacctgcgaaccctcctggtgtactggcccttttggatgaagaatgctggttccctaaagccacagataaaacctttgttgaaaaactggttcaagagcaaggttcccactccaagtttcagaaacctcgacaattaaaagacaaagctgatttttgcattatacattatgcagggaaggtggactataaggcagatgagtggctgatgaagaatatggaccccctgaatgacaacgtggccacccttttgcaccagtcatcagacagatttgtggcagagctttggaaagatgtggaccgtatcgtgggtctggatcaagtcactggtatgactgagacagcttttggctccgcatataaaaccaagaagggcatgtttcgtaccgttgggcaactctacaaagaatctctcaccaagctgatggcaactctccgaaacaccaaccctaactttgttcgttgtatcattccaaatcacgagaagagggctggaaaattggatccacacctagtcctagatcagcttcgctgtaatggtgtcctggaagggatccgaatctgtcgccagggcttccctaaccgaatagttttccaggaattcagacagagatatgagatcctaactccaaatgctattcctaaaggttttatggatggtaaacaggcctgtgaacgaatgatccgggctttagaattggacccaaacttgtacagaattggacagagcaagatatttttcagagctggagttctggcacacttagaggaagaaagagatttaaaaatcaccgatatcattatcttcttccaggccgtttgcagaggttacctggccagaaaggcctttgccaagaagcagcagcaactaagtgccttaaaggtcttgcagcggaactgtgccgcgtacctgaaattacggcactggcagtggtggcgagtcttcacaaaggtgaagccgcttctacaagtgactcgccaggaggaagaacttcaggccaaagatgaagagctgttgaaggtgaaggagaagcagacgaaggtggaaggagagctggaggagatggagcggaagcaccagcagcttttagaagagaagaatatccttgcagaacaactacaagcagagactgagctctttgctgaagcagaagagatgagggcaagacttgctgctaaaaagcaggaattagaagagattctacatgacttggagtctagggttgaagaagaagaagaaagaaaccaaatcctccaaaatgaaaagaaaaaaatgcaagcacatattcaggacctggaagaacagctagacgaggaggaaggggctcggcaaaagctgcagctggaaaaggtgacagcagaggccaagatcaagaagatggaagaggagattctgcttctcgaggaccaaaattccaagttcatcaaagaaaagaaactcatggaagatcgcattgctgagtgttcctctcagctggctgaagaggaagaaaaggcgaaaaacttggccaaaatcaggaataagcaagaagtgatgatctcagatttagaagaacgcttaaagaaggaagaaaagactcgtcaggaactggaaaaggccaaaagaaaactcgacggggagacgaccgacctgcaggaccagatcgcagagctgcaggcgcagattgatgagctcaagctgcagctggccaagaaggaggaggagctgcagggcgcactggccagaggtgatgatgaaacactccataagaacaatgcccttaaagttgtgcgagagctacaagcccaaattgctgaacttcaggaagactttgaatccgagaaggcttcacggaacaaggccgaaaagcagaaaagggacttgagtgaggaactggaagctctgaaaacagagctggaggacacgctggacaccacggcagcccagcaggaactacgtacaaaacgtgaacaagaagtggcagagctgaagaaagctcttgaggaggaaactaagaaccatgaagctcaaatccaggacatgagacaaagacacgcaacagccctggaggagctctcagagcagctggaacaggccaagcggttcaaagcaaatctagagaagaacaagcagggcctggagacagataacaaggagctggcgtgtgaggtgaaggtcctgcagcaggtcaaggctgagtctgagcacaagaggaagaagctcgacgcgcaggtccaggagctccatgccaaggtctctgaaggcgacaggctcagggtggagctggcggagaaagcaagtaagctgcagaatgagctagataatgtctccacccttctggaagaagcagagaagaagggtattaaatttgctaaggatgcagctagtcttgagtctcaactacaggatacacaggagcttcttcaggaggagacacgccagaaactaaacctgagcagtcggatccggcagctggaagaggagaagaacagtcttcaggagcagcaggaggaggaggaggaggccaggaagaacctggagaagcaagtgctggccctgcagtcccagttggctgataccaagaagaaagtagatgacgacctgggaacaattgaaagtctggaagaagccaagaagaagcttctgaaggacgcggaggccctgagccagcgcctggaggagaaggcactggcgtatgacaaactggagaagaccaagaaccgcctgcagcaggagctggacgacctcacggtggacctggaccaccagcgccaggtcgcctccaacttggagaagaagcagaagaagtttgaccagctgttagcagaagagaagagcatctctgctcgctatgccgaagagcgggaccgggccgaagccgaggccagagagaaagaaaccaaagccctgtcactggcccgggccctcgaggaagccctggaggccaaggaggagtttgagaggcagaacaagcagctccgagcagacatggaagacctcatgagctccaaagatgatgtgggaaaaaacgttcacgaacttgaaaaatccaaacgggccctagagcagcaggtggaggaaatgaggacccagctggaggagctggaagacgaactccaggccacggaagatgccaagcttcgtctggaggtcaacatgcaggccatgaaggcgcagttcgagagagacctgcaaaccagggatgagcagaatgaagagaagaagcggctgctgatcaaacaggtgcgggagctcgaggcggagctggaggatgagaggaaacagcgggcgcttgctgtagcttcaaagaaaaagatggagatagacctgaaggacctcgaagcccaaatcgaggctgcgaacaaagctcgggatgaggtgattaagcagctccgcaagctccaggctcagatgaaggattaccaacgtgaattagaagaagctcgtgcatccagagatgagatttttgctcaatccaaagagagtgaaaagaaattgaagagtctggaagcagaaatccttcaattgcaggaggaacttgcctcatctgagcgagcccgccgacacgccgagcaggagagagatgagctggcggacgagatcaccaacagcgcctctggcaagtccgcgctgctggatgagaagcggcgtctggaagctcggatcgcacagctggaggaggagctggaagaggagcagagcaacatggagctgctcaacgaccgcttccgcaagaccactctacaggtggacacactgaacgccgagctagcagccgagcgcagcgccgcccagaagagtgacaatgcacgccagcaactggagcggcagaacaaggagctgaaggccaagctgcaggaactcgagggtgctgtcaagtctaagttcaaggccaccatctcagccctggaggccaagattgggcagctggaggagcagcttgagcaggaagccaaggaacgagcagccgccaacaaattagtccgtcgcactgagaagaagctgaaagaaatcttcatgcaggttgaggatgagcgtcgacacgcggaccagtataaagagcagatggagaaggccaacgctcggatgaagcagcttaaacgccagctggaggaagcagaagaagaagcgacgcgtgccaacgcatctcggcgtaaactccagcgggaactggatgatgccaccgaggccaacgagggcctgagccgcgaggtcagcaccctgaagaaccggctgaggcggggtggccccatcagcttctcttccagccgatctggccggcgccagctgcaccttgaaggagcttccctggagctctccgacgatgacacagaaagtaagaccagtgatgtcaacgagacgcagccaccccagtcagagtaaagttgcaggaagccagaggaggcaatacagtgggacagttaggaatgcacccggggcctcctgcagatttcggaaattggcaagctacgggattccttcctgaaagatcaactgtgtcttaaggctctccagcctatgcatactgtatcctgcttcagacttaggtacaattgctcccctttttatatatagacacacacaggacacatatattaaacagattgtttcatcattgcatctattttccatatagtcatcaagagaccattttataaaacatggtaagaccctttttaaaacaaactccaggcccttggttgcgggtcgctgggttattggggcagcgccgtggtcgtcactcagtcgctctgcatgctctctgtcatacagacaggtaacctagttctgtgttcacgtggcccccgactcctcagccacatcaagtctcctagaccactgtggactctaaactgcacttgtctctctcatttccttcaaataatgatcaatgctatttcagtgagcaaactgtgaaaggggctttggaaagagtaggaggggtgggctggatcggaagcaacacccatttggggttaccatgtccatcccccaaggggggccctgcccctcgagtcgatggtgtcccgcatctactcatgtgaactggccttggcgagggctggtctgtgcatagaagggatagtggccacactgcagctgaggccccaggtggcagccatggatcatgtagacttccagatggtctcccgaaccgcctggctctgccggcgccctcctcacgtcaggagcaagcagccgtggacccctaagccgagctggtggaaggcccctccctgtcgccagccgggccctcatgctgaccttgcaaattcagccgctgctttgagcccaaaatgggaatattggttttgtgtccgaggcttgttccaagtttgtcaatgaggtttatggagcctccagaacagatgccatcttcctgaatgttgacatgccagtgggtgtgactccttcatttttccttctcccttccctttggacagtgttacagtgaacacttagcatcctgtttttggttggtagttaagcaaactgacattacggaaagtgccttagacactacagtactaagacaatgttgaatatatcattcgcctctataacaatttaatgtattcagttttgactgtgcttcatatcatgtacctctctagtcaaagtggtattacagacattcagtgacaatgaatcagtgttaattctaaatccttgatcctctgcaatgtgcttgaaaacacaaaccttttgggttaaaagctttaacatctattaggaagaatttgtcctgtgggtttggaatcttggattttccccctttatgaactgtactggctgttgaccaccagacacctgaccgcaaatatcttttcttgtattcccatatttctagacaatgatttttgtaagacaataaatttattcattatagatatttgcgcctgctctgtttacttgaagaaaaaagcacccgtggagaataaagagacctcaataaacaagaataatcatgtgaa

SEQ ID NO: 29672 - DNA, 1673 bp, Homo Sapiens
ttaataatgactagagaatctgagaggcgtcatccctcaagtgtatcacttagttcaagagtcctggaatcttttcacatccactatgaacacctctcacctcctggccttgctgctcccaaaatctccacaaggtgaaaacagaagcaaacccctgggcaccccatacaacttctctgaacattgccaggattccgtggacgtgatggtcttcatcgtcacttcctacagcattgagactgtcgtgggggtcctgggtaacctctgcctgatgtgtgtgactgtgaggcagaaggagaaagccaacgtgaccaacctgcttatcgccaacctggccttctctgacttcctcatgtgcctcctctgccagccgctgacctccgtctacaccatcatggactactggatctttggagagaccctctgcaagatgtcggccttcatccagtgcatgtcggtgacggtctccatcctctcgctcgtcctcgtggccctggagaggcatcagctcatcatcaacccaacaggctggaagcccagcatctcacaggcctacctggggattgtgctcatctgggtcattgcctgtgtcctctccctgcccttcctggccaacagcatcctggagaatgtcttccacaagaaccactccaaggctctggagttcctggcggataaggtggtctgtaccgagtcctggccactggctcaccaccgcaccatctacaccaccttcctgctcctcttccagtactgcctcccactgggcttcatcttggtctgttatgcacgcatctaccggcgcctgcagaggcaggggcgcgtgtttcacaagggcacctacagcttgcgagctgggcacatgaagcaggtcaatgtggtgctggtggtgatggtggtggcctttgccgtgctctggctgcctctgcatgtgttcaacagcctggaagactggcaccatgaggccatccccatctgccatgggaacctcatcttcttagtgtgccacttgcttgccatggcctccacctgtgtcaacccattcatctatggctttctcaacaccaacttcaagaaggagatcaaggccctggtgctgacttgccagcagagcgcccccctggaggagtcagagcatctgcccctgtccacagtacatacggaagtctccaaagggtccctgaggctaagtggcaggtccaatcccatttaaccaggtctaggtcttctccctgccatgtcccttgccaggctcttccacttagctaagtgggcacactgcaagctggggtggcaccccagcattcctggctttctggggtccagataggctggcaagagctgtttttgcatccatttgcatcgtgaagactggcattttgatacttcagctgtttgttcctgggagaattctgagcacagattccagaggtcacagtaagccttgcagcttgagctgaaagatgccagagccggagatgtctgctggcagcaggcagggttcattctggtgacacagcaacagatgcctggcctgggaacccagggatttcacctccaccagtgagaccacggggccactgtggggtgagggaaggagcgcttggagtcagagctctagagtcgacctgcaggcatgcaagcttggcactgaagccgaattccagcacact

SEQ ID NO: 29673 - DNA, 4398 bp, Homo Sapiens
gcgggcacgccgccgcctgcgcggttccgggtgctcccggcgcggcgctgcccagggcacacttgaccgaggtcgggctgcggggaaaggcgggtctggggagaaccccgagagacgcggcgtcctccaactcctcctccttctcctcgcggccgccgaagccacagcccgagcccgagcccgagcccgagccggcgccaccgcgcccccggccatggcttttgccaatttccgccgcatcctgcgcctgtctaccttcgagaagagaaagtcccgcgaatatgagcacgtccgccgcgacctggaccccaacgaggtgtgggagatcgtgggcgagctgggcgacggcgccttcggcaaggtttacaaggccaagaataaggagacgggtgctttggttgcggccaaagtcattgaaaccaagagtgaggaggagctggaggactacatcgtggagattgagatcctggccacctgcgaccacccctacattgtgaagctcctgggagcctactatcacgacgggaagctgtggatcatgattgagttctgtccagggggagccgtggacgccatcatgctggagctggacagaggcctcacggagccccagatacaggaggtttgccgccagatgctagaagccctcaacttcctgcacagcaagaggatcatccaccgagatctgaaagctggcaacgtgctgatgaccctcgagggagacatcaggctggctgactttggtgtgtctgccaagaatctgaagactctacagaaacgagattccttcatcggcacgccttactggatggcccccgaggtggtcatgtgtgagaccatgaaagacacgccctacgactacaaagccgacatctggtccctgggcatcacgctgattgagatggcccagatcgagccgccacaccacgagctcaaccccatgcgggtcctgctaaagatcgccaagtcagaccctcccacgctgctcacgccctccaagtggtctgtagagttccgtgacttcctgaagatagccctggataagaacccagaaacccgacccagtgccgcgcagctgctggagcatcccttcgtcagcagcatcaccagtaacaaggctctgcgggagctggtggctgaggccaaggccgaggtgatggaagggatcgaagacggccgggatgagggggaagaggaggacgccgtggatgccgcctccaccctggagaaccatactcagaactcctctgaggtgagtccgccaagcctcaatgctgacaagcctctcgaggagtcaccttccaccccgctggcacccagccagtctcaggacagtgtgaatgagccctgcagccagccctctggggacagatccctccaaaccaccagtcccccagtcgtggcccctggaaatgagaacggcctggcagtgcctgtgcccctgcggaagtcccgacccgtgtcaatggatgccagaattcaggtagcccaggagaagcaagttgctgagcagggtggggacctcagcccagcagccaacagatctcaaaaggccagccagagccggcccaacagcagcgccctggagaccttgggtggggagaagctggccaatggcagcctggagccacctgcccaggcagctccagggccttccaagagggactcggactgcagcagcctctgcacctctgagagcatggactatggtaccaatctctccactgacctgtcgctgaacaaagagatgggctctctgtccatcaaggacccgaaactgtacaaaaaaaccctcaagcggacacgcaaatttgtggtggatggtgtggaggtgagcatcaccacctccaagatcatcagcgaagatgagaagaaggatgaggagatgagatttctcaggcgccaggaactccgagagcttcggctgctccagaaagaagagcatcggaaccagacccagctgagtaacaagcatgagctgcagctggagcaaatgcataaacgttttgaacaggaaatcaacgccaagaagaagttctttgacacggaattagagaacctggagcgtcagcaaaagcagcaagtggagaagatggagcaagaccatgccgtgcgccgccgggaggaggccaggcggatccgcctggagcaggatcgggactacaccaggttccaagagcagctcaaactgatgaagaaagaggtgaagaacgaggtggagaagctcccccgacagcagcggaaggaaagcatgaagcagaagatggaggagcacacgcagaaaaagcagcttcttgaccgggactttgtagccaagcagaaggaggacctggagctggccatgaagaggctcaccaccgacaacaggcgagagatctgtgacaaggagcgcgagtgcctcatgaagaagcaggagctccttcgagaccgggaagcagccctgtgggagatggaagagcaccagctgcaggagaggcaccagctggtgaagcagcagctcaaagaccagtacttcctccagcggcacgagctgctgcgcaagcatgagaaggagcgggagcagatgcagcgctacaaccagcgcatgatagagcagctgaaggtgcggcagcaacaggaaaaggcgcggctgcccaagatccagaggagtgagggcaagacgcgcatggccatgtacaagaagagcctccacatcaacggcgggggcagcgcagctgagcagcgtgagaagatcaagcagttctcccagcaggaggagaagaggcagaagtcggagcggctgcagcaacagcagaaacacgagaaccagatgcgggacatgctggcgcagtgtgagagcaacatgagcgagctgcagcagctgcagaatgaaaagtgccacctcctggtagagcacgaaacccagaaactgaaggccctggatgagagccataaccagaacctgaaggaatggcgggacaagcttcggccgcgcaagaaggctctggaagaggatctgaaccagaagaagcgggagcaggagatgttcttcaagctgagcgaggaggcggagtgcccaaacccctccaccccaagcaaggctgccaagttcttcccctacagttctgcggatgcttcttaacaaccgcccggggctgtggctggcagcttggtgggccccagggccttctccttcattctctgtgaacatgtaactcaggaccccttttccctcttgcgtctgtgccagctcaaatccagcccctcgccctgtgccaccccaactgtgcctgatagacctgccccagcgttcctgacttcttgctggcctgtggagggtgaggtgtaattatttgtcacctgaacctaatgtatattctccttgagccccagatcccttcaagctggaagggatggggctgttggtggggtcagggtccaagaggaatgggtgttctgtggcctcgagtcctctcctgtttgcgaaaataccagttttgctctctgtgggacaaagcactgctgatgaagtccccgtgggctcatccgggctggaattcttggtttttcagccattccctgcagagtcactcaatcatcaagtccctcacagccatttctgttcccagaggagccaggcctgcagctggctgctcaggagatggcctcattcctcctgttctcccagtttgctttccacttaagacaaagccttgtctatgtggggggcggggaccggggaaagagggaggctgaaatgtttattctgcttctcccgtgtttcatgccatctcgcgtcccccttcctgcacatgggtgtgaatgcacacacatacgcgtacacacaggacttggtctgctggcctggcctcttctgcccaggtgggttggaacacgtttgctgcctgagcctgtgccactgagcatgttaggtggagcagttggtgtggcacgtgcggggtgttggcaccggaggcatggagaagcacaggctgtactgccaggctgcgatgcgtgctggcccccgcacaggctcctgtgtgcagggactgattcctcagcacacgaggcttccacaacccagtctgctccatagcactctggcccaccctgtctgcaggtgaaacaggagggctgtttgcctctgccccatccccccgactgtgttcaggagtcccaccttgcatttcagacatgggctggcagtctgttggacttctcttcaggaagaaaaagcatcagggggaaatggaatgcccctgccccaggaacatggcagaagcacaggttctgtacctcagatggactcctgctgggccttcggggtctcagttgacttcccccagattctgattctacagctgcagaatgtatataacgcaataaaagcaaatgtttgaaccaaaaaaaaaaaaaaaa

SEQ ID NO: 29674 - DNA, 4442 bp, Homo Sapiens
ggggccagcgtcggttgccgccttagcgggcgcctccttttcatccctcatccttcatccctggctttcgcgctctagcggagtgggatctgcgaacacgtgaggcgggggcgcggtccccaggctgccgagatggccctgagcgacgaaccggccgcgggcggccccgaggaggaggcggaggacgagacactggcctttggcgcggcgctggaagcgttcggcgagagcgcggagacccgggcgctgctgggccgcctgcgggaggtgcacggcggcggcgcggagcgcgaggtggccctggagcggttccgcgtaataatggacaaataccaggagcagcctcatctgttggacccgcaccttgaatggatgatgaacttgttgttggacatagtgcaagatcagacatctccagcttcccttgtacatctggcttttaaatttctttacatcatcaccaaggttcgaggctataaaacatttcttcgtttatttcctcatgaagttgccgatgtagagcctgttttagatttggtcacaattcagaatcccaaggaccatgaagcttgggaaacccgctacatgcttttgctctggctctccgtgacctgcctgatcccttttgatttttctcgccttgacgggaacctcctcacccagcctgggcaagcacgaatgtccataatggaccgtattctccaaatagcagagtcctacttgattgtcagtgacaaggcccgagatgcagctgctgtccttgtgtccagatttatcacacgtcctgatgtcaagcaaagcaagatggctgagttcctggactggagcctgtgcaatctggcccgttcctccttccagaccatgcagggggtcatcaccatggatgggacgctgcaggccctggcacaaatatttaaacatggaaaacgtgaagactgtttgccctatgctgccactgtcctcaggtgcctcgatggctgcagactccctgagagcaaccagaccctgctgcggaagctgggggtgaagcttgtgcagcgactggggctgacattcctgaagccgaaggtggcagcatggaggtaccagcgtggctgccgatctttggctgcaaatctgcagctcctcactcagggtcagagtgagcagaagccactcatcctgaccgaagatgacgacgaagatgacgacgtcccagagggggtggagcgtgtgatagagcagctgctggtcgggctgaaggacaaggacacggtcgtgcggtggtctgcagccaagggcatcggtaggatggctggcaggcttcccagagccctggcggatgatgtggtcgggtctgtgctggactgcttcagtttccaggagactgacaaggcgtggcatgggggatgtctggcgctggcagagctgggcaggagaggcctgttgctgccgtctcgactcgtggatgttgtcgccgtgatcctgaaggcgctgacctacgacgagaagcggggtgcctgcagcgtgggcaccaacgtcagggacgccgcctgctacgtgtgctgggccttcgcgcgtgcctatgagcctcaggagctgaagccctttgtgactgcaatctcgagtgcactggtgattgctgcggtgtttgaccgagacataaactgcagaagagcagcctctgccgccttccaggagaatgtggggagacagggcactttccctcatggtattgatattttgaccacagctgactattttgccgtcggtaacagatccaactgtttcctggttataagtgtgtttattgccggctttcctgagtacacgcagccaatgatagaccacctggttaccatgaagatcagccactgggatggggtcatccgagagttggctgcgagggcgctgcacaacctggcccagcaggcacccgagttcagcgccacgcaagtcttcccgaggctgctgtccatgacactgagtccagatcttcacatgaggcatgggtcgattctcgcctgcgcagaagttgcttacgccttgtacaaacttgcagcccaagagaacaggcccgtcacggaccatctggacgagcaggcagtgcagggcctgaagcagattcaccagcagctctatgatcgtcagttatacaggggtctgggaggacagctcatgagacaagcagtgtgtgttttaatagaaaagttgtcactttccaaaatgccctttagaggtgacaccgtaattgatggttggcaatggctgataaatgacactttgagacatctccatctcatctcaagtcactcccgccagcagatgaaggatgcagcagtctcggccctggctgctctatgcagtgaatattacatgaaggagccgggggaggcagatcccgcaattcaggaggagctgatcacgcagtacctggctgagcttcggaaccccgaggagatgactcgctgtggcttctcgttggccttgggcgcccttccaggcttccttctgaaaggccggctccagcaggttctcacaggtttaagagcagttacccacacttcccccgaggacgtaagttttgctgagtccaggagagacggcttgaaggccattgcgaggatttgccagactgttggtgtgaaagcaggagccccagacgaagctgtgtgcggagagaatgtttcccagatttactgtgcgctgctgggctgcatggacgactacaccacggacagcagaggggacgtgggcacctgggtccgcaaggccgccatgaccagtctgatggatctgacacttctgctggctcggagccagcctgagctgatcgaggcccatacctgtgagcgcatcatgtgctgtgtggcccagcaggccagtgagaagattgaccgtttccgtgctcacgccgccagcgtgttcctgacgctcctgcactttgacagccctcccatcccccacgtgccccaccgaggagaactggaaaagctgtttcccaggtccgatgtggcctccgtgaactggagtgcaccttcccaggccttcccacgcatcacccagctccttgggctgcccacctaccgctaccacgtcctgctggggctagtcgtgtccctgggcggcttgacggagtcgacgatccggcactccacccagagcctctttgagtacatgaagggcattcagagcgacccgcaggccctgggcagcttcagcgggacccttctgcagatctttgaggacaaccttctgaatgagagggtgtccgtgccgctgctgaagacgctggaccacgtgctcacccacggctgcttcgacatcttcaccacggaggaggaccacccctttgctgtgaagttgcttgcgctctgtaagaaagaaatcaagaattcaaaagatatccagaagctcctgtcaggcatcgcagtgttctgcgagatggtgcagttccccggcgacgtgaggaggcaggccctcctgcagctgtgtctgctcctctgccaccgtttcccgctgatccggaagaccacggccagccaggtgtacgagacattgctcacctacagtgacgtcgtgggcgcggatgtgctggacgaggtggtgactgtgctcagtgacactgcgtgggacgcggagcttgcagtggtgagagagcagcgcaaccgtctgtgtgaccttctgggcgtacccaggccccagctggtgccccagcctggtgcctgctgaagccagtcctggagcccatacctcacccctgcctggtgaggatgtcttgttcctgagggaggccggtgtggaaagcctcgcacagtggtgcctccagctgttgaagggtagcgctggcccttggaggctggcactagctgacagcttttcctctctgcacctgcgctctggtgacttggggtggacgcctctgccttcacttgaacacaaatgtgcttcctataaaatcatgtaccaagaagttcctgccttttgtctctgagcctgatgtgtgtaggggtgatggaaaggctcactgcccaggggtcagccagaggggaggtgggctgcactcctcctgcctggagaccaggcccccttcttgcctggtgctgtccctgctgtgggagacgtctggccacaggcagtgccccacccagtcttggagagagatgaatgttaaatcagaggttcaaatgctagagaactgagaagccctggtggcaggcatggtctggagtgctgggcagatgctgtttctgggcccgtctgcctggtgggggtgctgtcctcccccctgtgcacacgtgagcatcgtgcatgtggcccctctgcagtgcaggagtcactgattgatgggtgtgccgaccagcagcttcacaaatgtctgctgcaaggggaatcgtcagagtccaatgtgtgcctctacagtaatgtcggaaataaataccattcttgaaataaaaaaaaaa

SEQ ID NO: 29675 - DNA, 6782 bp, Homo Sapiens
gggcggggctgagggcggcgggggcgggccgcccgagctgggagggcggcggcgccgaggggaggagagcggcccatggacccgcggggcccggcgccccagactctgcgccgtcgggacggagcccaagatgtcggcctaggccggggcgcgacgacgcggacggggcggcgaggaggcgccgctgctgccggggctcgcagccgccgagcccccgagggcgcgccctgacggactggccgagccggcggtgagaggccggcgcgtcgggagcgggccgcgcggcaccatgtcggccaaggtgcggctcaagaagctggagcagctgctcctggacgggccctggcgcaacgagagcgccctgagcgtggaaacgctgctcgacgtgctcgtctgcctgtacaccgagtgcagccactcggccctgcgccgcgacaagtacgtggccgagttcctcgagtgggctaaaccatttacacagctggtgaaagaaatgcagcttcatcgagaagactttgaaataattaaagtaattggaagaggtgcttttggtgaggttgctgttgtcaaaatgaagaatactgaacgaatttatgcaatgaaaatcctcaacaagtgggagatgctgaaaagagcagagaccgcgtgcttccgagaggagcgcgatgtgctggtgaacggcgactgccagtggatcaccgcgctgcactacgcctttcaggacgagaaccacctgtacttagtcatggattactatgtgggtggtgatttactgaccctgctcagcaaatttgaagacaagcttccggaagatatggcgaggttctacattggtgaaatggtgctggccattgactccatccatcagcttcattacgtgcacagagacattaaacctgacaatgtccttttggacgtgaatggtcatatccgcctggctgactttggatcatgtttgaagatgaatgatgatggcactgtgcagtcctccgtggccgtgggcacacctgactacatctcgccggagatcctgcaggcgatggaggacggcatgggcaaatacgggcctgagtgtgactggtggtctctgggtgtctgcatgtatgagatgctctatggagaaacgccgttttatgcggagtcactcgtggagacctatgggaagatcatgaaccatgaagagcgattccagttcccatcccatgtcacggatgtatctgaagaagcgaaggacctcatccagagactgatctgcagtagagaacgccggctggggcagaatggaatagaggatttcaaaaagcatgcgttttttgaaggtctaaattgggaaaatatacgaaacctagaagcaccttatattcctgatgtgagcagtccctctgacacatccaacttcgacgtggatgacgacgtgctgagaaacacggaaatattacctcctggttctcacacaggcttttctggattacatttgccattcattggttttacattcacaacggaaagctgtttttctgatcgaggctctctgaagagcataatgcagtccaacacattaaccaaagatgaggatgtgcagcgggacctggagcacagcctgcagatggaagcttacgagaggaggattcggaggctggaacaggagaagctggagctgagcaggaagctgcaagagtccacccagaccgtgcagtccctccacggctcatctcgggccctcagcaattcaaaccgagataaagaaatcaaaaagctaaatgaagaaatcgaacgcttgaagaataaaatagcagattcaaacaggctcgagcgacagcttgaggacacagtggcgcttcgccaagagcgtgaggactccacgcagcggctgcgggggctggagaagcagcaccgcgtggtccggcaggagaaggaggagctgcacaagcaactggttgaagcctcagagcggttgaaatcccaggccaaggaactcaaagatgcccatcagcagcgaaagctggccctgcaggagttctcggagctgaacgagcgcatggcagagctccgtgcccagaagcagaaggtgtcccggcagctgcgagacaaggaggaggagatggaggtggccacgcagaaggtggacgccatgcggcaggaaatgcggagagctgagaagctcaggaaagagctggaagctcagcttgatgatgctgttgctgaggcctccaaggagcgcaagcttcgtgagcacagcgagaacttctgcaagcaaatggaaagcgagctggaggccctcaaggtgaagcaaggaggccggggagcgggtgccaccttagagcaccagcaagagatttccaaaatcaaatccgagctggagaagaaagtcttattttatgaagaggaattggtcagacgtgaggcctcccatgtgctagaagtgaaaaatgtgaagaaggaggtgcatgattcagaaagccaccagctggccctgcagaaagaaatcttgatgttaaaagataagttagaaaagtcaaagcgagaacggcataacgagatggaggaggcagtaggtacaataaaagataaatacgaacgagaaagagcgatgctgtttgatgaaaacaagaagctaactgctgaaaatgaaaagctctgttcctttgtggataaactcacagctcaaaatagacagctggaggatgagctgcaggatctggcagccaagaaggagtcagtggcccactgggaagctcagattgcggaaatcattcagtgggtcagtgacgagaaagatgcccggggttaccttcaagctcttgcttccaagatgaccgaagagctcgaggctttgaggagttctagtctggggtcaagaacactggacccgctgtggaaggtgcgccgcagccagaagctggacatgtccgcgcggctggagctgcagtcggccctggaggcggagatccgggccaagcagcttgtccaggaggagctcaggaaggtcaaggacgccaacctcaccttggaaagcaaactaaaggattccgaagccaaaaacagagaattattagaagaaatggaaattttgaagaaaaagatggaagaaaaattcagagcagatactgggctcaaacttccagattttcaggattccatttttgagtatttcaacactgctcctcttgcacatgacctgacatttagaaccagctcagctagtgagcaagaaacacaagctccgaagccagaagcgtccccgtcgatgtctgtggctgcatcagagcagcaggaggacatggctcggcccccgcagaggccatccgctgtgccgttgcccaccacgcaggccctggctctggctggaccgaagccaaaagctcaccagttcagcatcaagtccttctccagccctactcagtgcagccactgcacctccctgatggttgggctgatccggcagggctacgcctgcgaggtgtgttcctttgcttgccacgtgtcctgcaaagacggtgccccccaggtgtgcccaatacctcccgagcagtccaagaggcctctgggcgtggacgtgcagcgaggcatcggaacagcctacaaaggccatgtcaaggtcccaaagcccacgggggtgaagaagggatggcagcgcgcatatgcagtcgtctgtgagtgcaagctcttcctgtatgatctgcctgaaggaaaatccacccagcctggtgtcattgcgagccaagtcttggatctcagagatgacgagttttccgtgagctcagtcctggcctcagatgtcattcatgctacacgccgagatattccatgtatattcagggtgacggcctctctcttaggtgcaccttctaagaccagctcgctgctcattctgacagaaaatgagaatgaaaagaggaagtgggttgggattctagaaggactccagtccatccttcataaaaaccggctgaggaatcaggtcgtgcatgttcccttggaagcctacgacagctcgctgcctctcatcaaggccatcctgacagctgccatcgtggatgcagacaggattgcagtcggcctagaagaagggctctatgtcatagaggtcacccgagatgtgatcgtccgtgccgctgactgtaagaaggtacaccagatcgagcttgctcccagggagaagatcgtaatcctcctctgtggccggaaccaccatgtgcacctctatccgtggtcgtcccttgatggagcggaaggcagctttgacatcaagcttccggaaaccaaaggctgccagctcatggccacggccacactcaagaggaactctggcacctgcctgtttgtggccgtgaaacggctgatcctttgctatgagatccagagaacgaagccattccacagaaagttcaatgagattgtggctcccggcagcgtgcagtgcctggcggtgctcagggacaggctctgtgtgggctacccttctgggttctgcctgctgagcatccagggggacgggcagcctctaaacctggtaaatcccaatgacccctcgcttgcgttcctctcacaacagtcttttgatgccctttgtgctgtggagctcgaaagcgaggagtacctgctttgcttcagccacatgggactgtacgtggacccgcaaggccggagggcacgcgcgcaggagctcatgtggcctgcggctcctgtcgcctgtagttgcagccccacccacgtcacggtgtacagcgagtatggcgtggacgtctttgatgtgcgcaccatggagtgggtgcagaccatcggcctgcggaggataaggcccctgaactctgaaggcaccctcaacctcctcaactgcgagcctccacgcttgatctacttcaagagcaagttctcgggagcggttctcaacgtgccggacacctccgacaacagcaagaagcagatgctgcgcaccaggagcaaaaggcggttcgtcttcaaggtcccagaggaagagagactgcagcagaggcgagagatgcttagagacccagaattgagatccaaaatgatatccaacccaaccaacttcaaccacgtggcccacatgggcccaggcgacggcatgcaggtgctcatggacctgcctctgagtgctgtgcccccctcccaggaggaaaggccgggccccgctcccaccaacctggctcgccagcctccatccaggaacaagccctacatctcgtggccctcatcaggtggatcggagcctagcgtgactgtgcctctgagaagtatgtctgatccagaccaggactttgacaaagagcctgattcggactccaccaaacactcaactccatcgaatagctccaaccccagcggcccaccgagccccaactccccccacaggagccagctccccctcgaaggcctggagcagccggcctgtgacacctgaagccgccagctcgccacaggggccagggagctggagatggcctccagcgtcagtgccaagactgagcgggccctccagtgttgtccaaggaaatgtagaatcactttgtagatatggagatgaagaagacaaatctttattataatattgatcagttttatgccgcattgttcgtggcagtagaccacatctgttcgtctgcacagctgtgaggcgatgctgttccatctgcacatgaaggacccccatacagcctgtctcccacccctgacaacccgagagggcatatggggccctgccaacaccacttcctcagcagaaacccgtcatgacgcggctgcttcggaagcagacatctggggacacagcctcagtacccagtcttttccctagttcctgaaactttcctaggaccttaagagaatagtaggaggtcctatagcattcccagtgtcactagaattttgaagacaggaaagtggaggttagtctgtggcctttttttcatttagccattgcacagtcagctgcagaagtcctgctgaccacctagtcatggacaaaggcccaggaccagtgacaccctgcgtccctgtgtgcattaagttcattctgggtcgcagccatgaagtgtcaccagtatctactactgtgaagtcagctgtgctgttttccattcgcttccacggcttctgcctcctgccataaaaccagcgagtgtcgtggtgcaggcaggccctgtggcctgctgggctgagggaagtcagagccccagggcgccacgaagcagccactgggataccccaccccgccccgccctgcccccccccccccccaccagtcctgcccccgcatggagcccccgtgattagtagcccgtatgatcacgtagacccacccaacacactcctgcacactggccccggcccacggcacagcaatcccctgcgcgtggatttcacctcaccctttgtaccagatgttgagtgaccagctctgtggccctgtgtcgtcagaggcttgtgattaactgtggcggcagacacagcttgtccacagcttgggccaggcttcccctgtcctcccaccggtcggctgcttggcaaggctgttcaggacgtgcacttccccaagtcggcactgagtggcccagcaccgcctagccctgccaccccactgccctcctgggccttctgctggatgggcacctggggggttctggtttttacttttttaatgtaagtctcagtctttgtaattaattattgaattgtgagaacatttttgaacaatttacctgtcaataaagcagaagacggcagttttaaagttaaaaaaaaaaaaaaaaaaaaaaaaa

SEQ ID NO: 29676 - DNA, 3028 bp, Homo Sapiens
atttttgctggtagccatcttgagtgagggcggaccagaggatgagagagctgtggcagggctactggaacgctgtccctcattgttttagccttctgtgcttcatctcgagctcagaagactagcgaagaacgaaaagtcttatatatttcgagactaaagaacccaggaacccaagaagactccttgaccacaacaaagatggcgaaatctgcctgttgctcgtgctagattgaggttacgtagattggcgtgctgcaaaccagctctaggcggctctggccccaaaaggagcataaaccagggactttgatatcatgcagcagaagaccaaattatttccccaagctttgaagtatagtattcctcaccttggaaaatgcatgcagaaacagcatttgaatcactataacttcgctgatcattgttacaatagaataaaattgaaaaaatatcacctaaccaagtgtcttcagaataaacccaagatatcagagttagcaagaaacatcccaagtcggagcttctcatgtaaggatcttcagcctgttaaacaagaaaacgaaaaaccccttccagaaaacacggatgcatttgaaaaagtgagaacaaaattagaaacacagccacaagaagaatatgaaatcatcaatgtggaagttaaacatggtggttttgtttattaccaagaaggttgttgcttggttcgttccaaagatgaagaagcagacaatgataattatgaagttttattcaatttggaggaacttaagttagaccagcccttcattgattgtatcagagttgctccagatgaaaaatatgtggctgccaagataagaactgaagattctgaagcatctacctgtgtaattataaagctcagcgatcagcccgtaatggaagcttctttcccgaatgtgtccagttttgaatgggtaaaggacgaggaagatgaagatgttttattctacaccttccagaggaaccttcgctgtcatgacgtatatcgagccacttttggtgataacaaacgtaatgaacgcttttacacagaaaaagacccaagctactttgttttcctttatcttacaaaagacagtcgtttcctcaccataaatattatgaacaagactacttctgaagtgtggttgatagatggcctgagcccttgggacccaccagtacttatccagaagcgaatacatgggatcctttactatgttgaacacagagatgatgaattatacattctcactaatgttggagaacctacagaatttaagctaatgagaacagcggctgatacccctgcaattatgaattgggatttattttttacaatgaagagaaatacaaaagtgatagacttggacatgtttaaggatcactgtgttctatttctgaagcacagcaatctcctttatgttaatgtgattggtctggctgatgattcagttcggtctctaaagctccctccttgggcctgtggattcataatggatacaaattctgacccaaagaactgcccctttcaactttgctctccaatacgtcccccaaaatattacacatacaagtttgcagaaggcaaactgtttgaggaaactgggcatgaagacccaatcacaaagactagtcgcgttttacgtctagaagccaaaagcaaggatggaaaattagtgccaatgactgttttccacaaaactgactctgaggacttgcagaagaaacctctcttggtacatgtatatggagcttatggaatggatttgaaaatgaatttcaggcctgagaggcgggtcctggtggatgatggatggatattagcatactgccatgttcgaggtggtggtgagttaggcctccagtggcacgctgatggccgcctaactaaaaaactcaatggccttgctgatttagaggcttgcattaagacgcttcatggccaaggcttttctcagccaagtctaacaaccctgactgctttcagtgctggaggggtgcttgcaggagcattgtgtaattctaatccagagctggtgagagcggtgactttggaggcacctttcttggatgttctcaacaccatgatggacactacacttcctctgacattagaagaattagaagaatgggggaatccttcatctgatgaaaaacacaagaactacataaaacgttactgtccctatcaaaatattaaacctcagcattatccttcaattcacataacggcatatgaaaacgatgaacgggtacctctgaaaggaattgtaagttatactgagaaactcaaggaagccatcgcggagcatgctaaggacacaggtgaaggctatcagacccctaatattattctagatattcagcctggaggcaatcatgtaattgaggattctcacaaaaagattacagcccaaattaaattcctgtacgaggaacttggacttgacagcaccagtgttttcgaggatcttaagaaatacctgaaattctgaaacactgcattcaactgggaattggaaacacactgaaatatttcatagtcttacttccaattgagttagcaaaaaaaattaataacttgagacttttaagttattaattttttaaaatgtgcttctccatctaaattttgcttagtctacatctcacttgcttatactattctctccattgatgcacatgcccattaacctaggaaagtagttttcaaatcatgctccttagaaggatgtggagtagagggaagggaaggattggtgatagcagagctccaggcctcccttccagtcagaacagttgagcagtttacaaattagtgtcctgcctctttgctagcaaatgcttttagacactgtggcagtgagtcatcctctaatttctatgactgcattttaagggaaaagataaaattcttccccttaaaattcgttaaagtttttgaataatctggggtcctaatgtgttctggtcatccctgattgatgctatctgaataaagttataagctcctataagccat

SEQ ID NO: 29677 - DNA, 8459 bp, Homo Sapiens
ggaggttgtggggccgccgccgcggagcaccgtccccgccgccgcccgagcccgagcccgagcccgcgcacccgcccgcgccgccgccgccgccgcccgaacagcctcccagcctgggcccccggcggcgccgtggccgcgtcccggctgtcgccgcccgagcccgagcccgcgcgccggcgggtggcggcgcaggctgaggagatgcggcgcggagcgccggagcagggctagagccggccgccgccgcccgccgcggtaagcgcagccccggcccggcgcccgcgggccattgtccgccgcccgccccgcgccccgcgcagcctgcaggccttggagcccgcggcaggtggacgccgccggtccacacccgccccgcgcgcggccgtgggaggcgggggccagcgctggccgcgcgccgtgggacccgccggtccccagggccgcccggccccttctggacctttccacccgcgccgcgaggcggcttcgcccgccggggcgggggcgcgggggtgggcacggcaggcagcggcgccgtctcccggtgcggggcccgcgccccccgagcaggttcatctgcagaagccagcggacgcctctgttcaacttgtgggttacctggctcatgagaccttgccggcgaggctcggcgcttgaacgtctgtgacccagccctcaccgtcccggtacttgtatgtgttggtgggagtttggagctcgttggagctatcgtttccgtggaaattttgagccatttcgaatcacttaaaggagtggacattgctagcaatgagctcccaaagccatccagatggactttctggccgagaccagccagtggagctgctgaatcctgcccgcgtgaaccacatgcccagcacggtggatgtggccacggcgctgcctctgcaagtggccccctcggcagtgcccatggacctgcgcctggaccaccagttctcactgcctgtggcagagccggccctgcgggagcagcagctgcagcaggagctcctggcgctcaagcagaagcagcagatccagaggcagatcctcatcgctgagttccagaggcagcacgagcagctctcccggcagcacgaggcgcagctccacgagcacatcaagcaacaacaggagatgctggccatgaagcaccagcaggagctgctggaacaccagcggaagctggagaggcaccgccaggagcaggagctggagaagcagcaccgggagcagaagctgcagcagctcaagaacaaggagaagggcaaagagagtgccgtggccagcacagaagtgaagatgaagttacaagaatttgtcctcaataaaaagaaggcgctggcccaccggaatctgaaccactgcatttccagcgaccctcgctactggtacgggaaaacgcagcacagttcccttgaccagagttctccaccccagagcggagtgtcgacctcctataaccacccggtcctgggaatgtacgacgccaaagatgacttccctcttaggaaaacagcttctgaaccgaatctgaaattacggtccaggctaaagcagaaagtggccgaaagacggagcagccccctgttacgcaggaaagacgggccagtggtcactgctctaaaaaagcgtccgttggatgtcacagactccgcgtgcagcagcgccccaggctccggacccagctcacccaacaacagctccgggagcgtcagcgcggagaacggtatcgcgcccgccgtccccagcatcccggcggagacgagtttggcgcacagacttgtggcacgagaaggctcggccgctccacttcccctctacacatcgccatccttgcccaacatcacgctgggcctgcctgccaccggcccctctgcgggcacggcgggccagcaggacaccgagagactcacccttcccgccctccagcagaggctctcccttttccccggcacccacctcactccctacctgagcacctcgcccttggagcgggacggaggggcagcgcacagccctcttctgcagcacatggtcttactggagcagccaccggcacaagcacccctcgtcacaggcctgggagcactgcccctccacgcacagtccttggttggtgcagaccgggtgtccccctccatccacaagctgcggcagcaccgcccactggggcggacccagtcggccccgctgccccagaacgcccaggctctgcagcacctggtcatccagcagcagcatcagcagtttctggagaaacacaagcagcagttccagcagcagcaactgcagatgaacaagatcatccccaagccaagcgagccagcccggcagccggagagccacccggaggagacggaggaggagctccgtgagcaccaggctctgctggacgagccctacctggaccggctgccggggcagaaggaggcgcacgcacaggccggcgtgcaggtgaagcaggagcccattgagagcgatgaggaagaggcagagcccccacgggaggtggagccgggccagcgccagcccagtgagcaggagctgctcttcagacagcaagccctcctgctggagcagcagcggatccaccagctgaggaactaccaggcgtccatggaggccgccggcatccccgtgtccttcggcggccacaggcctctgtcccgggcgcagtcctcacccgcgtctgccaccttccccgtgtctgtgcaggagccccccaccaagccgaggttcacgacaggcctcgtgtatgacacgctgatgctgaagcaccagtgcacctgcgggagtagcagcagccaccccgagcacgccgggaggatccagagcatctggtcccgcctgcaggagacgggcctccggggcaaatgcgagtgcatccgcggacgcaaggccaccctggaggagctacagacggtgcactcggaagcccacaccctcctgtatggcacgaaccccctcaaccggcagaaactggacagtaagaaacttctaggctcgctcgcctccgtgttcgtccggctcccttgcggtggtgttggggtggacagtgacaccatatggaacgaggtgcactcggcgggggcagcccgcctggctgtgggctgcgtggtagagctggtcttcaaggtggccacaggggagctgaagaatggctttgctgtggtccgcccccctggacaccatgcggaggagagcacgcccatgggcttttgctacttcaactccgtggccgtggcagccaagcttctgcagcagaggttgagcgtgagcaagatcctcatcgtggactgggacgtgcaccatggaaacgggacccagcaggctttctacagcgaccctagcgtcctgtacatgtccctccaccgctacgacgatgggaacttcttcccaggcagcggggctcctgatgaggtgggcacagggcccggcgtgggtttcaacgtcaacatggctttcaccggcggcctggacccccccatgggagacgctgagtacttggcggccttcagaacggtggtcatgccgatcgccagcgagtttgccccggatgtggtgctggtgtcatcaggcttcgatgccgtggagggccaccccacccctcttgggggctacaacctctccgccagatgcttcgggtacctgacgaagcagctgatgggcctggctggcggccggattgtcctggccctcgagggaggccacgacctgaccgccatttgcgacgcctcggaagcatgtgtttctgccttgctgggaaacgagcttgatcctctcccagaaaaggttttacagcaaagacccaatgcaaacgctgtccgttccatggagaaagtcatggagatccacagcaagtactggcgctgcctgcagcgcacaacctccacagcggggcgttctctgatcgaggctcagacttgcgagaacgaagaagccgagacggtcaccgccatggcctcgctgtccgtgggcgtgaagcccgccgaaaagagaccagatgaggagcccatggaagaggagccgcccctgtagcactccctcgaagctgctgttctcttgtctgtctgtctctgtcttgaagctcagccaagaaactttcccgtgtcacgcctgcgtcccaccgtggggctctcttggagcacccagggacacccagcgtgcaacagccacgggaagcctttctgccgcccaggcccacaggtctcgagacgcacatgcacgcctgggcgtggcagcctcacagggaacacgggacagacgccggcgacgcgcagacacacggacacgcggaagccaagcacactctggcgggtcccgcaagggacgccgtggaagaaaggagcctgtggcaacaggcggccgagctgccgaattcagttgacacgaggcacagaaaacaaatatcaaagatctaataatacaaaacaaacttgattaaaactggtgcttaaagtttattacccacaactccacagtctctgtgtaaaccactcgactcatcttgtagcttattttttttttaaagaggacgttttctacggctgtggcccgcctctgtgaaccatagcggtgtgcggcggggggtctgcacccgggtgggggacagagggacctttaaagaaaacaaaactggacagaaacaggaatgtgagctgggggagctggcttgagtttctcaaaagccatcggaagatgcgagtttgtgcctttttttttattgctctggtggatttttgtggctgggttttctgaagtctgaggaacaatgccttaagaaaaaacaaacagcaggaatcggtgggacagtttcctgtggccagccgagcctggcagtgctggcaccgcgagctggcctgacgcctcaagcacgggcaccagccgtcatctccggggccaggggctgcagcccggcggtccctgttttgctttattgctgtttaagaaaaatggaggtagttccaaaaaagtggcaaatcccgttggaggttttgaagtccaacaaattttaaacgaatccaaagtgttctcacacgtcacatacgattgagcatctccatctggtcgtgaagcatgtggtaggcacacttgcagtgttacgatcggaatgctttttattaaaagcaagtagcatgaagtattgcttaaattttaggtataaataaatatatatatgtataatatatattccaatgtattccaagctaagaaacttacttgattcttatgaaatcttgataaaatatttataatgcatttatagaaaaagtatatatatatatataaaatgaatgcagattgcgaaggtccctgcaaatggatggcttgtgaatttgctctcaaggtgcttatggaaagggatcctgattgattgaaattcatgttttctcaagctccagattggctagatttcagatcgccaacacattcgccactgggcaactaccctacaagtttgtactttcattttaattattttctaacagaaccgctcccgtctccaagccttcatgcacatatgtacctaatgagtttttatagcaaagaatataaatttgctgttgatttttgtatgaattttttcacaaaaagatcctgaataagcattgttttatgaattttacatttttcctcaccatttagcaattttctgaatggtaataatgtctaaatctttttcctttctgaattcttgcttgtacatttttttttacctttcaaaggtttttaattatttttgtttttatttttgtacgatgagttttctgcagcgtacagaattgttgctgtcagattctattttcagaaagtgagaggagggaccgtaggtcttttcggagtgacaccaacgattgtgtctttcctggtctgtcctaggagctgtataaagaagcccaggggctctttttaactttcaacactagtagtattacgaggggtggtgtgtttttcccctccgtggcaagggcagggagggttgcttaggatgcccggccaccctgggaggcttgccagatgccgggggcagtcagcattaatgaaactcatgtttaaacttctctgaccacatcgtcaggatagaattctaacttgagttttccaaagaccttttgagcatgtcagcaatgcatggggcacacgtggggctctttacccacttgggtttttccactgcagccacgtggccagccctggattttggagcctgtggctgcaaggaacccagggacccttgttgcctggtgaacctgcagggagggtatgattgcctgaccaggacagccagtctttactctttttctcttcaacagtaactgacagtcacgttttactggtaacttattttccagcacatgaagccaccagtttcattccaaagtgtatattgggttcagacttgggggcagaagttcagacacaccgtgctcaggagggacccagagccgagtttcggagtttggtaaagtttacagggtagcttctgaaattaactcaaacttttgaccaaatgagtgcagattcttggattcacttggtcactgggctgctgatggtcagctctgagacagtggtttgagagcaggcagaacggtcttgggacttgtttgactttcccctccctggtggccactctttgctctgaagcccagattggcaagaggagctggtccattccccattcatggcacagagcagtggcagggcccagctagcaggctcttctggcctccttggcctcattctctgcatagccctctggggatcctgccacctgccctcttaccccgccgtggcttatggggaggaatgcatcatctcactttttttttttaagcagatgatgggataacatggactgctcagtggccaggttatcagtggggggacttaattctaatctcattcaaatggagacgccctctgcaaaggcctggcagggggaggcacgtttcatctgtcagctcactccagcttcacaaatgtgctgagagcattactgtgtagccttttctttgaagacacactcggctcttctccacagcaagcgtccagggcagatggcagaggatctgcctcggcgtctgcaggcgggaccacgtcagggagggttccttcatgtgttctccctgtgggtccttggacctttagcctttttcttcctttgcaaaggccttgggggcactggctgggagtcagcaagcgagcactttatatccctttgagggaaaccctgatgacgccactgggcctcttggcgtctgccctgccctcgcggcttcccgccgtgccgcagcgtgcccacgtgcccacgccccaccagcaggcggctgtcccggaggccgtggcccgctgggactggccgcccctccccagcgtcccagggctctggttctggagggccactttgtcaaggtgtttcagtttttctttacttcttttgaaaatctgtttgcaaggggaaggaccatttcgtaatggtctgacacaaaagcaagtttgatttttgcagcactagcaatggactttgttgtttttctttttgatcagaacattccttctttactggtcacagccacgtgctcattccattcttctttttgtagactttgggcccacgtgttttatgggcattgatacatatataaatatatagatataaatatatatgaatatatttttttaagtttcctacacctggaggttgcatggactgtacgaccggcatgactttatattgtatacagattttgcacgccaaactcggcagctttggggaagaagaaaaatgcctttctgttcccctctcatgacatttgcagatacaaaagatggaaatttttctgtaaaacaaaaccttgaaggagaggagggcggggaagtttgcgtcttattgaacttattcttaagaaattgtactttttattgtaagaaaaataaaaaggactacttaaacatttgtcatattaagaaaaaaagtttatctagcacttgtgacataccaataatagagtttattgtatttatgtggaaacagtgttttagggaaactactcagaattcacagtgaactgcctgtctctctcgagttgatttggaggaattttgttttgttttgttttgtttgtttccttttatctccttccacgggccaggcgagcgccgcccgccctcactggccttgtgacggtttattctgattgagaactgggcggactcgaaagagtccccttttccgcacagctgtgttgactttttaattacttttaggtgatgtatggctaagatttcactttaagcagtcgtgaactgtgcgagcactgtggtttacaattatactttgcatcgaaaggaaaccatttcttcattgtaacgaagctgagcgtgttcttagctcggcctcactttgtctctggcattgattaaaagtctgctattgaaagaaaaag

SEQ ID NO: 29678 - DNA, 4058 bp, Homo Sapiens
gtgtttccgggtcgctgctggcccccgggtactggtctcagtacccctgcagccggccggagaggctagagcccgacggggcccggctccggcggcagccgcgcctctcgcttgcttccctcggccgggccgtcctcggcggcagtgtcaggagcactccgctggtccaggcggcaacatgtccatgcttttagtgatgtccctgcctctaatccagaagccatggaggagataaggtagcccccctcgatcggatggggaagcccagttcaatggatactaaattcaaggatgacttatttcggaagtacgtgcagttccatgagagcaaagtggataccaccaccagcaggcagcggcctggcagcgatgagtgcctgcgggtggcagcctcaaccctgctcagcctgcacaaggtggatcccttttatcgattccggctgatccagttctatgaggtggtggagagctccttgcgctcgctcagctcctctagcctgcgggctctgcacggcgccttcagcatgctggagacggtgggcatcaacctcttcctctacccgtggaagaaggaattcagaagcatcaagacctacacgggcccttttgtttattatgtcaagtcgacattactggaagaggacatccgagccatcctgagctgcatgggctacacacctgagctgggcactgcatacaagctcagagagctcgtggagaccctccaggtgaagatggtctcctttgagctctttctggccaaagtcgagtgtgagcagatgctagaaatccactcacaagtgaaggacaagggctactccgagctggacattgtgagcgagcgcaagagcagtgcagaggatgtgcgcggctgctcggacgccctgcggcggcgggcagagggccgggagcacctgacggcctccatgtcacgagtggcactccagaagtcggccagcgagcgggcggccaaggactactacaagccccgcgtgaccaagccctcgaggtcagtggatgcctatgacagctactgggagagccggaagccacccctgaaggcctcattgagtcttcggaaggagcctgtggcaacggatgtgggggacgacctcaaggatgagatcatccgcccatccccttcgctgctgaccatggccagctccccccacggcagcccggatgtgcttccacccgcctcccccagcaacggcccggccctgctgcgcggtacctacttctccactcaggatgacgtggatctgtacacagactctgaacccagggccacctaccgtcggcaggatgctctgcggccggatgtgtggctgctcagaaacgatgcccactccctctaccacaagcgctcgccccctgccaaagagtccgccctctccaagtgccaaagctgcgggctgtcctgcagctcctccctctgccagcgctgtgacagcctgctcacctgtcctccagcttccaagcccagcgccttccccagcaaggcctcgactcatgacagcctggcccacggggcatctctgcgggagaagtacccaggccagactcagggcctcgaccgcctcccgcaccttcactccaaatccaagccctccaccacgcccacttcccgctgtggcttctgcaaccgcccaggcgccaccaacacctgcacccagtgttcaaaagtctcatgtgacgcctgcctcagcgcttaccattatgacccctgctacaaaaagagtgagctgcacaagttcatgcccaacaaccagctgaactacaagtccacccagctctcccatctcgtgtacagatagaccggcctcgccccttccagctccaagggctacatcaaccgacctttcgggtttcacggtgaagaagtactaacgcattgatctcagaggcggaggcctgcacttgaccatgtaggtggcagagatcgtgggctggctgtgtccacgtgggagttcacttagcgactcagatatctcaaccaatggctgctttgttgtctgacaagggagaaggtggcacttccgttcagattcattttgctaatctctccactccctgttcagttggttctttttttggggttttgttttgttttgttttgttgttttgttttttcctttaaagaggatttctgtctctgggaccctcgctgcacctacccctcccattgcaaagccaacttggactgggaagggcccttcaggtcaccaaacatccacctggagcggcgagctagaggcctgttggcttgtgaaatgagccctcctgccacacggggcctctcccaaaggctcatcccttggccgcccccttcctaaacacaaggatccccagctggactccccaccccctggcttccccacctctccaggtgtcaaaggtgaaccgagtccagtattagctgaatgtcatttcgtacaccacagctcagtcagcccatggccttcgtgaactttgctccaacacactgatgtgtgggcttcccacagcaggactgacttccccctttctgttgtttgcacatgcccctcttactgtactgtcaatagatatttttgagatttatttttaaataaatattcaacttgctgtgtgtttcaacgtggttaaaaaaatgaattatgtagctatttattaaatgccctgggttctttagtcttccaagggagggcctcgcgcccattcgtgttgtatcctccactcactatggcccgaggggagaggagagtttggggcagggaggaacagacatgaagcctccttttcttgagctggtggagagccactgtcttccctgcagtaactatctatacacctacctccagtgtgcacttagggggtgagcgcgggtgtcgaggtctgtgtgtctgcagactgctaacctatgacaattcagggacctcacctgtcggacctatagcttgctgagcaggaaccttgcacttcacacttcttgagtctcgtttcagaaggaaaatcatttgggattcctactgcccctccatctcaatcctcttctcttcaccagtttccaggactcatctgcaacatttgcaatctttttgcactaaaagtgggcaggagtcggcatgtgcccatcagagagacggctcctcagatgctcagctaagcctaagcgcttccaagcctgaaggccccttcagcttctcatgtgaattaccaacccctggattttccttgtgggggtacaagagcaggagtggggcaagagtttgaaaataaagccgcttccttgtgaactaactatattttagccataactgtttgtgatgtacacaatgttaagggatttatatgcagtgggcttttctgggagaaagttattcagctcttgagcaagtttaagtctggctgaatcctgaggccactgtgaatttgctgatgttcttccaactcagttgagtgattttaaggttttccaaatcttctatggctctctttttaatatatatatatatatatatatatatatatatatatatatatatatatctatctggtagatcacatgtagatgtacagtgtgtatattaagctgaatttcaaccaactttattactaagaccagcctagcagggcattcatctttgatgttcttccttttcacatttcagaatcggcaatgcctggcccactcctgagagctctagttttctagttttccatttccagattgcgccagcattacagtaactaactctttctaaccaaccgtgatgccacgtaacttaccctatggacaaaagcaggaatgactaacacatcctaggagggaaagtccagtgtacctgtcatcacggacgcactgtggtcacagactggaatacgaaatactacagccctgctcccaggtgtgcatcttactggatgaggttgctgtgattgagatagttaaatacatgctaatttaaaaatgcagatgttttacatttgatttctaccaagagttgaaatgttgagagatgattaaaaataataataataaagtgtcttccattgttaaaaaaaaaaaaaaaaaa

SEQ ID NO: 29679 - DNA, 6640 bp, Homo Sapiens
gagcgggccgacggccattttgtgaagcggcgaaggaggtggtggctgcgttgggctccgggaagccgttcgggctggggctgtcggccgcggggcggaggcactcgcgcggggggtaattcggggtctgggttctggtgccgcgcagctttccccgtctaaaagttggttttaattggttgcccacaggattgacttggcctctacttcttgttaaggaaattcatctcttgttttatcaggtgtgtgtggtttcagcgcagcatggctgtggtcatccgtttgcaaggtctcccaattgtggcggggaccatggacattcgccacttcttctctggattgaccattcctgatgggggcgtgcatattgtagggggtgaactgggtgaggctttcatcgtttttgccactgatgaagatgcaaggcttggtatgatgcgcacaggtggtacaattaaagggtcaaaagtaacactattgttgagtagtaagacggaaatgcagaatatgattgaactgagtcgtaggcgttttgaaactgccaacttagatataccaccagcaaatgccagtagatcaggaccaccacctagctcaggaatgagtagcagggtaaacttgcccacaacagtatccaactttaataatccatcacccagtgtagttactgccaccacttctgttcatgaaagcaacaaaaacatacagacattttccacagccagcgtaggaacagctcctccaaatatgggggcttcctttgggagcccaacgtttagctcaactgttccaagcacagcctctccaatgaacacagtcccgccgccaccaattcctccaattccagcgatgccatctctgccaccaatgccatccattcccccaattccagttcctcctccagtacctacattgcctcctgtgcctcctgtgcccccgattcccccagttccttctgtgccacccatgaccccactgccacccatgtcgggcatgccgcccttgaatccgccacctgtggcacctctacctgctggaatgaatggctctggagcacctatgaatttgaacaataatctgaatcctatgtttcttggtccgttgaatcctgttaaccctatccagatgaactctcagagcagtgtgaagccactccccatcaaccctgatgatctgtatgtcagtgtgcatggaatgcccttttctgcaatggaaaatgatgtcagagatttttttcatgggctccgtgttgatgcagtgcatttgttgaaagatcatgtaggtcgaaataatgggaatggattggttaagtttctctcccctcaagatacatttgaagctttgaaacgaaacagaatgctgatgattcaacgctatgtggaagttagccctgccacagaaagacagtgggtagctgctggaggccatatcacttttaagcaaaatatgggaccttctggacaaactcatccccctcctcagacacttcccaggtcaaaatcgcccagtgggcagaaaagatcaaggtcaagatcaccacatgaggctggtttttgtgtttacttgaaagggctaccatttgaagcagaaaacaaacatgtcattgatttttttaaaaagctggatattgtggaagatagtatttatatagcttatggacccaatgggaaagcaactggcgaaggctttgtagagttcagaaatgaggctgactataaggctgctctgtgtcgtcataaacagtacatgggcaatcgctttattcaagttcatccaattactaagaaaggtatgctagaaaagatagatatgattcgaaaaagactgcagaacttcagctatgaccagagggaaatgatactaaatccagagggggatgtcaactctgccaaagtctgtgcccacataacaaatattccattcagcattacaaagatggatgttcttcagttcctagaaggaatcccagtggatgaaaatgctgtacatgttcttgttgataacaatgggcaaggtctaggacaggcattggttcagtttaaaaatgaagatgatgcacgtaagtctgaacgcttacaccgtaaaaaacttaatgggagagaagcttttgttcatgtagttaccctagaagatatgagagagattgagaaaaatccccctgcccaaggaaaaaagggattaaagatgcctgtgccaggtaatcctgcagttccaggaatgcccaatgcgggactgcccggtgtgggactgcccagtgcaggacttcccggtgcaggcctgcccagcacaggactgcctggttcagcaataaccagtgcaggactgcctggtgcgggaatgcccagtgcaggaatacctagtgcaggaggtgaagagcatgccttcctgactgtaggatcaaaggaagccaataatgggcctccatttaactttcctggtaattttggtggatcaaatgcctttgggccaccaatccctcctccaggattaggaggcggggcctttggtgatgctaggcctggtatgccttcagttggaaacagtggtttgcctggtctaggactggatgttccgggttttggaggtggaccaaacaatttaagtgggccatcgggatttggagggggccctcagaattttggaaatggccctggtagcttaggcggtcccccggggtttggaagtggccctcctggtcttggaagtgcccctgggcatttgggtgggccaccagcttttgggcctggccccggccccggccccggccctggcccaatccatattggtggtccccctggctttgcatctagttctggaaaaccaggaccgacagtaattaaagtgcaaaacatgccctttactgtgtctattgatgagattttagatttcttttatggctatcaagtaatcccaggctcagtgtgtttaaaatacaatgaaaaaggtatgcccacaggtgaagccatggtggcctttgagtctcgggatgaagccacagctgctgtcattgacttaaatgacaggcctataggttcaagaaaagtaaaacttgtattagggtagccattcacatcattttttatagggtagatcttcatattgctgtgattaatgcatccagattgttttcctagtatttccaggttagaacctgtggattgtttcaattgcatatagcttggtttccataacatagagcattggttgactgtttacagaagactcactcaccaggataaacattgctgtatgttacagtaaagctatctggagagaacacataaatgattttggcataccattagagaaaccatttgtaaaactcaaatgaccacataaagcttatcaaggagtctagattggttttgttttataccatatgggatgaagaaaatagaaatgtcagtagaactcattgagggtgctcttgccagctgctgaaaatagaagttggctactctcagaatttggtttaaagctggacagatttgctttgttatagggtaaagctttgtctaaagtcctcattttcttttaaaattgaataaaatttctgtatacagattcattgtatgtacctttattgcttcttaagggtccttgctgtatagacagtcctgcttcagaagttgctgctttgtttgtctaattgactcatttgtaaatgagcagaactgttttgttggtttttttccctaaatataaaagtccacacttcgtttgtgctataacctcaaactttgatttctaatgtcacacttaaaactgtgtggaataagacttttgccataaaaataaactatggagtcctttatctaccagagcctttttggtttgaccgccacgatttaggttagtcagtttaaaaattgttcatgttgtttggatggtatcgaaaaccagaaaccacttttaataatgtgtttaagatacttgatttgaagtccttttcatatggactaattgtagtatcaatttcctcctgtcccgattatgtgaaattttggcctttaaacaaagaggggcccattcataagaaagtgttatatctaggtttttaaaactgaagttgaaattatctttgttagcagtagtagtatagaataaaagatccgtatgctggttcgtagattgatacgtgttagtcctgttatttggaggctttttggcatagttgttcgatcaggagcctgtttactaaaagtcttcatacagagtacaagtgcagccgccagaggagaaaattgagattcttgaccctttcatactcttttctttggtattcaggacactaaggcaggaggaccacatgagttctggttggtaagtgtccttgtcatgaaaacacttgccttacaaggctctaattatgatttccctagtcagtgctctgaagatgtgtcacattatattataaacaatacggaaggggagataggtgagatgatatgaaaaacaaattttctcactgtcataaaaggctctaattatggttactttccttgtgatgaaaaacttggccttacagggctctagttatggttactttccctagtcaatgctctgaaaatgtgtcacattataaacaatacagaaggagagatagatgagagatcatgaaaaccaaattttatcttttacatggcccctttgtcttcgtttgaaacatccccaacatttcctacaaatcagcgtagttacaaaggggtcagtcttttaaaataagtatttcctattaaactatatatatatacagtgcctttttggtgttgtgagtcagtggaacactgaaatacagcggttgtgtaatttaagagtggcaacagtttcatttgataagatttgaaaaggctttttatcactacaatcttagaggattgacagtacaggatttttgtttaagagaaggattgtttagactcaagaggtgactatgttgtgggtcttttgataattcatgaatacagatttgctttgaccgatcactagatactgcctcctcaatttcaaaagcaatataacgtttgtatatgctgtttaatttaagttaatgttaagtaatcatttctcattccaaagacaatgcaaaaaacttcagcactgcttgagagttgtatttcagccacagatattttctccattggaaagctattttcattttagaaaaatgggttgtttgaagatgaaagtcttttatcttttttcacaatttattttggttatatgttcgtacattcttattaaatatttcatacactttattgcaactactttgttatttctacatcttagataaatgctgaaaaggaaaacgatttcattgttcatctaattaaataaattaaaagagcggtttgtgtagaaattggagagaactatgttttatatgaatcacaacagtgctcgttgtggactgtaattaaatgctttgccctctggaacttgatttttgtgtatctgagatttattaacagtgctaactgctaaggatactgtttatcttgttctgggcattggagtttcagtttttaaaaaattcttgaaaatgtattctgtgaaactactcatacctctcttcctgcgaattttctcctaagaactaggtttggggtagaaatgaattgacattattttctcatttgctttgtatggtatgaaggatttgtaaagctttgctcaaagttgtgtgcatttgtaaacactatcatgatattttcaattttatgtgtaaattttattgtctgtttttggtgactctgacattaatggaagagaatattttccattagatttaattttttttcctctcccttctgattttttttttattggtgttcatttttcttttgatttaaaggattagagaaatctacaaatgtatgtcataaataagcaaatttgtaaacttttctgaactttagtgaaacatttagttcacaagcataatttggaggtgtgttctgtgtttacacagtagtttggatgtacaattattattagtggctttttaaaaaatgaaacagtgttaagtgaaatgtagttcctagctttgtactccaagttgtcaaagcatcaacaatgaaaattcgattaggaaactttatttaaaatttcaggtagtaatattcagtgtagttaaggccagtcttaacccactggatgaaaatctaggactgtatggaagtaagcaaacattacatttttaggtggaaatagtcagccttgcataaaaacaaggatgcgtgaaagccttaaattccagctcccttttactggagtctgtggttgtgtacaggtatgggccaagtgtaaaatctcatcaattttaagaacactcgggaaatgagtaaagaaaatgtaaaattgctgctagtcaaatcttttggaaagaatttctggaagtggtcactttaaaaattattttccacccttgcaaaattgccacatttaaattgttttactggcagttctatagtagtccagactttagaaaccaaacacaacaaaatggcttgttgccaatatggccacaacattgccagcaaatactgccttggcatcactcagcagaggtttttgtttataaagatgaagtcttgaatactgttcaataaacttgtcaaaaaataaaaaaaaaaaa

SEQ ID NO: 29680 - DNA, 5512 bp, Homo Sapiens
tttgatgaataatacttggtggggcgagggggaaagagtagaggtggaggggtaggaggatttactcttccagcgagagctacgcgcatcccatcctccccctcccccctacccgggctccggcgtggaggcggggcgtggccggcctgctttgggaggggaggggcttcccttacagtgctgggctctgccaggacggctgtggggtcgccttacctcggggtatccactctgcagtcgaccagttcccgccaggagcaaagggtaggaaggagagcaggatctgctgtaggaacgcagctaccgcgccactatcacgaagaaacagcaggctcggggcacgagacgaactggagaccgcgctgcctagctgggtaacctgggaagcagagggtaataagtggcgccttaagacaaccctgtagcagcagcagtggcggccaaaggaggctgctcagggaacaagcggctgtagtagtctgtggggcgactggagtgaccgaagccaaggcagtttagtgcctctcgtgttcttattttttaacctctgactatgcaattctgaaacctcccccattcgggggaccagacagcctgatagacaccttccactctccttcctcccgccgtggtctcgagaacagaaggatctctccttaacgcctttcaccattaagaggaaagcgatggaggagctgagcgctgatgagattcgacggaggcgccttgcacgacttgctggtggacagacctctcagccaaccaccccactcacctctccccagagggagaaccctccggggcctcccatagcggcatcagccccaggaccctctcagagtcttggtctcaatgtccacaacatgaccccagctacctccccaataggtgcatcaggagtagcccatcgaagccagagcagtgaaggagtcagttctctcagcagctcgccctctaatagccttgaaacgcaatctcagtctctctcacgttcccagagcatggatatcgatggtgtctcatgtgagaaaagcatgtcccaggtggatgtggattcaggaattgaaaacatggaggttgatgaaaatgatcgaagagaaaagcggagcctcagtgataaggagccttcctcgggccctgaagtgtctgaagagcaggccttacagctggtctgtaagatcttccgtgtctcttggaaggaccgggacagagatgtcatctttctttcttctctttctgcacagtttaagcagaacccaaaagaagtattctccgattttaaggacttgattggccagattttaatggaagtgctaatgatgtccactcagaccagagatgaaaacccatttgccagtctgacagccacatcacagccaattgctgcagcagcacggtcaccagacagaaatctcttgctaaacactggctccaatccaggaacaagccccatgttctgcagcgtggcttcctttggtgccagctctttgtctagtttgggagcctctggtggagcaagtaattgggattcctacagtgaccatttcaccattgaaacctgcaaagagacagatatgctgaactacctcatcgagtgtttcgaccgagttggaatagaggaaaaaaaagcaccaaagatgtgcagccagccagcagtcagccagcttctgagcaacatccgctcacagtgcatatcccatactgctttagtactacaaggctccctaacacagcccaggtccttgcagcagccgtccttcctagtgccgtatatgctgtgtaggaatctcccatatggcttcattcaggaactggtgagaaccactcaccaggatgaagaagtgttcaagcagatatttatccccattttacaaggcctggctcttgctgccaaagagtgctccctcgacagtgactactttaaataccccctcatggcactaggtgagctctgtgaaaccaagtttgggaagacacaccctgtgtgcaatttggttgcttctttgcggttgtggttgccgaaatccttaagtcctggctgtgggcgggagctgcagagactctcttacttaggggctttctttagcttctcagtctttgcagaagatgatgttaaagtggttgaaaaatacttctcagggcctgccattaccctggaaaacactcgtgtggttagccaatcattgcagcattacttagagctcggaaggcaagagctttttaagattctgcatagtattttgttaaatggcgaaacccgtgaggctgctctcagttacatggcggctgtcgtcaatgccaatatgaagaaagcacagatgcagacagatgatagattggtgtctacagatggatttatgctgaatttcctttgggtactgcagcagctaagtacaaaaatcaagttagaaacagttgatcccacgtatatttttcacccaagatgtcggattactcttcccaatgatgagacgcgtgtgaatgcaacgatggaagatgtgaatgactggctgactgaactctatggcgatcagcctccattttctgagccgaaattccctacggagtgcttctttctcaccctgcatgctcaccacctctctattctgcctagttgccgtcgctatatccgcagactccgggctatccgggagctcaatagaactgtagaagatttgaaaaataatgaaagccaatggaaagattccccactggcaactagacaccgcgaaatgctgaagcgctgtaaaactcagcttaagaaactggtacggtgcaaggcctgtgctgatgctggcctacttgacgagagcttcctgagaagatgtctgaatttttatggccttctcattcagctgctgctccgcatcctggaccccgcatatcccgatataacactgcctttaaattcagatgtccccaaggtatttgcagcgttgcctgagttttatgtagaagatgttgcagaatttttattttttattgtacaatactctccccaggcgctttatgagccctgtactcaggatattgtgatgttccttgttgtgatgttgtgcaaccagaactacatccgaaacccatatttggtggccaaactggtagaagtcatgtttatgaccaaccctgctgttcagccacgaacccagaagttttttgaaatgattgagaaccatcctctctccaccaagttgttggtaccttccctgatgaagttttatacagatgttgagcataccggagccaccagtgagttttatgacaagttcacaattcgctatcatattagcaccatttttaaaagcctttggcaaaacatagctcaccatggcacctttatggaggagttcaactccgggaagcagtttgttcgctatataaacatgttgataaacgacacgacgtttttgctcgatgaaagtctggagtctctgaagcgaatccatgaagtgcaggaagagatgaagaacaaagaacagtgggaccagttgccccgggatcagcagcaggctcgtcagtctcagcttgctcaggatgagcgtgtgtcccgctcttacctcgccctggccaccgaaaccgtggacatgttccacatcctcacgaagcaggtccagaagcccttcctcagaccggagcttggaccccgattggctgcaatgctgaactttaatcttcagcaactttgtggccccaagtgccgtgacctgaaagttgaaaaccctgagaaatacggctttgaaccaaagaagctgttggaccaactgacggatatttacttacagctggactgtgctcggttcgcgaaagccattgctgacgaccagagatcctacagtaaggaattgtttgaagaagttatttcaaagatgcggaaggcagggatcaaatccacaatagcaatagaaaaatttaagctgctcgccgagaaagtggaggagatagtggccaagaacgcacgcgcagaaatcgactacagcgacgctcctgatgagttcagagaccctctgatggacaccctcatgacagaccccgtgcggctgccctctggcaccatcatggaccgctccatcatcctgcggcacctgctcaactcccccacggaccccttcaaccggcagacgctgacagagagcatgctggaaccagtgccagaactgaaagagcagattcaggcgtggatgagagagaaacagaacagcgatcactaaaccgttccgccgcccaccctctgctagacacagccaaggccaacgaggcaagcagaagcagcggccgcagcgaagctgccgttcatgtgttggaggccaaatgtggcaaaccaaccccaggcccacccagagcgagcaaacgctgagacctgaaaggacatggatgagaagaggagcccgcttcctgtacatatatttaagtgacaaacacggtcaaaagcttaagggacaggttttatggttgcttgtgtaataaagcatgtccttcgtatgtcacagtttggggcaacggaagtcttttagtgatggctaatgggtctgggcagcatcccttcatgaatttttttttaatccaatatccgttgatttgattgtgattagagaaccttggacattttgctgctaaagaatcttttttcccctctcccccttcctgaccctacttgcactgctgtggatttttttaagagaagcaaaaacaaaagtaaactcctttccctggccctccaaacatatattctgtgagataactgtgcctgctaccaagtgttaatcctgggatcgtatttttatatcatattcacatatttgtttttttaattggtgttagatgacatgattaataaaaaaggcaagatattttcagaatttgaatttcagttttttttttcttttgaaatgtccctttaagatttttttattctaaacaaaataaagaaaatcctgctgctctggtccttgtgataagcctctcttcggcatctgaggagcagctgcagcaaaatctaggggtgtaagtgtatcaggacttatgtgacttatattttggggagatgagggttgggttttttttttaatgctacgtgacagtttgaaaccttcacagttatcctctgggggtaaatcaattcttcaacccttgggtgtgtgagtttgaggcagggtcatttgtgtgatgtgtttggccttaccaaagcaaaagagggtgcaagaatgtgggagtatgtctgccggtttcaacacacacagacaaacacagccacacgcgcacacaagtataagactttttgtattactgctccctacttaacatacttgaattctcaaatttcctttggggtaaaaaaaaaaaaaggatttgaaaccataaagtgttctgaagaaattaagtctataaaaagcatactttcttttttcttttccttttttccctccacagacaatgtcctctgttcaattcctaacgcaaactacaataaatggtgacacacgttcagaagaaaaaaaaaaaaaaaaaaaaaaaa

SEQ ID NO: 29681 - DNA, 2215 bp, Homo Sapiens
cgcggcgcatgttcggcgtgtcggtcttcaggcgcctgatgagttcatagttgggcggtggtgtcagcggtttcgctggcgttcgtgggcctcccccggacccacacacggaaacacgcaaccattcggggatccagacgcccgtttacacgcaccacccctgggcgggctgtgcggctcaggccctcccccgggaccggcccgtgtcccgccccgtgtcccgccccgtatttgtgcggcgccagctggccccgcagcctgcggcgcagagaggctgggcttgcaggcgcagtagctccagaggtcgcgctgggctgagagtgcgggccggcagaggctggcggggagcagccggggttatgctgggcaaggattacatgctggccatcattctggtcaactgcgatgatgacttgtggggggaccacagtctggaggtggaggctggcctgcctcctggctggaggaagatccacgatgctgcaggtacttactactggcatgtacccagcggtagcacccagtggcagcgcccaacctgggaactaggagatgcagaggacccaggcacgggaacggaggggatctggggactgcggccccccaaagggagatccttctccagcctggagagttcactggaccggagtaactctctgtcctggtatggtggggaatcctacatccagagcatggagccaggggctaagtgctttgcagtccgctctctgggctgggtagaggtacctgaagaggacctggcaccggggaagagcagtattgcagtcaataactgtatccagcagctggcccagacccgcagccggagccagcctccagatggtgcctggggtgagggccagaacatgctgatgatcctgaagaaggatgccatgagcctagtgaatcccctggaccacagtctgatccactgccagcctctggtgcacatccgtgtgtggggcgtggggagctccaagggccgtgacagccccatctctgcccctgctagggacttcgcttttgtggcaagtgacaaagatagctgtatgctcaagtgccatgtgtttcgctgtgatgtccctgccaaggccattgccagtgccctacatgggctttgtgcccagatcttgtcagagcgagtagaggtcagtggtgatgcctcttgctgctccccagaccccatctctcctgaagacctgccacggcaagtggagctgctggatgcggtaagccaagctgctcagaagtacgaggcactgtatatggggacactgccagtcaccaaggccatgggcatggatgtgctgaacgaggccattggtaccctcaccgccaggggggaccggaatgcctgggtccccaccatgctcagtgtgtctgactctctcatgactgcacatcccattcaggcagaggccagtacagaggaggagccattgtggcagtgccctgtgcgccttgtgacatttattggtgttggccgcgacccacacacctttggcctcatcgctgacctgggccgtcagagcttccagtgcgcagccttctggtgccagccccatgcagggggactctctgaagctgtgcaggctgcctgtatggttcagtaccagaagtgtcttgtggcctctgcagctcgaggcaaggcctggggtgcccaggcccgtgcccgcctgcggctcaagcggaccagctccatggattccccaggaggtcccctgcccctccccctgctcaaaggaggggttggcggtgcaggggcaacccctcgaaagcggggtgtcttctcttttcttgatgccttccggctgaaaccctctctgctccatatgccctaaacttatctgggaaggctggggaagtaggctctgggtccatgcctaactctgtaccgttttattcctcaaggcctatagcctgtcactccttgaagccttctctgcctgtccctccgatccttgtccaccgtctatttattgcccaatttattgtttatacggatgactgggaggcactgcaccacaacgtaggaccctggctcccctttccttgggtccttgtgttccttgcccctgtccaaccctggacagttggctctacctcagtaacactttatagcaaaatcagtgcaaataaaaatccctcagtgacctcaaaaaaaaaaaaaaaaaaaaaaaaaaaaaaaaaaaaaaaaaaaaaaaaaaaaaaaaaa

SEQ ID NO: 29682 - DNA, 3252 bp, Homo Sapiens
ggggtgaaccgtgacagcgcttcggcccgcactaaggccggctcttgtgccggaaggaggaaggcgtggggcattcgcccctcggagctagggagtgtgtgcgacgccgctgcgaggtcacgtgagccactgccggcagagagggaaaggggcggggcccagaacgaagcggggaggcgccccttgtttccctggggtcacgcgcagccggaagtggcggctgctgcggagaattggagatggggaccgccctggacatcaagattaaaagagcgaataaagtttatcacgccggggaagtgctctctggcgtggtggtcatatcgagtaaggattcagtccaacaccagggagtgtctttgaccatggaaggaactgtaaacctccagctcagtgccaaaagtgtgggtgtgtttgaagctttttataattctgttaagcctatccagattatcaacagcaccatagaaatggtgaagccggggaaatttcccagcggcaaaacagaaatcccttttgaatttcctctgcacttgaagggtaacaaagttctgtatgagacgtatcatggcgtgtttgtcaacattcagtatacactgcgctgtgacatgaagcggtctctgttggccaaggacttgacaaagacctgtgaatttatcgttcactccgctcctcagaaggggaagtttactcccagtcccgtggacttcacgattacacctgaaaccttacagaacgtcaaagagagagctttgcttcccaaatttctccttcgaggacatctcaactcaacaaactgtgtcatcacgcagccactaacgggagagctggtggtggagagctcggaagccgccatcagaagcgtggagctgcagctggtgcgcgtggagacgtgcgggtgtgcagaaggctatgcccgcgacgccacggagattcagaacattcagatcgccgacggggatgtgtgcaggggcctctctgtccccatctacatggtcttccctaggctgttcacctgccctacactggagaccaccaacttcaaagtggaatttgaggttaacatcgtggtgctgcttcaccctgaccacctcatcacggagaacttcccgctgaagctctgcaggatatagcccggaggagggaagcatagagaacgggagtggccatctggaaatccagctggttatccaaatcctaaggggagctacagccagcggcatatacttgtttttgtgattattctgtatcagaaatgaaacagaccctcaaattaactttccttcctcatttcttgaggcttctgcttccaacaggcacctctaatcagaccttttctttgaaattcaacaagatttcttaatgctatttgccaagaccatttcacagaaaacattgactgtggctcttgccttatctgttcctttttaggtacagtaaaacaattgtgacagcagtttgagcttgctggagagtggcatcatggggacaaaaggaaacctctgacttgctaatggatgtagccagggactccccatagcaaagggtctgtggccagttgacatccaggatggctgcaagcgcacttgatggtcaggaagtttgcagatactcgccaaggcagagcgcaaagtgctagccactggaaatgcatgacttccctccacccctactctattctgtagttttttggttttgtttctgagacggagtctcagtctgtcacccaggctggagtgatctcagctcactgcaacctccacctcccaggttcaagcgactctcctgcctcagcctcccgagtagttgggattacaggtgactgccaccgtgcccggctaatgtttgtatttttagtagagacggggcttcaccatcttggccaggctggtcttgaactcctgacctcgtgacccacccgccttggcctcccaaagtgctgggattacaggtgtgagccaccacacccagcctctgtagttctttttacaacatttttcattataactttaaattttttaagcaactggaaaagtgttccttgctctcttggggggatttggctggtgccgaagtgtttctgaagtctcaagaactgccataaaatctcacgctgccatttccctgaacagatacatacatagagagagacagttttccaaactgtgtcacgcaggctgagtgcactggcaggatcacagctcacggcagcctcaacctccctggctcaagcgatccctcccctcagcctcctgagtagctgagactacaggtgagtgccaccacactcagctaattttcaaattttttgtagacagggtctccctatgttgcccaggctggtcttgaactcctagactcaagtgatcctcctgtcttggcctcccaaagtgctgagattacaggtgtgagccactgtgcccagcagtttcccagaatatatttaaatgcaaagttacatgaggggaaaacatgtatgtttgctcctgttgttactgggtaggttctgaacagcagaaacccatgtgcagggtgggctggtgaaggcccctctccgcaaggtggtagcaggaaaaggtccttgacttgatgaatttggtctgcctctgagccactggaggaagctgttttgagccagggttttttggcctaaagccagcatttcctcagtctccctttgtggttcgaaggatatggactattgcaatacatttcttccttcaaatcctgccactgttttgttggcccacaactaataggacctcaaaataagccatgctgctttgcacacacactagccttcttttgtacttttcattctggatgggcttggccaaaacaggctcaggccaaagacctcccaagctgtatgtacttccagtatcctgaaacagtgtttggtgacataatgccaagggtaaacaagcctgatttaggcactgctttatccaggggcttcacccatgaaattaataaaacttatctgagtcacttgaaacttggttcccagaaaacacatttctggtttataatctccttttatgctcacctgacattaattatctatccttgatgatgtgtttaaactgagtagcagaaaacagaggccacactttctgggaaattttaaaggaagaaaccatttttaatgagatgaaaatatttaacgaatttaaaaagctaatgacaattttgagaaaaggtttgggatgtatattgctatgtaatttaataaactgattttatggatat

SEQ ID NO: 29683 - DNA, 2762 bp, Homo Sapiens
gggcccagatagaacaagaaggcagaagaaatgtgaattcctctttctctgctggagctgggatattcttcttctcctgcccttggacatcagagctgcaggctctctggcctttggacccgaggatttataccaagcaggtttctgggttctcaggcctttggccttggactgatagttacaccattggcatatctggttctgaggctcttggtcttggactgagccacactcctggcatcccagcgtctccagcttgcatggcctgtcacgtgattcctgtcagaatcaccatttttggtaaacaaaccaagcccagaacctgataattatggagcattctacactgacagttctttgagacaaatttcctcttggcatttacactgtggctttagctttcaaaccagaggttcctcttacccagcaaaaaatggctttcccgaagatgagattgatgtatatttgccttctggttctgggggctctttgtttgtattttagcatgtacagtctaaatcctttcaaagaacagtcctttgtttacaagaaagacgggaacttccttaagctcccagatacagactgcaggcagacacctcccttcctcgtcctgctggtgacctcatcccacaaacagttggctgagcgcatggccatccggcagacgtgggggaaagagaggatggtgaagggaaagcagctgaagacattcttcctcctggggaccaccagcagtgcagcggaaacgaaagaggtggaccaggagagccagcgacacggggacattatccagaaggatttcctagacgtctattacaatctgaccctgaagaccatgatgggcatagaatgggtccatcgcttttgtcctcaggcggcgtttgtgatgaaaacagactcagacatgttcatcaatgttgactatctgactgaactgcttctgaagaaaaacagaacaaccaggtttttcactggcttcttgaaactcaatgagtttcccatcaggcagccattcagcaagtggtttgtcagtaaatctgaatatccgtgggacaggtacccaccattctgctccggcaccggctacgtgttttctggcgacgtggcgagtcaggtgtacaatgtctccaagagcgtcccatacattaaactggaagacgtgtttgtggggctctgcctcgaaaggctgaacatcagattggaggagctccactcccagccgaccttttttccagggggcttacgcttctccgtatgcctcttcaggaggatcgtggcctgccacttcatcaagcctcggactctcttggactactggcaggctctagagaattcccggggggaagattgtccgcctgtctgaggggagcccagaggcacatccggacaagtttcagataacccgtggggatagtttttgctagattttggaagagggggcgggacagaggatgctgttcttcagtgctgaaatccacgccagaatgtcggtgttcatgaagtcactgattagttcccacttggtgccccaggcaataataggcccgtctcttgggcacgcacactcttcatactaagtgtttgacatacacctggatttttgcatttcaggggtcagtatcctatgacatgatgggtgttaccatcctaattttacaggcaaggacacagcagctgcgagaggtacagaaacttgtcccaaggctcacagccagtaggcataggagcgggaatgaaaatcgagcactgtcagaatctggtgggcagcccctgacttgaaccactcccacgtgctgcctcccttaggaggggacactgatgatgaggtctcggagccggcatccttccatccctgtcgagtcccctccacctcagctcccagtccttgtgctttttggagctaagcctgggatgaccaaattcaccccagctccttcattcacagggctggatgtagctgggattgagtccatgttatcggctcggtactcaacacaacccaagtttcatccgaggaaatgtccccgcagtggatgcagctcacatgctgaggaacacccagctctggacagagttcttataaatgtataaattaggctcagaaaccactgcattctgacctgctgtacagactgcccacactgctgacctgcctagcgagcaggacatcccttctgagccatctgctgctctctcatttcatcaccccaactgtcccttgtttttgatcaatggggaccagccactgccccaggagcactttagggctctcagttcaaactgaaggacagttgaactcagatggggttcatgtgggattctgggagctttctgggaattcagttggagtcaagtcaggatgctctcaaggacccctcgggctcagagccctaaagtgggccctggtgaagcagggtggtcctgcgtccacttcccaagcctgagccaagctcatcttcattgaatgtctcatttggccgaggaacaactgaactttgtggtttgctgtttagccttcagtttgctccgctgcctcctacccagaggtttgtgcgagcctgtgttgcagggttgtataaaaccaaggtacttcgttagttttgcccattcagccatggtcacgtgacatgcaaagtaatcttgctcctaattatagaaatgatttttcttttaattttttactttaccagactttactttgtactcagagaagaggcctcacatggctgtgtcacatataaatgttggactaaactctt

SEQ ID NO: 29684 - DNA, 2133 bp, Homo Sapiens
ggcagatgcccacgtgatcctggcctgcagttgggtggctgcggtgagatacctgggttcctgaagggcgggtggttaggtcgtaactactgcccccgccggctgactctccgagcggccgggctcggaagccacgagccagctgaggcgttctccgcttagtgcctacggcatgggtcagctctttctgccacctccgccttcgcggtcctcacctctttgcgggtgaagttacctttgggtttccagaccttgggggcctgaggcccaaactcgggacgaacccctaacccacctctcttttcctgtcattctccaactcttactttgtaccacggaatcacttggccttaaagctagccagctcggccgtgccttgaggccaggttcgagagataaaggtaaccgtggggaaagcggccccccagtggacaaaggcggaggcaagaatagagcaggcctgagggccataggcgatgagaataggcagttgaggggtgaaaaagaaaacaaacaaacaacaacaacaaaccctgaagagtactgaagatttagaagggactggaaaggacttgttgcgcaatggaagaatctgactctgagaaaacgacggagaaagaaaatctggggccgagaatggatccaccactaggggaaccggaaggatcgcttgggtgggtgctaccaaatacagccatgaagaaaaaggtgctgttgatgggtaaaagtgggtctggtaagaccagcatgaggtctattatctttgcaaattatattgccagagacacacgtcgccttggcgcaacaattgatgtagaacattctcatgttcgatttctgggaaacctggtattgaacctgtgggattgtggtgggcaagacaccttcatggaaaattatttcactagccaacgggacaacatcttccgaaatgtggaggttctgatttatgtctttgatgtggagagccgcgaactggaaaaggacatgcactattaccaatcatgcctggaggccattctgcagaattctccagatgccaaaatattttgcttggtacacaaaatggatctggtacaggaggatcaacgggacctgatttttaaagagcgagaagaagatttgaggcgtttgtctcgcccattggaatgttcttgtttccgaacatctatctgggatgaaaccctctataaggcttggtccagcatagtttatcagctgattcccaatgttcagcagctggaaatgaacctaaggaattttgctgaaattatcgaagctgatgaagtacttctttttgagagagctacttttctggtaatttctcactatcagtgtaaagagcagcgtgatgcccatagatttgagaaaataagcaacattattaagcagttcaagctgagctgcagcaagctggctgcctctttccagagtatggaagtcaggaactctaacttcgctgctttcattgacatctttacatccaacacttatgtgatggttgtgatgtctgatccgtccattccttctgcagctactctgatcaacatccgcaatgccaggaaacactttgaaaagctggaaagagtggatggaccaaagcagtgtcttctcatgcgctaaacattgatgaatattgtttcacacaaaaattaaaagtttcctaattaatgttgtattcatatatgtaggctctgaaatgttgtgatgcttattgcttctgtatttcttctctactccctagtcttaatgtttaaccttgaatgctattaacttaaatagccattgaggagttagaagatgaattgttcatgaagtcggtgttacataaaagtaggtgatatgtaagttttctgataacaaggttctaatagtgtttaaatgtactggtaacctggttccaatagttgtgtttgcccaagcctttctcggcatcatcttgtattccttatcagatagtaagtaacctgtaagtttggagtattactgttttctcagcatgcattaaaaatattccttaacttcaattgtaaataaacttttggtgttagggaaaaaaaaaaaaaaaaaaaaaaaaaaaaaaaaaaaaaaaaaaaaaaaaaaaaaaaaaaaaaaaaaaaaaaaaaaaaaaaa

SEQ ID NO: 29685 - DNA, 2451 bp, Homo Sapiens
gtttcccgcatgctcagtagctgaggtagggatgccatccttctcaaaagacttattgacagtgccaaagctcggtactggacacaacgagggacctgggtctacgataacgcgcttttgctcctcctgaagtgtctttggtccaacgttgttccagagtgtaccatggcttccagtaacactgtgttgatgcggttggtagcctccgcatattctattgctcaaaaggcaggaatgatagtcagacgtgttattgctgaaggagacctgggtattgtggagaagacctgtgcaacagacctgcagaccaaagctgaccgattggcacagatgagcatatgttcttcattggcccggaaattccccaaactcacaattataggggaagaggatctgccttctgaggaagtggatcaagagctgattgaagacagtcagtgggaagaaatactgaagcaaccatgcccatcgcagtacagtgctattaaagaagaagatctcgtggtctgggttgatcctctggatggaaccaaggaatataccgaaggtcttcttgacaatgtaacagttcttattggaattgcttatgaaggaaaagccatagcaggagttattaaccagccatattacaactatgaggcaggaccagatgctgtgttggggaggacaatctggggagttttaggtttaggcgcctttgggtttcagctgaaagaagtccctgctgggaaacacattatcacaactactcgatcccatagcaacaagttggttactgactgtgttgctgctatgaaccccgatgctgtgctgcgagtaggaggagcaggaaataagattattcagctgattgaaggcaaagcctctgcttatgtatttgcaagtcctggttgtaagaagtgggatacttgtgctccagaagttattttacatgctgtgggagcaagttaaccgatatccatgggaatgttcttcagtaccacaaggatgtgaagcatatgaactctgcaggagtcctggccacactgaggaattatgactactatgcaagccgagttccagaatctattaaaaatgcacttgttccttaaaggaaagtttcatttggccgggcgcggtggctcatgcctgtaatcccagcactttgggaggccgaggcaggtggatcacttgagctcaggagtttgagaccagcctgggcaatatcgtgagaccccatctctacaaaaatacaaattaactgggcatcctgtcatgcgcctgtcatcccagctacttgagaggctgaagcagaagaatctcttgagcccggaaggcagaggttgcagtgagctgagatcgtgccactgcactccagcctgagtgacaggagttaagccctgtctcagaaaaaaaaaaaacaaaaacccaaaaagtacttaaagtttcatttacttagctaggagaaagacttggttctcaaaataatacattttaagattaattgggtagaattagagttccacctttattcattgttgagcagtgatttatatttagttattatatttaggaatagaaaatagaattaaataatttaacttgattaatcaaccagaccaattttgacgtctggagaacttataaactcaatatgttatatttgttttcctgtatttaggtggagaaatgagaaaaagctttagttccaattgacagttcaggtcaatgttcaatgaacattcctatcttctaaaccagatttctctttttttttcctgagacggagtctcgctctgtagcctaggctggggacaagtggcgtgatctcggctcactgcaagctccgcctcccgggttcatgccattctcctgcctcagcctcccgagtagctgggactgcaggcaccgccaccacgcctggctaattttttgtatttttagtagagaaggtgtttcaccgtgttggccaggatggtcttgatctcctgacatcgtgatctgtctgcctcggactcccaaagtgctgggattacaggtgtgagccaccgcacctggcctaaaccagatttctttagggcacaattttttctggaatctcactcttgtttttcacagtaattttaaaaacgtttctactccaattaagaatatatatgatgttattatatatgcttatgaaacagatttatgagaaaagttttttttaaataaattatttaatcctagctctttgttattcaccagctttttaaaaaagtgtttgaaaattatacattctcgactttggggattagtttattcttgtggcatcattataaggcttaattgtggaaagctaagtacttgcttctattccttccaatgagagattataacataaactattaaaattattctgctaatatacctagatttttatttttaggtctctgtccattgcttttaattaaaattatctgttttcaaatc

SEQ ID NO: 29686 - DNA, 3240 bp, Homo Sapiens
actcgctgctctgcggggaggcgggcgctcccgcaggggttcctccaagatggcggcgcagaggaggagcttgctgcagagtgagcagcagccaagctggacagatgacctgcctctctgccacctctctggggttggctcagcctccaaccgcagctactctgctgatggcaagggcactgagagccacccgccagaggacagctggctcaagttcaggagtgagaacaactgcttcctgtatggggtcttcaacggctatgatggcaaccgagtgaccaacttcgtggcccagcggctgtccgcagagctcctgctgggccagctgaatgccgagcacgccgaggccgatgtgcggcgtgtgctgctgcaggccttcgatgtggtggagaggagcttcctggagtccattgacgacgccttggctgagaaggcaagcctccagtcgcaattgccagagggagtccctcagcaccagctgcctcctcagtatcagaagatccttgagagactcaagacgttagagagggaaatttcgggaggggccatggccgttgtggcggtccttctcaacaacaagctctacgtcgccaatgtcggtacaaaccgtgcacttttatgcaaatcgacagtggatgggttgcaggtgacacagctgaacgtggaccacaccacagagaacgaggatgagctcttccgtctttcgcagctgggcttggatgctggaaagatcaagcaggtggggatcatctgtgggcaggagagcacccggcggatcggggattacaaggttaaatatggctacacggacattgaccttctcagcgctgccaagtccaaaccaatcatcgcagagccagaaatccatggggcacagccgctggatggggtgacgggcttcttggtgctgatgtcggaggggttgtacaaggccctagaggcagcccatgggcctgggcaggccaaccaggagattgctgcgatgattgacactgagtttgccaagcagacctccctggacgcagtggcccaggccgtcgtggaccgggtgaagcgcatccacagcgacaccttcgccagtggtggggagcgtgccaggttctgcccccggcacgaggacatgaccctgctagtgaggaactttggctacccgctgggcgaaatgagccagcccacaccgagcccagccccagctgcaggaggacgagtgtaccctgtgtctgtgccatactccagcgcccagagcaccagcaagaccagcgtgaccctctcccttgtcatgccctcccagggccagatggtcaacggggctcacagtgcttccaccctggacgaagccacccccaccctcaccaaccaaagcccgaccttaaccctgcagtccaccaacacgcacacgcagagcagcagctccagctctgacggaggcctcttccgctcccggcccgcccactcgctcccgcctggcgaggacggtcgtgttgagccctatgtggactttgctgagttttaccgcctctggagcgtggaccatggcgagcagagcgtggtgacagcaccgtagggcagccggagaatgcagcccaagcagggcctggcatggggcaggacagggtccagccttttcctaacatctgcctgtgccacaacggccagcaggtgccccatcctctgcccacagcagactctgtcccatggctctccgggcagtagagtgtgtgagtgcagactggacctgtggttcataccttgtcaccacccgggaagctgaaggccacttcctcccagatggcctcagccaggaccatcgccctttctcagagcagagggccaggtatagaaaccgcagtgggcctgcaagccgcccgagcctccccagcagcctcctacagagcaggaagaggcgccctgtgaaccctgagtgttgcaggcccagcagaccctgctgtcccaagcccacccctcctcccaccatcacctccctcacctcgggacagtagccctccacttctccagcctctcagccctgtgctcctgcatccagagtggaacccaggctggtgtccgcatctgtccctgggccccacccctggacctgccttggttgtgtcatctgttgtaaacgttcaggaggaccagggcagcatctggggcctgggatggccacagaaggggcaggccaggtggaaaggagccagggggaagtggtctaagagacctggaactgccagaggatggcggcctgggcttccccagagccaggcgtgcgggagaggtgaggactggccccggtgggctgaggcaggggccgctgtcgtcaggcctgagccagggtgagctggtgcctgccttgcattttccttctggtgctgtgaagaccataggctggcaggcagctgagatgaactgtctttaccactgatgaggggcctctgccggctgagggtagcaagcaggggttgtgagtcaggctgggggacttgtttgaaagaaagaggagtggaaaatggttccaggagggaagaggttctttgagacacagtaccctgggaggcataggagaagggtcgggccagcccagcccagggcctgagttagactatttcccacatgttctctgccttcagtggggagggggtgccaccagggctgtcggccaggattgccactcctgtttcagaggaagcaggccgagagacttgcaccttggccaagccacacaatcagtggggcagccagagctcagacctgagccattttgtcagtatccaggaccccccggattctccacgccctccccatctcccagtctccctgccccccatgccccagaccggcccaccagggactagccgctgtcgcacagcctctggggtgcttggtctctgcgaagtcaaaggcctgacagctctgtggcctgggaatccattttcctgcggcagagcagggcctggtgtggaaccagggagctgtgggaagccacagcagaaatggaagaaaaacaggtctcagcccagggtcctcgctcactccctcactccccactttgaagccatctctgttctgcaggtgagaggatttaaagtcagtcacaaaggcttgggaacaaaaggaattctcttccaagaatgcctctgtggtgctgtttggtctctagaaacagggtcacttttttaatgtagtaaagaagtaataaatggtggcattacacattgtgatattaaaaaaaaaaaaaaaaaa

SEQ ID NO: 29687 - DNA, 4917 bp, Homo Sapiens
ggcagctcggccgactgggcccggagcggcgcggaggccgggcgctgacggtgtgtgtggaggccagtatgaagctgaaaaagcaggtgacagtgtgtggggctgccatcttctgtgtggcagtcttctcgctctacctcatgctggaccgagtgcaacacgatcccacccgacaccagaatggtgggaacttcccccggagccaaatttctgtgctgcagaaccgcattgagcagctggagcagcttttggaggagaaccatgagattatcagccatatcaaggactccgtgctggagctgacagccaacgcagagggcccgcccgccatgctgccctactacacggtcaatggctcctgggtggtgccaccggagccccggcccagcttcttctccatctccccgcaggactgccagtttgctttggggggccggggtcagaagccagagctgcagatgctcactgtgtcggaggagctgccgtttgacaacgtggatggtggtgtgtggaggcaaggcttcgacatctcctacgacccgcacgactgggatgctgaagacctgcaggtgtttgtggtgccccactctcacaatgacccaggctggatcaagacctttgacaagtactacacagagcagacccaacacatcctcaatagcatggtgtctaagctgcaggaggacccccggcggcgcttcctctgggcagaggtctccttcttcgccaagtggtgggacaacatcaatgtccaaaagagagcggcagtccgaaggctggtgggaaacgggcagctggagattgcgacaggaggctgggtgatgccagatgaggccaattcccactactttgcattgattgaccagctcatcgaaggacaccagtggctggagagaaatcttggtgcaaccccccgctctggctgggcagtggacccctttggatacagctccaccatgccttacctgctgcgccgtgccaacctcaccagcatgctgattcagagagtgcactatgccatcaagaagcactttgctgccacccacagcctagagttcatgtggaggcagacatgggactcggactccagcacagacatcttctgtcacatgatgcccttctacagctatgacgtcccccatacctgtggcccagatcccaagatctgctgccaatttgatttcaaacgcctgcctggtgggcgcatcaactgcccttggaaggtgccaccccgggccatcacagaggccaacgtggcagagagggcagccctgcttctggaccaataccggaagaagtcccagctgttccgaagcaacgtcctcctggtgcctcttggagatgacttccgatatgacaagccccaggagtgggatgcccagttcttcaactaccaacggctctttgacttcttcaacagcaggcctaacctccatgtgcaggcccagtttggcactctttctgactattttgatgccctgtacaagaggacaggggtggagccaggggcccggcctccagggtttcctgtgctgagcggggatttcttctcctatgcggaccgggaggatcattactggacaggctattacacttcccggcccttctacaagagcttagaccgagtcctggaagcccacctgcggggggcagaggttctgtacagcctggctgcagctcacgctcgccgctctggtctggctggccggtacccactgtctgatttcaccctcctgacggaagctcggcgcacattggggctcttccagcatcacgatgccatcactggcacggccaaggaggctgtggtggtggactatggggtcaggcttctgcgctcccttgtcaacctgaagcaggtcatcattcatgcagcccactatctggtgctgggggacaaggagacctaccactttgaccctgaggcgcccttcctccaagtggatgacactcgcttaagtcacgacgccctcccagagcgcacggtgatccagctggattcctcgcccaggtttgtggtcctattcaacccactggaacaggagcgattcagcatggtgtccctgctggtcaactctccccgcgtgcgtgtcctttcggaggagggtcagcccctggccgtgcagatcagcgcacactggagctctgccaccgaggcggtccctgacgtctaccaggtgtctgtgcctgtccgcctgccagccctgggcctgggcgtgctgcagctacagctgggcctggatgggcaccgcacgctgccctcctctgtgcgcatctacctgcacggccggcagctgtccgtcagcaggcacgaagcgtttcctctccgtgtcattgactctggcaccagcgacttcgccctcagcaaccgctacatgcaggtctggttctcaggccttactgggctcctcaaggggtcagggctgtgttttttggcagagcatccgaagggtggatgaggagcacgagcagcaggtggacatgcaggtccttgtctatggcacccgtacgtccaaagacaagagtggagcctacctcttcctgcccgatggcgaggcaagccctacgtccccaaggagccccccgtgctgcgtgtcactgaaggccctttcttctcagaggtggttgcgtactatgagcacattcaccaggcggtccggctttacaatctgccaggggtggaggggctgtctctggacatatcatccctggtggacatccgggactacgtcaacaaggagctggccctgcacatccatacagacatcgacagccagggtgcagccccgacggtatctgaagaagctccccctccaggccaacttctaccccatgccagtcatggcctatatccaggacgcacagaagcgcctcacgctgcacactgcccaggccctgggtgtctctagcctcaaagatggccagctggaggtgatcttggaccggcggctgatgcaggatgacaaccggggcctaggccaagggctcaaggacaacaagagaacctgcaaccgtttccgcctcctgctagagcggcgaaccgtgggcagtgaggtccaagatagccactctaccagctacccatccctcctcagccacctgacctccatgtacctgaacgccccggcgctcgctctgcctgtagccaggatgcagctcccaggccctggtctgcgctcatttcatcctctggcttcctcactgccctgtgacttccacctgctcaacctacgtacgctccaggctgaggaggacaccctaccctcggcggagaccgcactcatcttacaccgcaagggttttgactgcggcctggaggccaagaacttgggcttcaactgcaccacaagccaaggcaaggtagccctgggcagccttttccatggcctggatgtggtattccttcagccaacctccttgacgttactgtaccctctggcctccccgtccaacagcactgacgtctatttggagcccatggagattgctacctttcgcctccgcttgggttagggcttcttgtggcctgaagagaaagttcattcacagagactgcctcttaacatgaagatcattggacaagccacacgggtatcccatcccgatctgcctcccagaactgtgacacactgggctctgccctcattttctgtttattgctgctgctgtgttttcggcgcaacccacaaacccagtgatgggtaaatagggcagacgccagtgagatcagggagagaaggcccttggtcagagtgggcagtgccaggctctgctttgggttgtgagtggacacccaactgggcacaggctcaggcacccatcctttttccaaacagggatatagaagtggtggaagcagacagaagaggtaagggaggctaagtgggtaacagcccagcatcagggtcactgtggcaacagcaggctctaggggaatcctgtggttatgtagagactccatgtcctggtgtgatgagcaggatcagagtgactctgggaggacaggggtggggacccagagttagcagtggggatggagcagtagaaggaatcactgtttctcctaggagtctgaaggcctcgctgctttctgtgatggctttgcagtaagtgccgcctggcctgcatgcattggctaacaggctgcagaatggcaggaaggactcgctagagattgtcatggccagagatcataggtcacttcaggtagcaagacccctggcaaactgggcacttggcctatgtactgatttgtgggatggtggcaggggtgtggggtccttcaccctgcctgaattctctttggcttctgtgctctgtatgctgctgtccccaagggctctttcttattatggcagggagtggggattggtcctactttctttctctggaaaggaaagcctccaagactccatgtgcttgggcagcttgagaaggcgttcagcaccacgcctagcaggcagaccttgaagcctcacctttagtctatctgcagaggtattcagttcctggcacaggggactaggggcatgtagagtatatgaggaggcagtatggctgtgcaggagccttcatttcagcttcaattaatagggaagaatttatgatagctctatagatgctgaaaaggtatttcgtaagatttaaaatccatcccttattaaaactcttagtaaattaagtctggaaagaaacaccctaatctagataaaggtctgtttcagaaaccaacagtgatggcattctaaagagtcagacgccacaggcattcccattaaagtcagaaactagccaagggcaagctattattcagcagtgtcccggcactactaacccctgcaacaagccagatgaggaacataaggaagaattataattgtcattatttgtagacaataaaactgcctacctgtaaaa

SEQ ID NO: 29688 - DNA, 3552 bp, Homo Sapiens
atgcccggcgtggcccgcctgccgctgctgctcgggctgctgctgctcccgcgtcccggccggccgctggacttggccgactacacctatgacctggcggaggaggacgactcggagcccctcaactacaaagacccctgcaaggcggctgcctttcttggggacattgccctggacgaagaggacctgagggccttccaggtacagcaggctgtggatctcagacggcacacagctcgtaagtcctccatcaaagctgcagttccaggaaacacttctacccccagctgccagagcaccaacgggcagcctcagaggggagcctgtgggagatggagaggtagatcccgtagccggcgggcggcgacgtcccgaccagagcgtgtgtggcccgatggggtcatcccctttgtcattgggggaaacttcactggtagccagagggcagtcttccggcaggccatgaggcactgggagaagcacacctgtgtcaccttcctggagcgcactgacgaggacagctatattgtgttcacctatcgaccttgcgggtgctgctcctacgtgggtcgccgcggcgggggcccccaggccatctccatcggcaagaactgtgacaagttcggcattgtggtccacgagctgggccacgtcgtcggcttctggcacgaacacactcggccagaccgggaccgccacgtttccatcgttcgtgagaacatccagccagggcaggagtataacttcctgaagatggagcctcaggaggtggagtccctgggggagacctatgacttcgacagcatcatgcattacgctcggaacacattctccaggggcatcttcctggataccattgtccccaagtatgaggtgaacggggtgaaacctcccattggccaaaggacacggctcagcaagggggacattgcccaagcccgcaagctttacaagtgcccagcctgtggagagaccctgcaagacagcacaggcaacttctcctcccctgaataccccaatggctactctgctcacatgcactgcgtgtggcgcatctctgtcacacccggggagaagatcatcctgaacttcacgtccctggacctgtaccgcagccgcctgtgctggtacgactatgtggaggtccgagatggcttctggaggaaggcgcccctccgaggccgcttctgcgggtccaaactccctgagcctatcgtctccactgacagccgcctctgggttgaattccgcagcagcagcaattgggttggaaagggcttctttgcagtctacgaagccatctgcgggggtgatgtgaaaaaggactatggccacattcaatcgcccaactacccagacgattaccggcccagcaaagtctgcatctggcggatccaggtgtctgagggcttccacgtgggcctcacattccagtcctttgagattgagcgccacgacagctgtgcctacgactatctggaggtgcgcgacgggcacagtgagagcagcaccctcatcgggcgctactgtggctatgagaagcctgatgacatcaagagcacgtccagccgcctctggctcaagttcgtctctgacgggtccattaacaaagcgggctttgccgtcaactttttcaaagaggtggacgagtgctctcggcccaaccgcgggggctgtgagcagcggtgcctcaacaccctgggcagctacaagtgcagctgtgaccccgggtacgagctggccccagacaagcgccgctgtgaggctgcttgtggcggattcctcaccaagctcaacggctccatcaccagcccgggctggcccaaggagtacccccccaacaagaactgcatctggcagctggtggcccccacccagtaccgcatctccctgcagtttgacttctttgagacagagggcaatgatgtgtgcaagtacgacttcgtggaggtgcgcagtggactcacagctgactccaagctgcatggcaagttctgtggttctgagaagcccgaggtcatcacctcccagtacaacaacatgcgcgtggagttcaagtccgacaacaccgtgtccaaaaagggcttcaaggcccacttcttctcagacaaggacgagtgctccaaggataacggcggctgccagcaggactgcgtcaacacgttcggcagttatgagtgccaatgccgcagtggcttcgtcctccatgacaacaagcacgactgcaaagaagccggctgtgaccacaaggtgacatccaccagtggtaccatcaccagccccaactggcctgacaagtatcccagcaagaaggagtgcacgtgggccatctccagcacccccgggcaccgggtcaagctgaccttcatggagatggacatcgagtcccagcctgagtgtgcctacgaccacctagaggtgttcgacgggcgagacgccaaggcccccgtcctcggccgcttctgtgggagcaagaagcccgagcccgtcctggccacaggcagccgcatgttcctgcgcttctactcagataactcggtccagcgaaagggcttccaggcctcccacgccacagagtgcgggggccaggtacgggcagacgtgaagaccaaggacctttactcccacgcccagtttggcgacaacaactaccctgggggtgtggactgtgagtgggtcattgtggccgaggaaggctacggcgtggagctcgtgttccagacctttgaggtggaggaggagaccgactgcggctatgactacatggagctcttcgacggctacgacagcacagcccccaggctggggcgctactgtggctcagggcctcctgaggaggtgtactcggcgggagattctgtcctggtgaagttccactcggatgacaccatcaccaaaaaaggtttccacctgcgatacaccagcaccaagttccaggacacactccacagcaggaagtgaccactgcctgagcaggggcggggactggagcctgctgcccttggtcgcctagactggatagtgggggtgggcggaacgcaacgcaccatccctctcccccaggccccaggacctgcagggccaatggcctggtgagactgtccataggaggtgggggaactggactccggcataagccacttccccacaaacccccaccagcaaggggctggggccagggagcagagcttccacaagacatttcgaagtcatcattcctctcttagggggccctgcctggtggcaagagggaatgtcagcaggaccccatcgccatccctgtgtctctacacgctgtattgtgtatcaccgggggcattattttcattgtaatgttcatttcccacccctgctccagcctcgatttggttttattttgagcccccattccaccacagtttcctggggcacaagtgtctgtgcatgtcccccaggagccaccgtggggagccgatggggaggggatggagaaacaagacagggcttctctcagcccatggccggtcagccacaccagggcaccgcagccaataaaccgaaagtgttacagcc

SEQ ID NO: 29689 - DNA, 2826 bp, Homo Sapiens
gctccaagaaaccagccaacggctggaggatgtggaggagcaggtagggtggctcatggctacattagattcaggggacatctcctcagatgccctgcaaaccatgaaataaaaatggaggaggaacaacaacaacaaacaaaaaaaaaaagcaaagaggaactgcaagttcagtccctagcgactaacagtgagcagaggaagtaaagggggagttgtaagagaggcggtatcaacagcctgctgatgaaagaggcgactctgcagaaagaggcaacttgacatatcaggactttaaccgctgtagaaatagctcaggcataccaagcccatgcaaacacagaattgcagaagttcaggagaggcttatcacttccctgagaagaaaaacacattttcagttttgcctgcatcataagagtgagcactccattgctttctttcctggccacactgctacaatccagcactaactatccatgtccagggtaaggatcgagatcgagaagcccacactgccagtgaaaaagctacgtctttactgcataaattagaggaagcaatttcggaacaacggaaccttcaaactataaatactgaattatcgaacacttgccaggcacttcagcagaagacaaggaaactgaagaagctttttagatgaggaatttcctcactatgattccctgtcctgcgcagatgcaattcaacaacctcttcaagaaaaattgaagcagtgttgccacaaactatatggtggtcaagaagcaagaatacatcagacacccctgaccttgaaacatacgtgctggtacacacctctgctggatgccttatctctggatagttttacagcagttccaaccctggaatcaacacctttctcaggtgtagccaaccaaatccacactctgtgtgaaaggcccacatatggagaagtaaaggatggtgctttggatgtaaaaagacaacacaagtgcccaggccccacaagtggccccagcccaggaacgaatctctcaggctgcatcaggatgaatgatgacccaagtatggaagagaatggtgttgaacgcgtgtgtcctgagagcctgctgcagtccagggaatattcctcactaccattacccagacacacttcatcgacagacggtactataacttcaagtgatcctggattagaaattctgaatatggcttcttgtgaccttgacagaaactcgctctgtaagaaagaggaggatacaagatcagcttctcccacgatagaggcccaaggcacaagtccagctcatgataatattgcattccaagactctacgagtaaggataaaaccatattaaatctggaagccaaagaggaaccagaaacaatagaagaacataaaaaagaacatgcttcaggagactctgtggtttcccctcttcctgtaaccactgtgaaatcggttaaccttagacaaagtgagaacacttctgctaatgagaaggaggtggaggcagaatttctcagattatctttgggatttaagtgtgactggtttaccttggagaagagagtgaagcttgaagagaggtcccgtgacttggcagaagaaaatttgaagaaagaaatcactaactgtttaaaactattagagtctttaacacctctgtgtgaagatgacaaccaggcacaggaaatcattaagaagctggagaagagtataaagtttcttagccagtgtgcagcacgagtggccagtagggctgagatgttgggagccatcaatcaggaaagccgggttagtaaagcagttgaagtgatgattcagcacgtagaaaacttgaagaggatgtatgccaaagagcacgctgaattagaagaactgaaacaggttcttctgcagaatgaaaggtctttcaatcctcttgaagatgatgatgactgccaaattaaaaaacgttcagcttctctaaactccaagccatcttctctacgaagagtgactattgcctctttacccagaaatattggaaatgcaggaatggtggctgggatggaaaataatgatcgattcagtagaaggtcaagcagttggcgtattttggggtcaaagcagagtgaacaccgtccctcattacctcgatttattagcacctattcctgggcagatgctgaagaagaaaaatgtgaactaaaaactaaagatgactcagagccatctggagaagaaacagtagaaaggacaaggaagccaagtctttctgaaaagaaaaataatccatcaaagtgggatgtctcttcagtttatgacacaatagcttcctgggcaacaaatctcaagtcctccatcagaaaggctaataaggccctctggctctctattgcattcattgtactgtttgcagctttgatgagcttcctcacaggccaattattccagaagtctgtggatgccgctcccacacagcaagaggactcatggacgtctctagaacatatcttgtggccatttaccagactccgacacaatgggccaccaccagtgtgacagcaggacatcctaatatatggatcttgatttttaagtttcagtatctgaacttcgtaaattagtaacttttagctgggaaagtatagcatgaaaccagaggttctcagaatgactgtaagatagcttacatttcctctttttgcctttatctccccaactaaaatacaatggggaagaagtctgcctatgatctttgaatgagctttttaaggaagaaatattatatattgtttgttaaagtttattgaaataaagaatcatttaaatcttcaaaaaaaaaaaaaaaaaa

SEQ ID NO: 29690 - DNA, 1938 bp, Homo Sapiens
ccaagagctacgcggcggcggcggagcgcaggcctcgtgccgttacggccatcacggcggccgcagtggcgtcctggagccctcctcagtgctgaagctgctgaaagatggcagaagaagtggtggtagtagccaaatttgattatgtggcccaacaagaacaagagttggacatcaagaagaatgagagattatggcttctggatgattctaagtcctggtggcgagttcgaaattccatgaataaaacaggttttgtgccttctaactatgtggaaaggaaaaacagtgctcggaaagcatctattgtgaaaaacctaaaggataccttaggcattggaaaagtgaaaagaaaacctagtgtgccagattctgcatctcctgctgatgatagttttgttgacccaggggaacgtctctatgacctcaacatgcccgcttatgtgaaatttaactacatggctgagagagaggatgaattatcattgataaaggggacaaaggtgatcgtcatggagaaatgcagtgatgggtggtggcgtggtagctacaatggacaagttggatggttcccttcaaactatgtaactgaagaaggtgacagtcctttgggtgaccatgtgggttctctgtcagagaaattagcagcagtcgtcaataacctaaatactgggcaagtgttgcatgtggtacaggctctttacccattcagctcatctaatgatgaagaacttaatttcgagaaaggagatgtaatggatgttattgaaaaacctgaaaatgacccagagtggtggaaatgcaggaagatcaatggtatggttggtctagtaccaaaaaactatgttaccgttatgcagaataatccattaacttcaggtttggaaccatcacctccacagtgtgattacattaggccttcactcactggaaagtttgctggcaatccttggtattatggcaaagtcaccaggcatcaagcagaaatggcattaaatgaaagaggacatgaaggggatttcctcattcgtgatagtgaatcttcgccaaatgatttctcagtatcactaaaagcacaagggaaaaacaagcattttaaagtccaactaaaagagactgtctactgcattgggcagcgtaaattcagcaccatggaagaacttgtagaacattacaaaaaggcaccaatttttacaagtgaacaaggagaaaaattatatcttgtcaagcatttatcatgatactgctgaccagaagtgactgctgtgtagctgtaatttgtcatgtaattgaagactgagaaaatgttgggtccagtcgtgcttgattggaaattgttgtttctaaatctatatgagaattgacaataagtatttttattataactcagcccatacatatatactatgtatgcagtgcatctgcatagaacagttccttatccttggccttctgttttattgtttttttctttgctgttttccctttgcttctaatattacagttttgtattttgtaaacaaaaatcaaataatgcatatcagaatctttatatggaagaaatcctttattgcctttcctttgtttccttgtaaaggcaccctgttctgttatggtttttcattatataaaattattatatctatatatgacatatgctaaaatttcttggagagtgttaatcttttctgtgactaaatagcaataataagtggaaaattagaaattatttccaggtattatatttgtcacaggccattgtaaataccaagtatattgtgtctgccataatttttaaaaatacattcattgtcttcagtcatacagcaagacacatgagacatagattagaaaacatgttgtacaattttaatttacaactgttggaaataaaaatcacttaatttttttccaaaaaaaaaaaaaaaaaaaaaaaaa

SEQ ID NO: 29691 - DNA, 5749 bp, Homo Sapiens
ctcccgcttctcctcctcctcctccacagttgcctgccctgggcgggggcgagcgcgtccggtttgctggaagcgttcggaaatggcaacttgcgcggtggaggtgttcgggctcctggaggacgaggaaaattcacgaattgtgagagtaagagttatagccggaataggccttgccaagaaggatatattgggagctagtgatccttacgtgagagtgacgttatatgacccaatgaatggagttcttacaagtgtgcaaacaaaaaccattaaaaagagtttgaatccaaagtggaatgaagaaatattattcagagttcatcctcagcagcaccggcttctttttgaagtgtttgacgaaaaccgattgacaagagatgatttcctaggtcaagtggatgttccactttatccattaccgacagaaaatccaagattggagagaccatatacatttaaggattttgttcttcatccaagaagtcacaaatcaagagttaaaggttatctgagactaaaaatgacttatttacctaaaaccagtggctcagaagatgataatgcagaacaggctgaggaattagagcctggctgggttgttttggaccaaccagatgctgcttgccatttgcagcaacaacaagaaccttctcctctacctccagggtgggaagagaggcaggatatccttggaaggacctattatgtaaaccatgaatctagaagaacacagtggaaaagaccaacccctcaggacaacctaacagatgctgagaatggcaacattcaactgcaagcacaacgtgcatttaccaccaggcggcagatatccgaggaaacagaaagtgttgacaaccaagagtcttccgagaactgggaaattataagagaagatgaagccaccatgtatagcagccaggccttcccatcacctccaccgtcaagtaacttggatgttccaactcatcttgcagaagaattgaatgccagactcaccatttttggaaattcagccgtgagccagccagcatcgagctcaaatcattccagcagaagaggcagcttacaagcctatacttttgaggaacaacctacacttcctgtgcttttgcctacttcatctggattaccaccaggttgggaagaaaaacaagatgaaagaggaagatcatattatgtagatcacaattccagaacgactacttggacaaagcccactgtacaggccacagtggagaccagtcagctgacctcaagccagagttctgcaggccctcaatcacaagcctccaccagtgattcaggccagcaggtgacccagccatctgaaattgagcaaggattccttcctaaaggctgggaagtccggcatgcaccaaatgggaggcctttctttattgaccacaacactaaaaccaccacctgggaagatccaagattgaaaattccagcccatctgagaggaaagacatcacttgatacttccaatgatctagggcctttacctccaggatgggaagagagaactcacacagatggaagaatcttctacataaatcacaatataaaaagaacacaatgggaagatcctcggttggagaatgtagcaataactggaccagcagtgccctactccagggattacaaaagaaagtatgagttcttccgaagaaagttgaagaagcagaatgacattccaaacaaatttgaaatgaaacttcgccgagcaactgttcttgaagactcttaccggagaattatgggtgtcaagagagcagacttcctgaaggctcgactgtggattgagtttgatggtgaaaagggattggattatggaggagttgccagagaatggttcttcctgatctcaaaggaaatgtttaacccttattatgggttgtttgaatattctgctacggacaattataccctacagataaatccaaactctggattgtgtaacgaagatcacctctcttacttcaagtttattggtcgggtagctggaatggcagtttatcatggcaaactgttggatggttttttcatccgcccattttacaagatgatgcttcacaaaccaataacccttcatgatatggaatctgtggatagtgaatattacaattccctaagatggattcttgaaaatgacccaacagaattggacctcaggtttatcatagatgaagaactttttggacagacacatcaacatgagctgaaaaatggtggatcagaaatagttgtcaccaataagaacaaaaaggaatatatttatcttgtaatacaatggcgatttgtaaaccgaatccagaagcaaatggctgcttttaaagagggattctttgaactaataccacaggatctcatcaaaatttttgatgaaaatgaactagagcttcttatgtgtggactgggagatgttgatgtgaatgactggagggaacatacaaagtataaaaatggctacagtgcaaatcatcaggttatacagtggttttggaaggctgttttaatgatggattcagaaaaaagaataagattacttcagtttgtcactggcacatctcgggtgcctatgaatggatttgctgaactatacggttcaaatggaccacagtcatttacagttgaacagtggggtacgcctgaaaagctgccaagagctcatacctgttttaatcgcctggacttgccaccttatgaatcatttgaagaattatgggataaacttcagatggcaattgaaaacacccagggctttgatggagttgattagattacaaataacaatctgtagtgtttttactgccatagttttataaccaaaatcttgacttaaaattttccggggaactactaaaatgtggccactgagtcttcccagatcttgaagaaaatcatataaaaagcatttgaagaaatagtacgacaacttatttttaatcacttttaaataatgtgttgcatttacacagttgtttcatgctgtctttagagttaggtgcctgcctaaagccaggcaccaccacacctggctttagagttcacacaataggatataagtcctgtatgacttaaatagtgaattttatccttaacatttacctcttgtatagtatctgccaggcagttttttcttaaactactgagatgataactgtgaaatatttgtgatacgtgtcatgtgtgaaaagtttgatgcattttgagatggaaaactgaaatttggaaaaagaaatactttactattgagtaaactacaatatatttagtgctactcgcagctatttattattttgtagacctgccttatgcaccttactgcctagatttttgggaaaaaactttggaaagtgtgttacctatatttctagccaactaactcacagaaaaactgtttacttcttcactttcgaagtatttggcttttgttaatatgcagttttactaaacagatggttcataagacatgtgaagcaaattcatatttgcaatgggtaaaaagtattaaagcctttctcttgcctgcatatcctattgaccattggtatagtcatcactttttcatattttagtgtagttagaagaattccttcttcaaacattaaagatccacaaagcagtatttctaaatatgccttgaagaactaaatgaagtgtatagcacttgcctttactagatattctttacacttgtacaattatgtagtaaatgtatgtttacagggtttatcatgtttacagattaagctaatttctgtagtcgcatttttatatttttagtatcactctagtaaaaaaaccaaataatttgtttaaaataaccaaagagttgttataatgcataatttgtattaaatttattactatttcttatgccttttaaaatactgtttactatgaagacaatgtttttaattacaaatccagaattctgtaggcaaaatgctacagttcatatcttcctttaaccaaactgaagtacataaagaccatgtacatgtattcatcaaacgtttattgaatgctgcgtgcctagcgctgtgctatgctctggggtaagagttgtcagcttcagagaagctgagtcctgatcctcaaggaacttgcaaatgtgtctatgaatttgtaaaacaatcaaaagtaggcgtaagcagaataaggcaaaagggaaagtgttctaggttccagcacacctgcaaagataaagtgtgccaagactgtatttatatttcatacttatattgtttcatccttatattggaatgattatatagaaaatgctcttaaaaagattaaacctatttctcagtatggtatcttggtgatttaggaataattgtaaatatatgttacgaatcttcttaaatatatatatatacacaccctgtgagaactgtaaaaagtacctctggttcttggtttaagtttgttggggtataacatgatgagtactcattagcacctgatagaaatctgaaatgtgacagtagcaaaaccactttctactttccaaacaccacagcatcagcatggtttaggggaagcaattcacagattaatgtaccctgcgttttgtcttcaccattgtcaaccagcagtcaaggatgagcaccaggtatagtcctggtttgatatctcaccagccatgtgaactgaagcagcttacttaacctctctggattcatatttcttcatctgtcaaatgagagtaatcatgcccaccctcattgtcatggcagattgtcagaagttccagacagatgagaaagcaaaaagtactttgtaaagtgttatacaatcagaaggtgctttgtgctgaccgtcagattgtgtcaagtcaggtgtgcaaattgaccacactcccaaagaatcatttaaaagtaaagtgacttctaagagacaaggaagtaggaacatttctgatattaaatatataaataatatggatacacatgtgtatatctgtatatggatcttaccatcataattcattttcttcatatcagcaaagtaatagtaatgtgggccaatgcattttggaaatgtcctcattatgtagaatggaatgtgaaaattatttttgttaaaacaggattttgccacaattatttaaatattatgtttgtgaactatctaagcatgagaaaatacaaagctttctttgtatctggctgatactcatttggatgattctgtgactcatagaacatgatgttaaatgagaccagactcaactgccaccagtccccagctgcagaccttcatccccttcatctcccactaggggctcgtggtctggaagaaacatgtatcaagcaacacagccccttatcccagatagaaaagtgtctcaaatgcattctactgcgggacagtcagtaggatcattttcataaagcaaggacatcatatgtttctagaaattacaagcatataactttagcctacaatctcttattaaaaatttttaacaaaattgtattacaaatgcatttcatcagaactcaaatttaaatggtgtttgttttgggtttttatttataatgctgaagttattccatataagtatcaagttaaacacaattcattttgattataaactatttgactttttaaaatcttctgacacagtaaatatatatatcaagattgatgtatcaaaatttattgcacactttaaagtgtaaaatcattttttaaaatcttgaatccacaaataaagttctattctgatttt

SEQ ID NO: 29692 - DNA, 3482 bp, Homo Sapiens
ggagggaggggaggccgagtcctggaagcggagctccgcgctgggactggttccttcgcagccattttctgtccaaccaaacagccgattggagacgggagccaaccagggctgcattggaggttgaaatcacaaagattagacacctttttagataggtgttcttcagcaccactgacaacacggttctgacagtatttcatgacaatggatggtgacagttctacaacagatgcttctcaactaggaatctctgcagactatattggaggaagtcattatgttatacagcctcatgatgatactgaggacagcatgaatgatcatgaagacacaaatggttcaaaagaaagtttcagagaacaagatatatatcttccaatagcaaacgtggctaggataatgaaaaatgccatacctcaaacgggaaagattgcaaaagatgccaaagaatgtgttcaagaatgtgtaagtgagttcatcagttttataacatctgaagcaagtgaaaggtgccatcaagagaaacggaaaacaatcaatggagaagatattctctttgctatgtctactttaggctttgacagttatgtggaacctctgaaattataccttcagaaattcagagaggctatgaaaggagaaaagggaattggtggagcagtcacagctacagatggactaagtgaagagcttacagaggaggcatttactaaccagttaccagctggcttaataaccacagacggtcaacaacaaaatgttatggtttacacaacatcatatcaacagatttctggtgttcagcaaattcagttttcatgatctgaagaaatgatggaatggggagtgtagagaaatgagagtctgtatgattctggaacagagacatcagaaggaaagactggtgaaaagatgtatctttgtatattaatagctgtaatgtagcttcctgatgcttgactaattgaggtgttaattctgacttgagaatctttttcatgaatgattttaaagaaaaatttggattttaaaggtattaaaatatttttgttttgtacgagagtttgttgctctgtatgactcctgtatgcattgtatattgcaatttattactgtcagagatttgtagacagtttcttattttcatattgaatcatgttacttttgtaattcaagtaagcggctgggttaattcatgatgtttgcccttttaataaaatataagggtagagttcattttgaatgcaagttgcctttattataaatttgagtttgtcttggttataccttgcatgataacctagctagatttctagcatttgctgtatttattaaaattattatttttttggtaaaacattaatagtttaagcagcatcatttttttaaaaaatgtaattgaataagtgtgaatgcagaagcaaatattgtctgccctgttaaacttggtgcccattaacagtgtttacactgttcatcgtgcctgttaatgtagttttagttactggagcttttttaagactagatttggttttgagttacatttttaagaatgtgggaatatatttaagtttaatgtagtcctagtgctcttgaaatggtgcccctttcatttggtacatgattttttttcaaatcatatcttcaagtactatagtattctcttacagaagaggagttttatagtctgatggtaaatgtcttcattttacctttttaattgaaatgtcaagtttcctgttacactatggaaaccaagaaacatcagacatcattgcgtgtacagaccttttgcatgggtgagtggatgaaatggagaacagagtgagtgctgtgaacggtgtgaaatagaagccaacttctagtatgctgtcttcatctctgcaataaactaaacgtaaataatgtaactttgtataatttagtagtatgtacttggattgtttctttttgaaaagtgaggatttgtattttctcatctattctttttggtgttaattaacttgagggatttcttttttaagtttttaatatcaaaaattgctattgtatagtttgcctaaaaggaagttggagtgaatatcatctttgaaggacactcaaatttataaggtagaagcaatttcccagatataggctgaacagaaacatttactttgccagaaggagcctttaggagtatatgtgggctaatcagaggttaataatgtcctcatctcctactctccatttaaaaaacaaacttcattgtagtaaattcaaataggaaaaaatgggggagtagttaagcaaaatcaacagtcatcctactatgttgaaagaaccaatgttaatattttgataaatatcatttgtccttttactttgctaaatatgtatatttttataaaaatgggctcatattgtgcataccattttgtaacctgcttttttcacttaacaatatattgggaacatcttttccaggtcatgcatagtcttctgcatcatttttattggtttattattctgctgtatgactcaatcataattcatttaatcttctattggatattttgactatttacatcttttcacagttataaacagcacttcactgaatcccatgtacatccatgactgttttcttaaattctttgaattgctgggttaccaaatatgcaaaattttaaggcttttgatacttcgttatgagtgtatttttgagatattttccacttgatccaagcagtgtgtcactatataactgataaaagcacttggtctttgattatcagatactgtctctaaaattattttaaagattaatatttgttcaagtagagaatgaagataaaaaaggaatttgaggccaggtatggggtgtctcatgcctataattccagcactttgggaggccaaggcaggcagatcactttgaggtcaggagtttgagaccagcctggccaacatggagaaccccccgtctctacaaaaaatacaaaattagcagggtgtggtggtgcacacctgtagtcccttactccctggtggctgaggcattatcccttgaacctgggaggcagagcctaaagtgagccgagatcgcgccactgcactccagcctgggtgacacagcaagactcttgtctcaaacaaacaggaatttgagtaaattttaaattagtatatactacaacaaatttccaaacttcataatttgctagtagtgctaactaaaattttacaccaggtaaaatcaggtcaccttttttatgtattgacttcattgttggacttcatactctgatgggaaagaaaatggacattctgaatgtgtcaggtgcataatatcctaatttatgcttgtcagagctggggtctctgtcttccttggcccatgttgcatttaactgaatgtcatgttttctcctctggaacttcttatgtatgcaagctcccatgttaacctatcataaaaatgttttttataattttgt

SEQ ID NO: 29693 - DNA, 3447 bp, Homo Sapiens
ggccagtccgcccggcggctcgcgcacggctccgcggtcccttttgcctgtccagccggccgcctgtccctgctccctccctccgtgaggtgtccgggttcccttcgcccagctctcccacccctacccgaccccggcgcccgggctcccagagggaactgcacttcggcagagttgaatgaatgaagagagacgcggagaactcctaaggaggagattggacaggctggactccccattgcttttctaaaaatcttggaaactttgtccttcattgaattacgacactgtccacctttaatttcctcgaaaacgcctgtaactcggctgaagccatgccttgtgttcaggcgcagtatgggtcctcgcctcaaggagccagccccgcttctcagagctacagttaccactcttcgggagaatacagctccgatttcttaactccagagtttgtcaagtttagcatggacctcaccaacactgaaatcactgccaccacttctctccccagcttcagtacctttatggacaactacagcacaggctacgacgtcaagccaccttgcttgtaccaaatgcccctgtccggacagcagtcctccattaaggtagaagacattcagatgcacaactaccagcaacacagccacctgcccccccagtctgaggagatgatgccgcactccgggtcggtttactacaagccctcctcgcccccgacgcccaccaccccgggcttccaggtgcagcacagccccatgtgggacgacccgggatctctccacaacttccaccagaactacgtggccactacgcacatgatcgagcagaggaaaacgccagtctcccgcctctccctcttctcctttaagcaatcgccccctggcaccccggtgtctagttgccagatgcgcttcgacgggcccctgcacgtccccatgaacccggagcccgccggcagccaccacgtggtggacgggcagaccttcgctgtgcccaaccccattcgcaagcccgcgtccatgggcttcccgggcctgcagatcggccacgcgtctcagctgctcgacacgcaggtgccctcaccgccgtcgcggggctccccctccaacgaggggctgtgcgctgtgtgtggggacaacgcggcctgccaacactacggcgtgcgcacctgtgagggctgcaaaggcttctttaagcgcacagtgcaaaaaaatgcaaaatacgtgtgtttagcaaataaaaactgcccagtggacaagcgtcgccggaatcgctgtcagtactgccgatttcagaagtgcctggctgttgggatggtcaaagaagtggttcgcacagacagtttaaaaggccggagaggtcgtttgccctcgaaaccgaagagcccacaggagccctctcccccttcgcccccggtgagtctgatcagtgccctcgtcagggcccatgtcgactccaacccggctatgaccagcctggactattccaggttccaggcgaaccctgactatcaaatgagtggagatgacacccagcatatccagcaattctatgatctcctgactggctccatggagatcatccggggctgggcagagaagatccctggcttcgcagacctgcccaaagccgaccaagacctgctttttgaatcagctttcttagaactgtttgtccttcgattagcatacaggtccaacccagtggagggtaaactcatcttttgcaatggggtggtcttgcacaggttgcaatgcgttcgtggctttggggaatggattgattccattgttgaattctcctccaacttgcagaatatgaacatcgacatttctgccttctcctgcattgctgccctggctatggtcacagagagacacgggctcaaggaacccaagagagtggaagaactgcaaaacaagattgtaaattgtctcaaagaccacgtgactttcaacaatggggggttgaaccgccccaattatttgtccaaactgttggggaagctcccagaacttcgtaccctttgcacacaggggctacagcgcattttctacctgaaattggaagacttggtgccaccgccagcaataattgacaaacttttcctggacactttacctttctaagacctcctcccaagcacttcaaaggaactggaatgataatggaaactgtcaagagggggcaagtcacatgggcagagatagccgtgtgagcagtctcagctcaagctgccccccatttctgtaaccctcctagcccccttgatccctaaagaaaacaaacaaacaaacaaaaactgttgctatttcctaacctgcaggcagaacctgaaagggcattttggctccggggcatcctggatttagaacatggactacacacaatacagtggtataaactttttattctcagtttaaaaatcagtttgttgttcagaagaaagattgctataatgtataatgggaaatgtttggccatgcttggttgttgcagttcagacaaatgtaacacacacacacatacacacacacacacacacacagagacacatcttaaggggacccacaagtattgccctttaacaagacttcaaagttttctgctgtaaagaaagctgtaatatatagtaaaactaaatgttgcgtgggtggcatgagttgaagaaggcaaaggcttgtaaatttacccaatgcagtttggctttttaaattattttgtgcctatttatgaataaatattacaaattctaaaagataagtgtgtttgcaaaaaaaaagaaaataaatacataaaaaagggacaagcatgttgattctaggttgaaaatgttataggcacttgctacttcagtaatgtctatattatataaatagtatttcagacactatgtagtctgttagattttataaagattggtagttatctgagcttaaacattttctcaattgtaaaataggtgggcacaagtattacacatcagaaaatcctgacaaaagggacacatagtgtttgtaacaccgtccaacattccttgtttgtaagtgttgtatgtaccgttgatgttgataaaaagaaagtttatatcttgattattttgttgtctaaagctaaacaaaacttgcatgcagcagcttttgactgtttccagagtgcttataatatacataactccctggaaataactgagcactttgaattttttttatgtctaaaattgtcagttaatttattattttgtttgagtaagaattttaatattgccatattctgtagtatttttctttgtatatttctagtatggcacatgatatgagtcactgcctttttttctatggtgtatgacagttagagatgctgattttttttctgataaattctttctttgagaaagacaattttaatgtttacaacaataaaccatgtaaatgaaaaaaaaaa

SEQ ID NO: 29694 - DNA, 2591 bp, Homo Sapiens
gcggccgcctccccctccccctccccctctttcttctcctccctcgtcgccgccgccgccgccgccgcctcagccttcgcctcagcgccgcccgctcgccgcgcgcggcgggatggacgatcaatccaggatgctgcagactctggccggggtgaacctggctggccactcggtgcaggggggcatggccctgccgcctcccccgcacggccacgaaggggcggacggcgacggcaggaagcaggacatcggcgacatcctccaccagatcatgaccatcaccgaccagagcttggacgaggcgcaagcaaagaaacatgccctgaactgtcacagaatgaaaccagcgctcttcagcgtcctgtgtgagatcaaagagaaaacaggtctcagcatcagaggagcccaggaggaggaccctcccgatccccagctaatgagactggacaatatgcttttggcagaaggggtttcaggtcctgagaaaggtgggggatcggcggcagcagctgcagccgcggcagcctctggaggttcttcagataactctattgaacactcagattacagagccaaattgacccagatcagacaaatctatcacacagaactggagaaatatgaacaggcatgtaatgaatttactacacatgtgatgaaccttctccgagaacagagtagaacacgtcccatttctccaaaagagattgaaagaatggtgggcatcatccatcgaaaatttagttccattcagatgcagctcaaacaaagcacttgtgaagcagttatgattttaagatcaaggttccttgatgccagacggaaaaggcgtaacttcagtaaacaggccacagaaatcttgaatgaatatttttactcacacctcagcaacccctaccccagtgaagaagccaaagaggagctggccaagaaatgcagcatcacagtgtcacaggtatccaattggtttggcaacaaacgaatcaggtacaagaagaacattggcaagtttcaggaagaagccaacctctatgctgcaaagacggccgtgacagctgcacacgcagtagcagcagctgtgcagaacaaccagaccaattcgcccaccacaccaaattccggttcttctggttcttttaacctcccaaattctggggacatgttcatgaacatgcagagtctgaatggggattcttaccaagggtcccaagtcggagccaatgtgcaatcacaggtggataccctccgtcatgttatcaatcagacgggaggctacagtgatggccttggaggaaattcactgtacagtccacataatttaaatgctaatggaggctggcaggacgcaacaactccatcttctgtgacttctcctacagaaggcccaggaagtgtgcactcggatacctctaactaatctctggccacacttttcctgagctacatgccttgataagtgcattcagagcaataggaggaaaaggaaagcgtttttgtagcccaccatctacagctttactgtaaaaccttgtcttattcgagaacttggtaaatctgtttttaaggaatcataatcatttgtatttatacttaaaaacacacaatgttaaaaaaaataaagcactttatccaattaggccaagatttaacattgttgacagtcctgtagctattttatcataatttattatcaatattttacattaatggtttcacagttgccaattacttggccttaagggtaaaaagtacaatatacactaaacctcaaccgttaaagcagatgcaaaaattcacctcacctaaattgaacttcttgcatatttccattactgacttggattgtctttctttcatatcactaatggagttggaataaagagctgtttgcctatccctgttaatgatggttgtgtttaagaatcttcctcgtcacgtttgtgttcagatctcttatgttataattagatcagagactggtagcatcgtttctctctctgaaagcaccagtgcccagagtctgctcggtaataaaattatggatccagattgttctgagagacgaagatacttgctgctgatagaggtgaaaacgagattgatccgtctggggttttacggtgtgcactgggtgctgcacagacttgtcaaggtttgctacgtcctctgggcatctgcaaaaggccctgctctctggagtgttgtatatagtgtagcaaaagagtatttatacatcccaccaatcaaaacacagctttattacctcatgcgaactcatacaaaccaatagaatttcaacatgttctgtagcttagagtgctcacttactacctctgaacaatactcacgctgtagtttgtctctttcttatctttttgcatcttgtaattaactctttgtttcccttcataaaatgtaatgtacattgtaatcttttaaaagaaaaatcagggttgcacttgcaacttttaaaaaaccgagtgtggaaacattgggtcttaattcaacacaggatcggtaaaactgttgtaaatactgagaaacattttgaatgttcttcaatcttattactaatccatgcaaaaaaaaaa

SEQ ID NO: 29695 - DNA, 6633 bp, Homo Sapiens
ttctccccgccccccagttgttgtcgaagtctgggggttgggactggaccccctgattgcgtaagagcaaaaagcgaaggcgcaatctggacactgggagattcggagcgcagggagtttgagagaaacttttattttgaagagaccaaggttgagggggggcttatttcctgacagctatttacttagagcaaatgattagttttagaaggatggactataacattgaatcaattacaaaacgcggtttttgagcccattactgttggagctacagggagagaaacaggaggagactgcaagagatcatttgggaaggccgtgggcacgctctttactccatgtgtgggacattcattgcggaataacatcggaggagaagtttcccagagctatggggacttcccatccggcgttcctggtcttaggctgtcttctcacagggctgagcctaatcctctgccagctttcattaccctctatccttccaaatgaaaatgaaaaggttgtgcagctgaattcatccttttctctgagatgctttggggagagtgaagtgagctggcagtaccccatgtctgaagaagagagctccgatgtggaaatcagaaatgaagaaaacaacagcggcctttttgtgacggtcttggaagtgagcagtgcctcggcggcccacacagggttgtacacttgctattacaaccacactcagacagaagagaatgagcttgaaggcaggcacatttacatctatgtgccagacccagatgtagcctttgtacctctaggaatgacggattatttagtcatcgtggaggatgatgattctgccattataccttgtcgcacaactgatcccgagactcctgtaaccttacacaacagtgagggggtggtacctgcctcctacgacagcagacagggctttaatgggaccttcactgtagggccctatatctgtgaggccaccgtcaaaggaaagaagttccagaccatcccatttaatgtttatgctttaaaagcaacatcagagctggatctagaaatggaagctcttaaaaccgtgtataagtcaggggaaacgattgtggtcacctgtgctgtttttaacaatgaggtggttgaccttcaatggacttaccctggagaagtgaaaggcaaaggcatcacaatgctggaagaaatcaaagtcccatccatcaaattggtgtacactttgacggtccccgaggccacggtgaaagacagtggagattacgaatgtgctgcccgccaggctaccagggaggtcaaagaaatgaagaaagtcactatttctgtccatgagaaaggtttcattgaaatcaaacccaccttcagccagttggaagctgtcaacctgcatgaagtcaaacattttgttgtagaggtgcgggcctacccacctcccaggatatcctggctgaaaaacaatctgactctgattgaaaatctcactgagatcaccactgatgtggaaaagattcaggaaataaggtatcgaagcaaattaaagctgatccgtgctaaggaagaagacagtggccattatactattgtagctcaaaatgaagatgctgtgaagagctatacttttgaactgttaactcaagttccttcatccattctggacttggtcgatgatcaccatggctcaactgggggacagacggtgaggtgcacagctgaaggcacgccgcttcctgatattgagtggatgatatgcaaagatattaagaaatgtaataatgaaacttcctggactattttggccaacaatgtctcaaacatcatcacggagatccactcccgagacaggagtaccgtggagggccgtgtgactttcgccaaagtggaggagaccatcgccgtgcgatgcctggctaagaatctccttggagctgagaaccgagagctgaagctggtggctcccaccctgcgttctgaactcacggtggctgctgcagtcctggtgctgttggtgattgtgatcatctcacttattgtcctggttgtcatttggaaacagaaaccgaggtatgaaattcgctggagggtcattgaatcaatcagcccggatggacatgaatatatttatgtggacccgatgcagctgccttatgactcaagatgggagtttccaagagatggactagtgcttggtcgggtcttggggtctggagcgtttgggaaggtggttgaaggaacagcctatggattaagccggtcccaacctgtcatgaaagttgcagtgaagatgctaaaacccacggccagatccagtgaaaaacaagctctcatgtctgaactgaagataatgactcacctggggccacatttgaacattgtaaacttgctgggagcctgcaccaagtcaggccccatttacatcatcacagagtattgcttctatggagatttggtcaactatttgcataagaatagggatagcttcctgagccaccacccagagaagccaaagaaagagctggatatctttggattgaaccctgctgatgaaagcacacggagctatgttattttatcttttgaaaacaatggtgactacatggacatgaagcaggctgatactacacagtatgtccccatgctagaaaggaaagaggtttctaaatattccgacatccagagatcactctatgatcgtccagcctcatataagaagaaatctatgttagactcagaagtcaaaaacctcctttcagatgataactcagaaggccttactttattggatttgttgagcttcacctatcaagttgcccgaggaatggagtttttggcttcaaaaaattgtgtccaccgtgatctggctgctcgcaacgtcctcctggcacaaggaaaaattgtgaagatctgtgactttggcctggccagagacatcatgcatgattcgaactatgtgtcgaaaggcagtacctttctgcccgtgaagtggatggctcctgagagcatctttgacaacctctacaccacactgagtgatgtctggtcttatggcattctgctctgggagatcttttcccttggtggcaccccttaccccggcatgatggtggattctactttctacaataagatcaagagtgggtaccggatggccaagcctgaccacgctaccagtgaagtctacgagatcatggtgaaatgctggaacagtgagccggagaagagaccctccttttaccacctgagtgagattgtggagaatctgctgcctggacaatataaaaagagttatgaaaaaattcacctggacttcctgaagagtgaccatcctgctgtggcacgcatgcgtgtggactcagacaatgcatacattggtgtcacctacaaaaacgaggaagacaagctgaaggactgggagggtggtctggatgagcagagactgagcgctgacagtggctacatcattcctctgcctgacattgaccctgtccctgaggaggaggacctgggcaagaggaacagacacagctcgcagacctctgaagagagtgccattgagacgggttccagcagttccaccttcatcaagagagaggacgagaccattgaagacatcgacatgatggacgacatcggcatagactcttcagacctggtggaagacagcttcctgtaactggcggattcgaggggttccttccacttctggggccacctctggatcccgttcagaaaaccactttattgcaatgcggaggttgagaggaggacttggttgatgtttaaagagaagttcccagccaagggcctcggggagcgttctaaatatgaatgaatgggatattttgaaatgaactttgtcagtgttgcctctcgcaatgcctcagtagcatctcagtggtgtgtgaagtttggagatagatggataagggaataataggccacagaaggtgaactttgtgcttcaaggacattggtgagagtccaacagacacaatttatactgcgacagaacttcagcattgtaattatgtaaataactctaaccaaggctgtgtttagattgtattaactatcttctttggacttctgaagagaccactcaatccatccatgtacttccctcttgaaacctgatgtcagctgctgttgaactttttaaagaagtgcatgaaaaaccatttttgaaccttaaaaggtactggtactatagcattttgctatcttttttagtgttaagagataaagaataataattaaccaaccttgtttaatagatttgggtcatttagaagcctgacaactcattttcatattgtaatctatgtttataatactactactgttatcagtaatgctaaatgtgtaataatgtaacatgatttccctccagagaaagcacaatttaaaacaatccttactaagtaggtgatgagtttgacagtttttgacatttatattaaataacatgtttctctataaagtatggtaatagctttagtgaattaaatttagttgagcatagagaacaaagtaaaagtagtgttgtccaggaagtcagaatttttaactgtactgaataggttccccaatccatcgtattaaaaaacaattaactgccctctgaaataatgggattagaaacaaacaaaactcttaagtcctaaaagttctcaatgtagaggcataaacctgtgctgaacataacttctcatgtatattacccaatggaaaatataatgatcagcaaaaagactggatttgcagaagttttttttttttttcttcatgcctgatgaaagctttggcaaccccaatatatgtattttttgaatctatgaacctgaaaagggtcagaaggatgcccagacatcagcctccttctttcaccccttaccccaaagagaaagagtttgaaactcgagaccataaagatattctttagtggaggctggatgtgcattagcctggatcctcagttctcaaatgtgtgtggcagccaggatgactagatcctgggtttccatccttgagattctgaagtatgaagtctgagggaaaccagagtctgtatttttctaaactccctggctgttctgatcggccagttttcggaaacactgacttaggtttcaggaagttgccatgggaaacaaataatttgaactttggaacagggttggaattcaaccacgcaggaagcctactatttaaatccttggcttcaggttagtgacatttaatgccatctagctagcaattgcgaccttaatttaactttccagtcttagctgaggctgagaaagctaaagtttggttttgacaggttttccaaaagtaaagatgctacttcccactgtatgggggagattgaactttccccgtctcccgtcttctgcctcccactccataccccgccaaggaaaggcatgtacaaaaattatgcaattcagtgttccaagtctctgtgtaaccagctcagtgttttggtggaaaaaacattttaagttttactgataatttgaggttagatgggaggatgaattgtcacatctatccacactgtcaaacaggttggtgtgggttcattggcattctttgcaatactgcttaattgctgataccatatgaatgaaacatgggctgtgattactgcaatcactgtgctatcggcagatgatgctttggaagatgcagaagcaataataaagtacttgactacctactggtgtaatctcaatgcaagccccaactttcttatccaactttttcatagtaagtgcgaagactgagccagattggccaattaaaaacgaaaacctgactaggttctgtagagccaattagacttgaaatacgtttgtgtttctagaatcacagctcaagcattctgtttatcgctcactctcccttgtacagccttattttgttggtgctttgcattttgatattgctgtgagccttgcatgacatcatgaggccggatgaaacttctcagtccagcagtttccagtcctaacaaatgctcccacctgaatttgtatatgactgcatttgtgggtgtgtgtgtgttttcagcaaattccagatttgtttccttttggcctcctgcaaagtctccagaagaaaatttgccaatctttcctactttctatttttatgatgacaatcaaagccggcctgagaaacactatttgtgactttttaaacgattagtgatgtccttaaaatgtggtctgccaatctgtacaaaatggtcctatttttgtgaagagggacataagataaaatgatgttatacatcaatatgtatatatgtatttctatatagacttggagaatactgccaaaacatttatgacaagctgtatcactgccttcgtttatatttttttaactgtgataatccccacaggcacattaactgttgcacttttgaatgtccaaaatttatattttagaaataataaaaagaaagatacttacatgttcccaaaacaatggtgtggtgaatgtgtgagaaaaactaacttgatagggtctaccaatacaaaatgtattacgaatgcccctgttcatgtttttgttttaaaacgtgtaaatgaagatctttatatttcaataaatgatatataatttaaagtt

SEQ ID NO: 29696 - DNA, 3213 bp, Homo Sapiens
atgtgcttcagtttcataatgcctcctgctatggcagacatccttgacatctgggcggtggattcacagatagcatctgatggctccatacctgtggatttccttttgcccactgggatttatatccagttggaggtacctcgggaagctaccatttcttatattaagcagatgttatggaagcaagttcacaattacccaatgttcaacctccttatggatattgactcctatatgtttgcatgtgtgaatcagactgctgtatatgaggagcttgaagatgaaacacgaagactctgtgatgtcagaccttttcttccagttctcaaattagtgacaagaagttgtgacccaggggaaaaattagactcaaaaattggagtccttataggaaaaggtctgcatgaatttgattccttgaaggatcctgaagtaaatgaatttcgaagaaaaatgcgcaaattcagcgaggaaaaaatcctgtcacttgtgggattgtcttggatggactggctaaaacaaacatatccaccagagcatgaaccatccatccctgaaaacttagaagataaactttatgggggaaagctcatcgtagctgttcattttgaaaactgccaggacgtgtttagctttcaagtgtctcctaatatgaatcctatcaaagtaaatgaattggcaatccaaaaacgtttgactattcatgggaaggaagatgaagttagcccctatgattatgtgttgcaagtcagcgggagagtagaatatgtttttggtgatcatccactaattcagttccagtatatccggaactgtgtgatgaacagagccctgccccattttatacttgtggaatgctgcaagatcaagaaaatgtatgaacaagaaatgattgccatagaggctgccataaatcgaaattcatctaatcttcctcttccattaccaccaaagaaaacacgaattatttctcatgtttgggaaaataacaaccctttccaaattgtcttggttaagggaaataaacttaacacagaggaaactgtaaaagttcatgtcagggctggtctttttcatggtactgagctcctgtgtaaaaccatcgtaagctcagaggtatcagggaaaaatgatcatatttggaatgaaccactggaatttgatattaatatttgtgacttaccaagaatggctcgattatgttttgctgtttatgcagttttggataaagtaaaaacgaagaaatcaacgaaaactattaatccctctaaatatcagaccatcaggaaagctggaaaagtgcattatcctgtagcgtgggtaaatacgatggtttttgactttaaaggacaattgagaactggagacataatattacacagctggtcttcatttcctgatgaactcgaagaaatgttgaatccaatgggaactgttcaaacaaatccatatactgaaaatgcaacagctttgcatgttaaatttccagagaataaaaaacaaccttattattaccctcccttcgataagattattgaaaaggcagctgagattgcaagcagtgatagtgctaatgtgtcaagtcgaggtggaaaaaagtttcttcctgtattgaaagaaatcttggacagggatcccttgtctcaactgtgtgaaaatgaaatggatcttatttggactttgcgacaagactgccgagagattttcccacaatcactgccaaaattactgctgtcaatcaagtggaataaacttgaggatgttgctcagcttcaggcgctgcttcagatttggcctaaactgcccccccgggaggccctagagcttctggatttcaactatccagaccagtacgttcgagaatatgctgtaggctgcctgcgacagatgagtgatgaagaactttctcaatatcttttacaactggtgcaagtgttaaaatatgagccttttcttgattgtgccctctctagattcctattagaaagagcacttggtaatcggaggatagggcagtttctattttggcatcttaggtcagaagtgcacattcctgctgtctcagtacaatttggtgtcatccttgaagcatactgccggggaagtgtggggcacatgaaagtgctttctaagcaggttgaagcactcaataagttaaaaactttaaatagtttaatcaaactgaatgccgtgaagttaaacagagccaaagggaaggaggccatgcatacctgtttaaaacagagtgcttaccgggaagccctctctgacctgcagtcacccctgaacccatgtgttatcctctcagaactctatgttgaaaagtgcaaatacatggattccaaaatgaagcctttgtggctggtatacaataacaaggtatttggtgaggattcagttggagtgatttttaaaaatggtgatgatttacgacaggatatgttgacactccaaatgttgcgcttgatggatttactctggaaagaagctggtttggatcttcggatgttgccttatggctgtttagcaacaggagatcgctctggcctcattgaagttgtgagcacctctgaaacaattgctgacattcagctgaacagtagcaatgtggctgctgcagcagccttcaacaaagatgcccttctgaactggcttaaagaatacaactctggggatgacctggaccgagccattgaggaatttacactgtcctgtgctggctactgtgtagcttcttatgtccttgggattggtgacagacatagtgacaacatcatggtcaaaaaaactggccagctcttccacattgactttggacatattcttggaaatttcaaatctaagtttggcattaaaagggagcgagtgccttttattcttacctatgatttcatccatgtcattcaacaaggaaaaacaggaaatacagaaaagtttggccggttccgccagtgttgtgaggatgcatatctgattttacgacggcatgggaatctcttcatcactctctttgcgctgatgttgactgcagggcttcctgaactcacatcagtcaaagatatacagtatcttaaggactctcttgcattagggaagagtgaagaagaagcactcaaacagtttaagcaaaaatttgatgaggcgctcagggaaagctggactactaaagtgaactggatggcccacacagttcggaaagactacagatcttaa

SEQ ID NO: 29697 - DNA, 3632 bp, Homo Sapiens
cgcggcgctgcggaaccggagctccgggcggcgtcggcagcggcgcgagaggcgacgaggcccgggcggcaggagccggcgcggcgaccgcggcgagggcggcggggacggagcagagcacgacgaagacgcacaggcagccgggccgggccgggccacggggagagcggccggcgggcagcgggcgggaggccgggcgggccgcgggcagccaccgagccgcgaagcgacatggtgctgctcaaggagtatcgagtaatcctgcctgtgtctgtagatgagtatcaagtggggcagctgtattctgtggctgaggccagtaaaaatgaaacgggtggtggcgaaggcgtggaggtcctggtgaatgagccctacgagaaggacggtgagaaaggccagtacacacataagatctaccacctgcagagcaaagtacccacgtttgttcgaatgctggccccagagggagccctgaatatacacgagaaagcctggaatgcttacccctactgcagaaccgttattacaaatgagtacatgaaagaagactttctgattaaaattgaaacctggcacaaaccagatcttggcacgcaggagaatgtgcataagctggagcctgaggcgtggaaacacgtggaagccgtatatatagacattgcagatcgaagccaagtgctcagcaaggattacaaggcagaggaagacccagcaaaatttaaatctatcaaaacaggccgaggacccttgggccccaattggaagcaagagcttgtaaaccagaaggactgcccatatatgtgtgcatacaaactggtgaccgtcaagttcaagtggtggggcctgcagaacaaagtggagaacttcatccataagcaagagaggcgtctgtttacaaacttccacaggcagctgttctgttggctcgataagtgggttgacctgaccatggacgacattcgaaggatggaagaagagacgaagagacagctggatgaaatgagacaaaaggacccagtgaaaggaatgacagcagatgactaaagccgcctttcccctctgcactttttgcaagacagtggtcaacaggaagacccagcagctccaccctcccaagtgacaggccattttcggacgcagccgttctgtgcccattcttcaggcaactttcgattccttactgtagctaattctagatgcccttcagtattgtgaacaaatagaccgtctggtgtcacagagcccgcgtgtgcaggagcctgctcctccgagatacgtggcgtgtaggttgctgtagttacagcgcctccgtctctctccattgtgttccgacccatttctgtgtgttcccccaacctttatttccaagtgacattttcagtctttcaaatagctgccttttgtgatgtggtgatttaaatgatttaagttcatttgttctcaaccttggggtaaactgaggtattttgcttcctgggaagatctttgcaattttgagtgctcctgtggggagcggggatgagctaaagatacaatgtttccctgccccgcaccgcttccacaaaatagcaatgtggttttgcagctctgacttctgctcccagtaacccatcgttagggcactctagcactatggaggtacccaaggctcagccagtctctatttaagaaaatttaacaaatacgagtaaccctgtcccaatcactgaatctctagttactactcttagaaacacctgtggcttcttggccctcctgttgcccgctctgaatctctctgcagtctacaaaatcgccccagtcaactctccacttggagggaattgtccagtgtggcccctagaattgagtcaccccctagataccaactgtctgaccccgaggagctctgtaagtccctgctcctcctcttccctttggggctggtgctgccactcagcaataatcctcttttctctgtgctttcttaggtccctgtcctctgtctttgaggctggttaggaagcaagagtcctgatctttcatgctgcacaatatgagcatgcaaaaagctttttccagcagaacatgttccctcatctccagttgccggaaaggaatttggggatcaagaacttagctcgtcctacccccatgttgagttctgccctggaaaacccaaagcaagtagtgatcatagtacagaacccgaccaaagtaggctggtgaggaagtccaggctccaggggaacagacgctgcccagtgttcatagcttcctgcaacttgacagagcctgagtttgcctcttagtgggagaatcagagagagctgtagtgtcacctgacattccccaaaccttgtgaagcacgttggcctaagtgtgccgtgatcccagcccacactagcctgggtgcatctgctaatgggagaccaaatctttgtccgggaagcaagaagtgggtgggagaatgtatcctgtttttgtcagtttgtttgccttactcatttctaagtgcaataagggagtgtctcacaggattgcacctgtgacatcctgatgatgcttccctgtggccctcctggggcaagggtggacagactcagacccccagcatggttagcgctgaccttcattgaggtccctttggaaccagatgtcttgttacagacaccttcctctgtgtaagtctcctcaccttgaggggtctttagtaatgcatctgggtagcatctcaactgctggtagcatttatctgacttggaaagttggagaagaggcattcctactggagaaaaatgtcagtgttttcctataagctctgtgttagctattcattatatttgtgcttaaagatgttccttcattcatcaactaggggaagtccagatgcgggttatcttgaaagaaacaaactgacattctaggcagacagttgtctatgtggtctgagggtcagcagctgttagtctccttcctttggctcttgagacccacacatatcactttagccctaacaagggctcctcccacctccacctgttgccccagttgaaaagcatccattatgagctgaggtcagcctggatctggaattgcagcccacataaacataaaggaggatgtccctggtctgttccatccccacggatggtgttgctgctgggcaacagtgttggcttcttttaagtaccccctttcctcctcacccacctccaaactgactagcactcagagggacttatgataaaggttcagctccaggggtagtacctgagtgtgtgccatgccccttcagaccagctgcttccatcagaattccagggtcacagccccaacagaagcagcagtgcctctgtaggaggggtgctgggctctggccttctcatgcagagaggtccgggacagggtcagtatcgtgggcatgtgtatagcttcccaagttcttttacagtccctgctgggactccctgacttactttggttggttcctagtgctacttgttttacaaactacactttgtagaattgattagattaccttgtttatttaatgtgagtttgtgcctttttgtctcaatcttccaatacaggtatattgagaaaaaaagcagtctaataaaatcctagacagaaaaaaaaaaaaaaaaaaa

SEQ ID NO: 29698 - DNA, 5093 bp, Homo Sapiens
gcgcagactcagttcctggagaaagatggcgacagccgagaagcagaaacacgacgggcgggtgaagatcggccactacattctgggtgacacgctgggggtcggcaccttcggcaaagtgaaggttggcaaacatgaattgactgggcataaagtagctgtgaagatactcaatcgacagaagattcggagccttgatgtggtaggaaaaatccgcagagaaattcagaacctcaagcttttcaggcatcctcatataattaaactgtaccaggtcatcagtacaccatctgatattttcatggtgatggaatatgtctcaggaggagagctatttgattatatctgtaagaatggaaggctggatgaaaaagaaagtcggcgtctgttccaacagatcctttctggtgtggattattgtcacaggcatatggtggtccatagagatttgaaacctgaaaatgtcctgcttgatgcacacatgaatgcaaagatagctgattttggtctttcaaacatgatgtcagatggtgaatttttaagaacaagttgtggctcacccaactatgctgcaccagaagtaatttcaggaagattgtatgcaggcccagaggtagatatatggagcagtggggttattctctatgctttattatgtggaacccttccatttgatgatgaccatgtgccaactctttttaagaagatatgtgatgggatcttctatacccctcaatatttaaatccttctgtgattagccttttgaaacatatgctgcaggtggatcccatgaagagggccacaatcaaagatatcagggaacatgaatggtttaaacaggaccttccaaaatatctctttcctgaggatccatcatatagttcaaccatgattgatgatgaagccttaaaagaagtatgtgaaaagtttgagtgctcagaagaggaagttctcagctgtctttacaacagaaatcaccaggatcctttggcagttgcctaccatctcataatagataacaggagaataatgaatgaagccaaagatttctatttggcgacaagcccacctgattcttttcttgatgatcatcacctgactcggccccatcctgaaagagtaccattcttggttgctgaaacaccaagggcacgccatacccttgatgaattaaatccacagaaatccaaacaccaaggtgtaaggaaagcaaaatggcatttaggaattagaagtcaaagtcgaccaaatgatattatggcagaagtatgtagagcaatcaaacaattggattatgaatggaaggttgtaaacccatattatttgcgtgtacgaaggaagaatcctgtgacaagcacttactccaaaatgagtctacagttataccaagtggatagtagaacttatctactggatttccgtagtattgatgatgaaattacagaagccaaatcagggactgctactccacagagatcgggatcagttagcaactatcgatcttgccaaaggagtgattcagatgctgaggctcaaggaaaatcctcagaagtttctcttacctcatctgtgacctcacttgactcttctcctgttgacctaactccaagacctggaagtcacacaatagaattttttgagatgtgtgcaaatctaattaaaattcttgcacaataaacagaaaactttgcttatttcttttgcagcaataagcatgcataataagtcacagccaaatgcttccatttgtaatcaagttatacataattataaccgagggctggcgttttggaatgcaatttgcacagggattggaacatgatttatagttaaaagcctaatatgcagaaatgaattaagatcattttgttgttcattgtgcagtatgtatatagcataatatacacagtgaattataggtctcaggcttacttgatttttggctattttatatttagtgtacacagggctttgaaatattaatttacataaaggccttcatatattattacgtgttatatattacgtgttataaatttattcaataaatatttgcctagaattcccaagacctttataggtgattttgttttctgggctccttaacttcataaatagctagtatcttccagcagtagtaacagtctggataacttcttccatatccctccctctttgtttttttgagacagtgtcactttgtcacccaggctggagtgcaatggtgtggtctcggctcactgcaacctccacctcccgggttcaagtgattctcccgcctcagcttcctgagtagctggaactacaggcgtgtgccaccacacccggctaatttttcgtatttttagtgtagacggggtttcactatgttgcccaggctggtctcgaactcctgaccgcgtgatccaccacctcagcttcccaaagtggtgggattacaggcgtgagccaccgcacccggcctccatatcccccttttaaaattctgtagtgtatggtaagtcatatcagatatcagacctaatttaaatttcattttagctttacaagtccaaaaacacagaatttatatattcagatactctagcactaattttagtcttaaaatattcccacgatattctgtacacaaaatgttctttttgttacaagagctgagttgcatatactgtagataaatcatattatttttgccaatttcacaaattcctctggcccatcatgtcagtcattattgagtatatgcacacattgctacttatttgattatgtatcttttaaattgattcagtgcatagaaaactatctcttacaaactttaagtgctctgatatgacttcccccccaaattttattatgaacatttttaaaaacagaaaaattgaaaaactgtttggtaagcacatgtatatctaccatttagattcagcagttgttaatgttttgtcatttgttttctctatacctatatatgtatagatacagctagttatgcatatatatgcatatatgtgtttgtttgtgtatgtatatatgcttttttccccctgaaccatttggatgttacagacatacttatcaccgtgaaaatacttcaagtatctcctacagataatgacattctcctaaaaatccgtaataccattgtaaaagtaataattccccaatatcatctaatcaagccatatttaaatttctgaagttaactccaaatttctttatagctgattatttcaaactaggatccaattaaagtttacatatgacacttggttataactctttagttggatataacattattattattttgataaaatatggaacaaatcaattctattaataagtggtcacatttgttttgggcttaaattactttttaaagatactggattttcctaagatttctgatttacactgatatttttttttgtcattcttaattgcatcacacaatagatgtaaatgaagatgtagtcacctcagataaaattggtatcgtgtatgataatattgtatcatttatatttgccttatgttaactttaagaaattgatttttttgtattaatcattttcccattgcaacagagctatattttttctattttaagaatcatattttaggattatttttggcaaatacagtgagcacttatgtaaccagatgataatgaactcaaatgtcatgatagcttgcataaatggtgactctagtagatttgactcaagcacttctagaatcatgcactgaattcaaaagaaaaatcttgctgctttttgtccagggcttgttctattcaacttctaatttgaaagctgtacaaagtaatagaagttccatttaaatatgagttcaaaactgtatttactttttatgtggccctctctttaggggattctaattttacttagggtctctaagtgcagcataatgttcctgatgttaacagaagactgtatttttaaagttacaaatttgtatatggaattaagtaatggcgctatatacgctgttgtggggaggggggaagaaaaggaggaaccaattaaataggaccttttaaaaattgttaattttgtaaactttgcttctcttataagttattgtgattcattttagttactgtgttttattttgaaaatatttaaatattgcacttctataaatagtatgataaatgcacagacaattgcagtaaattcttttttaagctaggatatttgaaatgacaacctttggttaagtgtgtcaaggttgcaacagaattttcacaatttttttgttgtttgcaaattgttactaatattgaagaggtaagggaggcaatgcaaatgatttttaatctttttttattatcttttcagcagtttatattttttgtgactttatgcaaccatatttttactttgtcttgacaactgaaagatgtataaggttttttgccagaaatgtactgtatacatagttttaagtataacagattttactgatatgtaaaaattttgccattaaaataaatgatttctcactgagaggaacttttctaccaggttggggcatatgggagcttaatatatcatatctaatttaaaataatttcactgaaataaactccattgcttttacctaatttttttcttgagatgcttttgtagtttttcagagttttagatgattttatacaaaatcctctgcctagcactgctctttttgatgttgtagtgacaccatttacattgaattaatgcttggtagcctggggctagatgtggaactccatggatctgtgttctgactggcacctttggaatgaaagaaaagtgtgtgctgtccaaattttttccccttaattctttccctcatcttctcacccataatagaaattttatttccattgtgagttctgacaagaatgaaattccacatacaacataactgtaaattgttggtaggtagaagttaatatttgtggttcatgtatattttgaccagagtatatttaagtatataatttcagcttccttgatttagaaatatgatataataaagaaaaactccatttatcatctgttaaaaaaaaaaaaaaaaa

SEQ ID NO: 29699 - DNA, 3522 bp, Homo Sapiens
aggggcgagtcctgcgcgagtccccgggaggcgccgcgcgcttggaagggacggtcgggcttccccggcccgctgagggctcggcggcgggctcccctcctttccacctcgggagggagggaaggaggggagggaaaagtcccacggaggaggcagaatggccagtcgaggggcgcttaggcgctgcctttccccagggctgcctcgactcctgcacctgtcccgagggctggcctgagacgggactcccggttctcccgctgcgaagcagcgcggccccccggggccggggcagcggcgccggcatgtcgtctggcaccatgaagttcaatggctatttgagggtccgcatcggtgaggcagtggggctgcagcccacccgctggtccctgcgccactcgctcttcaagaagggccaccagctgctggacccctatctgacggtgagcgtggaccaggtgcgcgtgggccagaccagcaccaagcagaagaccaacaaacccacgtacaacgaggagttttgcgctaacgtcaccgacggcggccacctcgagttggccgtcttccacgagacgcccctgggctacgaccacttcgtggccaactgcaccctgcagttccaggagctgctgcgcacgaccggcgcctcggacaccttcgagggttgggtggatctcgagccagaggggaaagtatttgtggtaataacccttaccgggagtttcactgaagctactctccagagagaccggatcttcaaacattttaccaggaagcgccaaagggctatgcgaaggcgagtccaccagatcaatggacacaagttcatggccacgtatctgaggcagcccacctactgctctcactgcagggagtttatctggggagtgtttgggaaacagggttatcagtgccaagtgtgcacctgtgtcgtccataaacgctgccatcatctaattgttacagcctgtacttgccaaaacaatattaacaaagtggattcaaagattgcagaacagaggttcgggatcaacatcccacacaagttcagcatccacaactacaaagtgccaacattctgcgatcactgtggctcactgctctggggaataatgcgacaaggacttcagtgtaaaatatgtaaaatgaatgtgcatattcgatgtcaagcgaacgtggcccctaactgtggggtaaatgcggtggaacttgccaagaccctggcagggatgggtctccaacccggaaatatttctccaacctcgaaactcgtttccagatcgaccctaagacgacagggaaaggagagcagcaaagaaggaaatgggattggggttaattcttccaaccgacttggtatcgacaactttgagttcatccgagtgttggggaaggggagttttgggaaggtgatgcttgcaagagtaaaagaaacaggagacctctatgctgtgaaggtgctgaagaaggacgtgattctgcaggatgatgatgtggaatgcaccatgaccgagaaaaggatcctgtctctggcccgcaatcaccccttcctcactcagttgttctgctgctttcagacccccgatcgtctgttttttgtgatggagtttgtgaatgggggtgacttgatgttccacattcagaagtctcgtcgttttgatgaagcacgagctcgcttctatgctgcagaaatcatttcggctctcatgttcctccatgataaaggaatcatctatagagatctgaaactggacaatgtcctgttggaccacgagggtcactgtaaactggcagacttcggaatgtgcaaggaggggatttgcaatggtgtcaccacggccacattctgtggcacgccagactatatcgctccagagatcctccaggaaatgctgtacgggcctgcagtagactggtgggcaatgggcgtgttgctctatgagatgctctgtggtcacgcgccttttgaggcagagaacgaagatgacctctttgaggccatactgaatgatgaggtggtctaccctacctggctccatgaagatgccacagggatcctaaaatctttcatgaccaagaaccccaccatgcgcttgggcagcctgactcagggaggcgagcacgccatcttgagacatcctttttttaaggaaatcgactgggcccagctgaaccatcgccaaatagaaccgcctttcagacccagaatcaaatcccgagaagatgtcagtaattttgaccctgacttcataaaggaagagccagttttaactccaattgatgagggacatcttccaatgattaaccaggatgagtttagaaacttttcctatgtgtctccagaattgcaaccatagccttatggggagtgagagagagggcacgagaacccaaagggaatagagattctccaggaatttcctctatgggaccttcccagcatcagccttagaacaagaaccttaccttcaaggagcaagtgaagaactctgtgaaggatggaactttcagatatcaactatttagagtccagagggagccatggcactagaaatagttgataatgaaatgagattttatgaagtataccgctccacctatgagcgtctgtctctgtgggcttgggatgttaacaggagccaaaaggagggaaagtgtgaagaataaagtagatctgagaaattctgagccaatcaggcttcttaattcaagagacaaaccaagacgttctgtcaactgtgctgtgctcttctttaagccaatgaaccccaattcctggcagtctacaagaagtctcttaatgctaatgaagaatttaaaggtctttttaaggaaatgaagggctttccaaatagaatgatttactctgaagaaacaaacaatggtatctctgaaactcacaacctaaagcccaatcttgaaaatatgttgtgcaccaagacgactgcttcagcttcttctcttatccttactttctttaatagatatttattaaactgtccagtgaaaaggtgccacaatgcccagtattgtaaacaacaggtttgcattcatgaagctttcattcattctggagtctactaatttacctgaatggtgtttgcattctgtgaaatgcctctccacgttgcatatgtcacacttttgtctgcacataactcttttttcacaagaagggtcactgccacaacagcacagtcagcgggtgaattacaggtgcctgctgcctgcctacctgggtaatctgatcttgtctgtatcgccgtgtgctcatcactgaagaattgcaggccactcatgtcagtgaccagatttgtggcttataaacattagcagtttatttatgttttaagatgcaaagatgtgtgtttgatattcactttaataattagaaatggatcttgtaaacagggcatatatcaaagatgaccttataatatgtacccgaatatacagttcaagaattttgtctgactggaaataaatgcattttgtagcaaaaggaaaaaaaaaaaaaaaaaa

SEQ ID NO: 29700 - DNA, 3255 bp, Homo Sapiens
ggagcgcaaatggcgtccaaccccgaacggggggagattctgctcacggaactgcagggggattcccgaagtcttccgttttctgagaatgtgagtgctgttcaaaaattagacttttcagatacaatggtgcagcagaaattggatgatatcaaggatcgaattaagagagaaataaggaaagaactgaaaatcaaagaaggagctgaaaatctgaggaaagtcacaacagataaaaaaagtttggcttatgtagacaacattttgaaaaaatcaaataaaaaattagaagaactacatcacaagctgcaggaattaaatgcacatattgttgtatcagatccagaagatattacagattgcccaaggactccagatactccaaataatgaccctcgttgttctactagcaacaatagattgaaggccttacaaaaacaattggatatagaacttaaagtaaaacaaggtgcagagaatatgatacagatgtattcaaatggatcttcaaaggatcggaaactccatggtacagctcagcaactgctccaggacagcaagacaaaaatagaagtcatacgaatgcagattcttcaggcagtccagactaatgaattggcttttgataatgcaaaacctgtgataagtcctcttgaacttcggatggaagaattaaggcatcattttaggatagagtttgcagtagcagaaggtgcaaagaatgtaatgaaattacttggctcaggaaaagtaacagacagaaaagcactttcagaagctcaagcaagatttaatgaatcaagtcagaagttggaccttttaaagtattcattagagcaaagattaaacgaagtccccaagaatcatcccaaaagcaggattattattgaagaactttcacttgttgctgcatcaccaacactaagtccacgtcaaagtatgatatctacgcaaaatcaatatagtacactatccaaaccagcagcactaacaggtactttggaagttcgtcttatgggctgccaagatatcctagagaatgtccctggacggtcaaaagcaacatcagttgcactgcctggttggagtccaagtgaaaccagatcatctttcatgagcagaacgagtaaaagtaaaagcggaagtagtcgaaatcttctaaaaaccgatgacttgtccaatgatgtctgtgctgttttgaagctcgataatactgtggttggccaaactagctggaaacccatttccaatcagtcatgggaccagaagtttacactggaactggacaggtcacgtgaactggaaatttcagtttattggcgtgattggcggtctctgtgtgctgtaaaatttctgaggttagaagattttttagacaaccaacggcatggcatgtgtctctatttggaaccacagggtactttatttgcagaggttaccttttttaatccagttattgaaagaagaccaaaacttcaaagacaaaagaaaattttttcaaagcaacaaggcaaaacatttctcagagctcctcaaatgaatattaatattgccacttggggaaggctagtaagaagagctattcctacagtaaatcattctggcaccttcagccctcaagctcctgtgcctactacagtgccagtggttgatgtacgcatccctcaactagcacctccagctagtgattctacagtaaccaaattggactttgatcttgagcctgaacctcctccagccccaccacgagcttcttctcttggagaaatagatgaatcttctgaattaagagttttggatataccaggacaggattcagagactgtttttgatattcagaatgacagaaatagtatacttccaaaatctcaatctgaatacaagcctgatactcctcagtcaggcctagaatatagtggtattcaagaacttgaggacagaagatctcagcaaaggtttcagtttaatctacaagatttcaggtgttgtgctgtcttgggaagaggacattttggaaaggtgcttttagctgaatataaaaacacaaatgagatgtttgctataaaagccttaaagaaaggagatattgtggctcgagatgaagtagacagcctgatgtgtgaaaaaagaatttttgaaactgtgaatagtgtaaggcatccctttttggtgaacctttttgcatgtttccaaaccaaagagcatgtttgctttgtaatggaatatgctgccggtggggacctaatgatgcacattcatactgatgtcttttctgaaccaagagctgtattttatgctgcttgtgtagttcttgggttgcagtatttacatgaacacaaaattgtttatagagatttgaaattggataacttattgctagatacagagggctttgtgaaaattgctgattttggtctttgcaaagaaggaatgggatatggagatagaacaagcacattttgtggcactcctgaatttcttgccccagaagtattaacagaaacttcttatacaagggctgtagattggtggggccttggcgtgcttatatatgaaatgcttgttggtgagtctccctttcctggtgatgatgaagaggaagtttttgacagtattgtaaatgatgaagtaaggtatccaaggttcttatctacagaagccatttctataatgagaaggctgttaagaagaaatcctgaacggcgccttggggctagcgagaaagatgcagaggatgtaaaaaagcacccatttttccggctaattgattggagcgctctgatggacaaaaaagtaaagccaccatttatacctaccataagaggacgagaagatgttagtaattttgatgatgaatttacctcagaagcacctattctgactccacctcgagaaccaaggatactttcggaagaggagcaggaaatgttcagagattttgactacattgctgattggtgttaagttgctagacactgcgaaaccaagctgactcacaagaagacctcttaaaaatagcaacccttcatttgctctctgtgccaccaatagcttctgagttttttgttgttgttgtttttattgaaacacgtgaagatttgtttaaaagtaccattctaatacttcttcaaaagtggctcctcattgtacttcagcgtaaatatgagcactggaaacagtttcatggagtttaagttgagtgaacatcggccatgaaaatccatcacgaatacttttggatcaatagtctatttt

SEQ ID NO: 29701 - DNA, 3273 bp, Homo Sapiens
agtccccgcgcagtccccgcgcagtcccagcgccaccgggcagcagcggcgccgtgctcgctccagggcgcaaccatgtcgccatttcttcggattggcttgtccaactttgactgcgggtcctgccagtcttgtcagggcgaggctgttaacccttactgtgctgtgctcgtcaaagagtatgtcgaatcagagaacgggcagatgtatatccagaaaaagcctaccatgtacccaccctgggacagcacttttgatgcccatatcaacaagggaagagtcatgcagatcattgtgaaaggcaaaaacgtggacctcatctctgaaaccaccgtggagctctactcgctggctgagaggtgcaggaagaacaacgggaagacagaaatatggttagagctgaaacctcaaggccgaatgctaatgaatgcaagatactttctggaaatgagtgacacaaaggacatgaatgaatttgagacggaaggcttctttgctttgcatcagcgccggggtgccatcaagcaggcaaaggtccaccacgtcaagtgccacgagttcactgccaccttcttcccacagcccacattttgctctgtctgccacgagtttgtctggggcctgaacaaacagggctaccagtgccgacaatgcaatgcagcaattcacaagaagtgtattgataaagttatagcaaagtgcacaggatcagctatcaatagccgagaaaccatgttccacaaggagagattcaaaattgacatgccacacagatttaaagtctacaattacaagagcccgaccttctgtgaacactgtgggaccctgctgtggggactggcacggcaaggactcaagtgtgatgcatgtggcatgaatgtgcatcatagatgccagacaaaggtggccaacctttgtggcataaaccagaagctaatggctgaagcgctggccatgattgagagcactcaacaggctcgctgcttaagagatactgaacagatcttcagagaaggtccggttgaaattggtctcccatgctccatcaaaaatgaagcaaggccgccatgtttaccgacaccgggaaaaagagagcctcagggcatttcctgggagtctccgttggatgaggtggataaaatgtgccatcttccagaacctgaactgaacaaagaaagaccatctctgcagattaaactaaaaattgaggattttatcttgcacaaaatgttggggaaaggaagttttggcaaggtcttcctggcagaattcaagaaaaccaatcaatttttcgcaataaaggccttaaagaaagatgtggtcttgatggacgatgatgttgagtgcacgatggtagagaagagagttctttccttggcctgggagcatccgtttctgacgcacatgttttgtacattccagaccaaggaaaacctcttttttgtgatggagtacctcaacggaggggacttaatgtaccacatccaaagctgccacaagttcgacctttccagagcgacgttttatgctgctgaaatcattcttggtctgcagttccttcattccaaaggaatagtctacagggacctgaagctagataacatcctgttagacaaagatggacatatcaagatcgcggattttggaatgtgcaaggagaacatgttaggagatgccaagacgaataccttctgtgggacacctgactacatcgccccagagatcttgctgggtcagaaatacaaccactctgtggactggtggtccttcggggttctcctttatgaaatgctgattggtcagtcgcctttccacgggcaggatgaggaggagctcttccactccatccgcatggacaatcccttttacccacggtggctggagaaggaagcaaaggaccttctggtgaagctcttcgtgcgagaacctgagaagaggctgggcgtgaggggagacatccgccagcaccctttgtttcgggagatcaactgggaggaacttgaacggaaggagattgacccaccgttccggccgaaagtgaaatcaccatttgactgcagcaatttcgacaaagaattcttaaacgagaagccccggctgtcatttgccgacagagcactgatcaacagcatggaccagaatatgttcaggaacttttccttcatgaaccccgggatggagcggctgatatcctgaatcttgcccctccagagacaggaaagaatttgccttctccctgggaactggttcaagagacactgcttgggttcctttttcaacttggaaaaagaaagaaacactcaacaataaagactgagacccgttcgcccccatgtgacttttatctgtagcagaaaccaagtctacttcactaatgacgatgccgtgtgtctcgtctcctgacatgtctcacagacgctcctgaagttaggtcattactaaccatagttatttacttgaaagatgggtctccgcacttggaaaggtttcaagacttgatactgcaataaattatggctcttcacctgggcgccaactgctgatcaatgaaatgcttgttgaatcaggggcaaacggagtacagacgtctcaagactgaaacggccccattgcctggtctagtagcggatctcactcagccgcagacaagtaatcactaacccgttttattctattcctatctgtggatgtgtaaatggctggggggccagccctggataggtttttatgggaattctttacaataaacatagcttgtaacttgagatctacaaatccattcatcctgattgggcatgaaatccatggtcaagaggacaagtggaaagtgagagggaaggtttgctagacaccttcgcttgttatcttgtcaagatagaaaagatagtatcatttcacccttgccagtaaaaacctttccatccacccattctcagcagactccagtattggcacagtcactcactgccattctcacactataacaagaaaagaaatgaagtgcataagtctcctgggaaaagaaccttaaccccttctcgtgccatgactggtgatttcatgactcataagcccctccgtaggcatcattcaagatcaatggcccatgcatgctgtttgcagcagtcaattgagttgaattagaattccaaccatacattttaaaggtatttgtgctgtgtgtatattttgataaaatgttgtgacttcatggcaaacaggtggatgtgtaaaaatggaataaaaaaaaaaaaagagtcaaaaaaaaaaaaa

SEQ ID NO: 29702 - DNA, 3738 bp, Homo Sapiens
ctggcgcgcgcgcgcgccattgtgtggctggactcggccgcccctgtggtgtgaggcgcgtgttcgggctcttgccgtccccgcacccgcaccgcggttactggcttgcggtccgccgttcgacaaccagcccttgggtccccgcccgccacggacatgccgcgcgtctacataggacgcctgagctacaacgtccgggagaaggacatccagcgctttttcagtggctatggccgcctcctcgaagtagacctcaaaaatgggtacggcttcgtggagttcgaggactcccgcgacgccgacgacgccgtttacgagctgaacggcaaggagctctgcggcgagcgcgtgatcgtagagcacgcccggggcccgcgtcgcgatcgcgacggctacagctacggaagccgcagtggtggaggtggatacagcagtcggagaacatctggcagagacaaatacggaccacctgttcgtacagaatacaggcttattgtagaaaatctttctagtcggtgcagttggcaagatttaaaggattttatgcgacaagcaggtgaagtaacctatgcggatgcccacaaggaacgaacaaatgagggtgtaattgagtttcgctcctactctgacatgaagcgtgctttggacaaactggatggcacagaaataaatggcagaaatattaggcttattgaagataagccacgcacaagccataggcgatcttactctggaagcagatccaggtctcgatctagaagacggtcacgaagtaggagtcgcaggagcagccgcagtagatctcgaagtatctcaaaaagtcgctcccgttccaggtcgcggagcaaaggtcgatcacgttctcgatcaaaaggcaggaaatctagatcaaagagcaaatctaagcccaagtctgatcggggctcccattcacattctcgaagcagatctaaggatgagtatgagaaatctcgaagcaggtctcggtcccgatcccccaaagaaaatggaaagggtgatataaagtcaaaatccagatcaaggagccagtcccgttccaattcgccgctacctgttccaccctcaaaggcccgttctgtgtcccctccaccaaaaagagctacttcaagatcccgttctagatctcgctcaaagtcaagatcaaggtccaggtcgagttccagagattaactcagaactccttgtttgcacattattatggaacactttcctacttaggcagttactcttccatgtttatacttggcctcttctgcaagaggaatctcttgaaaacaggggcacacagaaatttgatttgtggccaaattggatgaaaaagatgaggctctaaggaaatggtggcatgaagaccctctcccttctttgtagaattaagataactttgattttatagcttttgagctaacgtaacttttgtaaagattaagctcatttagtgttgttttttttttttttttttttttttttttttagtatttcagcaggatctgctggcagggtttttttgttttatttgtttgcttatttttaaattaactgttttgagctttgaatacttaaggctttagagggagaacccaattttcaattatgttggctttttataaagcttgagttatgtaagatttaaataaaagtttgctaccaagatgattgccttattgaataggtcactattaaattcctttaaatgttgatatctgccatttgtggaaacaacgtaaattctacttaagtgtaaacaaggcaagcctcagaccagcaataaattactcagtttggataacattattttgtgcagttaatcaaatttgccaaagtctttatctgcccctttaacaagttgagtaaaaataaaaggtattttttagtcaatgtgttccatgattttgcttaaattaatacttttaagtaatggaacttttttcaaaggcaaatttaaactatttaagaaatagctcctaatacttgggatcttgtttagagaatccactttctggaagttctcagcataattagtgttgagagtggttcagttgtctttaatgtttgtcatgtggaaatggaagtagcctctttttgttctgaaattgagtttattcaaagtgtaaaagcacatactgcattttctgctgaaagatcattatgtttaacaggcacttaatctcagtaaagtcagttgccagttaagttccacccagtagtcagtcccctttgtagttagtgggattatttgataattggttagatcatacttgtaaattttaatgctttgtgtaattggtttgaaaaacagtgaaatgggtaaacgcaaaacttttgtactttattacgagtaaagtgtaatgagtactgtggaaaccaaatttgaatactgcaaatttgtaggagttactaggttagcaattagtccatacatccataagcctgatgagttgaaattgcagtttgagaagtgaattaaccttacatccctttgttcagataccttaaaagttactttatttaaaagcatttattaatcttagtctgaaatcaaaatatagattaattggctcagctttaatacctttctaggaggtgtcacaatgtagggtaccaagggttggattgtgatggggcatggtcgtacactgctcattgtgccacaggtgtgactggaaagcatgatattctagggttggtttgtagattcaaataatccagaaatatacctaataagattgagtgaaaaatttgagtcaaatatctagggcattcacagagtagctgtgagttcttggtaatgtgaaaaaggccttgtttttcagaaattcctgggtttcctgttaaaaaatcttaaagcccaaccttaggaatatagtgccccaaaaggcggatgcttcttccattatcttattttctttgatactttatttaattagatgtttataaagaaatgggtttatttttccagcataaacctcagaatttaaggaaagaaaatgatgtctgttgttatagttcattgttttgcctactcagcagaagtgatgactcttaaaaattggctttgaccaaagttctcttgttttcagggaaagaacataaaagctttttgaactacagcctttttaaaagagggatgggaggatattacagtaagaaattaggctttctaaaagtatgaaacatccttcaactgggctctcttgttaataggacatcatatggtaatagactggtttgactatattgttagctgccacagtaagcaggtcattgtataggtaaatgcctgcacccataattttctagtaatagccacgaccaatttattaacagtcagggcctatccttgcctgtagttctcagtcactggatgcacaaaatcactgtgtaacattggctcacttggtgagcatagggttgactgataaaatgtttaattcccttgctagcttgtgagaagaatgagttgatgacatgctccataccagtggctagatggagtattaaggtggagcagaaaagaagtgagaacatcttgattcccctttcttttacttgatggtgtttatgaacatgccgtagtgcctttatggccagtttgagtcctgcctactttgacttttacgttcccattcctgtgttaccaccttcctcccgatttgttcacctattttgtgctttaaatctcaataaaatacttactgaggaaaaaaaaaaaaaaaa

SEQ ID NO: 29703 - DNA, 2754 bp, Homo Sapiens
actcgagccctgggcgctgcttgctaaagagccgagcacgcgggtctgtcatcatgtcgcgttacgggcggtacggaggagaaaccaaggtgtatgttggtaacctgggaactggcgctggcaaaggagagttagaaagggctttcagttattatggtcctttaagaactgtatggattgcgagaaatcctccaagatttgcctttgtggaattcgaagatcctagagatgcagaagatgcagtacgaggactggatggaaaggtgatttgtggctcccgagtgagggttgaactatcgacaggcatgcctcggagatcacgttttgatagaccacctgcccgacgtccctttgatccaaatgatagatgctatgagtgtggcgaaaagggacattatgcttatgattgtcatcgttacagccggcgaagaagaagcaggtttcttcgtttgagtcagtcgccttgattcagaatgtcacgagccttatgatatcatgctgaggcgccttgcaaatccgacaattaagatcctcctagaccttgaggtgatcagcataagaggccagatcccctcgagtcatctacacctagcttcaccttattctttaaagggcagaaaatttgagacggtgatcgccgtaacagtaaatttggcttacaattggggcccccctccggtttagaaagaggaacaccagattgaccacattcccaactagaaaaatcttcttgcgtcaatcaagcctcacctggctcatttggctgtcagtttgatcgtcgttagattgaagaaaacatctagatgcagcgatcggctatagatacttctagatcgtctagatctactagaccatgggccaaagagggtcgacctgcaaacttgcaaggtcacggtctagatcacattctcgatccagaggaaggcgatactctcgctcacgcagcaggagcaggggacgaaggtcaaggtcagcatctcctcgacgattaagatctatctctcttcgtagatcaagatcagcttcactcagaagatctaggtctggttctataaaaggatcgaggtatttccaatccccgtcgaggtcaagatcaagatccaggtctatttcacgaccaagaagcagccgatcaaagtccagatctccatctccaaaaagaagtcgttccccatcaggaagtcctcgcagaagtgcaagtcctgaaagaatggactgaagctctcaagttcaccctttagggaaaagttattttgtttacattattataagggatttgtgatgtctgtaaagtgtaacctaggaaagataattcaaccatctaatcaaaatggatctggattactatgtaaattcacagcagtaagataatataaattttgttgaatgtattaacatcatatggtctgaaaatgtgggtttttatttggcacatttaaataaaatgtttctaactagatttttgatttgtgttcaatattaacacttcttaatttgatatatttgagagtcagacattataattgttaaccttattcatacatacctacattcagaattgaaaggtgttggttaagtcttgaacatcactattctatgcataaaacttggccaggatcttaagggactttgaaaattccatcttacccttgtagctctgggtaagatgacctgagtcccttatgatacagcctgaatgcatcatgacagatccttaagttagctaatccgtttgaagttggtgttagtaggtattgtatgatcagtggtgaagcaagtaggaccactgatgtgtctaaatgagcatgacaggaactaaacgaaactgattaaatgtatgagaaatagaaactgatttctggatgatctttatactaattgcagctttcaggctactaggtggcatagtgttaattaggactccccaagatatggggagttctactctcaatggtcttgtttctttgctttctacattagttaaccagttttataccaaaaaatgcatgtttgaggaattgtctgaaattgggacaaaacaccttcatgtaaaccagctttgcaaaattttccagcccagatactcttcatctattcaaatggattgtcttattctgagcaaagacctgttgttaatcttcaagctaggttttgcagttcccaaccacaacattcttctattttgccaggctggtgcaaagtaattaaagatgtcaatcagaaatgtcaatgagactaaagtggttttgtaaatctcagctatatttagcaacactccatgtagctaatattttttggtagcatctggtagaccttagaatgttacatagccagtaggttctttattcaaattttaagtatcttaagaatagtagggcagtaacagttacttttgagagttttctggtcaagcttttaccaggcattctctagccttggtacaaaaaaaaaaaaaacctgctggttgcgcagatacctaggcttgtccattttatgcatttcagcaaagtcattggatactattgcaacttgggaatactggtctgcatcaagtttattcggtagtttgaccgctagtatgttggaagttatttggattgtttttggaattttgactggctgaattatggttggtataaagttatgtgtataactggcaggcttatttatctgttgcacttggttagctttaattgttctgtattatttaaagataagtttactcaacaataaatctgcagagattgaacaaat

SEQ ID NO: 29704 - DNA, 6344 bp, Homo Sapiens
gcggaagtgtgggagggtctgcggggcgggctcaggaggtccgcgggaggatggagcagtgagcgggtctgggcggctgctggcagcgccatggagacggtacagctgaggaacccgccgcgccggcagctgaaaaagttggatgaagatagtttaaccaaacaaccagaagaagtatttgatgtcttagagaaacttggagaagggtcctatggcagcgtatacaaagctattcataaagagaccggccagattgttgctattaagcaagttcctgtggaatcagacctccaggagataatcaaagaaatctctataatgcagcaatgtgacagccctcatgtagtcaaatattatggcagttattttaagaacacagacttatggatcgttatggagtactgtggggctggttctgtatctgatatcattcgattacgaaataaaacgttaacagaagatgaaatagctacaatattacaatcaactcttaagggacttgaataccttcattttatgagaaaaatacaccgagatatcaaggcaggaaatattttgctaaatacagaaggacatgcaaaacttgcagattttggggtagcaggtcaacttacagataccatggccaagcggaatacagtgataggaacaccattttggatggctccagaagtgattcaggaaattggatacaactgtgtagcagacatctggtccctgggaataactgccatagaaatggctgaaggaaagcccccttatgctgatatccatccaatgagggcaatcttcatgattcctacaaatcctcctcccacattccgaaaaccagagctatggtcagataactttacagattttgtgaaacagtgtcttgtaaagagccctgagcagagggccacagccactcagctcctgcagcacccatttgtcaggagtgccaaaggagtgtcaatactgcgagacttaattaatgaagccatggatgtgaaactgaaacgccaggaatcccagcagcgggaagtggaccaggacgatgaagaaaactcagaagaggatgaaatggattctggcacgatggttcgagcagtgggtgatgagatgggcactgtccgagtagccagcaccatgactgatggagccaatactatgattgagcacgatgacacgttgccatcacaactgggcaccatggtgatcaatgcagaggatgaggaagaggaaggaactatgaaaagaagggatgagaccatgcagcctgcgaaaccatcctttcttgaatattttgaacaaaaagaaaaggaaaaccagatcaacagctttggcaagagtgtacctggtccactgaaaaattcttcagattggaaaataccacaggatggagactacgagtttcttaagagttggacagtggaggaccttcagaagaggctcttggccctggaccccatgatggagcaggagattgaagagatccggcagaagtaccagtccaagcggcagcccatcctggatgccatagaggctaagaagagacggcaacaaaacttctgagcaaggccaggctgtgagggccccagctccacccaggctttgggtgaattctggatggcttgcctcatgtttgttagccagcacttctgctctgtcgtctctccacagcacctttgtgaactcaggaatgtgcgccagtgggaagggctctcttgacagtcagcgtgccatcttgatgtgtgtatgtacattggtcaggtatattatctcaaaggatttatattggcgcttttaactcagagttttaaaccccaggaacagagactcctagttgagtgatagctgggaaagttttacattgtctgtttttcttctcccaatagctttcaattgttctttctggaagacttttaaaaaaatataaatatgcatatatatatataaattataaatagattccccacgcagtgtggtggcatctctgtacaggtacagttttaaacggtttgcctcttttctgtaagattatggtactgtggaacatgagggcagaggacaccgggaggctgttagggggtcactgaatcccaggagccaacctccccctttgcagggctgcatttaaaaattaggtttgggacagttcttgtaccgtggtttcagccttgtgtggtcatcactggcttctggagctattggtgatgtccaagggaaagctttgagagtttatgtttactctttgagtcccaggagaagcctggcaccctctttgcaaattggcctttgctctttcaatgcctttcatccatctccactctctcaactgcctaaagtcacagcacagatactgcccagtgccttaagaggagacatgatctctaccagggactctcagcaaacacgggactgtgttcagtccacaaaggaaaagcgtttttgaagctctcattgttcatgtaaaaatcatacacgtggcatgttgctccacattccttacacacaggggtagaggggattgcttttgtgacccacgttcaaatatgtgactgttttcttttctcttttactgctaagcagcctggaaaggataaatgaatattagactaagatttgttttccaggaggctcaatctgaacacacagaatgtcagagctggaagggactatagagatcatctgatctgatcctcttgtacggatgatcgcaaaactgaggtgtagagaggggaatggccaaaatcacaaagcaagttagcgttaagagctgagactagaattcagggtcctcactcccaggccaccgaaccatgcagccccttctttgggggaagagacctgtgtcagtcttggttaattgttccagggaaccttgctaacagaaacttgctcttgccttggctcttcagtagatgacctggctgtaaagagattccctggacgagccagatcattcagtttcagcgagtccttgagctccacaacatctaccagatatagcagacaagcacccatggaggcaggtttcgggcctgaagcagatcagagggctttgcaaaagacagcatagagccatcttcctgcaactttacctctttccctcagatggggagccatgactgggttgcacctcaggatactgtaatttgactccataattgcttttgctcctgaaacctgggaatcaatggaaaggcagggaatgtgcctcttctgtggccagattctgttatttgcaattaaagcaagtttttaaaaaatgcaagaggcagttgttagtcttcagggcttggcaactgaaatagctatgtggcggatacggaaaacagaggacaatttgaggatcttgctggaataataaatgacagctaccatttgttgagcacctattatatatcaggcactgagctgggtaggctctaaacttcacaataaccctgtgacttaactactttatctccattttgtagttgaagaaataagttcagagagaaagattccttcccaaggtcatgcagctagtaaatgatagaatcaggattcatagcatcactatagggggtcaatatttacacaaaaaaggaaagtcacaagcctgtttaaaatgaagtgaccaccttttcttgcatagactaaataactcgaactggcatttttaggttggaaagacagctgaattagtagttaagtctgatagccaagtaagttttaaaaaccaaagcatccaggatgcacacccctgcaccatttgctgtgcgaattaatagttctgtctctctctctctttcttttttctttttattctttgagatggattttcgctcttgtcgcccaggctggagtacaatggcacgatcttggctcactgcaacctccgcctcccgggttcaagcgattcttctgctgggattacagcatatgccaccatgcccagattatttttttgtatttgtagtagagacggggtttcaccatgtcagtcaggctggtcttgaactcctgacctcaggtgatccacccgcctcagcctcccacactgctgggattacaggcatgagccaccgctcctggcctctctttcttttttaaacaaagaactttgcacttggccagagaggaggagaaagcccattttctcccttcctaagctagatccaaataaaagaaagttcagttttcccccataactattcttgggtcatgaactttgatctggagtttgttttgtttcaggaatgtgtgcacccagcttgctgatccaacaaagtctattgcttaccagtctagcttgatgaagccttttggccagaagtcaatttgttttggatcagagaaatttcctgacaaggtatatttgttttctagtgacagaaaggcaaaggaacaagtcctagttgttgttgttgttgttgaatactaaatttaagatatgtcagcttgctttcaatgagccttgggcttctgttattgcttgagcatttggaactcgagcttccagagaaatttgaggtcctcgcttgttctctgccttcaagaaacaatgacctgattctgtctttaaaaaaaaaaatctcagaattctttttttgtttgtgtttttttttttttttgagacagagtctcactctgttgcccaggctggagtgcagtggcgccatctcggctcactgcaacctccgcctcccaggttcaagcaattctcctgcctcagcctcccaggtagctgccactacaggtgctgcaccaccacgcccggctaatttttgtatttttagtagagacagggtttcaccatattagccaggtgggtcttgaactcctgaccttgtgatccacccgcctcggcctcccaaagtgctgggattacaggcgtgagccaccttgcctggccaaaaatctcagaattctttaagactgttttaattgctccatcagtaattttgaagcactttcctttttttttttttttcccctttttgtccctttccccaagccaccaattggatggatgaatgtttgacggggaagaggaagggtaggaggatgcatggatgagtggatgagtggatcgatggatgtattgataaatagatagaaccagtcatctgaagcaacttaagaattgtagccttgactccttgagactgtagatttcgatccaggaaacatttatttagcacctgccagatgccagaaatttataccatttaaaactcagtaagtcttttaaatatcaggaaggagagaagcgacatcatgatacatcctatgggtattaaaaagccaatagaatattatgaataattttatgctaataaatttaacaacttcaacatcataaacaaattccttgaaaaataaaaagtaccaaaattcattcaagaagaaatagataccagcctgagcaacatggcaaaatcccatctctacaaaacatcaaaaaaaaaaaaaattagtcgggcatggtggtgcacacctgtaatcccagcttgtcaggaggctgaagtgggaggatcacctgagcccagggaggtcaaggatgcagtgagccatggtctcaccactgcactctagcctgggtgacagaatgagaccccgtctcaaaaaaaaagaagaagtagataatctgaatagccctatatctatagaaacttaatagtgctgggagatataggtattattatcctcattttacagatgtgaaaattgaggctcagagaagtaaagtctattgctcaaggtcatgtggctagaatatggcagagccatgattcagatccaggtcttctgattcttattccagtgtcctttctagcataccatgttgcctctaaagattgcagctccttatttactagaaaattgttcctgcccaatctacatctccacctcaccccatcttttcttaagcactatgtttgtgtttttatcagtattatattcattgtctttggaatacatgttcttgtttgtgtttggaaaaaaaatctcttttaccagcttgcactcggaccaacttggaaaaaaaaaagcttaaatgtttttgctatgtacagtttaaaaatgtgaagtttgtagctttaactttttgtaagaaaatctaataacactggcttaagtgctgacttgaaatgctattttgtaaggtttggatgtaagtaatcaattgaggtcagcagtttgtatgagacatagcttcctccattgcccccactccttttttcttttttaagtttgagatgcttcctgtgtttttatgttagaattgttgttctccttcttttcttcttcctatacctcatcacgtttgttttaaataaactgtcctttggaccacaaaaaaaaaaaaaaaa

SEQ ID NO: 29705 - DNA, 8187 bp, Homo Sapiens
cccgagaagcggcggggcggcgggccggcgggcggggcgcagagccaggcagcgcaggtatagccaggctggagaaaagaagctgccaccatggttgcactttcactgaagatcagcattgggaatgtggtgaagacgatgcagtttgagccgtctaccatggtgtacgacgcctgccgcatcattcgtgagcggatcccagaggccccagctggtcctcccagcgactttgggctctttctgtcagatgatgaccccaaaaagggtatatggctggaggctgggaaagctttggactactacatgctccgaaatggggacactatggagtacaggaagaaacagagacccctgaagatccgtatgctggatggaactgtgaagacgatcatggtggatgactctaagactgtcactgacatgctcatgaccatctgtgcccgcattggcatcaccaatcatgatgaatattcattggttcgagagctgatggaagagaaaaaggaggaaataacagggaccttaagaaaggacaagacattgctgcgagatgaaaagaagatggagaaactaaagcagaaattgcacacagatgatgagttgaactggctggaccatggtcggacactgagggagcagggtgtagaggagcacgagacgctgctgctgcggaggaagttcttttactcagaccagaatgtggattcccgggaccctgtacagctgaacctcctgtatgtgcaggcacgagatgacatcctgaatggctcccaccctgtctcctttgacaaggcctgtgagtttgctggcttccaatgccagatccagtttgggccccacaatgagcagaagcacaaggctggcttccttgacctgaaggacttcctgcccaaggagtatgtgaagcagaagggagagcgtaagatcttccaggcacacaagaattgtgggcagatgagtgagattgaggccaaggtccgctacgtgaagctagcccgttctctcaagacttacggtgtctccttcttcctggtgaaggaaaaaatgaaagggaagaacaagctagtgcccaggcttctgggcatcaccaaggagtgtgtgatgcgagtggatgagaagaccaaggaagtgatccaggagtggaacctcaccaacatcaaacgctgggctgcgtctcccaaaagcttcaccctggattttggagattaccaagatggctattactcagtacagacaactgaaggggagcagattgcacagctcattgccggctacatcgatatcatcctgaagaagaaaaaaagcaaggatcactttgggctggaaggagatgaggagtctactatgctggaggactcagtgtcccccaaaaagtcaacagtcctgcagcagcaatacaaccgggtggggaaagtggagcatggctctgtggccctgcctgccatcatgcgctctggagcctctggtcctgagaatttccaggtgggcagcatgccccctgcccagcagcagattaccagcggccagatgcaccgaggacacatgcctcctctgacttcagcccagcaggcactcactggaaccattaactccagcatgcaggccgtgcaggctgcccaggccaccctggatgactttgacactctgccgcctcttggccaggatgctgcctctaaggcctggcgtaaaaacaagatggatgaatcaaagcatgagatccactctcaggtagatgccatcacagctggtactgcgtctgtggtgaacctgacagcaggggaccctgctgagacagactataccgcagtgggctgtgcagtcaccacaatctcctccaacctgacggagatgtcccgtggggtgaagctgctggctgccttgctggaggacgaaggcggcagtggtcggcccctgttgcaggcagcaaagggccttgcgggagcagtgtcagaactgctgcgcagtgcccaaccagccagtgctgagccccgtcagaacctgctgcaagcagctgggaacgtgggccaggccagtggggagctgttgcaacaaattggggaaagtgatactgacccccacttccaggatgcgctaatgcagctcgccaaagctgtggcaagtgctgcagctgccctggtcctcaaggccaagagtgtggcccagcggacagaggactcgggacttcagacccaagttattgctgcagcaacacagtgtgccctatccacttcccaactagtggcctgtactaaggtggtggcacctacaatcagctcacctgtctgccaagagcaactggtggaggctggacgactggtagccaaagccgtggagggctgtgtgtctgcctcccaggcagctacagaggatgggcaactgttgcgaggggtaggagcagcagccacagctgtcacccaggccctaaatgagctgctgcagcatgtgaaagcccatgccacaggggctgggcctgctggccgttatgaccaggctactgacaccatcctaaccgtcactgagaacatctttagctccatgggtgatgctggggagatggtgggacaggcccgcatcctggcccaagccacatctgacctggtcaatgccatcaaggctgatgctgagggggaaagtgatctggagaactcccgcaagctcttaagtgctgccaagatcctagctgatgccacagccaagatggtagaggctgccaagggagcagctgcccaccctgacagtgaggagcagcagcagcggctgcgggaggcagctgaggggctgcgcatggccaccaatgcagctgcgcagaatgccatcaagaaaaagctggtgcagcgcctggagcatgcagccaagcaggctgcagcctcagccacacagaccatcgctgcagctcagcacgcagcctctacccccaaagcctctgccggcccccagcccctgctggtgcagagctgcaaggcagtggcagagcagattccactgctggtgcagggcgtccgaggaagccaagcccagcctgacagccccagcgctcagcttgccctcattgctgccagccagagcttcctgcagccaggtgggaagatggtggcagctgcaaaggcctcagtgccaacgattcaggaccaggcttcagccatgcagctgagtcagtgtgccaagaacctgggcaccgcgctggctgaactccggacggctgcccagaaggctcaggaagcatgtggacctttggagatggattctgcactgagtgtggtacagaatctagagaaagatctacaggaagtgaaggcagcagctcgagatggcaagcttaaacccttacctggggagacaatggagaagtgtacccaggacctgggcaacagcaccaaagccgtgagctcagccatcgcccagctactgggagaggttgcccagggcaatgagaattatgcaggtattgcagctcgggatgtggcaggtgggctgcggtcactggcccaggccgctaggggagtcgctgcactgacgtcagatcctgcagtgcaggccattgtacttgatacggccagtgatgtgctggacaaggccagcagcctcattgaggaggcgaaaaaggcagctggccatccaggggaccctgagagccagcagcggcttgcccaggtggctaaagcagtgacccaggctctgaaccgctgtgtcagctgcctacctggccagcgcgatgtggataatgccctgagggcagttggagatgccagcaagcgactcctgagtgactcgcttcctcctagcactgggacatttcaagaagctcagagccggttgaatgaagctgctgctgggctgaatcaggcagccacagaactggtgcaggcctctcggggaacccctcaggacctggctcgagcctcaggccgatttggacaggacttcagcaccttcctggaagctggtgtggagatggcaggccaggctccgagccaggaggaccgagcccaagttgtgtccaacttgaagggcatctccatgtcttcaagcaaacttcttctggctgccaaggccctgtccacggaccctgctgcccctaacctcaagagtcagctggctgcagctgccagggcagtaactgacagcatcaatcagctcatcactatgtgcacccagcaggcacccggccagaaggagtgtgataacgccctgcgggaattggagacggtccgggaactcctggagaacccagtccagcccatcaatgacatgtcctactttggttgcctggacagtgtaatggagaactcaaaggtgctgggcgaggccatgactggcatctcccaaaatgccaagaacggaaacctgccagagtttggagatgccatttccacagcctcaaaggcactttgtggcttcaccgaggcagctgcacaggctgcatatctggttggtgtctctgaccccaatagccaagctggacagcaagggctagtggagcccacacagtttgcccgtgcaaaccaggcaattcagatggcctgccagagtttgggagagcctggctgtacccaggcccaggtgctctctgcagccaccattgtggctaaacacacctctgcactgtgtaacagctgtcgcctggcttctgcccgtaccaccaatcctactgccaagcgccagtttgtacagtcagccaaggaggtggccaacagcacagctaatcttgtcaagaccatcaaggcgctagatggggccttcacagaggagaaccgtgcccagtgccgagcagcaacagcccctctgctggaggctgtggacaatctgagtgcctttgcgtccaaccctgagttctccagcattcctgcccagatcagccctgagggtcgggctgccatggagcccattgtgatctctgccaagacaatgttagagagtgccgggggactcatccagacagcccgggccctcgcagtcaatccccgggaccccccgagctggtcggtgctggccggccactcccgtactgtctcagactccatcaagaagctaattacaagcatgagggacaaggctccagggcagctggagtgtgaaacggccattgcagctctgaacagttgtctacgggacctagaccaggcttccctcgctgcagtcagccagcagcttgctccccgtgagggaatctctcaagaggccttgcacactcagatgctcactgcagtccaagagatctcccatctcattgagccgctggccaatgctgcccgggctgaagcctcccagctgggacacaaggtgtcccagatggcgcagtactttgagccgctcaccctggctgcagtgggtgctgcctccaagaccctgagccacccgcagcagatggcactcctggaccagactaaaacattggcagagtctgccctgcagttgctatacactgccaaggaggctggtggtaacccaaagcaagcagctcacacccaggaagccctggaggaggctgtgcagatgatgaccgaggccgtagaggacctgacaacaaccctcaacgaggcagccagtgctgctggggtcgtgggtggcatggtggactccatcacccaggccatcaaccagctagatgaaggaccaatgggtgaaccagaaggttccttcgtggattaccaaacaactatggtgcggacagccaaggccattgcagtgaccgttcaggagatggttaccaagtcaaacaccagcccagaggagctgggccctcttgctaaccagctgaccagtgactatggccgtctggcctcggaggccaagcctgcagcggtggctgctgaaaatgaagagataggttcccatatcaaacaccgggtacaggagctgggccatggctgtgccgctctggtcaccaaggcaggcgccctgcagtgcagccccagtgatgcctacaccaagaaggagctcatagagtgtgcccggagagtctctgagaaggtctcccacgtcctggctgcgctccaggctgggaatcgtggcacccaggcctgcatcacagcagccagcgctgtgtctggtatcattgctgacctcgacaccaccatcatgttcgccactgctggcacgctcaatcgtgagggtactgaaactttcgctgaccaccgggagggcatcctgaagactgcgaaggtgctggtggaggacaccaaggtcctggtgcaaaacgcagctgggagccaggagaagttggcgcaggctgcccagtcctccgtggcgaccatcacccgcctcgctgatgtggtcaagctgggtgcagccagcctgggagctgaggaccctgagacccaggtggtactaatcaacgcagtgaaagatgtagccaaagccctgggagacctcatcagtgcaacgaaggctgcagctggcaaagttggagatgaccctgctgtgtggcagctaaagaactctgccaaggtgatggtgaccaatgtgacatcattgcttaagacagtaaaagccgtggaagatgaggccaccaaaggcactcgggccctggaggcaaccacagaacacatacggcaggagctggcggttttctgttccccagagccacctgccaagacctctaccccagaagacttcatccgaatgaccaagggtatcaccatggcaaccgccaaggccgttgctgctggcaattcctgtcgccaggaagatgtcattgccacagccaatctgagccgccgtgctattgcagatatgcttcgggcttgcaaggaagcagcttaccacccagaagtggcccctgatgtgcggcttcgagccctgcactatggccgggagtgtgccaatggctacctggaactgctggaccatgtactgctgaccctgcagaagccaagcccagaactgaagcagcagttgacaggacattcaaagcgtgtggctggttccgtcactgagctcatccaggctgctgaagccatgaagggaacagaatgggtagacccagaggaccccacagtcattgctgagaatgagctcctgggagctgcagccgccattgaggctgcagccaaaaagctagagcagctgaagccccgggccaaacccaaggaggcagatgagtccttgaactttgaggagcagatactagaagctgccaagtccattgcagcagccaccagtgcactggtaaaggctgcgtcggctgcccagagagaactagtggcccaagggaaggtgggtgccattccagccaatgcactggacgatgggcagtggtcccagggcctcatttctgctgcccggatggtggctgcggccaccaacaatctgtgtgaggcagccaatgcagctgtacaaggccatgccagccaggagaagctcatctcatcagccaagcaggtagctgcctccacagcccagctccttgtggcctgcaaggtcaaggctgaccaggactcggaggcaatgaaacgacttcaggctgctggcaacgcagtgaagcgagcctcagataatctggtgaaagcagcacagaaggctgcagcctttgaagagcaggagaatgagacagtggtggtgaaagagaagatggttggcggcattgcccagatcatcgcagcacaggaagaaatgcttcggaaggaacgagagctggaagaggcgcggaagaaactggcccagatccggcagcagcagtacaagtttctgccttcagagcttcgagatgagcactaaagaagcctcttctatttaatgcagacccggcccagagactgtgcgtgccactaccaaagccttctgggctgtcggggcccaacctgcccaaccccagcactccccaaagtgcctgccaaaccccagggcctggccccgcccagtcccgcagtacatcccctgtcccctccccaaccccaagtgccttcatgccctagggccccccaagtgcctgcccctccccagagtattaacgctccaagagtattattaacgctgctgtacctcgatctgaatctgccggggccccagcccactccaccctgccagcagcttccagccagtccccacagcctcatcagctctcttcaccgttttttgatactatcttcccccacccccagctacccataggggctgcagagttataagccccaaacaggtcatgctccaataaaaatgattctacctacaaaaaaaaaaaaaaaaaaa

SEQ ID NO: 29706 - DNA, 9725 bp, Homo Sapiens
cgcgcgggctacctcagttctcgggcgtacggcgcggcctgtcctactgccgccggcgccgcggccgtcatggggttcctgaaactgattgagattgagaactttaagtcgtacaagggtcgacagattatcggaccatttcagaggttcaccgccatcattggacccaatggctctggtaagtcaaatctcatggatgccatcagctttgtgctaggtgaaaaaaccagcaacctgcgggtaaagaccctgcgggacctgatccatggagctcctgtgggcaagccagctgccaaccgggcctttgtcagcatggtctactctgaggagggtgctgaggaccgtacctttgcccgtgtcattgtaggaggttcttctgagtacaagatcaacaacaaagtggtccaactacatgagtacagtgaggaattagagaagttgggcattctcatcaaagctcgtaacttcctcgttttccagggtgctgtggaatctattgccatgaagaaccccaaagagaggacagctctatttgaagagattagtcgttctggggagctggcgcaggagtatgacaagcgaaagaaggaaatggtgaaggctgaagaggacacacagtttaattaccatcgcaagaaaaatattgcggctgaacgcaaggaagcaaagcaggagaaagaagaggctgaccggtaccagcgcctgaaggatgaggtagtacgggctcaggtacagctgcagctctttaagctttaccataatgaagtggaaattgagaagctcaacaaggaactggcctcaaagaacaaggagatcgagaaggacaagaagcgtatggacaaggtggaggatgaactgaaggagaagaagaaggagctgggcaaaatgatgcgggagcagcagcagattgagaaggagatcaaggagaaggactcagaattgaaccagaagcggcctcagtacatcaaagccaaggagaacacctcccacaaaatcaagaagctggaagcagccaagaagtctctgcagaatgctcagaagcactacaagaagcgtaaaggtgacatggatgagctggagaaggagatgctgtcagtggagaaggctcggcaggagtttgaagaacggatggaagaagagagtcagagtcagggcagagatttgacgttggaggagaatcaggtgaagaaataccaccggttgaaagaagaagccagcaagagagcagctaccctggcccaggagctggagaaattcaatcgagaccagaaagctgaccaggaccgtctggatctggaagaacggaagaaagtagagacagaggccaagatcaagcaaaagctgcgggaaattgaagagaatcagaagcggattgagaaactggaggaatacatcaccactagcaagcagtccctagaagagcagaagaagctagagggggagctgacagaggaggtggagatggccaagcggcgtattgatgaaatcaataaggagctgaaccaggtgatggagcagctaggggatgcccgcatcgaccgccaggagagcagccgccagcagcgaaaggcagagataatggaaagcatcaagcgcctttaccctggctctgtgtacggccgcctcattgacctatgccagcccacacaaaagaagtatcagattgctgtaaccaaggttttgggcaagaacatggatgccattattgtggactcggagaagacaggccgggactgtattcagtatatcaaggagcagcgtggggagcctgagaccttcttgcctcttgactacctggaggtgaagcctacagatgagaaactccgggagctgaagggggccaagctagtgattgatgtgattcgctatgagccacctcatatcaaaaaggccctgcagtatgcttgtggcaatgcccttgtctgtgacaacgtggaagatgcccgccgcattgcctttggaggccaccagcgccacaagacagtggcactggatggaaccctattccagaagtcaggagtgatctctggtggggccagtgacctgaaggccaaggcacggcgctgggatgagaaagcagtagacaagttgaaagagaagaaggagcgcttgacagaggagctgaaagagcagatgaaggcaaaacggaaagaggcagagctgcgtcaggtgcagtctcaggcccatggactgcagatgcggctcaagtactcccagagtgacctagaacagaccaagacacgacatctagccctgaatctgcaggaaaaatccaagctggagagtgagctagccaactttgggcctcgcattaatgatatcaagaggatcattcagagccgagagagggaaatgaaagacttgaaggagaagatgaaccaggtagaggatgaggtgtttgaagagttttgtcgggagattggtgtgcgcaacatccgggagtttgaggaagaaaaggtgaaacggcagaatgaaatcgccaagaagcgtttggagtttgagaatcagaagactcgcttgggcattcagttggattttgaaaagaaccaactgaaggaggaccaagataaagtacacatgtgggagcagacagtgaaaaaagatgaaaatgagatagaaaagctcaaaaaggaggaacaaagacacatgaagatcatagatgagaccatggctcagctacaagacctgaagaatcagcatctggccaagaagtcggaagtgaatgacaagaatcatgagatggaggagattcgtaagaaactcgggggcgccaacaaggaaatgacccatttacagaaggaggtgacagccattgagaccaagcttgaacagaagcgcagtgaccgtcacaacttgctacaggcctgtaagatgcaggacattaagttgccactgtcaaaaggcaccatggatgatattagtcaggaagagggtagctcccagggggaggactcagtgagtggttcacagagaatttccagtatctatgcacgagaggccctcattgagattgactacggtgatctgtgtgaggatctgaaggatgcccaggctgaggaagagatcaagcaagagatgaacacactgcagcagaagctgaatgagcagcagagtgtgcttcagcgtattgccgcccccaacatgaaggccatggaaaagctggaaagtgtccgagacaagttccaggagacctcagatgagtttgaagcagcccgaaagcgagcaaagaaggccaagcaggcattcgaacagatcaagaaggagcgctttgaccgcttcaatgcttgttttgaatctgtggctaccaacattgatgagatctataaggccctgtcccgcaatagcagtgcccaggcattcctgggccctgagaaccctgaagagccctacttggatggcatcaactacaactgtgtggctcctgggaaacgcttccggcctatggacaacttgtcaggcggggagaagacagtggcagctctggccctgctctttgccatccacagctacaagccagcccccttcttcgtcctggatgagattgatgctgccttggataacaccaacattggcaaggtggcaaattacatcaaggagcagtcgacttgcaacttccaggccatcgtcatctctctcaaggaggagttctacaccaaggccgagagcctcattggagtctatcctgagcaaggggactgtgtgatcagcaaagtcctgaccttcgacctcaccaagtacccagatgccaaccccaaccccaatgagcagtagcagtatttttgccctcccgccctgtctggatccctaagctgtccctctcccaatctctggatatttgactcccaaccttccccctacctcctggccctttttggtgtagtcatgggatttaggcactgctaatcaagcatgaagaggaacagaggtgatgttaggtctggagcaaaaattcctgaacgacagggagtattctggcctctgaaaggaggtgctgagctgaacagggccatctgttcatcacacacacccccttcctccccctcatcacccataatcgtgggccccttgggcctcttgcccactgtgtgtgtgggtatgtatgtgtgtatgtatgtatccgcatgtgtgcatgtgagtatgtttgcaaaataataaaggatattggagacctgttttagaaggagcctaggctgaatttgattccaagagagcttaggatgacagcacccctgagctgggcaaaggtactcaggacctcataggagtcttaggcagttacctgaaactgccttcattcactcatttgtgtattcattcatttatgtattcatcagacacataccgaacaccctctatttgtcaggctctgtgcttggaatacagagttgaatcagacatgatctctaccctcctagtaaggagatacagtgggttcatgaatgactatagttagctgaatgtcatatgtactttgaatttgagaagtgggtgatcccctctaggcttcctggaggtcacatttaagctagaccttgacaaattggtaggatttggtcaggcactaggagtggagcatgagctctggggacagacagttatgggttctggtcccactttttatcacttactagttgtttgaccttgggcaagtcatttgaccttctgtgcctcagtttcctcatctgtaaaatggggctaacaatattacctacctcataggatttaatgatgtcaagctcctcactggaggccttatcccttcgtggagcccactaggtgccgacccctcagaatataaccctcatgcctggacccctgagagcttctgatcccagctattagggacagaagaagcctccaaatctggaaggtgctgaatgccctgctgactgggaaagtttcagggcactgatggggtctacctggtaagcggagggcctgaggaaacctgtagcttcaatcatgtctggtaaccgggtgcctgagccccaatctgggttgtgaggaaataggggagaggtatcctgggccacatcccagcctaacacctgtgaggttcattttaggaactaacctcattagctataaggatcatgcagaggcagcaaagccgggtgcgatgagctcagcctttactcattcacatacaccatcacactttaattccaatctgtatattgctttttaaaagttaagtccattctaattacccaaatatgcatgaattcattctccttttgagaagttagattgttaaagatagtctcattcagctaccaaccactccttgatccttcccttcttagtggctgttgtttgttgtacttccgtttagactttgttttaatgcttgtacgtacatatgtgaactcattggaaatattgtgtgtttaatgcaaatgatatattgaattgtttagcaatttgttttctttgcttaacgatgtttttgagatctgtgcatgttacttaatgtagctcaatccatcttctgtaattgctgtatagattgtcatcatatgattaccacattttacttacgcatttcttttgtgatggacattaagactgtttttaggttttgctattacaaaatactacacaggagcatcactatgcctgtgtgaaagtatatgtatgaaagtttacctagggttgattcctagaagtggaattgcaaagtcataggatatttatatattggtttttaataatacttccaaattgccctcctgtactatttactcagtatttttcttgaggttgatctgaggtctaacattgttatcctatatcattttcatcccaagtagtgatatctgtgaaatcacaggtttgatgtgtgctaattatgtattcttctaatacatattaaaagacataactatcaaaacaaaataaatttgtctgttttcaaccaaagaagtcacgtaccactggtggtactgtgtgccataatttggcaaatgctggcctttatggacgagcacaattcgggggtcagacctggttcaaattctagctgtagaaacttgtgcaagttacttcacctctgagcctaagtttccacatctgtaaaaggagataataaacacctaccttgcagtagtgaagcaaagagaaaattaaatatatatgaagcaatttggctggcatctagatcattcacagccctttaaaggtcacctttgctgttctccccactttacagataaggaaactgaggcccaaaaaggtttgaacccaggtcttccaagtcattcaagtgctttctccactgtacaggtggttatcaaccttggctgcgcatcagaatcgtttgtaaagctttttctttttcctttttaaaaagtaaagcaatatatacacaggtaaaaaaataaaatagtacagaagggcttataatgagaagcagcagttccctgcttgcacccccacatccaaaggatgtggagctctttaaaaataaattgctctggtcccacctctggaaatctgattcagccagcatggataataacccagataactaacccctacctcacaggataaaaaggattacatgagatgccttaggctaaggccctggcacacaggaacacatgtgctacaaaggagctttggggacttaagtcctgaggatccaggaggtgaggtgacttgtccaagattccactggtttagtggcagagcctagacttccactcggatctatttagtgcttgccccctgctctctcctgtcgtgccccaccacctcctggcatcacagggcaaccgttgtcaaggctatgctcacgggaggctgggcaccacagtgtttccaagagcaagctggatccgagtagattccctagggcttgttggaggaactagtttgactcccttatactgtggacgcagtagccttgctgtagggagttgaagagtactccacaacagtatcttaagtttaactgggcacttccctctggaaatcacagtgttgtgcaccaggaacacaaagatgagtcaaatctttatcctgcctttgaggagctcactgtttagttggggaaaccatttgtaaaacagccattaaccatacagtgtgatcaacactgacaggagcacaggaaaaacatctagcttatgtgaagattcagagaaggcatcctgtagtctaggtggtgatacctgaactgagtcttgagggacgggtaggaattagccagttgaggaagtagaaggaatttccagatattggaaacagtatgcatgaagacatgaaggcaagaaacagcaaaacaaatactgaagcatgaagattcctggggtggggggaaagcagcaagaaaaggtagagaggaaccagattggaagagggtcgtaaatgcatggctacagaattcagatttgttttgtaggacagtgtggttcccaaactggctgtataccacaaacaggtacggcattctgggccccggcccctaaaacattcattaagtctggggtgaagatttggaatcttgaatgcttataaaggttaccacatgactagggtacagccagatttggaaaccatagcttgaaggcagtgagggagccatgaaatggtttttaatagggggactccagatcagatgtgaacttaacctgtttctggctggctagccaaccagcatggaaaacagattaggttagatgttcatgctgtatgtgcccgtgcctgtagcttccctgttaatcagcttcttacactactatatttgcttattttgtctctgaataagctttaggcaccacaagggtgggcctggggatattttgcttaccagtatagcccctgcaaaaaagcacagtgcctgacacaaaacaggcacccagtaaagtttttgaatgaatgaatgcatgagtgaatccatttgtgagagagcgaatggagatgacaagattagctaggagactggaaaaagaccaggaggcctgcactagggcaaaggccagtaggaatagattggaggtgttaaggtgtgaactgttaaggtaagatgataacttaatgactgattattggatgtggagggtgactgagaggatagaatgagtacccatgaatagccatgattcctaccctgtcccagtcatctctttccttatccatctctgaaacaatctgcttacatcctcctcagcaactggaattcctcaagttagttagacattctgtgtgctgtgtggtctctcactgcccccccactccccacccctccacaagccattgattcattcatccagttcaataaatcttggctaagcacctccagtgtgcagtaaggctcttccaagccaggactctgactccctctttcctacctcaagagatgtttttgagggctttcccaggtaagagtcacatctcttatacaataacttatagtgagatacccagaatgtcagacttgtaagggaagactgcccaaaccccttctgaggtcctcagaggggaattaacttcctaaggtccgactgctaggaagtgttggagccagaaatggaacctaggtttcctttctatgtcatctctggagtcttgatcttgatctatcccattgtagatcaggacaggcagaggtggtcagggagaaggtgggacttaggttgaaccttgaaggtcaatgtattggacaggtcaaacaagatggttgccaattacactgcccccttctggaaacccttagcaaacctgccatgcttgcagtcccttctaaggggtttccttagcataagttgccatgctctgtaccatgtgacctcacaatcctggccacagatagctagatgtggatagtgtctggttcaagggcaaccaatctctaggctggccagtggcctgttagctggactggcataaggacttcaccttacaggggtggcatgtatcaaatggcaaatgtatgaaacaaccagatctttcagggaggcagaatgtgagctattcagaagaagtgaacgttaattagaatttaatgaggcattagtggtggtggatgaggggtggccagaaactaaacagcaaaagcaaagagaaagctgcagaaaccataagtaagcagaggtcatgagacatttgtataatgagatcacggagccacagggtggcagaagccatgaagcagcaaggcaacaatgggctagaagccatgaagcaataggagccacgaggaacagaaaccgtgagacaaaactgactatgagatccacaaagcagcagaaggcttgaatagataagatcatgagacagtagaagcgatgagactgcaagaaccacaaggtagccagaaccatgtggcaacatggcaacaggaatggaagaggcagcaggagctacaatgcagaaaagccatggattaataggaactgaagcgccgggagccatgaagctgcaggacccatgaggcagaaaaagccatgggctagcatcgaggggggcagaaagaagttagtcagtagcagtaggaggagtataaatacagccagaaaggagttgagtcaccaatttgggaagcactagagaagggagcaacagatgcctgcagctgagggggtgacaagataagccaggctctagagctgctttggatcatgaaccattttcaagtttctgttcttccatgaggctgcctgtgtagctgttcttgtcttccttatttccctgtgaatgctttaataaatccccatcactaa

SEQ ID NO: 29707 - DNA, 4177 bp, Homo Sapiens
tctctcccccgccccccaggctcccccggtcgctctcctccggcggtcgcccgcgctcggtggatgtggctggcagctgccgccccctccctcgctcgccgcctgctcttcctcggccctccgcctcctcccctcctccttctcgtcttcagccgctcctctcgccgccgcctccacagcctgggcctcgccgcgatgccggagaagaggcccttcgagcggctgcctgccgatgtctcccccatcaactacagcctttgcctcaagcccgacttgctggacttcaccttcgagggcaagctggaggccgccgcccaggtgaggcaggcgactaatcagattgtgatgaattgtgctgatattgatattattacagcttcatatgcaccagaaggagatgaagaaatacatgctacaggatttaactatcagaatgaagatgaaaaagtcaccttgtctttccctagtactctgcaaacaggtacgggaaccttaaagatagattttgttggagagctgaatgacaaaatgaaaggtttctatagaagtaaatatactaccccttctggagaggtgcgctatgctgctgtaacacagtttgaggctactgatgcccgaagggcttttccttgctgggatgagcctgctatcaaagcaacttttgatatctcattggttgttcctaaagacagagtagctttatcaaacatgaatgtaattgaccggaaaccataccctgatgatgaaaatttagtggaagtgaagtttgcccgcacacctgttatgtctacatatctggtggcatttgttgtgggtgaatatgactttgtagaaacaaggtcaaaagatggtgtgtgtgtccgtgtttacactcctgttggcaaagcagagcaaggaaaatttgcgttagaggttgctgctaaaaccttgcctttttataaggactacttcaatgttccttatcctctacctaaaattgatctcattgctattgcagactttgcagctggtgccatggagaactggggccttgttacttatagggagactgcattgcttattgatccaaaaaattcctgttcttcatcccgccagtgggttgctctggttgtgggacatgaactcgcccatcaatggtttggaaatcttgttactatggaatggtggactcatctttggttaaatgaaggttttgcatcctggattgaatatctgtgtgtagaccactgcttcccagagtatgatatttggactcagtttgtttctgctgattacacccgtgcccaggagcttgacgccttagataacagccatcctattgaagtcagtgtgggccatccatctgaggttgatgagatatttgatgctatatcatatagcaaaggtgcatctgtcatccgaatgctgcatgactacattggggataaggactttaagaaaggaatgaacatgtatttaaccaagttccaacaaaagaatgctgccacagaggatctctgggaaagtttagaaaatgctagtggtaaacctatagcagctgtgatgaatacctggaccaaacaaatgggatttcccctcatttatgtggaagctgaacaggtagaagatgacagattattgaggttgtcccaaaagaagttctgtgctggtgggtcatatgttggtgaagattgtccccagtggatggtccctatcacaatctctactagtgaagaccccaaccaggccaaactaaaaattctaatggacaagccagagatgaatgtggttttgaaaaatgtcaaaccagaccaatgggtgaagttaaacttaggaacagttgggttttatcggacccagtacagctctgccatgctggaaagtttattaccaggcattcgtgacctttctctgccccctgtggatcgacttggattacagaatgacctcttctccttggctcgagctggaatcattagcactgtagaggttctaaaagtcatggaggcttttgtgaatgagcccaattatactgtatggagcgacctgagctgtaacctggggattctctcaactctcttgtcccacacagacttctatgaggaaatccaggagtttgtgaaagatgtcttttcacctataggggagagactgggctgggaccccaaacctggagaaggtcatctcgatgcactcctgaggggcttggttctgggaaaactaggaaaagcaggacataaggcaacgttagaagaagcccgtcgtcggtttaaggaccacgtggaaggaaaacagattctctccgctgatctgaggagtcctgtctatctgactgttttgaagcatggtgatggcactactttagatattatgttaaaacttcataaacaagcagatatgcaagaagagaaaaaccgaatcgaaagagtccttggcgctactcttttgcctgacctgattcaaaaagtcctcacgtttgcactttcagaagaggtacgtccacaggacactgtatcggtaattggtggagtagctggaggcagcaagcatggtaggaaagctgcttggaaattcataaaggacaactgggaagaactttataaccgataccagggaggattcttaatatccagactaataaagctatcagttgagggatttgcagttgataaaatggctggagaggttaaggctttcttcgagagtcacccagctccttcagctgagcgtaccatccagcagtgttgtgaaaatattctgctgaatgctgcctggctaaagcgagatgctgagagcatccaccagtacctccttcagcggaaggcctcaccacccacagtgtgaatcctgaggtgccgccattggcggttctgctgcttcgctgcagggataaggtggagctaccgaacagctgattcatatgccaagaatttggagtcttctttcaaaccagtgggggttggacaatgaatgtagttaactggttcctgctcacactccagaattaaattctattgaaaaaggaaaatcagcaattcagcaaaaaaataaataaaaaataaaaatgtaaatatgatagtaataaaatagagcataacgaaactgtgaaactttctgaagccttgtcagtggttaaaagtatttaacactctactgttaatgacagatgttctgtttttataacctaccaaaaggaaactagaggcttcttggtgaagagcatttttgtgaagtgggttctgcaaggagcctataaagccaagggtggtgtccatttctgggaatggttaaacacaaaaggctgatagctggtatcacatagttggagtcagtgcataattccaagtggctttttttttttttggcacggggactgatcaggaagatatattcctgcataactcaatctgaaccaaggattgtagtttagttttcctccttgccttcccttctgtgtgaccgaccccttggccaaaaaaaaaacaaaaagcaaaaaacaaaaacctaccctgttctggtttttttcctccctttagttccacccccaacccccattccctggtgtccttcttagagatgaagaaataataaggaaacatctttcatagccacattaaataagagaaactgatatacattatttttttctttttaaagatgacttataagaaccctgaaatttatataggtgagacaatagaaataaaaagatcttcagccaggcctttctgaaggagttattctgctaaaaatggtcttagttgtctgaaaagccagctcttgaacctcttcacaacagtatcaacactggcttctcccggttcattttatgcgtgcgagaagtcagtggtaactgctgcagggcttaatacattagtggtaactggtttaaaaaacaaagactgtaagcctgtgtgtgccactgtttgcttcaacagtatatcctactaataagcctcacctatttaatccaatgagttttaaatctaaatctcattcccttcttctttccctaccttttttttctttttttcttaaaaaaatattttgtgttattaacagaaattcatatttggtgtggcttaacggtatttcagaaggtcatcagattgtgagactgcttccttgaaacatttttgtgctattgttttaaaaaaataattaaaaaacagttggcgttaataaaaatgtcaatgtg

SEQ ID NO: 29708 - DNA, 7940 bp, Homo Sapiens
tcaagatggcggccaaggtggcgaagcagcagccgcggcggcggcggcggctggagtgagcgtccgactcgccgcgccgaacgaggtcccggtgtagggccgcgcgccgtggccgcgtcccactcctcaggccggggcgcacgtcggctcccacgcttagccagctcccggtggtttcctagaaacatgattgtttattggcattgatctcacagtctggtgaggacttctttactgataatgtcaagttcaggttatcctcccaaccaaggagcattcagcacagaacaaagtcgttatcctcctcactctgtccagtatacatttcccaacacccgccaccagcaggagttcgcagtccctgattatcgttcctctcatcttgaagtgagtcaggcatcacagcttttgcagcaacagcagcagcaacagcttcgaaggcgaccttccttgctttcagaatttcacccaggttctgacaggcctcaagaaaggagaactagttatgaaccgtttcatccaggcccatccccagtggatcatgattcactggaatcgaagcgaccacgtctggaacaggtttctgattctcattttcagcgtgtcagtgctgcggttttgcctttagtgcacccgctgccagaagggctgagggcttctgcagatgctaagaaggatccagcattcggaggcaaacatgaagctccatcctctccaatttcggggcaaccatgtggagatgatcaaaatgcttcaccttcaaaactctcaaaggaagagttaatacagagtatggatcgtgtagatcgagaaattgcaaaagtagaacagcagatccttaaactgaaaaagaaacaacaacagcttgaagaagaggcagctaaacctcctgagcctgagaagcccgtgtcccctcctcctgtggagcagaaacaccgcagtattgtccaaattatttatgatgagaatcggaaaaaagcagaagaagctcataaaatttttgaaggtcttggcccaaaagttgaactgccactgtataaccagccatcagataccaaggtgtaccatgagaacatcaagacaaaccaggtgatgaggaaaaaactcattttattttttaaaagaagaaatcatgcaagaaaacaaagggaacaaaaaatctgccagcgttatgatcagctcatggaggcatgggagaaaaaagtggacagaatagaaaataatcctcggaggaaagctaaagaaagcaaaacaagggaatactatgaaaagcagtttccagaaattcgaaaacaaagagaacagcaagaaagatttcagcgagttgggcagaggggagctggtctttcagccaccattgctaggagtgagcatgagatttctgaaattattgatgggctctctgagcaggagaataatgagaaacaaatgcggcagctctctgtgattccacctatgatgtttgatgcagaacaaagacgagtcaagttcattaacatgaatgggcttatggaggaccctatgaaagtgtataaagataggcagtttatgaatgtttggactgaccatgaaaaggagatctttaaggacaagtttatccagcatccaaaaaactttggactaattgcatcatacttggagaggaagagtgttcctgattgtgttttgtattactatttaaccaagaaaaatgagaattataaagccctcgtcagaaggaattatgggaaacgcagaggcagaaaccagcaaattgctcgaccctcgcaagaagaaaaagtagaagaaaaagaagaggataaagcagaaaaaacagaaaaaaaagaagaagaaaagaaagatgaagaggaaaaagatgaaaaagaagactccaaagaaaataccaaggaaaaggacaagatagatggtacagcagaagaaactgaggaaagagagcaagccacaccccgggggcgaaagactgccaacagtcagggccgccgtaagggccggatcaccaggtccatgacaaacgaagctgcagctgccagtgctgcagccgcagcggctactgaagagcccccaccacctctgccaccgccaccagaacccatttctacagagcctgtggagacctctcgatggacagaagaagaaatggaagttgctaaaaaaggtctagtagaacatggtcgtaactgggcagcaattgctaaaatggtgggaacgaaaagtgaagctcaatgtaaaaacttctattttaactataaaaggcgacacaatcttgacaacctcttacagcagcataaacagaaaacttcacgaaaacctcgtgaagagcgagatgtgtctcaatgtgaaagtgtcgcttccactgtttctgctcaggaggatgaagatattgaagcctccaatgaagaagaaaatccagaagacagcgaagttgaagctgtcaagcccagcgaggacagtcctgaaaatgctacttctcgaggaaacacagaacctgcggttgagcttgagcccaccacggaaactgcacccagtacatctccctccttagcagttccaagtacaaaaccagctgaagatgaaagtgtggagacccaggtgaatgacagcatcagtgctgagacagcagagcagatggatgtagatcagcaggagcacagtgctgaagagggttctgtttgtgatcccccacccgctaccaaagctgactctgtggacgttgaagtgagggtgccagaaaaccatgcatctaaagttgaaggtgataataccaaagaaagagacttggatagagccagtgagaaggtggaacctagagatgaagatttggtggtagctcagcaaataaatgcccaaaggcccgagccccagtcagacaatgattccagtgccacgtgcagcgctgatgaggatgtggatggagagccagagaggcagagaatgtttcctatggactcaaagccttcactgttaaaccccactggatctatactcgtctcatctccgttaaaaccaaatccactggatctgccacagcttcagcatcgagctgctgttatcccaccaatggtatcctgcaccccatgtaacataccaattggaaccccagtgagcggctatgctctctaccagcgacacattaaagcaatgcatgagtcagcactcctggaggagcagcggcagagacaagaacagatagatttggaatgtagaagttctacaagtccatgtggcacatccaagagtccaaacagagagtgggaagtccttcagcctgctccacatcaagtgataactaatctccctgaaggcgttcggcttccgacaactcgaccaaccaggccaccgccccctctcatcccgtcatccaaaaccacagtggcttcagaaaaaccatcttttataatgggaggctccatctcacagggaacaccaggcacttatttgacttctcataatcaggcttcctacactcaagaaacacccaagccgtcagtgggatctatctctcttggactgccacggcaacaggaatctgccaaatcagctactttgccctacatcaagcaggaagaattttctccccgaagccaaaactcacaacctgagggtctgttggtcagggcccaacatgaaggtgtagtcagaggtaccgcaggagccatacaagaaggaagtataactcggggaactccaaccagcaaaatttcagtggagagcattccatccctacggggctctatcactcagggcaccccggctctgccccagactggcataccaacagaggctttggtgaaggggtccatttcgagaatgcccattgaagacagcagtcctgagaaaggcagagaggaagctgcatccaaaggccatgttatttatgaaggcaaaagtggacatatcttgtcatatgataatattaagaatgcccgagaagggactaggagtccaagaacagctcatgaaatcagtttaaagagaagctatgaatcagtggaaggaaatataaagcaagggatgtcaatgagggagtctcctgtatcagcaccgttagaggggctgatatgccgagcattacccagggggagtcctcattctgacctcaaagaaaggactgtattgtctggctccataatgcaggggacaccaagagcaacaactgaaagctttgaagatggccttaaatatcccaaacaaattaaaagggaaagtcctcccatacgagcatttgaaggtgccattaccaaaggaaaaccatatgatggcatcaccaccatcaaagaaatggggcgttccattcatgagattccaaggcaagatattttaactcaggaaagtcggaaaactccagaagtggtccagagcacacggccgataattgagggttccatttcccagggcacaccaataaagtttgacaacaactcaggtcaatctgccatcaaacacaatgtcaaatccttaatcacggggcctagcaaactatcccgtggaatgcctccgctggaaattgtgccagagaacataaaagtggtagaacggggaaaatatgaggatgtgaaagcaggcgagaccgtgcgttcccggcacacgtcagtggtaagctctggcccctccgttcttaggtccacactgcatgaagctcccaaagcacaactgagccctgggatttatgatgacaccagtgcacggaggacccctgtgagttatcaaaacaccatgtccagaggctcacccatgatgaacagaacttctgatgttacaatttcttctaacaagtctaccaatcatgaaaggaaatcgacactgacccctacccagagggaaagtatcccagcgaagtctccagtgcctggggtggaccctgtcgtgagccacagtccgtttgatccccatcacagaggcagcactgcaggcgaggtttatcggagccacctgcccacgcacttggatccagccatgccttttcacagggctttggatcctgcagcggctgcttacctgtttcagagacagctttcaccaactccaggttacccaagtcagtatcagctttacgcaatggagaacacaagacagacaatcttaaatgattacattacctcacaacagatgcaagtgaacttgcgtccagatgtggccagaggactctccccaagagagcagccactgggtctcccatacccagcaacgagaggaatcattgacctgaccaatatgcctccaacaattttagtgcctcatccagggggaacaagcactcctcccatggacagaatcacttatattcctggtacacagattactttccctcccaggccgtacaactctgcttccatgtctccaggacacccaacacaccttgcagctgctgcaagtgctgagagggaacgggaacgggagcgggagaaggagcgggagcgggaacggattgctgcagcttcctccgacctctacctgcggccaggctcagaacagcctggccgacctggcagtcatggatatgttcgctccccttccccttcagtaagaactcaggagaccatgttgcaacagagacccagtgttttccaaggaaccaatggaaccagtgtaatcacacctttggatccaactgctcagctacgaatcatgccactgcctgctgggggcccttcaataagccaaggcctgccagcctcccgttacaacactgctgcggatgccctggctgctcttgtggatgctgcagcttctgcaccccagatggatgtgtccaaaacaaaagagagtaagcatgaagctgccaggttagaagaaaatttgagaagcaggtcagcagcagttagtgaacagcagcagctagagcagaaaaccctggaggtggagaagagatctgttcagtgtttatacacttcttcagcctttccaagtggcaagccccagcctcattcttcagtagtttattctgaggctgggaaagataaagggcctcctccaaaatccagatatgaggaagagctaaggaccagagggaagactaccattactgcagctaacttcatagacgtgatcatcacccggcaaattgcctcggacaaggatgcgagggaacgtggctctcaaagttcagactcttctagtagcttatcttctcacaggtatgaaacacctagcgatgctattgaggtgataagtcctgccagctcacctgcgccaccccaggagaaactgcagacctatcagccagaggttgttaaggcaaatcaagcggaaaatgatcctaccagacaatatgaaggaccattacatcactatcgaccacagcaggaatcaccatctccccaacaacagctgcccccttcttcacaggcagagggaatggggcaagtgcccaggacccatcggctgatcacacttgctgatcacatctgtcaaattatcacacaagattttgctagaaatcaagtttcctcgcagactccccagcagcctcctacttctacattccagaactcaccttctgctttggtatctacacctgtgaggactaaaacatcaaaccgttacagcccagaatcccaggctcagtctgtccatcatcaaagaccaggttcaagggtctctccagaaaatcttgtggacaaatccaggggaagtaggcctggaaaatccccagagaggagtcacgtctcttcggagccctacgagcccatctccccaccccaggttccggttgtgcatgagaaacaggacagcttgctgctcttgtctcagaggggcgcagagcctgcagagcagaggaatgatgcccgctcaccagggagtataagctacttgccttcattcttcaccaagcttgaaaatacatcacccatggttaaatcaaagaagcaggagatttttcgtaagttgaactcctctggtggaggtgactctgatatggcagctgctcagccaggaactgagatctttaatctgccagcagttactacgtcaggctcagttagctctagaggccattcttttgctgatcctgccagtaatcttgggctggaagacattatcaggaaggctctcatgggaagctttgatgacaaagttgaggatcatggagttgtcatgtcccagcctatgggagtagtgcctggtactgccaacacctcagttgtgaccagtggtgagacacgaagagaggaaggggacccatcacctcattcaggaggagtttgcaaaccaaagctgatcagcaagtcaaacagcaggaaatctaagtctcctatacctgggcaaggctacttaggaacggaacggccctcttcagtctcctctgtacattcagaaggggattaccataggcagacgccagggtgggcctgggaagacaggccctcttcaacaggctcaactcagtttccttataaccctctgactatgcggatgctcagcagtactccaccaacaccgattgcatgtgctccctctgcggtgaaccaagcagctcctcaccaacagaacaggatctgggagcgagagcctgccccactgctctcagcacagtacgagaccctgtcggatagtgatgactgaactgcacaaagtgaggggaacagggtgcaggagagggatctctagtttttgtggtttaatttttagtagcaggtcaaaaacctgccctcctgtgacttattccctgagacttttcaggagagccagcccacagatgatgaagaaatgatggaagttcatttggagagtcaaatgggaaaaaaacaaacaaaaaactgcctttgatacaggcaattcagtggactataataatagtggagggttgagatgtagagtttttaaaaagtgaacagttgctgttcttacatctgtaaagaaaaccataatgtctttaaatcactcttctgtaaatagatgacctttttgcagtgtaaaaaaaaaaaaaaaaaaaaaaaaaa

SEQ ID NO: 29709 - DNA, 1820 bp, Homo Sapiens
gcggcgacgacggcggcggcagcgctccaactggctcctcgctccgggctccgccgtcgagccgggagagagcctccgccagcggccaggcaccagccagacgacgccagcgaccccggcctctcggcggcaccgcgctaactcaggggctgcataggcacccagagccgaactccaagatgggaggcaagctcagcaagaagaagaagggctacaatgtgaacgacgagaaagccaaggagaaagacaagaaggccgagggcgcggcgacggaagaggaggggaccccgaaggagagtgagccccaggcggccgcagagcccgccgaggccaaggagggcaaggagaagcccgaccaggacgccgagggcaaggccgaggagaaggagggcgagaaggacgcggcggctgccaaggaggaggccccgaaggcggagcccgagaagacggagggcgcggcagaggccaaggctgagcccccgaaggcgcccgagcaggagcaggcggcccccggccccgctgcgggcggcgaggcccccaaagctgctgaggccgccgcggccccggccgagagcgcggcccctgccgccggggaggagcccagcaaggaggaaggggaacccaaaaagactgaggcgcccgcagctcctgccgcccaggagaccaaaagtgacggggccccagcttcagactcaaaacccggcagctcggaggctgccccctcttccaaggagacccccgcagccacggaagcgcctagttccacacccaaggcccagggccccgcagcctctgcagaagagcccaagccggtggaggccccggcagctaattccgaccaaaccgtaaccgtgaaagagtgacaaggacagcctataggaaaaacaataccacttaaaacaatctcctctctctctctctctctctctctctatctctctctctatctcctctctctctctcctctcctatctctcctctctctctctcctatactaacttgtttcaaattggaagtaatgatatgtattgcccaaggaaaaatacaggatgttgtcccatcaagggagggagggggtgggagaatccaaatagtatttttgtggggaaatatctaatataccttcagtcaactttaccaagaagtcctggatttccaagatccgcgtctgaaagtgcagtacatcgtttgtacctgaaactgccgccacatgcactcctccaccgctgagagttgaatagcttttcttctgcaatgggagttgggagtgatgcgtttgattctgcccacagggcctgtgccaaggcaatcagatctttatgagagcagtattttctgtgttttctttttaatttacagcctttcttattttgatatttttttaatgttgtggatgaatgccagctttcagacagagcccacttagcttgtccacatggatctcaatgccaatcctccattcttcctctccagatatttttgggagtgacaaacattctctcatcctacttagcctacctagatttctcatgacgagttaatgcatgtccgtggttgggtgcacctgtagttctgtttattggtcagtggaaatgaaaaaaaaaaaaaaaaaaagtctgcgttcattgcagttccagtttctcttccattctgtgtcacagacaccaacacaccactcattggaaaatggaaaaaaaaaacaaaaaaaaaacaaaaaaatgtacaatggatgcattgaaattatatgtaattgtataaatggtgcaacagtaataaagttaaacaattaaaaagaaaaaaaaaaaaaaaaaaaaaaaaa

SEQ ID NO: 29710 - DNA, 1874 bp, Homo Sapiens
ccggtgatggcggctggtgatggggacgtgaagctaggcaccctggggagtggcagcgagagcagcaacgacggcggcagcgagagtccaggcgacgcgggagcggcagcggaagggggaggctgggcggcggcggcgttggcgcttctgacggggggcggggaaatgctgctgaacgtggcgctggtggctctggtgctgctgggggcctaccggctgtgggtgcgctgggggcggcggggtctgggggccggggccggggcgggcgaggagagccccgccacctctctgcctcgcatgaagaagcgggacttcagcttggagcagctgcgccagtacgacggctcccgcaacccgcgcatcctgctcgcggtcaatgggaaagtcttcgacgtgaccaaaggcagcaagttctacggcccggcgggtccatatggaatatttgctggtagggatgcctccagaggactggccacattttgcctagataaagatgcacttagagatgaatatgatgatctctcagatttgaatgcagtacaaatggagagtgttcgagaatgggaaatgcagtttaaagaaaaatatgattatgtaggcagactcctaaaaccaggagaagaaccatcagaatatacagatgaagaagataccaaggatcacaataaacaggattgaactttgtaaacaaccaaagtcaggggccttcagaactgcaattcttactccctttcacagactgtccggagtctttgggtttgattcacctgctgcgaaaaacattcaacaaattgtgtacaagataaattaatctcactatgaagatttgaataactagacattatttatgctgccaaactcatttgttgcagttgtttgtaatgtctagtggggcttcatcatcctgaaaagaaggagacagggatttttttaaagagcaagaaagtcacaatattacttctttccttccttttttccttctttcctttcttctttctctttctttctttttaaaatatattgaagacaaccagatatgtatttgctactcaagtgtacagatctcctcaagaaacatcaagggactcctgtgtcacatactgtgtttttattttaacatgggtgagggaggcgacctgatcaggggaggtgggggtacacatcaatttgagttgttcaggctactgaaacattaaaatgtgaattcccaaacttttctttttggctttgtcagggaaaagaaaaatatctttataaagaaatctttggaaattaggagaaggaatttcaggtgggtttaagtcagagctagttccccaacagaaagatcatttgaaaccagtttttatcccttctctttccttccctttccctaaatcaaatcaatattaattgtgccttatttcacttaacatagacttgaattatttttagggaaagcccctataatgaattcagaaatcactacaagcagcattaagactgaagttggaatattctgttgaccataaaaccttgatatcattctgtgtatatagaatgtaaaaggaatattacagtgttaactgccatatatgtaatatacacaaactcaattagcattgtaatggccaaatgcattcccccatgcttttctgttttcaaaaaaattgaaaaacaaatcaactcttatccccaacagctgcctaattttaggagtctgaccctccacatctcactggtgtgggtgcatggggctgtggagtgggtgtcagtatggatgtgtctgaatgtgtgaggccttggaagggactctttctgcagatactgtaaatacaagtaccattttaataaagcatgtacaataaaccaaaaaaaaaaaaaaaaaaaaaaaa

SEQ ID NO: 29711 - DNA, 4758 bp, Homo Sapiens; identical to SEQ ID NO: 23902

SEQ ID NO: 29712 - DNA, 4299 bp, Homo Sapiens
tgacagcggaggcggcggcggctgcaggctccgagccgtaggagccggatcgggggaggggccgggcccaggagcctcagccccgccggcagccctaagggcaaggtaaccgccacggggtccccgtcgcgaccccctccctcccggagctcccgtccccgggatcccaagctccgccccgccgacccccgtctcccctggaccccggctctagcctgacgagatccccaacctcctgaggtgctctggccccggattctcccgggctgcattctctgctcctcctcgcctgcgaagcatcacgtccgcttcccgacgctgagggcagccccgtccagggcagtggctctgccaatgatcctgtgagtattcaggaatcactgttgcccctggggatccttgtcctggagtggcccacctgcttgcccccagcatggcgtccgacactcccgagtcgctgatggccctctgtactgacttctgcttgcgcaacctggatggcaccctgggctacctgctggacaaggagaccctgcggctacatccggacatcttcttgcccagcgagatctgtgaccggctcgtcaatgagtatgtggagctggtgaacgctgcctgtaacttcgagccacacgagagcttcttcagcctcttttcggacccccgcagcacccgcctcacgcggatccacctccgtgaggacctggtgcaggaccaggacctggaggccatccgcaagcaggacctggtggagctgtacctgactaactgcgagaagctgtccgccaagagcctgcagacactgaggagcttcagccacaccctggtgtccttgagcctcttcggctgtacaaacattttctatgaggaggagaacccagggggctgtgaagatgagtacctcgtcaaccccacctgccaggtgctggttaaggatttcaccttcgagggcttcagccgcctccgcttcctcaacttgggccgcatgattgattgggtccctgtggagtccctgctgcggccgcttaactccctggctgccttggacctctcaggcattcagacgagcgacgccgccttcctcacccagtggaaagacagcctggtgtccctcgtcctctacaacatggacctgtccgacgaccacatccgggtcatcgtgcagctgcacaagctgcgacacctggacatctcccgagaccgcctctccagctactacaagttcaagctgactcgggaggtgctgagcctctttgtgcagaagctggggaacctaatgtccctggacatctctggccacatgatcctagagaactgcagcatctccaagatggaagaggaagcggggcagaccagcattgagccttccaagagcagcatcatacctttccgggctctgaagaggccgctgcagttcctcgggctctttgagaactctctgtgccgcctcacgcacattccagcctacaaagtaagtggtgacaaaaacgaagagcaggtgctgaatgccatcgaggcctacacggagcaccggcctgagatcacctcgcgggccatcaacttgctttttgacatcgcccgcatcgagcgttgcaaccagctgctgcgggccctgaagctggtcatcacggccctcaagtgccacaaatatgacaggaacattcaagtgacaggcagcgccgctctcttctacctaacaaattccgagtaccgctcagagcagagtgtgaagctgcgccggcaggttatccaggtggtgctgaatggcatggaatcctaccaggaggtgacggtgcagcggaactgctgcctgacgctctgcaacttcagcatccccgaggagctggaattccagtaccgccgggtcaacgagctcctgctcagcatcctcaaccccacgcggcaggacgagtctatccagcggatcgccgtgcacctgtgcaatgccctggtctgccaggtagacaacgaccacaaggaggccgtgggcaagatgggctttgtcgtgaccatgctgaagctgattcagaagaagctgctggacaagacatgtgaccaggtcatggagttctcctggagtgccctgtggaacatcacagatgaaactcctgacaactgcgagatgttcctcaatttcaacggcatgaagctcttcctggactgcctgaaggaattcccagagaagcaggaactgcataggaatatgctaggacttttggggaatgtggcagaagtgaaggagctgaggcctcaactaatgacttcccagttcatcagcgtcttcagcaacctgttggagagcaaggccgatgggatcgaggtttcctacaatgcctgcggcgtcctctcccacatcatgtttgatggacccgaggcctggggcgtctgtgagccccagcgtgaggaggtggaggaacgcatgtgggctgccatccagagctgggacataaactctcggagaaacatcaattacaggtcatttgaaccaattctccgcctccttccccagggaatctctcctgtcagccagcactgggcaacctgggccctgtataacctcgtgtctgtctacccggacaagtactgccctctgctgatcaaagaaggggggatgccccttctgagggacataattaagatggcgaccgcacggcaggagaccaaggaaatggcccgcaaggtgattgagcactgcagtaactttaaagaggagaacatggacacgtctagatagaggcctccgtccccatggccgccaccgctctggaccacaggcggggaggaagcatgctcaagcagcccagcgggcgggccccttccgagggagcctcccacggagtgaagagacatgggggacttttgcacaaccgacgcttttccttaatgttagtgagatatatatatattatatatatatattttttttttggttaggaagtgtgaagttttgtgtgtatgatttctgtgcaaaaacaaaagcaacactcctgagtccttgcagcttccttggccattctcaaacccactcagccttcatcgctgacacacacactcctaccccaaccagactaaatgcctataacgctgtgagtgtccagtccttgtccaggaaactcagatcccggcctggcttcctttcatgagaggagcaggccttggacagcgtatcgagcatcctgacccactgcccctgcctgagaacgccatctcggctcccgggcacagctgatggggtttggggattagaacttaccccactgggtctcccaaaagccttggtgctcccggctgtgggccatctggggcaggaaagtgagccattcctaggctgaggtccaggcagccctgcccctgaagaccctctaggagcagggcacccagtggccctgctgctgtccagccaggcctgcctgaggccacgctgctatggaggctgcctcctagtctcccaccaggtcccaggctgtggaaagccccagcccagggatggtcagaactcgggggcagattccactgccccttctgccaaacacatccagaacctgccctcagccctggaagctagcatcttctggggccaggggcttgcttcctcgctccatagccctcaactgcccaggcgctcccaccagcagaactgagcctgcctcctcctcccagcctgccccgctgcccagaggaccccacgcctctcagaggcagaggtcccatgccagcctttgacccacaacggccacacagccgcctccagaccagcactcggactgccctgcagtggccgcttgggcctccctggcggtcccgccctgccctaggctttaccttggaagcctgagaggcgccggctctcttgctcctccatcgatggacactgcattgcttctcatcggacacttgtggagcgcaggggcctggggagcagcgctaaccctggaggcagcctttgggtgatggctttttcttcccttttcctcccgcgggcctgttttcaggtgttcctagcatttctgcctccaggcaggacggcaggggtgagcagctttgggagagacacctggcctttttctcctggagcctctccctcccggccctgggaagtgggcgcagccctgtgttcccccagcttggcagatgggctgcatgcggcgctcccttccttcccacgctcagcggccccggccagaccctggcagacttcacacctcattgctttaccccctggggcctggggaaatgtctgtactttgggaagtcacagaaatacatttttgtgcaaaatggaaaaaaaaaaaaaaaaaa

SEQ ID NO: 29713 - DNA, 2129 bp, Homo Sapiens; identical to SEQ ID NO: 22362

SEQ ID NO: 29714 - DNA, 4244 bp, Homo Sapiens
tttaaactgtgctttctaagcacagtcaggtagcaaaagtaataaaaaggatggttgaacaagttttcttgtatgttccaggatatgtttgggacttttctttgtttattatatgagttgttccctttgaaattaaagctattttgtaggttttgtgggacataatttgataagtagagttaattaaatttcttctggaagagatctaaattcttattcttagtgagagactgtagttaaaggaaggcttttagaacttgggttcaaggaagatggagatgcgtcggaagctctttggcgggggtgaggaagttcagaaagtgtgcattttccttctggcatttaggtcttgtccgtgtgatttggtggtgcttgggtcataagcctgattaaaattcagggacatgtaccacggcggccaaagcggaattaatttttttatatggggactggagcgctgaaaagttgttcctgaccaggctctaatgagaaattcctctctccccaggttatgaagacagtatggagtttccagaccatagtagacatttgctacagtgtctgagcgagcagagacaccagggttttctttgtgactgcactgttctggtgggagatgcccagttccgagcgcaccgagctgtactggcttcatgcagcatgtatttccacctcttttacaaggaccagctggacaaaagagacattgttcatctgaacagcgacattgttacagcccccgctttcgctctcctgcttgaattcatgtatgaagggaaactccagttcaaagacttgcccattgaagacgtgctagcagctgccagttatctccacatgtatgacattgtcaaagtctgcaaaaagaagctgaaagagaaagccaccacggaggcagacagcaccaaaaaggaagaagatgcttcaagttgttcggacaaagtcgagagtctctccgatggcagcagccacatagcaggcgatttgcccagtgatgaagatgaaggagaagatgaaaaattgaacatcctgcccagcaaaagggacttggcggccgagcctgggaacatgtggatgcgattgccctcagactcagcaggcatcccccaggctggcggagaggcagagccacacgccacagcagctggaaaaacagtagccagcccctgcagctcaacagagtctttgtcccagaggtctgtcacctccgtgagggattcggcagatgttgactgtgtgctggacctgtctgtcaagtccagcctttcaggagttgaaaatctgaacagctcttatttctcttcacaggacgtgctgagaagcaacctggtgcaggtgaaggtggagaaagaggcttcctgtgatgagagtgatgttggcactaatgactatgacatggaacatagcactgtgaaagaaagtgtgagcactaataacagggtacagtatgagccggcccatctggctcccctgagggaggactcggtcttgagggagctggaccgggaggacaaagccagtgatgatgagatgatgaccccagagagcgagcgtgtccaggtggagggaggcatggagagcagtctgctcccctacgtctccaacatcctgagccccgcgggccagatcttcatgtgccccctgtgcaacaaggtcttccccagcccccacatcctgcagatccacctgagcacgcacttccgcgagcaggacggcatccgcagcaagcccgccgccgatgtcaacgtgcccacgtgctcgctgtgtgggaagactttctcttgcatgtacaccctcaagcgccacgagaggactcactcgggggagaagccctacacatgcacccagtgcggcaagagcttccagtactcgcacaacctgagccgccatgccgtggtgcacacccgcgagaagccgcacgcctgcaagtggtgcgagcgcaggttcacgcagtccggggacctgtacagacacattcgcaagttccactgtgagttggtgaactccttgtcggtcaaaagcgaagcactgagcttgcctactgtcagagactggaccttagaagatagctctcaagaactttggaaataattttatatatatataaataatatatatatatatacatatatataaatagatctctatatagttgtggtacggtctaaaagcagtcttgtttcctggaaataaaaagttgggatattaacttgtttttgcactttagaatagcatgagaatctcactaatttagcattctgataaaagaaactttagagcaagtcagaatagagaggtgtttttcctttgaggggataggggaagtaagccaataagaaccttttaaacaaatcgtcctgtcacaaaatgctttcatatggcttaattttgtcaacactgcattgtcttttgagctcttttttcccccccaacaaagtttttttgttttttgtttttttttttaagtagaaattccctccagttttattagcctctttatatgtctcaaattgcatgaattttttctggctgttggaaacctgaatgcttttagacccaaatggaaaatttctgaaatgctggattatctatttttaaacaagcagttgacttaaaactttctgtggcaacttctggttttctgacagttcccagtgagagaaatgctgaaagtacactgggatcactgggacactgtcttatgaaggtttgcttgggatgaaaaaggatattgcagcttcagcagtgttgaactgtgtgtttaaaaatgtgaattactgttattgtatactgtaattgattacatgggctgggggggtgtcaaagaacttgacaggttgtgttgatgctcttagttgagtcttgaaaagtaaatattaacgctacagaaatgcatgagtttcaatatattttttgtctttgtttgcattgtataactttaacgagtgagtttaaaattatttaatttccttagaaaaatagcaccatttggaaaaaaaaactggtgttatgaagaacgtaaatgcactgtttttatttttattttatataatttaaattgactttcccactgtctttaagttgaaactgttaagctgaataaaaacttaagctgcaaattgataacttcgctacataacaaggaaaatataaatgtttacaaacagcttaaagatttgcatgtgcagtgtgcatttataacaaacttctaattgcacaaaacccatgccagctcagagtttaggtgtacacatttacccagttgagcgttcttagaataactactgcacaagttgacaataggtcgttctctctttttttttgtttgctccctttttctttttctccccttcctccttaccctccctcccttactctccccccccaccaccaccctccacccccaactcatgaaaagattctatggactgaaaaagccccaggctgaaaggactggactgccttgattgacatggggaagggggttagtagactatgtggattgcggcagcagaggctgcagcctaacgtgtggttttaatgaccagcacgcaaggcaaaagcattttgcacagtgtttgttttcctgtcttgcacttacaaataaggtctatgggagtagcatggaaaacgtttgctgtttttcccttttttttttaattgcttttgtttaaaatttgatcgccttaactactgtaaacatagcctatttttgtgcttaagatactgaatggaaaactccattgtgtgttgctggactgttttggaaatatttggttaaatgtgtgttaatttggctgtaatggcatttaaagcaaacaaacaaacaaaaaaagctgtgaaaatggccttggagcattatctttagttacttgaagagtttctagtttttttaaaatacagtttatgttaaaataatttttattaatttagagaagacaatcaatgtctgtgagaaaacggactttcttttggattttctttttgtggtcattgtgagtgattgctttttccttttcttagtttcacattcttcctttgttctaaaacttagactgacatctagctttgacaatcatagtatgttttattttcctgagggggaataacttataatgctgtttagttttgtactattggtgtgttggtgaatttttaaactgtgtgctaactgcaataaattatatgaactgagaaaaaaaaaaaaaaaaaaaaaaaaaaaaaaaaaaaaaaaaaaaaaaaaa

SEQ ID NO: 29715 - DNA, 1980 bp, Homo Sapiens
atcctcaccttccctcgccttcctgttcctggcggagccgggctccgctcgtcttctctgtcttagggctggtgctggccctgcccacgcctagggctccggcgcgtcacgggcctcagctgggattcccgcgcccctcggacggccacgagactcggacatctttccaggaacagcgtgaggaggacagaagcacccaacaggactgctcaagccacctgcgaacactgctgctaccatgcccaagagaaaggcaaaaggagatgctaaaggtgataaagcaaaggtgaaggatgagccacagaggagatcagctcggttgtctgctaaaccagctcctccaaaaccagagcccaggcctaaaaaggcctctgcaaagaagggagagaagcttcccaaagggagaaaggggaaagcagatgctggaaaggatgggaacaaccctgcaaaaaaccgagatgcctctacactccagtcccagaaagcggaaggcactggggatgccaagtgaaatgtacatttttgagagctctgtacttatagtgactctactgtttgaaatactatttttttaaatcaagttttataaaagtgtagaattttggcttttttaagttatgttgttagcacacaggacacttccttgttgtcttttgtggaaagggcaagtaccactaatagggtgtatctcagaaactgaattgaaataagggaaaataggattttctgtcctggtttttgaagattgttcttgattcccttgattcccaggagagattctctgacattcacgtgtcagccactttggcacggaagccttacagtgtggggaaccaaaacttcgtgtctcccctttccccgatgccatcagcatagacttgacttccttaaaccgagagttttgatgtggccttggcaaccctaaaatcagctgtgttaggtaacaaaactcaggctttctgttgatgacatcgagatggtgtcacttaaaagagccaagattcctgttttcagtttgtggattcatcctgctggttttactttagtccctccatgtcaaagtgggcctgagaaaagctcatacatgcctcatgtgaagtgtccaccctctctgaaaatctttcttgttcaaaacagcaacgacatatcttgttaacttttacggtgacttttggaggaggggagtttggaaattgtaaaatgttatagattgttgcctatttcctgctgaaagtaaatgtttttaaaaagtatcatataaagctgaatacaaattggtttggggggagatcctttcctacccaaagtcataaatatattctttactgccttgtggaaattttatagttttgcctttcacatttgtctttagtctgtcctgaactgatttttgtgaaaattatgagttagaaattcaacttaacatttttcatattcgaagtggttgtctctgcactatttactgaaaagttcatcctttccccagtgatttgtaacactgcctctttcataaattaaatttttgtgtatgtgtgtgggtcttttgatggtttctattctgactgacatcaatttgtctaatcttgtagcagtacagtacagtcctgattattgcaactttaggaaaaggtctgataaaaaccaagatgcctccacattttgtcataattgtaaccaatttcacctctgtctccagtatcaccacaaaattgttcttccttggagtgtcttggctattcttagccaactgttcctccatattacttctagaattagaccaacaatttataaatcaaacaaacccaagagcattgaaattttgattggatttgtattgaatttatagattaatctggtaaaccatgtcatctttacaatgttgtcttccaatacatgaatatggtacagctcttcatttacttaggcctttgaaatatctttcaataaagtttataattttctccataaaaaaaaaaaaaa

SEQ ID NO: 29716 - DNA, 3286 bp, Homo Sapiens
tagcagcgaatatactttacaccaaatctcagaagattcagaacttagatgagtggggcccaggacaggaaccctggagccttggaaggaggggagccccatctccccagaagagcagtgaccccagcagagaggggcctggtgtatcactggaggaaatagcctgccaaggaatacacgtcttcagaagaaattctgtgtggcttcaagagactgatcaaattgtgagaggaaaacagcctacccggtcctcttttcttcaatacaaaatgagataataggggttggaaggaaaaccttcaagacctatggaagtcagttgcagccagctcatcacatagaggtgcaggtgaggtgtattttcatcacggtggaaaattctggctgcttcatctccatctctagagccaatattggagcttttcaataaaagctatggcctcaaccaccagcaccaagaagatgatggaggaagccacctgctccatctgcctgagcctgatgacgaacccagtaagcatcaactgtggacacagctactgccacttgtgtataacagacttctttaaaaacccaagccaaaagcaactgaggcaggagacattctgctgtccccagtgtcgggctccatttcatatggatagcctccgacccaacaagcagctgggaagcctcattgaagccctcaaagagacggatcaagaaatgtcatgtgaggaacacggagagcagttccacctgttctgcgaagacgaggggcagctcatctgctggcgctgtgagcgggcaccacagcacaaagggcacaccacagctcttgttgaagacgtatgccagggctacaaggaaaagctccagaaagctgtgacaaaactgaagcaacttgaagacagatgtacggagcagaagctgtccacagcaatgcgaataactaaatggaaagagaaggtacagattcagagacaaaaaatccggtctgactttaagaatctccagtgtttcctacatgaggaagagaagtcttatctctggaggctggagaaagaagaacaacagactctgagtagactgagggactatgaggctggtctggggctgaagagcaatgaactcaagagccacatcctggaactggaggaaaaatgtcagggctcagcccagaaattgctgcagaatgtgaatgacactttgagcaggagttgggctgtgaagctggaaacatcagaggctgtctccttggaacttcatactatgtgcaatgtttccaagctttacttcgatgtgaagaaaatgttaaggagtcatcaagttagtgtgactctggatccagatacagctcatcacgaactaattctctctgaggatcggagacaagtgactcgtggatacacccaggagaatcaggacacatcttccaggagatttactgccttcccctgtgtcttgggttgtgaaggcttcacctcaggaagacgttactttgaagtggatgttggcgaaggaaccggatgggatttaggagtttgtatggaaaatgtgcagaggggcactggcatgaagcaagagcctcagtctggattctggaccctcaggctgtgcaaaaagaaaggctatgtagcacttacttctcccccaacttcccttcatctgcatgagcagcccctgcttgtgggaatttttctggactatgaggccggagttgtatccttttataacgggaatactggctgccacatctttactttcccgaaggcttccttctctgatactctccggccctatttccaggtttatcaatattctcctttgtttctgcctcccccaggtgactaaggaaaagagcagaagctccttggtttaaccagcacagagaaaataatataaatcccataagggcagacgtttggtctgttttcttcgctgtcatttccttagtagttagactagtgctgagattttagtggatatataattgatttatgttgaatatatggacttagcaactaaaaataccacagatggttaacctggactggggcaaagcaagataatagtgatgatcgtatgttgctgtctccatccgtctttaatgggtcagggctttgatttccaagggtcttcaggtgatgagtaggggtacccacaagtcagaaggtctgcgttctcctagtttgtttgctgccatttgaactcatgtagggaatgaaagaaagctgcaattatccgccaactgcatttaaaacaaaacaaaacagaaaaatcaaaataacattgactcttccaaccactgacatgttgtttaataatctaagcggcagtcctggaggctaccagacttactgagttctacctgagaaacagccaagcaaagtgtgagagaagggttaagactggcttacaatgagatgcttcaaatgaaaagggaattatgagtaaaattgaactttgatgggggattcagttctggaaaagaatttggtattttccagtctgctaggaccaattaccttgaaatattttaaaatctcagtaaatagttattgctgaaatggctgttggcagttcttattatgattcagagaagagcaaatagaccttaacttcattttgaaaaagaccaaattaccatacccgagtgagtaatgacaggactacaactaaaacataaacaacattaatgatgaccataaaaagtcacaaaattgctaaatgttataatttagagttgacataaaaattgatggccaggcatggtggctcacgcctgtaatcccagaactatgtgaggctgaggcaggtggatcacttgaggtcaggagttcaacaccagcctggccaacatggtgaaaccctgtctctactaaaaatacaaaaattagccgggcatggtggtaggggcctgtaacccagctactcgtgaggccaaggcaggagaattgcttgagcctgcagcagctgcagtaagccaagatcatgctgtgcctcaaggaaaaaaaaaattaatgtttactgatatttgttgaagtcctacaacatcacctctgagaataggagaaatgaagcaacagttgtgtctagatgtcagaggcatggctgggcctccatctctgcctaagggagatataaaagagttcaaactattgcccatgttccccagggtcagaagttctaattatgatgatagaggctgggttgtaagtagtaagtgaagggtagcagaatatgccatctttggcataagaagtattttgagttgaagacaattgagaaaaaaaaaaaaaaaaaa

SEQ ID NO: 29717 - DNA, 2279 bp, Homo Sapiens
gtggttctagggcaggcgggcgggtttgagagggcggggattgcgactctcacaccctgagctccggtgctcctttcctaactccactggctgcggcatctgtgggaaaagtgtggctgggtcttcgaggagccgcaccaatggcttccgtgctgtcctacgaaagcctggtccacgccgtggccggagccgtgggaagcgtgacagcaatgacagtgttttttcccctggatacagctagacttcgacttcaggttgatgagaaaagaaaatccaaaactacacacatggtgctcctggagatcattaaagaagaaggactcctggcaccatatcgagggtggtttccagtgatttccagtctctgctgctccaattttgtctatttctacacttttaatagcctcaaagcactctgggtcaaaggtcaacattctaccactggaaaagatctggtagttgggtttgttgcaggagtggttaatgtgttgctaacaactccactctgggtggtaaacaccagactgaagcttcaaggagcaaaatttaggaatgaagacattgtaccaacaaactacaaaggtatcattgatgcttttcatcagatcattcgcgatgaaggaatctcggctttatggaatggcacatttccctcattgctgttggtcttcaatcctgccatccagttcatgttttatgaaggtttaaaacggcagcttttaaagaaacggatgaagctttcttccttggatgtgttcatcattggtgcagtagccaaagcgattgccaccacggtgacctatcccctgcagacggtacagtcaattctgaggtttgggcgtcatagactaaacccagaaaacagaacattgggaagtcttcggaatattctctatcttcttcaccaacgagtaagacgttttggaataatgggactctacaaaggccttgaagccaaactgctgcagacagtcctcactgctgctctcatgttccttgtttatgagaaactgacagctgccaccttcacagttatggggctgaagcgtgcacaccaacactgagacgccttcccatgaaaaattccgaagatgctcaagagggaggtttcctcctgagtgaagagaagtgattctcccttgactctggctcctgccaccacaaatgttaccctcattggcttgaaaagcatccaagggtgcacagggagtatggccaactggacctgttgtcaccttaattgtcatgctggctggttggattttggggtggcagttggactaatgtgaaaaaaacattgctgaaaacctaaaaatgaaagtttgtgagtgtttattggttttcttaagagaaatggactattttgctctcatgtgtaatgttttctatttaaatctttcttaaatataccagctgttctctttccctgaactctcccccaggttctaggacaaatttaataacatgtaattctcctcaaatacttttgtatgtctcagtgttggtgttttcctccctaaaactaacattagggctgtgccacgggcatgactttatttttgttgggcttttttttccctgcttaaggagaggtgtcttttttggatatgagctatttattttgtgaaatgaaaattgttcacccaaatgattctcttataaactatttgtaaatgtcacttattcattagtgtttgacataatttttagaatatttattttgaatcaatcctttcattacgaaagacttgaagttttgtgtccattcttacaagccctggtcagtcaagtcccaataaatggtcagcacaaaaaagatattcttgaaaattgctctttattaaggtattacgttgagtttgcaaccagatgggaaaaatcacaaaaatgagaaggggagcagatatcttgttgaggtctggatattatctccctttataaacttggtgtaggccgtatattttgaaaataaacatctggttgaggttatttcatttggaaaccttccttagagtcctgttgctcagtgtggtccatcagacggtagtactgccacaagctgagagcttgctgggcacgcaacccagagtttctgaatcctgttccgtattttaacattcccaggtgattcacagccacattaaagttcaggagaccataggacccctgacccatgagaagaagtgattggtttcgattatagacatcaagataaagatttttctcaaaggaaagagattaatgtattaaaacaacctctgaaaaaaaaaaaaaaaaaa

SEQ ID NO: 29718 - DNA, 4452 bp, Homo Sapiens
cgccggtgaggtaggggcgggaggcggggggagacatggctcggcgcggctggcggcgggcacccctccgccgtggcgtcggcagcagtccccgagcccgcaggctcatgcggcccctttggttgctcctcgcagtgggcgtctttgactgggcaggggcttcggacggcggcggcggagaggctagagccatggacgaggagatcgtgtccgagaagcaagccgaggagagccaccggcaggacagcgccaacctgctcatcttcatcctgctgctcaccctcaccattctcacaatctggctcttcaagcaccgccgggcccgcttcctgcacgaaaccggcctggctatgatttatggtcttttggtgggccttgtgcttcggtatggcattcatgttccgagtgatgtaaataatgtgaccctgagctgtgaagtgcagtcaagtccaactaccttactggttacttttgatccagaagtatttttcaacatattacttcctcctatcatattttatgcaggttatagcctgaaaaggagacatttttttcgaaatcttgggtctatcctagcatacgcttttcttggaacagcaatttcttgtttcgttattgggtcaataatgtatggctgtgtaacgctgatgaaggtaacgggacaacttgcaggagatttttactttacagattgcctactgtttggtgccattgtatcagcaactgatccagtgactgttcttgctatattccacgagcttcaagttgatgttgaactctatgcacttctttttggtgaaagtgtcctcaatgatgctgttgccatagtgctgtcctcctcaatagtggcataccagccagctggagacaacagtcacacctttgatgtcacagcgatgttcaagtctattgggatcttccttggaatcttcagtggatcttttgcaatgggtgctgctactggagtggtgacagctttagtgacaaagttcaccaaattacgggagttccagttgttggagacaggcctgttcttcttgatgtcctggagtaccttcctcttggctgaagcatggggcttcacaggtgtagttgcagtattgttttgtggcatcacacaagcacattatacgtataataatttgtccacggagtctcagcatagaactaaacagttgtttgagcttctcaatttcttggcagagaatttcatcttctcctacatggggctgacactgttcaccttccagaaccatgtctttaacccaacatttgtagtaggagcatttgttgctattttcttgggaagagctgccaatatttaccccttgtccctcttacttaatttgggtagaagaagtaagattggatcaaattttcaacacatgatgatgtttgctggccttcgtggtgcaatggcatttgccttggccattcgagatactgccacttatgcacggcaaatgatgttcagcaccacgcttctgattgtgttttttaccgtgtgggtatttggtggtggcaccactgcaatgctgtcatgcttgcatatcagggttggtgttgattcagaccaagaacacttgggtgttcctgaaaatgaaaggagaactaccaaagcagagagtgcttggcttttccggatgtggtacaactttgatcataactatctgaagcctctgctgacccacagcgggcctccgctgacaacaacactccctgcctgctgtggacccatcgccaggtgcctcaccagcccccaggcttacgaaaaccaggaacagttgaaagatgatgattctgatcttattctcaatgatggtgacatcagtttgacatatggagattctactgtgaacactgaaccggccacatccagcgccccaaggagatttatgggaaacagttctgaagatgccttggatcgggagcttgcatttggggaccatgaactggtcattcgaggaacacgcctggttcttccaatggatgattctgaacccccgctaaatttgttagataatacgagacatggtccagcctaagcttactaatactcacttagtgatttgtaaaatttgcacatgtgattgtgaagaaatttgtactacctaaaagtcccagtgcatgtctctgaatgtgtaagctatataaatgctatttatatggcatagaaagaatataaatatcctgtacacggcagattgtgaacaaactatattcctttaagttttcctggttgcactctgtagactggatctgttttaggaagttactttcacagtgatgttgtgtgttctgttagttttatgtctcagttaaagtgtaaaaagtgacggattttctctttcttaaacttacctgacacttaaccagagtaccagttctcgtgatgtgaattaatttttttgtgtgctaggggagggagagtgaggagggagtgttatttccttgggaacctagggaggagaggttcctttgttgggaaacttttgttgatagctgctgcctttgtcctgatcgttttctttcccttttctctggtggcctgttgtggtgcaacgagctgatggcatttgatcttgccccattcaggttggggagtgaagtgtggggacccttttcccccgcttgctgtgaaagcacagattcattgactacagtacactgttgttcagaaaagaaggctgcaaatgacttctgagactttatgtcttttcttccagaccaagaccgtagaaggagtcacatctagccggcttagccaaagtacaggtgtatatagttcagggcacttgatttagatttggaggggctggggtgggcagagagcaagaggcgagtaaagagaatggtggtttcagagatctctcttcccaaatgtgtaaatattctataccagataagtttaaataagaaatttaattgctgcttaatttttgattatgtactttatctgtatagcaggctttgtcgtcagaagtttttatatcgatttaaattgctgctctttagcagccaaacaggagcaaaatgtaaaatttttgaacttactgtgtctaatcatcatttgttagtctgtagttaatgtcaacagttaatttatgaacccacgatcgttccacactgcaccaaagtcagtcataagagaaatcgaatattctggagcactgattgcagcagggtggctcctttgtgtgcagcaggtgtagtagtcttcattttcatggtacgttttaatattaattacctaagctgccatgcattttttttttacagttctcaaggaagagcacagaacaatttctcatttcatatttggagtatgaaagtagattctattttgtaatgctgataatacctaaagatgcattgaatgcttggaagaatgctttttgatgttgattttgacctgttcatgattcagaagaaaaacaaacttttttggattttttttccctcaggtctgagtagcattgccttaaatcttatccagttagaacattgatttatttacatgatgttcagattttccagtgaaaaatacccttctgaacaaaacatgtacttactctccgaaaggcatctatctgtgctattgcaaacactccttgagattttaggggaattctaatgttgtaccctttcgtggcagctttgactgttggcatagccatttgttatgtagtggtagcgactttcctgctatgcaggaatccctcccatgacgtgtatgttttacatgatgtgtgcctcttcacgcagtaaatagtttcttgttaatgtatgtttgaggagtttgaacgtcagtgtcacttacccacaaagttattcaagttgtaaaaggttataaataatttaacaactaccttttttattctgtcgggttactgacctcactttatgtaaatacttcgcatgacaaattcagtaactcgtctatttcagcatgcataagacttttcactagggaaactgataaagcttgagtcaactaaatctgccttcatactttatcaaggggaaccaagcctgctgtgcttacatcagcatctggaagactttcctctcctctaatctgtgtacacatctccaagcaaggaagaaaaaacaaactctgctcagacgcctatgaaacacctgaatgaactttgatgaagtacagtctgagttaccatcatgcacaagtagaactgctcttggacttgttttcctgttgtttgtggaacctacgcgtttgaatggcttgaacgttgcatcttttaaagttattttttaaggtttcttggcatttatcctagttgtccgtgtttggcaatgtgctgttaaagtaatagacttttaatctttatgtattttttgttttctctggagtacttggacagatgttatagtggtttcttttaggaaaatctgtcattaaaaaagttatagccttgcaaataaccactc

SEQ ID NO: 29719 - DNA, 3890 bp, Homo Sapiens
ggcagaggcggcgccagccatgttggccgggcggaggtcttcgctgaggcccggggcggggtggcgccacccctgattgcggtgccacggactgctcctgctgggcggagaggacagattttgcaaagcggaggctgcgacgggtcctgcagggggacagtgaggaaagggccgcctcgtctccgctcctgggggaccgcagaaataagaatcaaactccacaatgacaacctatttggaattcattcaacaaaatgaagaacgagatggagtccgatttagttggaatgtttggccatcaagtcgactggaagctacaagaatggttgttcctgtggcagccctgtttacaccactgaaagagagacctgacttaccacctattcaatatgaacctgttctgtgtagtaggaccacttgccgtgcagttttgaatcctttatgtcaagtggattatcgagcaaaactttgggcttgcaacttttgttaccaaaggaatcagtttccacctagttatgctggtatatctgaactgaatcagcctgctgaacttttacctcagttttctagcattgaatatgtagttctgcgtggtcctcagatgcctttgatattcctctatgtggttgatacttgcatggaagatgaagatttacaagccctgaaagaatccatgcagatgtcattaagtcttttaccacctacagctttggttggacttattacttttgggagaatggttcaggttcatgaacttggatgtgaaggcatttcaaaaagctatgtcttcagaggaacaaaagatttgtctgccaaacaactgcaggaaatgctggggctctctaaagtaccacttactcaagcaacacgtggtcctcaggtacagcagccacctccttccaacagattcttacaaccagtacagaaaatagacatgaatctcacagatcttctgggagaactccagcgagacccttggcctgtaccacagggaaagagacctttgcgttcctctggggtggcactttccatagctgtaggactgctggagtgtacttttcccaacactggtgctcgtatcatgatgttcattggtggtcctgctactcaggggcctggaatggtggttggagatgagttgaagacacctataagatcgtggcatgacattgacaaagacaatgccaaatatgttaaaaagggaactaagcattttgaagcattggctaatcgagctgctacaactggccatgttattgatatctatgcgtgtgcattagatcagacaggtctcctggagatgaaatgctgtcccaaccttactggaggatacatggtaatgggtgattctttcaatacttccttattcaaacaaacttttcaaagagtctttaccaaagacatgcatggacagtttaaaatgggctttggtggtacgctagaaataaagacctcaagggaaataaagatttcaggagctattggaccctgtgtgtcactcaattctaaaggaccctgtgtgtctgaaaatgagataggaacaggtggcacatgtcagtggaagatatgtggacttagtcccactacaaccttagccatatattttgaggttgtcaatcagcataatgctccaattcctcaaggagggcgtggtgcaatccagtttgtgactcagtatcagcattcaagtgggcagagacgcatccgagtgaccaccattgctaggaactgggcagatgctcaaactcaaatccaaaacattgctgcatcttttgaccaggaggcagctgccattcttatggcccggctagcaatatatagagcagaaacagaagaaggtccagatgtgcttaggtggctggacagacagctcattcgactgtgtcagaaatttggagaatatcataaagatgacccaagttccttcagattttcagaaactttctccctttatccacagtttatgtttcatttaagaagatcttctttcctgcaagtttttaacaatagtcctgatgagagttcatattatcgtcaccattttatgcgtcaagatctgacccagtctctaattatgattcagcctatcctgtatgcgtattcttttagtggaccaccagagccggttcttcttgatagcagtagcattcttgcagatcgtattcttctcatggacacattcttccagattttgatttatcatggtgagaccatagcacagtggcggaagtcaggataccaggatatgcctgagtatgaaaatttccgccaccttctgcaagccccagtggatgatgcacaggaaattcttcactccagatttccaatgccaagatacattgacactgaacatggaggcagccaggcccgtttcctcctttcaaaagtcaacccttcacagactcataataatatgtatgcctgggggcaggagtctggagcacctattcttacagatgatgttagtttacaagtgtttatggatcacttgaagaaacttgctgtgtccagtgctgcttgaagtgctaataatgttaaagacacttaagaagatgaaataatattcaaatttcattttttcctttttccatttatctgtggaaaccaacagatattgctctatattttttgtattagtatggtttgagacaacatatggaaaatgttcacatttgtagattaagctggaattataatgagagcaataagaacaaatttattttgcttaccacagtgttatagctggttctagaaatttgaagtctttataacttaattatgtttaataaaaaatagagtctgcctcgtactacagatgtaactcatttgtatattgcagacagacccaaagtggcactgaattttcttgctcaccttttaaaaacttgttccttaattttagccagaaagcaaaaaaacaatagtaatgataaatgtgaacatttttgcttattcattgaatatttttctgtaattttcagcacttatgtatacactttttctgtacttactaggttaaggcagatttatttttatgatttgtttaggaattatttgattttataatggtaattttcatgatgataatgtttttggttatttggaaagatagtttagagatgaaaggtttttttgggtaacaatcccgcagctgacaaaaaatgtgaaatttccacaaaatatccaacttatgtgactaaacgcagtagtttttttaaaaggggagatagaaaataaatggttttgttggagtgcattttagtaagcctttgcagtaaaatgacggttgtaactactaaaccaaatttagttttcacagcatggttttgttgttttccccttgtttttcagaggtaaattttgcattatatccttcagtattttaacactattttggcagtttacacattactttttgtttttccttcctttttgtgaaatgtattaagttgtggttcttattgaaacagtattatataatgtttgcttaattatatcatgtgatgctcagttctattttgatttattcattagtattcacttttacctttaaagtttacttgtagcaaatatgtttacattgataaagccagatatgttttgacaatgaaatttacatatcaagtactgcaaataaaaggtggtgctatgatatatgcttaggaggacagttttaatgattgtacttgcatgaacacaatcatatgatggtaaagcagaaacttaagaaaaaattgtttatgtgttatattcaattagcttaaataagttgctttgttatattttatttgaattgaactacgctaggcctaaatgccaataaaatatacttttcactgttaaaaaaaaaaaaaaaaaaaaaaaaaaaaaaaaaaaaaaaaaaaaaaaaa

SEQ ID NO: 29720 - DNA, 3080 bp, Homo Sapiens
tcccctttatttccactccccacccgcgtggctttgctctccctctcccccctcagctcgtctgtatttggagctccggaagctgccggcgactctcccctggagcagcgtgactgacaccggctcctattcagctgggaggagggagaggggaggagaaggggagggccgcgggaggagggtacgagtggccgaccacggatttgcattgccgaggacgggaccccagggcagcgaagcagaatggccaacatgcagggactggtggaaagactggaacgagctgtcagccgcctggagtcgctgtctgcagagtcccacaggccccctgggaactgcggggaagtcaatggtgtcattgcaggtgtggcaccctccgtggaagcctttgacaagctgatggacagtatggtggccgagtttttaaagaacagtaggatccttgctggggacgtggagacccatgcagaaatggtgcacagtgctttccaggcccagcgggctttccttctgatggcctctcagtaccaacaaccccacgagaatgacgtggccgcacttctgaaacccatatcggaaaagattcaggaaatccaaactttcagagagagaaaccgggggagtaacatgtttaatcatctttcggccgtcagcgaaagcatccctgcccttggatggatagctgtgtctcccaaacctggtccttatgtcaaggagatgaatgacgctgccaccttttacactaacagggtcttaaaggactacaaacacagtgatttgcgtcatgtggattgggtgaagtcatatttgaacatttggagtgaacttcaagcatacatcaaggaacaccacaccacgggcctcacatggagcaaaacaggtcctgtagcatccacagtatcagcgttttctgtcctctcctctgggcctggccttcctccaccccctcctcctctgcctcctccagggccacctccacttttcgagaatgaaggcaaaaaagaggaatcttctccttcacgctcagctttatttgcccaacttaaccagggagaagcaattacaaaagggctccgccatgtcacagatgaccagaagacatacaaaaatcccagcctgcgggctcaaggagggcaaactcaatctcccaccaaaagtcacactccaagtcccacatctcctaaatcttatccttctcaaaaacatgccccagtgttggagttggaaggaaagaaatggagagtggagtaccaagaggacaggaatgaccttgtgatttcagagactgagctgaaacaagtggcttacattttcaaatgcgaaaaatcaactattcagataaaagggaaagtaaactccattataattgacaactgtaaaaaactcggcctggtgtttgacaatgtggtgggcattgtggaagtgatcaactcccaggacattcaaatccaggtaatggggagagtgccaacaatttccattaataagacagaaggttgccacatatacctcagtgaagatgcattagactgtgagatcgtgagcgccaagtcatctgaaatgaacatacttatccctcaggatggtgattatagagaatttcccattcctgaacagttcaagacagcatgggatggatccaagttaatcactgaacctgcagaaattatggcctaacttcctgagagaccgaaccccctcacctgaatccccctctatcaaacaaacaaaaaagcagcagtaaagagctagaagttgcagtagcccctactgctttagctttggcctccaacgattctgtgctatagatacagcactgtttctggcacgcctcgtgggcattttgaaatatttaacgtttcctcatgatttgcctttgtgtgtgattttagttccacatgatgacttgtgaacattagggatttaaaggaaaaaaaaaaagaattctgttcccctcatatcatgaacacagtaactgataggtaaaaagactgcatgattcacttttacacttatatttcattgctagttaaaaaataaaacctttgagaatctaagatgtacatttttaccttttaggcaatttcaatataatgtagaagtagtagtgtgccctgaaaaatgtacacgttttttcttattgttaccacatgttcacctttatcagcgtggatactgtcagcatgagtacatatttcaacccacgcttgtaaaagacataagagtttataaaggaccaaattcagttccttggtccttggaagacctatattctctgtagttactgaaaaccgaaagtcaattctaattattcatcttacatatttttccaccatgtcatttgaaaacttgcttttcttctgcataagagattcttatgccaaaaacattaaacagaagaaatcattttttttgctatgtaatacctcgcaactttgctctaaaatcaagctcagttattattttccaagtttgaacatgttaaatatcagatgccttgtaaattatgtctttaacgttttcttatagactaatttcctcttttccacctgccagacttgctaaccaagctcgaaaatgaacatgaaaaagccatacatgtattatttctcctaaaacctaaggcattatctgttggtttggcttgctgctcctattttgtagtcttgatagtagatgcttcttcagcgtaagagtagctatgatattcctttttatcttttcagtacatagtgctgaaaaatctgcaacttcttggatcatatttaatgaattatagtataatgcttgcaggcccagtacaagcatatatattgtgcctcttacagcctttggaatacattgtttccattttttaaatatcttctatatccatatagtattcaaattattaatgctcatgtaccaaggttttgctataaaagttttgtctgtatgaataatgtggctttagtaaataatcatttttcaactgtaaacttattctgaaataaagtaaaattctaattgtttaaatactgtgatgaaaaaaaaaaaaaaaaaaaaaaaaaaaaaaaaaaaaaaaaaaaaaaaaaaaaaaa

SEQ ID NO: 29721 - DNA, 6328 bp, Homo Sapiens
cccagcctgccggccggtactcaccgctacccggagttcgctcagacggtgagatttggggcgggtccgaggcagcggcgggacgctacctgcgaccgggaccatgaggagctgccagacccgtggggccggtaacgagagcagtcgcggcacctgctgagaggaaagagggagcggtccggcgcggctggggcgcggcagaggcttgcccgatcctcggccatgtcactgctctgcgtgcgcgttaaaagggccaaattccagggttcaccagataaatttaacacatatgtgaccctgaaagtacagaatgtgaagagcacaactgtagcagttcgtggtgatcagccttcctgggaacaggatttcatgtttgagattagtcgcctggacctgggtctaagtgtggaggtatggaacaaaggactgatctgggacaccatggtggggactgtgtggattgcgctgaagactattcgtcagtcggatgaggaagggcctggggaatggtccacattagaggcagagacgttaatgaaagacgatgagatctgtggaactagaaacccaactcctcataaaattttgcttgatacaagatttgagttgccttttgatatcccagaggaggaagccagatattggacctacaaatgggagcaaatcaatgccttgggagctgacaatgagtattctagtcaagaagaaagccagaggaagccattgcccactgctgccgcccagtgttcttttgaagaccctgatagtgccgtcgatgaccgagatagtgactatcgcagtgagaccagcaacagcttcccacctccttaccatacagcttcccagcccaacgcttctgtgcaccagttccctgtgccggtgcgatcgccacagcagctgctacttcaaggcagttcccgggactcttgtaatgactctatgcaaagttatgaccttgattatccagagcggcgggctatcagccccaccagcagcagtaggtatggctcctcctgtaatgtgagtcaaggaagctctcagctaagtgaactagaccagtatcacgaacaagatgacgaccatcgggagacggactcgattcattcttgccacagctctcacagcctgtccagagatggccaagcaggttttggagaacaagagaaacccttggaggtgacaggtcaagcagagaaggaggcagcatgtgaacccaaggagatgaaagaagatgccacaacccaccctcccccagatctggtgctgcaaaaagaccacttcctaggtccccaggagagttttcctgaggagaatgcatcttcaccatttacccaagccagagcacattggatccgagcagttaccaaggttcgactccagctgcaggagattccagatgatggtgacccctctctgcctcagtggctcccggaagggccagccggagggctctatggcattgacagcatgccagatttacgcagaaagaagccactgccacttgtcagtgatctgtcactggtccagtctcggaaggcaggaatcacttctgcaatggctacacgcacttctcttaaggacgaagagctgaaatcccacgtgtataagaaaaccctgcaggccttaatctaccccatttcgtgcaccactcctcataactttgaggtctggacggccactaccccaacctactgctatgagtgtgaaggcctgctctggggcattgcccggcagggcatgcgctgcagcgaatgtggagtcaagtgccatgagaagtgccaggatctgctcaatgctgactgcctgcagcgggctgcagaaaagagctgtaaacatggagctgaggaccggacccagaacattatcatggccatgaaggaccgcatgaagatccgagagcgaaataagccagagatctttgaagttatccgggacgtcttcacagtgaacaaagctgcccatgtgcagcagatgaaaacagtgaagcagagtgtactggatggcacctccaaatggtcagccaagatcaccattactgtggtgtgtgcccagggcctacaagccaaggacaaaacaggatccagtgacccttacgtgactgtgcaagtcagcaaaactaagaagcgtaccaagaccatttttggaaacttgaatcctgtttgggaggagaagttccattttgagtgccacaactcctctgaccgcattaaggtgcgtgtatgggatgaggatgatgacatcaagtcaagagtaaagcaacgcctaaagcgagagtctgatgatttccttggccaaaccatcattgaggttcggaccctaagtggcgagatggacgtctggtacaacttggagaagaggacagacaaatcagccgtctcaggggctatccgactacaaatcagtgtggagatcaagggggaggagaaagtagccccataccacgtgcagtatacatgtctccatgagaatcttttccattacctcacagacattcagggcagtggaggagtccgcatccctgaagctcgaggagacgatgcctggaaggtgtactttgatgagacagcccaagaaattgtggatgaatttgccatgcgttatggcattgagtccatatatcaggccatgacgcactttgcatgtttatcatccaagtacatgtgtcctggtgtgccagcagtgatgagcaccttactggccaacatcaacgcctactatgcccacacaactgcctctaccaatgtctctgcatctgatcgctttgcagcctccaactttgggaaagagagatttgtaaaactgctggaccagctacacaactcactgaggatcgacctctctacatacaggaataatttccctgctgggagtcctgaacggcttcaggacttaaaatccacagtggatttgctgaccagcattactttcttcagaatgaaggtacaagaactgcaaagccctccaagagccagccaggtggtaaaggattgtgtgaaggcctgtttgaactccacatatgaatatatcttcaacaactgccacgacttatacagccgccagtaccagctgaagcaggagctacctccagaggaacaagggcccagcattcggaacctggatttctggcccaagctcatcacactcatcgtgtcaatcatagaggaagataagaattcctacacacctgttctgaaccagtttcctcaggagttgaatgtgggaaaagtcagcgcagaagtgatgtggcatttgtttgcccaagacatgaaatatgcattggaggagcatgagaaagaccacctgtgtaaaagtgctgactacatgaacctgcacttcaaggtgaagtggctccacaatgaatacgtgcgggatctgcctgtcctccaggggcaggtgcctgagtacccagcgtggtttgagcagttcgtgctacaatggctggatgagaatgaggatgtatccctggaattcctgcgtggggccctggaacgagataagaaggatggattccagcagacatcagagcatgcactcttttcctgctctgtggtggatgtcttcacacaactcaatcagagctttgagatcatccggaagctggaatgcccagaccccagcatccttgcccactacatgaggaggtttgctaagaccatcgggaaggtgctgatgcagtatgcagacatcttgtcaaaggacttcccagcctattgcacaaaggagaaactgccctgcatcctgatgaacaacgtgcagcaactgagggtccagctggagaaaatgtttgaggccatgggaggcaaggagctggaccttgaagctgcagacagtctgaaggagctgcaggtgaaactgaatacggttctggatgagctcagcatggtgtttggaaacagtttccaggtacggattgatgagtgtgttcgacaaatggccgacatcctgggccaggttcggggcacagggaatgcatctccagacgccagggcctcagcggctcaggatgcagatagcgtactccggcctctcatggacttcctggatggcaacctcaccctctttgccactgtgtgtgagaagacggttctgaagcgtgtactgaaggagctctggcgcgtggtgatgaacacaatggagaggatgattgttctgcccccactcactgaccagacgggcacccagctgatcttcactgctgccaaggagctgagccatctttccaaactcaaggatcacatggtacgagaggaaacacggaatctcactccaaagcagtgtgcagtccttgacctcgccctggacaccatcaagcaatacttccatgcaggaggcaatgggctgaagaaaaccttcctggagaagagcccagatctgcagtctctacgctatgccctgtctctgtacacacagactactgacactctcatcaagacctttgtgcgctcgcagaccacccaagggtctggtgtggacgatcctgtgggagaagtctctattcaggtggacttgtttacacaccctggtactggggagcacaaggtcacagtgaaagtggtggctgccaatgacctcaagtggcagacagcgggtatgttccggcctttcgtggaggtgactatggttggcccacaccaaagtgataagaagaggaagttcacaaccaaatccaaaagcaacaactgggcccccaagtacaatgagacattccacttactcctgggaaatgaggaggggcccgagtcctatgagttgcagatatgcgtgaaggattactgctttgcccgggaagatcgcgtgctagggctggctgtgatgcctctgagggatgtcacagccaagggcagctgtgcctgctggtgccccttgggccggaagatccatatggatgagacaggcctgaccattctccggattttatctcagaggagcaatgacgaggtggcccgagaatttgtgaaactcaaatcagagtctcgttccacggaggaggggagctgaacaccttcgactcctgtgccaatcaggcagcagcaatttcacaaatcagggccagtgggagttagctgtgtaaccggcttagggtctttgcagtcaagaggctgaccccttcagttaaagatatttaaggaaaaatttggggtggtgataatatggcttttcacagaaagggtcatgaagccctggcccaacaggactgtggtactaggggctgggatgtggggttaccacatggagagattttccattaagagagaaggacaaacatttctgagagtgtcagccattcttggtagacacctctccactcctcatcccacctctacccatctccatgccacaccttatccagttagacacatacataccaatcattagaagaacaagtttagaaggtgtggaacttgtgcctggctggctgggtagtcagctgagcctgttgctgagcccggtggtctggattggagtatggccagggcaggagtacacagaatagaatttagactgtcccttgagtagaatccactgattttctgtggctccagtgagaacaaggctttgaaactgaacaagataacttctagaaatgaactgtactaatccctttccccagattgtatcatgagtagaatcaggttcacgtggtgcttcaaagccctgagaagaatatttctttggaccccaggcactaggggccacctgcctgggagtctccctgcctcactcctctaggcaggggagtgatgcttcaggacgtgacaggctgttctaacatgtgtctacctgagggctagttgaaggatccaggagtattttcttcttgggtgggccctgaacaaagccaaaaattgtagaaaccagtctagaaaaagtcctgctcatctgtggccactgccttctagccgtcctccaccttgcagaaagaatctagcctttggtctctctctctctcatcggggtcatttgctattcccctctgatattcaaccctatagaaggagcctggactctgatccctctgtacaggctggatggaaggggccctccacacttcctgggaggtcagagacaaactgtttcagagagtcagatggacttcccaagacttgttgagagatgtgacatggttcttggatttcctctgtagcagcctcctggacttcctgaggactcgacattgtccacagatgtactggccattacatgaaacaagaaaccaagcatctttgctgttgttaattattatatgtgccattgttacaggagattataggctagtctgtaataaattatcttatagcaaaaaaaaaaaaaaaaaaaaaaaaaaaaa

SEQ ID NO: 29722 - DNA, 5189 bp, Homo Sapiens
ggactgcgaaaggagcagggttgcggagctagggctccagcctgcggccgcgcattcttgcgtctggccagccgcgagctctaagggtcggccccgcccggtccgcccccgcggctccctgccaggctctcgcgggcgcgctcggggtggggcctcgcggctggcggagatgcggccggggctgcgcggtggtgatgcgagcctgctgggcggcgcgccggggcagccggagccgcgcgccgcggcgctgtaatcggacaccaagagcgctcgcccccggcctccggccactttccattcactccgaggtgcttgattgagcgacgcggagaagagctccgggtgccgcggcactgcagcgctgagattcctttacaaagaaactcagaggaccgggaagaaagaatttcacctttgcgacgtgctagaaaataaggtcgtctgggaaaaggactggagacacaagcgcatccaaccccggtagcaaactgatgacttttccgtgctgatttctttcaacctcggtattttcccttggatattaacttgcatatctgaagaaatggcattccggacaatttgcgtgttggttggagtatttatttgttctatctgtgtgaaaggatcttcccagccccaagcaagagtttatttaacatttgatgaacttcgagaaaccaagacctctgaatacttcagcctttcccaccatcctttagactacaggattttattaatggatgaagatcaggaccggatatatgtgggaagcaaagatcacattctttccctgaatattaacaatataagtcaagaagctttgagtgttttctggccagcatctacaatcaaagttgaagaatgcaaaatggctggcaaagatcccacacacggctgtgggaactttgtccgtgtaattcagactttcaatcgcacacatttgtatgtctgtgggagtggcgctttcagtcctgtctgtacttacttgaacagagggaggagatcagaggaccaagttttcatgattgactccaagtgtgaatctggaaaaggacgctgctctttcaaccccaacgtgaacacggtgtctgttatgatcaatgaggagcttttctctggaatgtatatagatttcatggggacagatgctgctatttttcgaagtttaaccaagaggaatgcggtcagaactgatcaacataattccaaatggctaagtgaacctatgtttgtagatgcacatgtcatcccagatggtactgatccaaatgatgctaaggtgtacttcttcttcaaagaaaaactgactgacaataacaggagcacgaaacagattcattccatgattgctcgaatatgtcctaatgacactggtggactgcgtagccttgtcaacaagtggaccactttcttaaaggcgaggctggtgtgctcggtaacagatgaagacggcccagaaacacactttgatgaattagaggatgtgtttctgctggaaactgataacccgaggacaacactagtgtatggcatttttacaacatcaagctcagttttcaaaggatcagccgtgtgtgtgtatcatttatctgatatacagactgtgtttaatgggccttttgcccacaaagaagggcccaatcatcagctgatttcctatcagggcagaattccatatcctcgccctggaacttgtccaggaggagcatttacacccaatatgcgaaccaccaaggagttcccagatgatgttgtcacttttattcggaaccatcctctcatgtacaattccatctacccaatccacaaaaggcctttgattgttcgtattggcactgactacaagtatacaaagatagctgtggatcgagtgaacgctgctgatgggagataccatgtcctgtttctcggaacagatcggggtactgtgcaaaaagtggttgttcttcctactaacaactctgtcagtggcgagctcattctggaggagctggaagtctttaagaatcatgctcctataacaacaatgaaaatttcatctaaaaagcaacagttgtatgtgagttccaatgaaggggtttcccaggtatctctgcaccgctgccacatctatggtacagcctgtgctgactgctgcctggcgcgggacccttattgcgcctgggatggccattcctgttccagattctacccaactgggaaacggaggagccgaagacaagatgtgagacatggaaacccactgactcaatgcagaggatttaatctaaaagcatacagaaatgcagctgaaattgtgcagtatggagtaaaaaataacaccacttttctggagtgtgcccccaagtctccgcaggcatctatcaagtggctgttacagaaagacaaagacaggaggaaagaggttaagctgaatgaacgaataatagccacttcacagggactcctgatccgctctgttcagggttctgaccaaggactttatcactgcattgctacagaaaatagtttcaagcagaccatagccaagatcaacttcaaagttttagattcagaaatggtggctgttgtgacggacaaatggtccccatggacctgggccagctctgtgagggctttacccttccacccgaaggacatcatgggggcattcagccactcagaaatgcagatgattaaccaatattgcaaagacactcggcagcaacatcagcagggagatgaatcacagaaaatgagaggggactatggcaagttaaaggccctcatcaatagtcggaaaagtagaaacaggaggaatcagttgccagagtcataatattttcttatgtgggtcttatgcttccattaacaaatgctctgtcttcaatgatcaaattttgagcaaagaaacttgtgctttaccaaggggaattactgaaaaaggtgattactcctgaagtgagttttacacgaactgaaatgagcatgcattttcttgtatgatagtgactagcactagacatgtcatggtcctcatggtgcatataaatatatttaacttaacccagattttatttatatctttattcaccttttcttcaaaatcgatatggtggctgcaaaactagaattgttgcatccctcaattgaatgagggccatatccctgtggtattcctttcctgctttggggctttagaattctaattgtcagtgattttgtatatgaaaacaagttccaaatccacagcttttacgtagtaaaagtcataaatgcatatgacagaatggctatcaaaagaaatagaaaaggaagacggcatttaaagttgtataaaaacacgagttattcataaagagaaaatgatgagtttttatggttccaatgaaatatgttggggtttttttaagattgtaaaaataatcagttactggtatctgtcactgacctttgtttccttattcaggaagataaaaatcagtaacctaccccatgaagatatttggtgggagttatatcagtgaagcagtttggtttatattcttatgttatcaccttccaaacaaaagcacttactttttttggaagttatttattttagactcaaagaatataatcttgcactactcagttattactgtttgttctcttattccctagtctgtgtggcaaattaaacaatataagaaggaaaaatttgaagtattagacttctaaataaggggtgaaatcatcagaaagaaaaatcaaagtagaaactactaattttttaagaggaatttataacaaatatggctagttttcaacttcagtactcaaattcaatgattcttccttttattaaaaccagtctcagatatcatactgatttttaagtcaacactatatattttatgatcttttcagtgtgatggcaaggtgcttgttatgtctagaaagtaagaaaacaatatgaggagacattctgtctttcaaaaggtaatggtacatacgttcactggtctctaagtgtaaaagtagtaaattttgtgatgaataaaataattatctcctaattgtatgttagaataattttattagaataatttcatactgaaattattttctccaaataaaaattagatggaaaaatgtgaaaaaaattattcatgctctcatatatattttaaaaacactacttttgcttttttatttaccttttaagacattttcatgcttccaggtaaaaacagatattgtaccatgtacctaatccaaatatcatataaacattttatttatagttaataatctatgatgaaggtaattaaagtagattatggcctttttaagtattgcagtctaaaacttcaaaaactaaaatcattgtcaaaattaatatgattattaatcagaatatcagaatatgattcactatttaaactatgataaattatgataatatatgaggaggcctcgctatagcaaaaatagttaaaatgctgacataacaccaaacttcattttttaaaaaatctgttgttccaaatgtgtataattttaaagtaatttctaaagcagtttattataatggtttgcctgcttaaaaggtataattaaacttcttttctcttctacattgacacacagaaatgtgtcaatgtaaagccaaaaccatcttctgtgtttatggccaatctattctcaaagttaaaagtaaaattgtttcagagtcacagttccctttatttcacataagcccaaactgatagacagtaacggtgtttagttttatactatatttgtgctatttaattctttctattttcacaattattaaattgtgtacactttcattacttttaaaaatgtagaaattcttcatgaacataactctgctgaatgtaaaagaaaattttttttcaaaaatgctgttaatgtatactactggtggttgattggttttattttatgtagcttgacaattcagtgacttaatatctattccatttgtattgtacataaaattttctagaaatacacttttttccaaagtgtaagtttgtgaatagattttagcatgatgaaactgtcataatggtgaatgttcaatctgtgtaagaaaacaaactaaatgtagttgtcacactaaaatttaattggatattgatgaaatcattggcctggcaaaataaaacatgttgaattccccaaaaaaaaaaaaaaaa

SEQ ID NO: 29723 - DNA, 2030 bp, Homo Sapiens
gtaaacattacgagattggcttggattctgtcggatggacttggggctagctgcggcggggctggaggaggccagataaccatgtcagccacagttgtagatgcagttaatgctgcacccctatcggggtccaaagaaatgagtttggaagaaccaaagaagatgaccagagaggactggagaaagaagaaggagctagaagaacagcgaaaattgggcaatgctcctgcagaagttgatgaagaaggaaaagacatcaacccccatattcctcagtatatttcttcagtgccatggtatattgatccttcaaaaagacctactttaaaacaccagagaccacaaccagaaaaacaaaagcagttcagctcatctggagaatggtacaagaggggtgtaaaagagaattccataattactaagtaccgcaaaggagcatgtgaaaattgtggggccatgacacacaaaaagaaagactgctttgagagacctaggcgagttggagccaaatttacaggtactaatatagctccagatgaacatgtccagcctcaactgatgtttgactatgatgggaagagggatcggtggaatggctacaatccagaagaacacatgaaaattgttgaagagtatgccaaagttgatttggcaaaacgaacattgaaagcccagaaactccaagaggaattagcctcaggaaaattagtggaacaggctaattctccaaaacaccagtggggagaagaggaaccaaattctcagatggaaaaagatcataatagtgaagatgaggatgaagataaatatgcagatgatattgacatgcctggacagaattttgactccaagagacgaattactgtccggaatctcaggattcgagaagatattgcaaaatatttgaggaatttagatccaaattctgcctactatgatccaaaaactagagcaatgagagagaatccttatgccaatgcaggaaagaatccagatgaagtgagttatgctggagataactttgttaggtacacaggagataccatttcaatggctcagacacagttgtttgcatgggaagcctatgacaagggatctgaagtgcatctacaggcagatcctacaaagctagagctgttgtataagtccttcaaagtcaaaaaagaagatttcaaagaacagcagaaagaaagcatcctggaaaagtatggtggccaagaacatttggatgcccctccagctgaattgcttttagcccagactgaagactatgtggagtactcaagacatgggacagtcatcaaaggacaggagcgggctgttgcctgctctaagtatgaggaggatgtgaagatccacaatcacacacatatctggggatcgtactggaaagaaggccgatggggatacaaatgctgtcactcttttttcaagtattcctattgtactggagaagctgggaaggagattgttaactctgaggagtgtattataaatgagataactggggaagaatctgtgaaaaaacctcaaaccctcatggagctgcatcaagaaaaactgaaagaggaaaagaagaagaagaaaaagaaaaagaagaagcatcgaaagagcagttcagatagtgatgatgaagaaaagaagcatgaaaaattgaaaaaggcactgaacgcagaggaggcccgccttcttcatgtcaaggagaccatgcagattgatgagaggaagcggccttacaatagcatgtatgaaactcgagaacctactgaagaggaaatggaggcatatagaatgaaacgtcagaggccagatgaccccatggcctctttccttggacagtagcaactagtcagaagaccatccaagatagatgcagctgatacattcttttcagcttcttattgatgattgtagatagaaaaatccttgtttattcttcttgctgcctggctttaataaatatttcagatgcctcacaaaaaaaaaaaaaaaaaaaaaaaaaaaaaaaaaaaaaaaaaaaaaaaaaaaaa

SEQ ID NO: 29724 - DNA, 2618 bp, Homo Sapiens
agatgcaacgcaagcaacgacttcgtcacactaaaacggattttgtgagggccaaaagtataaattacgaagcagaaatgattatcaaacaacttccagcggtttgcacctaaagaaacacaaggagaacccactacaaacaaacaaacccagtccaaacaacgcctccagtaggaaaagaggaaaactgcgataacacgaccccccgagaagagacgagaccaacacgctgagactgtggggcgtcagcaaacctccaagtgcacggcggactgagttgtacttcgcagctctctggacattaattacctcctgcaccttccatttgggggagggtgaggaagaaggcactcacctacactgagcgaagaagtcctatcagcgtggaagagaagtttaagaatgaaccactgaatgtttcgcttttatttttaaatttactttggcacttaaaaaacctcatttccagatttctggacaatctcggctgcagacatctaagcctaaccttttggtatcctgagttttttccctctccttctccttcctcacgcccaccccgcttctctcgcacacggtcatctttacatatcaagagaaagcaaaaaggttccaagaggtacttttctttttagaaaatcaccttttctcccctaattcttctgcagaagaaaagaggtttcgaaagagggaaaaggaaaaaacaagccggctacggtatcagccggtcagcccaggtggaaaacgagagtgaaagtagggcttaacggggagcgcaccgcctctttcgaaagccgctgggccaccaccagtgcgtgagccttggatccctcaacgtattgcgagacgccggtgtatagcccggacctgtgccccaacatgatcgccgctcaggccaagctggtttaccagctcaataagtactacactgagcgctgtcaggcgcgcaaggcggccatcgccaaaaccatccgagaggtctgtaaggtggtctcggacgtgctcaaggaagtggaggtgcaggagcctcgcttcatcagctccttgagcgagatcgatgcccgctacgaggggctcgaggtcatttcgcccaccgaatttgaggtggtgctctacctaaaccagatgggcgtcttcaacttcgtggacgacggctcgctgcccggctgcgcagtgctcaaactgagcgatgggcggaagcggagcatgtctctctgggtcgagttcatcacggcgtcgggctatctctcagcgcgtaagatccgctcgcgtttccagacgctggtggcccaggcggtggacaagtgcagctatcgggatgtggtcaagatgatcgcggacaccagcgaggtcaagttgcgcatcagggagcgctatgtggtgcaaatcactccggcgttcaagtgcaccgggatctggcctcgcagcgcggcacagtggcctatgccccacatcccttggcccggccccaatcgggtggccgaggtcaaggccgaagggttcaacttgctctcgaaggagtgctactcgctgaccggcaagcagagctcggcagagagcgacgcctgggtgctacagttcggggaggcggagaaccgcctgctgatgggcggctgccgaaacaagtgcctctcagtgctgaagactctgcgggaccgccacctggagctacccggccagccgctcaacaactaccacatgaagacgctgctgctgtacgagtgcgagaaacacccacgagaaacggactgggacgagtcgtgcctgggcgaccggctcaacggcatcctgctgcagctcatctcctgcctgcagtgccgccgctgccctcactactttctgcccaacctcgacctctttcagggcaagccccattcggccctggagagcgctgccaagcagacctggaggttggccagggaaattctcaccaatcccaaaagcctggacaaactatagggtgctggggactgcttgaaaagcgacacaaacgggcgtgctctctcagacacacaactcagctataaacagcagaaactctggacacaaacttttatgtaagtcacctgaaataggaatccggcagaagaccttcattaattaagaagcaaacaaaaagagagcaacccaaccaaaacaaatcacattcttgcacaaaagtgatcgttttcttccaaacaatgtgaatttaaaaggtcacacaaaagaagcaatcgggctccgccaccacaaaatgaaacccaaggtacattttcaaatcaatgtatagtagttccccccccttttccttctttccccctatcctttttctctccaccccatcccccccccatttcgttttgcttttggttgcctgaatgttgtcaccaagtgaaaaaattatttaactatatgtaaaatttctcttttaaaaaaaagttttactgatgttaaacgttctcagtgccaatgtcagactgtgctcctccctctcctgaacctctaccctcaccctgagctgtcttgttgaaaacagtaataaaaacattactttacattgtaaaaaaaaaaaaaaaaaaaaaaaaaaaaaaaaaaaaaaaaaaaaaaaaaaaaaaaaaaaaaaaaaaaaaaaaaaaaaa

SEQ ID NO: 29725 - DNA, 3624 bp, Homo Sapiens
gcaggttgggagggaaagtcgggggaggacgcggaagaggagctgtgggaagggggaggagggagggaggaaaagaggaggagacggaggagaactgagcagagcagagcatcgagccaaaggggagatgagtttgtctgtcctctgctgaggctacggccgggcctagggaactgggagcttgggtggaagcgacacccgtggaagtgggaggaggtggcgccgggactttaaccccttgtgggctctgcggcaggggatttaaccctttgtggatctggcccctcggaggcagcgtcatcggtagttttaaccccttcggggctgggtttcacgcactggacttaccctcatcaccttgctcaccaactcctttattggggtgctccgcttggaggtttgaggcccacctccgcccattacgtactgttcctgccgctgcacccccttggacccgctagctggccgcactgtgggcgcttaaccctttactgacttgagctccccagattgcagttggagtttgctgatagaaggactagctaaaggcgtcactgcaggaattacaaactgaagaggactctgttggactgttttttttttctttttcttttttttaagaaaaacccatttttttccttaaggacttactagccaaaatttcttaaacttcgaggactctactagccatggccgagccattcttgtcagaatatcaacaccagcctcaaactagcaactgtacaggtgctgctgctgtccaggaagagctgaaccctgagcgccccccaggcgcggaggagcgggtgcccgaggaggacagtaggtggcaatcgagagcgttcccccagttgggtggccgtccggggccggagggggaagggagcctggaatcccaaccacctcccttgcagacccaggcctgtccagaatctagctgcctgagagagggcgagaagggccagaatggggacgactcgtccgctggcggcgacttcccgccgccggcagaagtggaaccgacgcccgaggccgagctgctcgcccagccttgtcatgactccgaggccagtaagttgggggctcctgccgcagggggcgaagaggagtggggacagcagcagagacagctggggaagaaaaaacataggagacgcccgtccaagaagaagcggcattggaaaccgtactacaagctgacctgggaagagaagaaaaagttcgacgagaaacagagccttcgagcttcaaggatccgagccgagatgttcgccaagggccagccggtcgcgccctataacaccacgcagttcctcatggatgatcacgaccaggaggagccggatctcaaaaccggcctgtactccaagcgggccgccgccaaatccgacgacaccagcgatgacgacttcatggaagaagggggtgaggaggatgggggcagcgatgggatgggaggggacggcagcgagtttctgcagcgggacttctcggagacgtacgagcggtaccacacggagagcctgcagaacatgagcaagcaggagctcatcaaggagtacctggaactggagaagtgcctctcgcgcatggaggacgagaacaaccggctgcggctggagagcaagcggctgggtggcgacgacgcgcgtgtgcgggagctggagctggagctggaccggctgcgcgccgagaacctccagctgctgaccgagaacgaactgcaccggcagcaggagcgagcgccgctttccaagtttggagactagactgaaacttttttgggggagggggcaaaggggactttttacagtgatggaatgtaacattatatacatgtgtatataagacagtggacctttttatgacacataatcagaagagaaatccccctggctttggttggtttcgtaaatttagctatatgtagcttgcgtgctttctcctgttcttttaattatgtgaaactgaagagttgcttttcttgttttcctttttagaagtttttttccttaatgtgaaagtaatttgaccaagttataatgcatttttgtttttaacaaatcccctccttaaacggagctataaggtggccaaatctgagaacaattaaattcattttagttataataaatttaatatttgtaaatgtaacatagtttcagtgtgatttctagagctaattcaaaatagtattgatatattttatgtgactgcatttttggggaggggtaccgaaatcgttaaatttgtcagtttgcaaaaatatcaatctttaatgggagaattttcaatttgccaattttttccttgaatgggtttaagtatgctacaatatacagttcaggcaaaatttaagatgtaattatcttcaatacttaagtgtgcttgctttctagtgccttggttttctttcttgatgctggaaaaataaacaaaccggtattgagtgtttaggcgagtggaaagtggctacaatccaaaattttaaatttaactctgcctcggccattcaaaagtctaataacaaaaaatgtaaacctaatttggcagtttgttaggttagacaactgacagcctcatttcattcctacaagttggttttcagtaatctcttccttccccccagtaaggctggaagaggctcttggcaaacttcttagcgcaagcaatggttagattaatttgtgaggcagctctttaagacgttcagaggtaagaaatactggatttataaagcaaatggctgtttgggggattccaaggatttacctaattgtccaattctacgtgctctctataccaaaacaaaaaaaaagctatccacctttccatgtgggtcaaactaaaattagaaatgtcccctcactgcagatcaaatgtaaagcttccagttaaggagctaaatgaggtcctcagctgaatgaggaaccctgtacatccccttgcacagccctattctaaatcgcttaaactatgctgatagctgcttaggttcttgagtagttctgctcttaaacgtagggaggccctgagaactaaattttgccccaaaataaaaacagaaattatgagattgcctcctgtcattttggttaacccagtccttcacctgccctgtgtcagtgtcttctgagggcaattgcgttgctcaaatcactagcacagaggttccttaatttggggccttagaaaccattgtgggccttggggtccatgaaccccatgaaattatttgtagacttgtatgtacatttttctggggagaaggttcaagagattcataagattgtcaaactccttgaaggttcagaacctctgcagggaagggggaagaaaaccctcccattaggaagcatgcttttgcagttaaatggcgatggtggaggtgatagggacttcaagagtaaaatgcaccttgtattgcataagaagcatacacaaatcaataaatcaagggagattataccagtaggactgaatcagggccttcaaagctggactgagttggtcctgttctggcacatatggtccactggagacaatgtatgattgagcttttctttggtctaaaaattatattaaacatttattttgaaaaaaaaaaaaaaaaaaaaaaaaaaa

SEQ ID NO: 29726 - DNA, 2177 bp, Homo Sapiens
ggaagaaggcccctcggcctcagcagagcgctatcctccactggttacccgggttccccggcttgctaccgggctgctccgtgcatctttccccccaggcgtcaggaactgcgccctcatggcggaggtgaaggtgaaggtgcagccgcctgacgcggatccggtcgaaatagaaaacaggattatagaattatgtcaccagttccctcatggaatcacagaccaagtaattcagaatgaaatgcctcatatagaagcccagcagcgggcagtagccatcaataggttgttgtctatgggtcagttggatctcttaaggagcaatacgggccttttatatagaataaaggactctcagaatgctggtaaaatgaagggatccgataaccaagaaaaactagtatatcaaatcatagaggatgcaggaaataaaggaatatggagcagagatatccgctataaaagtaatttgccattaacagaaatcaacaaaattctgaagaatctggaaagtaaaaagcttatcaaagctgttaagtctgtagcagcctcaaaaaagaaggtgtatatgctctataacctgcagccagaccggtctgtgactggtggagcctggtacagtgaccaggattttgaatctgaatttgtagaggtgcttaaccaacagtgttttaaattcctacagtccaaggcagaaacagcacgagaaagcaaacagaacccaatgatacaaagaaatagttcatttgcctcatcacatgaagtgtggaaatatatctgcgaattgggaatcagtaaggtagagttatccatggaagacattgaaaccatcctgaatacactcatttatgatggaaaagtggagatgacgattattgctgcaaaagaaggcacagttggcagtgtagatggacacatgaaactgtacagggcagtcaatccaatcatccctcccacaggtttggtccgggcaccctgtggactctgcccggtttttgatgactgccacgaaggtggtgagatttcaccatctaactgtatttacatgacagagtggctcgaattttaatagagagctatgaactttattgacattttgcaaatgaagttacttagggagcagataatttaattcatgatggaacacgaaatctccttgaaagcaaacttcacaataatggacgtagacttgctgctatgaaaacatattttttttatttatgaagactaaatttatattggtaaaatagccagtagaatatgaaagaaataaggttagtagtgaaattcattcttcaataaataaaacactttgaaactccggaggaccacatctttcaagacttctgatgggtcaaggaaaaagatgccaacatacccgtatttaccaagtactatgataatggctagagtataaaaatgttctttttaaagttatttattaagttcttcattggaagtttttttttatatctggttcactaccaccattttctgtttcctactttctcagtggtttcattgaaaagaaattagaaggggttaaaggcaggaatagcaaagagtgcaaacttggggtatgactgggggagagtggaacatgccttttccgcacaatattaattcctttttgtatcagaaatgttcttttaggagattatgctaccatacttacttcaaacccaatgactactgtcaaggacatattttcagtacataaatactatcattttcattctaaagaatattttcactgttccttctttcttaaagtcttatgtttcactctttaactcaaatgtattctttgttagaatttaccctagattcttatttaatgtctgcagtagactgaatgtttgtgtgcccccagaattctaatgttgaaatctcatttccaatgtgatggtatttggaggtggggcttttggtaagtgataggtcaggagagtaacagcgctcatgaatgggattagtgcccttatataaagagacccagagagctccatcaccccttctgccatgtgaaagggagaagacaaacatccacgaaccaggaagtgggtcctcaccagaaaacaaatctgtaagcaccttgatcttggacttcccagcctccagaattgtgagaaataaatttctgttgttgataaaaaaaaaaaaaaaaaaaaaaaaaa

SEQ ID NO: 29727 - DNA, 4080 bp, Homo Sapiens; identical to SEQ ID NO: 22880

SEQ ID NO: 29728 - DNA, 1983 bp, Homo Sapiens
gaattgaaccacccattttcctttcttagccaaatcaccaaaatgtccagttagaacaagaatttagcattctgcaaaagaagttaacagctgagataacgaggaaatattctgaaatggatcccaaatatttcatcttaattttgttttgtggacacctgaacaatacatttttttcaaagacagagacaattacaacagagaagcagtcacagcctaccttattcacatcatcaatgtcacaggtattggctaattctcaaaacacaacagggaatcctttgggtcaaccaacacaattcagcgacactttttctggacaatcaatatcacctgccaaagtcactgctggacaaccaacaccagctgtctatacctcttctgaaaaaccagaagcacatacttctgctggacaaccacttgcctacaacaccaaacaaccaacaccaatagccaacacctcctcccagcaagccgtgttcacctctgccagacaactaccatctgcccgtacttctaccacacaaccaccaaagtcatttgtctatacttttactcaacaatcatcatctgtccagatcccttctagaaaacaaataactgttcataatccatccacacaaccaacatcaactgtcaaaaattcacctaggagtacaccaggatttatcttagatactaccagtaacaaacaaaccccacaaaaaaacaattataattcaatagctgccatactaattggtgtacttctgacttctatgttggtagctataatcatcattgtactttggaaatgcttaaggaaaccagttttaaatgatcaaaattgggcaggtagatctccatttgctgatggagaaacccctgacatttgtatggataacatcagagaaaatgaaatatccacaaaacgtacatcaatcatttcacttacaccctggaaaccaagcaaaagcacacttttagcagatgacttagaaattaagttgtttgaatcaagtgaaaacattgaagactccaacaaccccaaaacagagaaaataaaagatcaagtaaatggtacatcagaagatagtgctgatggttcaacagttggaactgctgtttcttcttcagatgatgcaggtctgcctccaccacctccccttctggatttggaaggacaggaaagtaaccaatctgacaaacccacaatgacaattgtatctcctcttccaaatgattctactagtctccctccatctctggactgtctcaatcaagactgtggagatcataaatctgagataatacaatcatttccaccgcttgactcacttaacttgcccctgccaccagtagattttatgaaaaaccaagaagattccaaccttgagatccagtgtcaggagttctctattcctcccaactctgatcaagatcttaatgaatccctgccacctccacctgcagaactgttataaatattacaacttgctttttagctgatcttccatcctcaaatgactcttttttctttatatgttaacatatataaaatggcaactgatagtcaattttgatttttattcaggaactatctgaaatctgctcagagcctatgtgcatagatgaaacttttttttaaaaaaagttatttaacagtaatctatttactaattatagtacctatctttaaagtatagtacattttacatatgtaaatggtatgtttcaataatttaagaactctgaaacaatctacatatacttattacccagtacagttttttttcccctgaaaagctgtgtataaaattatggtgaataaacttttatgtttccatttcaaagaccagggtggagaggaataagagactaagtatatgcttcaagttttaaattaatacctcaagtattaaataaatattccaagtttgtgggaatgggagattaaaatgcatgtttgagagtaaaaaaaaaaaaaaaaaaaaaaaaaaaaaa

SEQ ID NO: 29729 - DNA, 5376 bp, Homo Sapiens
agccggagctggagccgaggcggcggcgggacgcggccggccggacaaatttcctgctaggctgcggacagcgggcggcaggagccggcgcgagcggcttcaggaacccacggcctctgcgcgtccccgcgacccttcttcgcgcccggcgaagacagccgggcgccccggagggcggcgggcaggcgcccgggagatgcggagcctccgctgcagcgcgatctgcgcgaccagaccggcccccccgagactatagccttcactttccctcggtccaccatggagcccttgtgtccactcctgctggtgggttttagcttgccgctcgccagggctctcaggggcaacgagaccactgccgacagcaacgagacaaccacgacctcaggccctccggacccgggcgcctcccagccgctgctggcctggctgctactgccgctgctgctcctcctcctcgtgctccttctcgccgcctacttcttcaggttcaggaagcagaggaaagctgtggtcagcaccagcgacaagaagatgcccaacggaatcttggaggagcaagagcagcaaagggtgatgctgctcagcaggtcaccctcagggcccaagaagtattttcccatccccgtggagcacctggaggaggagatccgtatcagatccgccgacgactgcaagcagtttcgggaggagttcaactcattgccatctggacacatacaaggaacttttgaactggcaaataaagaagaaaacagagaaaaaaacagatatcccaacatccttcccaatgaccattctagggtgattctgagccaactggatggaattccctgttcagactacatcaatgcttcctacatagatggttacaaagagaagaataaattcatagcagctcaaggtcccaaacaggaaacggttaacgacttctggagaatggtctgggagcaaaagtctgcgaccatcgtcatgttaacaaacttgaaagaaaggaaagaggaaaagtgccatcagtactggcccgaccaaggctgctggacctatggaaacatccgggtgtgcgtggaggactgcgtggttttggtcgactacaccatccggaagttctgcatacagccacagctccccgacggctgcaaagcccccaggctggtctcacagctgcacttcaccagctggcccgacttcggagtgccttttacccccattgggatgctgaagttcctcaagaaagtaaagacgctcaaccccgtgcacgctgggcccatcgtggtccactgtagcgcgggcgtgggccggacgggcaccttcattgtgatcgatgccatgatggccatgatgcacgcggagcagaaggtggatgtgtttgaatttgtgtctcgaatccgtaatcagcgccctcagatggttcaaacggatatgcagtacacgttcatctaccaagccttactcgagtactacctctacggggacacagagctggacgtgtcctccctggagaagcacctgcagaccatgcacggcaccaccacccacttcgacaagatcgggctggaggaggagttcaggaaattgacaaatgtccggatcatgaaggagaacatgaggacgggcaacttgccggcaaacatgaagaaggccagggtcatccagatcatcccgtatgacttcaaccgagtgatcctttccatgaaaaggggtcaagaatacacagactacatcaacgcatccttcatagacggctaccgacagaaggactatttcatcgccacccaggggccactggcacacacggttgaggacttctggaggatgatctgggaatggaaatcccacactatcgtgatgctgacggaggtgcaggagagagagcaggataaatgctaccagtattggccaaccgagggctcagttactcatggagaaataacgattgagataaagaatgataccctttcagaagccatcagtatacgagactttctggtcactctcaatcagccccaggcccgccaggaggagcaggtccgagtagtgcgccagtttcacttccacggctggcctgagatcgggattcccgccgagggcaaaggcatgattgacctcatcgcagccgtgcagaagcagcagcagcagacaggcaaccaccccatcaccgtgcactgcagtgccggagctgggcgaacaggtacattcatagccctcagcaacattttggagcgagtaaaagccgagggacttttagatgtatttcaagctgtgaagagtttacgacttcagagaccacatatggtgcaaaccctggaacagtatgaattctgctacaaagtggtacaagattttattgatatattttctgattatgctaatttcaaatgaagattcctgccttaaaatattttttaatttaatggtcagtatattttgtaaaaatcatgttaatttatttcatagttgacattaatatcttccctaatttctttgtatatattttgttatgccttaaaggccacctgctatacagttgttaaatcttaaatatgctttttaaaaattggaataatgtattaaggtcaaataatatcccataaaatatatatttctgctaatattagtaaatatcttaatttttcattagattcatatcatttaatttcacatattcaacacctttaaatgttgtaatcttaatatgcgaagtgtgcctctgcaagatactaacacaaagctcatgttaagaaaacagttgaggactcagaagtcagttgaaaatgcactttcctaacagtgaattcacaaccctgaacagcagcatttttggaaggcaaactgttcgtgatggtacaatgtaaatggggacttctgtaaagttctcagtttcggtccatgtggtttatctttacattttaaagatcaaagaagtctttacaacctgaatccaggtctaaaacacactagagtagctggtgactataaataatattttaaaatgctgtgtctacaccatcaagactgtgtctacactatcttggctgaacgagaagagatgtaaatgctgggtggtcccgttgacccacggcgttgggtacaacaaaaccagccatcggagttacaccccaaagcaccatttgctgtccagctgcctgtcgtttggcccagaccaccctcagaaaaaaaccagctgcctctcccattctcccctcccgttctgccacagcggcctgggctggtccagtgctatgcctggaggctcaacacaaaacttcccatccaaacattcagatgaactgagcgtcttacacacgcagtacagaggagcacacattaggatagaaacagtagaataaccacgggcaattaaactttaaattttctgagcagcattttggtatttaaacatttcttgtaaaaagctgagacagtttgtaagaaaagaatccttaaaatctagatttataccattttttaaagtcccacctttcaatgtttaataaaacaaaaagagaaatccttaatctaaaagctaaattatttttgaatggaaatactactgagaccattgacactggataacagtaatgatcccattaccagataagattgactgacggggaaaaaaaaaaaaaaagaatggggtgtgaatgtaccaacactgaatcttacagcagttatctttctatggccattaggtacctagcagatgtgcacaatataaacaaaaagatatctggcctaccttactactaaaagcatttaacacgtgcatttttggtacttttttttttgttttctaaaagctacataaaggccttatttgacattttcactgataactgatcgcaccctcatgttgcagtgttcgtcccctattcattaacagtgtgtgcaaatgcaaccccaggacacattattgttctgatagatgctcacagggaatcaagcttctcgcccactccacggctctgagccccatccaagggcaagacttggtgcccagctggaaggacgaaagcacactttgtgaccgccatcctcaccagctgcatgcctgggctgcacactgctgaacgtgctcctctctccttctctgtacaatgattcagcatctcggcggaagaggaaaatggagctttttgaggctcgccaggtcccttttgttttcaccattaaaattccaaacccaaagcctttgtttgactgaaggagaagagagggaagtaagcttctgttcagcacctgaaccctagaaaaagagccagtttgctacgatgaaggtgacatttctctggtcatttatttgagagttcgaagtcaaagtcgaggggcaccggctttggttcatgtctaggagccctctgtcagaatccttgaagccctttaatggtctaactggcatctcttgtatcaagaagtacctttaaggtagaccttttcagggtgccctcaggaaagggccctgctcatgtttttttcctgtccccttagaccaaccccaggtgtccactgcaggggttctgcctgttcccaaactttttccattccaggaacaaaggagaagccactttccccaggacgcaagactctcccctccactgtccgggacagcgttcgccctttagcggggaggtcattacagcctcatggcctctaccaaggccccagatcacaggatctcctgggccttggagcacctcacgctgggggaatcaatccctgagggactcagaatcttctccgtgcaacctggaaagttcatctcttgtttccttcagtcaaagaaagtccattgtacataacaaaacagcccccaaacagcccagtgccgacaccattgttcctttcacactttcctttgttgcatgcagttgggttcaaatgccaaatagtgattagaagacgaccattctgatctgtgtgtgatctggtcactatgtgactgcctttacggtttctctccatgtgctatatgaatgaagaatgcataccagtgttttaaaaggtatttttatgtgtttttaaacacttttttaaatgagcctgacacctgtgtttcagcatttggagacatccccatgttattcttttaagtgtataattactgatacttttttgtttgtttgtttaactaagttgtgtttaacttatgtgcagtctttataatgtatgtatgttattacagtttcaactatcatattttctttgattacatttataatttgatcttgctctgattataatgccagtgaatgttgctgaactctttgtatatgcaaattgcaagatttaaaccattctgatgcaaggataaacctttactttgactaccagcctgtgtttttgtctttaaatctcttaatttcattcctctgcaaa

SEQ ID NO: 29730 - DNA, 1854 bp, Homo Sapiens
atgtcatcattaccaacttcagatgggtttaaccatcccgcccgttcttcaggacagagtcctgatgttggtaatcctatgagtcttgctcgctctgtctctgcttcagtctgccctatcaagcccagtgactcagatcgcattgaacctaaagctgtgaaggctttgaaggcttcagctgaattccagctaaactctgaaaagaaagaacatctttctttacaagatctttctgatcatgcttcctcagcagaccatgctccaacagaccagagtccagctatgcctatgcagaattcatccgaagaaataactgttgcaggtaatctggagaaatctgctgaaagaagcacccagggcctcaaatttcatctccatacaagacaggaagctagtttatctgtcacatctactaggatgcatgaaccacagatgtttctaggtgaaaaggattggcatccagaaaatcagaacctgagtcaagtgagtgaccctcagcagcacgaagaaccagggaatgaacagtatgaggttgcacaacaaaaagcttcacatgaccaagaatatctttgtaacataggggaccttgagcttcctgaagaaaggcaacagaatcaacacaaaattgttgatttggaagctacgatgaaaggaaatgggctcccacagaatgtggatcctccaagtgcgaagaaaagtattccatcttcagaatgcagtggctgctcaaattcagaaacatttatggaaatcgatacagctcaacagtccctagttactttgcttaattcaacaggcaggcagaatgccaatgtcaagaacattggtgcattggatctcactttagataatcccttgatggaagtagaaacatcaaaatgtaacccttcatctgaaattttgaatgattccatttccactcaggatttacagcccccagaaactaatgttgaaatacctggaacaaataaagaatatggccattactcctctccaagtctctgtggcagttgtcagccttctgtggagtcagcagaagaatcttgcccgtctataacggcagccttgaaagaacttcatgaacttttggttgttagcagtaaaccagcttcagaaaatacatctgaagaagtaatctgtcaatcagaaaccatagctgagggccaaaccagtattaaagacctttctgaaagatggacccaaaatgagcatcttacccagaatgaacagtgtccacaagtctcctttcatcaggccatatctgtatcagtggagacagaaaaattaacaggtacttcatctgacactggaagagaagctgtagaaaatgtaaacttcaggagtctaggtgatggcctgtcaaccgataaggaaggtgtccccaaatctagggaatccataaataagaaccgttctgtcactgtaacctcagctaaaacatccaatcagttacactgcaccttaggtgtagaaatttcacccaaacttttagcaggtgaggaggatgcactcaatcagacttctgagcaaactaagtctttgtcatccaatttcatattggttaaagacttaggtcagggcatacagaattcagtaacagacaggcctgaaaccagagaaaatgtctgtcctgatgcttcgaggccattacttgaatatgaaccacctaccagccatccatcatcaagtcctgccattcttccaccattgatttttcctgccacagatattgaccgcattctccgtgctggctttactttgcaggaagctcttggagctttgcatcgagttggtgggaatgcagaccttgcacttcttgttttgctcgcaaaaaacatcgtagttcctacatga

SEQ ID NO: 29731 - DNA, 2856 bp, Homo Sapiens
tagtcgcgggtccccgagtgagcacgccagggagcaggagaccaaacgacgggggtcggagtcagagtcgcagtgggagtccccggaccggagcacgagcctgagcgggagagcgccgctcgcacgcccgtcgccacccgcgtacccggcgcagccagagccaccagcgcagcgctgccatggagcccagcagcaagaagctgacgggtcgcctcatgctggctgtgggaggagcagtgcttggctccctgcagtttggctacaacactggagtcatcaatgccccccagaaggtgatcgaggagttctacaaccagacatgggtccaccgctatggggagagcatcctgcccaccacgctcaccacgctctggtccctctcagtggccatcttttctgttgggggcatgattggctccttctctgtgggccttttcgttaaccgctttggccggcggaattcaatgctgatgatgaacctgctggccttcgtgtccgccgtgctcatgggcttctcgaaactgggcaagtcctttgagatgctgatcctgggccgcttcatcatcggtgtgtactgcggcctgaccacaggcttcgtgcccatgtatgtgggtgaagtgtcacccacagcctttcgtggggccctgggcaccctgcaccagctgggcatcgtcgtcggcatcctcatcgcccaggtgttcggcctggactccatcatgggcaacaaggacctgtggcccctgctgctgagcatcatcttcatcccggccctgctgcagtgcatcgtgctgcccttctgccccgagagtccccgcttcctgctcatcaaccgcaacgaggagaaccgggccaagagtgtgctaaagaagctgcgcgggacagctgacgtgacccatgacctgcaggagatgaaggaagagagtcggcagatgatgcgggagaagaaggtcaccatcctggagctgttccgctcccccgcctaccgccagcccatcctcatcgctgtggtgctgcagctgtcccagcagctgtctggcatcaacgctgtcttctattactccacgagcatcttcgagaaggcgggggtgcagcagcctgtgtatgccaccattggctccggtatcgtcaacacggccttcactgtcgtgtcgctgtttgtggtggagcgagcaggccggcggaccctgcacctcataggcctcgctggcatggcgggttgtgccatactcatgaccatcgcgctagcactgctggagcagctaccctggatgtcctatctgagcatcgtggccatctttggctttgtggccttctttgaagtgggtcctggccccatcccatggttcatcgtggctgaactcttcagccagggtccacgtccagctgccattgccgttgcaggcttctccaactggacctcaaatttcattgtgggcatgtgcttccagtatgtggagcaactgtgtggtccctacgtcttcatcatcttcactgtgctcctggttctgttcttcatcttcacctacttcaaagttcctgagactaaaggccggaccttcgatgagatcgcttccggcttccggcaggggggagccagccaaagtgataagacacccgaggagctgttccatcccctgggggctgattcccaagtgtgagtcgccccagatcaccagcccggcctgctcccagcagccctaaggatctctcaggagcacaggcagctggatgagacttccaaacctgacagatgtcagccgagccgggcctggggctcctttctccagccagcaatgatgtccagaagaatattcaggacttaacggctccaggattttaacaaaagcaagactgttgctcaaatctattcagacaagcaacaggttttataatttttttattactgattttgttatttttatatcagcctgagtctcctgtgcccacatcccaggcttcaccctgaatggttccatgcctgagggtggagactaagccctgtcgagacacttgccttcttcacccagctaatctgtagggctggacctatgtcctaaggacacactaatcgaactatgaactacaaagcttctatcccaggaggtggctatggccacccgttctgctggcctggatctccccactctaggggtcaggctccattaggatttgccccttcccatctcttcctacccaaccactcaaattaatctttctttacctgagaccagttgggagcactggagtgcagggaggagaggggaagggccagtctgggctgccgggttctagtctcctttgcactgagggccacactattaccatgagaagagggcctgtgggagcctgcaaactcactgctcaagaagacatggagactcctgccctgttgtgtatagatgcaagatatttatatatatttttggttgtcaatattaaatacagacactaagttatagtatatctggacaagccaacttgtaaatacaccacctcactcctgttacttacctaaacagatataaatggctggtttttagaaacatggttttgaaatgcttgtggattgagggtaggaggtttggatgggagtgagacagaagtaagtggggttgcaaccactgcaacggcttagacttcgactcaggatccagtcccttacacgtacctctcatcagtgtcctcttgctcaaaaatctgtttgatccctgttacccagagaatatatacattctttatcttgacattcaaggcatttctatcacatatttgatagttggtgttcaaaaaaacactagttttgtgccagccgtgatgctcaggcttgaaatcgcattattttgaatgtgaagggaa

SEQ ID NO: 29732 - DNA, 5653 bp, Homo Sapiens
gacaaagagaactaatgctttgtgctgattcatatttgaatcgaggcattgggaaccctgtatgccttgtttgtggaaagaaccagtgacaccatcactgagcttcctaaaagttcgaagaagttagaggactatacactttcttttgaacttttataataaatatttgctctggtttttggaacccagggctgttagaggggtgagtgacaagtcttacaagtggccttattccaactccagaaattgcccaacggaactttgagattatatgcaatcgaaagtgacaggaaacatgccaactcaatccctcttaatgtacatggatgggccagaagtgattggcagctctcttggcagtccgatggagatggaggatgccttgtcaatgaaagggaccgctgttgttccattccgagctacacaagaaaaaaatgtcatccaaatcgaggggtatatgcccttggattgcatgttctgcagccagaccttcacacattcagaagaccttaataaacatgtcttaatgcaacaccggcctaccctctgtgaaccagcagttcttcgggttgaagcagagtatctcagtccgcttgataaaagtcaagtgcgaacagaacctcccaaggaaaagaattgcaaggaaaatgaatttagctgtgaggtatgtgggcagacatttagagtcgcttttgatgttgagatccacatgagaacacacaaagattctttcacttacgggtgtaacatgtgcggaagaagattcaaggagccttggtttcttaaaaatcacatgcggacacataatggcaaatcgggggccagaagcaaactgcagcaaggcttggagagtagtccagcaacgatcaacgaggtcgtccaggtgcacgcggccgagagcatctcctctccttacaaaatctgcatggtttgtggcttcctatttccaaataaagaaagtctaattgagcaccgcaaggtgcacaccaaaaaaactgctttcggtaccagcagcgcgcagacagactctccacaaggaggaatgccgtcctcgagggaggacttcctgcagttgttcaacttgagaccaaaatctcaccctgaaacggggaagaagcctgtcagatgcatccctcagctcgatccgttcaccaccttccaggcttggcagctggctaccaaaggaaaagttgccatttgccaagaagtgaaggaatcggggcaagaagggagcaccgacaacgacgattcgagttccgagaaggagcttggagaaacaaataagggcagttgtgcaggcctctcgcaagagaaagagaagtgcaaacactcccacggcgaagcgccctccgtggacgcggatcccaagttacccagtagcaaggagaagcccactcactgctccgagtgcggcaaagctttcagaacctaccaccagctggtcttgcactccagggtccacaagaaggaccggagggccggcgcggagtcgcccaccatgtctgtggacgggaggcagccggggacgtgttctcctgacctcgccgcccctctggatgaaaatggagccgtggatcgaggggaaggtggttctgaagacggatctgaggatgggcttcccgaaggaatccatctggataaaaatgatgatggaggaaaaataaaacatcttacatcttcaagagagtgtagttattgtggaaagtttttccgttcaaattattacctcaatattcatctcagaacgcatacaggtgaaaaaccatacaaatgtgaattttgtgaatatgctgcagcccagaagacatctctgaggtatcacttggagagacatcacaaggaaaaacaaaccgatgttgctgctgaagtcaagaacgatggtaaaaatcaggacactgaagatgcactattaaccgctgacagtgcgcaaaccaaaaatttgaaaagattttttgatggtgccaaagatgttacaggcagtccacctgcaaagcagcttaaggagatgccttctgtttttcagaatgttctgggcagcgctgtcctctcaccagcacacaaagatactcaggatttccataaaaatgcagctgatgacagtgctgataaagtgaataaaaaccctacccctgcttacctggacctgttaaaaaagagatcagcagttgaaactcaggcaaataacctcatctgtagaaccaaggcggatgttactcctcctccggatggcagtaccacccataaccttgaagttagccccaaagagaagcaaacggagaccgcagctgactgcagatacaggccaagtgtggattgtcacgaaaaacctttaaatttatccgtgggggctcttcacaattgcccggcaatttctttgagtaaaagtttgattccaagtatcacctgtccattttgtaccttcaagacattttatccagaagttttaatgatgcaccagagactggagcataaatacaatcctgacgttcataaaaactgtcgaaacaagtccttgcttagaagtcgacgtaccggatgcccgccagcgttgctgggaaaagatgtgcctcccctctctagtttctgtaaacccaagcccaagtctgctttcccggcgcagtccaaatccctgccatctgcgaaggggaagcagagccctcctgggccaggcaaggcccctctgacttcagggatagactctagcactttagccccaagtaacctgaagtcccacagaccacagcagaatgtgggggtccaaggggccgccaccaggcaacagcaatctgagatgtttcctaaaaccagtgtttcccctgcaccggataagacaaaaagacccgagacaaaattgaaacctcttccagtagctccttctcagcccaccctcggcagcagtaacatcaatggttccatcgactaccccgccaagaacgacagcccgtgggcacctccgggaagagactatttctgtaatcggagtgccagcaatactgcagcagaatttggtgagccccttccaaaaagactgaagtccagcgtggttgcccttgacgttgaccagcccggggccaattacagaagaggctatgaccttcccaagtaccatatggtcagaggcatcacatcactgttaccgcaggactgtgtgtatccgtcgcaggcgctgcctcccaaaccaaggttcctgagctccagcgaggtcgattctccaaatgtgctgactgttcagaagccctatggtggctccgggccactttacacttgtgtgcctgctggtagtccagcatccagctcgacgttagaaggaaaaaggcctgtgtcatatcaacacttatctaacagcatggcacaaaagagaaactatgagaattttattgggaatgcacattatcgaccaaatgacaaaaaaacttgattcactaattagggggaaaaaaggtcttggtggatgtcagtgcttactccccatgaaattaaattttacttcatcctttgagaagcgaatggtgaaagctactgaaataagctgtgattgtactgtacataaaacatatgaggaatctgcaaggaacactacagttgtgtaaagttgttctgttaacttttgtaccaaatagcaatacaaactagttggaacagttggaacttacatacatggggactggaaatctctattttgtccctgaataatatttttcttagaattgaccaaataagaagtggaatttttgcatacttgagcgctgctgaaaagaaatcatttgggttgggtggggcgggatgggggaaaagtatataatgcttgcacctcaggtaaaaatctgtaaatatctaagttgtaaacctgcttgttcaaatactgtgtgtattccttttctctaatgcagctcatcacttggagcagtttctgctattgtgctctttcatttaaaatgtatgtttttttttttttaaactgtcaatgattttgtattatgttgaatccacccaaatctattgttgtcttaaaattgttaatggaagtattgaccctctatgatatgtgctgcagatatcgaggtcagccattcggaagctggcagcattttatcgcaactttgagcatctcagatggggaaggcaccttcttcctcgcctctccagattgtcctggaacctccaggatccttgactgagggcgttgggatggcttgtaggatttttaagagagtgtgtctacagacaagcattttctctgtagagcagccacacgttgtataaacataaactgtatgtgcagttatttaaatttgtttctgtcaaattaatcatttttgttggacgattcagtggcgggggggttttgcctaaattagtatataaaaacaaaaatgctaaattatatctgtgaattgcaggtattggggaacagttttaagggaaattttggggggaacattttaggtttgtatttggtagtcttaatgtatctggcatttgggtgaactgtggacatactagagttgattatagacacattgattttgaataaggaactgctggccgagcccgctgggagtctagaaagagaaaatctgtttctagacctcagttattttcccatttttggttgttttgaagcagtaacatttttctcagtgcacatgcaatttgggttttagagaagatggccaccagctggcttcctagatattttaaacttttgttctttaatatgctgtccatggctgagtttattagtacatgggcttagtgaccacaaaatattttattaagaaactgtttcaaaaataaatttgcactgttcatttttctggcctcgctgttctccatagagcaagggtaatcctagaaaaaattttttttttttaaattatgcaacgtaagatgtcctccttgatagaagtcttagctcctgtgttacaagggagaactcatttgagatcagtctgttggcattgcaatgaagtgctttgtatcaggaaagtgtacactattgaccttttttcctgttcacaagctgagccatatgtacataatctagattttgttttcatagttttgcacttttatagcctatttttgaagattaacacatttgcaagatgattgactcaatctttgcctaatccaatgagtgttacagagagcttgctgtgactagaaccataaatcttaaagggggtatgtgataatagagggctggaatttaaacctgtatttaaaaaaaagaatcaccaaatctatttgaaaacaagtcgatttgtattatgctggaattttttgggctttcagatttctctttttaaccacatttctgaatgtataaaaataccaattattttcctacagccctttgtacttcaaaatatgtttttgtgtccatcagtattaactattggtatactactggttttatatttttttttctttgagacaacagtacatataatagaggtacaattcgttggatttttgtttatgtatttatttcattccagtttgatttattttaattgttgatacttaagttgtcgaacagtagacattacttgttttatttatgatatatttcagcttaaagttatgttattatatgtggaagtgtaaatatagatttggtgttttgcaaaaaaaaaaaaaaaaaaaa

SEQ ID NO: 29733 - DNA, 6156 bp, Homo Sapiens
ggcggccgcagcctcggctacagcttcggcggcgaaggtcagcgccgacggcagccggcacctgacggcgtgaccgacccgagccgatttctcttggatttggctacacacttatagatcttctgcactgtttacaggcacagttgctgatatgtgttcaagatgagtgggatgggagaaaatacctctgacccctccagggcagagacaagaaagcgcaaggaatgtcctgaccaacttggacccagccccaaaaggaacactgaaaaacgtaatcgtgaacaggaaaataaatatatagaagaacttgcagagttgatttttgcaaattttaatgatatagacaactttaacttcaaacctgacaaatgtgcaatcttaaaagaaactgtgaagcaaattcgtcagatcaaagaacaagagaaagcagcagctgccaacatagatgaagtgcagaagtcagatgtatcctctacagggcagggtgtcatcgacaaggatgcgctggggcctatgatgcttgaggcccttgatgggttcttctttgtagtgaacctggaaggcaacgttgtgtttgtgtcagagaatgtgacacagtatctaaggtataaccaagaagagctgatgaacaaaagtgtatatagcatcttgcatgttggggaccacacggaatttgtcaaaaacctgctgccaaagtctatagtaaatgggggatcttggtctggcgaacctccgaggcggaacagccataccttcaattgtcggatgctggtaaaacctttacctgattcagaagaggagggtcatgataaccaggaagctcatcagaaatatgaaactatgcagtgcttcgctgtctctcaaccaaagtccatcaaagaagaaggagaagatttgcagtcctgcttgatttgcgtggcaagaagagttcccatgaaggaaagaccagttcttccctcatcagaaagttttactactcgccaggatctccaaggcaagatcacgtctctggataccagcaccatgagagcagccatgaaaccaggctgggaggacctggtaagaaggtgtattcagaagttccatgcgcagcatgaaggagaatctgtgtcctatgctaagaggcatcatcatgaagtactgagacaaggattggcattcagtcaaatctatcgtttttccttgtctgatggcactcttgttgctgcacaaacgaagagcaaactcatccgttctcagactactaatgaacctcaacttgtaatatctttacatatgcttcacagagagcagaatgtgtgtgtgatgaatccggatctgactggacaaacgatggggaagccactgaatccaattagctctaacagccctgcccatcaggccctgtgcagtgggaacccaggtcaggacatgaccctcagtagcaatataaattttcccataaatggcccaaaggaacaaatgggcatgcccatgggcaggtttggtggttctgggggaatgaaccatgtgtcaggcatgcaagcaaccactcctcagggtagtaactatgcactcaaaatgaacagcccctcacaaagcagccctggcatgaatccaggacagcccacctccatgctttcaccaaggcatcgcatgagccctggagtggctggcagccctcgaatcccacccagtcagttttcccctgcaggaagcttgcattcccctgtgggagtttgcagcagcacaggaaatagccatagttataccaacagctccctcaatgcacttcaggccctcagcgaggggcacggggtctcattagggtcatcgttggcttcaccagacctaaaaatgggcaatttgcaaaactccccagttaatatgaatcctcccccactcagcaagatgggaagcttggactcaaaagactgttttggactatatggggagccctctgaaggtacaactggacaagcagagagcagctgccatcctggagagcaaaaggaaacaaatgaccccaacctgcccccggccgtgagcagtgagagagctgacgggcagagcagactgcatgacagcaaagggcagaccaaactcctgcagctgctgaccaccaaatctgatcagatggagccctcgcccttagccagctctttgtcggatacaaacaaagactccacaggtagcttgcctggttctgggtctacacatggaacctcgctcaaggagaagcataaaattttgcacagactcttgcaggacagcagttcccctgtggacttggccaagttaacagcagaagccacaggcaaagacctgagccaggagtccagcagcacagctcctggatcagaagtgactattaaacaagagccggtgagccccaagaagaaagagaatgcactacttcgctatttgctagataaagatgatactaaagatattggtttaccagaaataacccccaaacttgagagactggacagtaagacagatcctgccagtaacacaaaattaatagcaatgaaaactgagaaggaggagatgagctttgagcctggtgaccagcctggcagtgagctggacaacttggaggagattttggatgatttgcagaatagtcaattaccacagcttttcccagacacgaggccaggcgcccctgctggatcagttgacaagcaagccatcatcaatgacctcatgcaactcacagctgaaaacagccctgtcacacctgttggagcccagaaaacagcactgcgaatttcacagagcacttttaataacccacgaccagggcaactgggcaggttattgccaaaccagaatttaccacttgacatcacattgcaaagcccaactggtgctggacctttcccaccaatcagaaacagtagtccctactcagtgatacctcagccaggaatgatgggtaatcaagggatgataggaaaccaaggaaatttagggaacagtagcacaggaatgattggtaacagtgcttctcggcctactatgccatctggagaatgggcaccgcagagttcggctgtgagagtcacctgtgctgctaccaccagtgccatgaaccggccagtccaaggaggtatgattcggaacccagcagccagcatccccatgaggcccagcagccagcctggccaaagacagacgcttcagtctcaggtcatgaatatagggccatctgaattagagatgaacatggggggacctcagtatagccaacaacaagctcctccaaatcagactgccccatggcctgaaagcatcctgcctatagaccaggcgtcttttgccagccaaaacaggcagccatttggcagttctccagatgacttgctatgtccacatcctgcagctgagtctccgagtgatgagggagctctcctggaccagctgtatctggccttgcggaattttgatggcctggaggagattgatagagccttaggaatacccgaactggtcagccagagccaagcagtagatccagaacagttctcaagtcaggattccaacatcatgctggagcagaaggcgcccgttttcccacagcagtatgcatctcaggcacaaatggcccagggtagctattctcccatgcaagatccaaactttcacaccatgggacagcggcctagttatgccacactccgtatgcagcccagaccgggcctcaggcccacgggcctagtgcagaaccagccaaatcaactaagacttcaacttcagcatcgcctccaagcacagcagaatcgccagccacttatgaatcaaatcagcaatgtttccaatgtgaacttgactctgaggcctggagtaccaacacaggcacctattaatgcacagatgctggcccagagacagagggaaatcctgaaccagcatcttcgacagagacaaatgcatcagcaacagcaagttcagcaacgaactttgatgatgagaggacaagggttgaatatgacaccaagcatggtggctcctagtggtatgccagcaactatgagcaaccctcggattccccaggcaaatgcacagcagtttccatttcctccaaactacggaataagtcagcaacctgatccaggctttactggggctacgactccccagagcccacttatgtcaccccgaatggcacatacacagagtcccatgatgcaacagtctcaggccaacccagcctatcaggccccctccgacataaatggatgggcgcaggggaacatgggcggaaacagcatgttttcccagcagtccccaccacactttgggcagcaagcaaacaccagcatgtacagtaacaacatgaacatcaatgtgtccatggcgaccaacacaggtggcatgagcagcatgaaccagatgacaggacagatcagcatgacctcagtgacctccgtgcctacgtcagggctgtcctccatgggtcccgagcaggttaatgatcctgctctgaggggaggcaacctgttcccaaaccagctgcctggaatggatatgattaagcaggagggagacacaacacggaaatattgctgacactgctgaagccagttgcttcttcagctgaccgggctcacttgctcaaaacacttccagtctggagagctgtgtctatttgtttcaacccaactgacctgccagccggttctgctagagcagacaggcctggccctggttcccagggtggcgtccactcggctgtggcaggaggagctgcctcttctcttgacagtctgaagctcgcatccagacagtcgctcagtctgttccctgcattcaccttagtgcaacttagatctctcctccccaagtaaatgttgacaggccaatttcatacccatgtcagattgaatgtatttaaatgtatgtatttaaggagaaccatgctcttgttctgttcctgttcggttccagacactggtttcttgctttgttttccctggctaacagtctagtgccaaagattaagattttatctgggggaaagaaaagaattttttaaaaaattaaactaaagatgttttaagctaaagcctgaatttgggatggaagcaggacagacaccgtggacagcgctgtatttacagacacacccagtgcgtgaagaccaacaaagtcacagtcgtatctctagaaagctctaaagaccatgttggaaagagtctccagttactgaacagatgaaaaggagcctgtgagagggctgttaacattagcaaatattttttccttgttttttctttgttaaaaccaaactggttcacctgaatcatgaattgagaagaaataattttcatttctaaattaagtcccttttagtttgatcagacagcttgaatcagcatctcttcttccctgtcagcctgactcttcccttcccctctctcattccccatactccctattttcattccttttttaaaaaataatataagctacagaaaccaggtaagccctttatttccttaaatgttttgccagccacttaccaattgctaagtattgaatttcagaaaaaaaaaatgcatttactggcaaggagaagagcaaagttaaggcttgataccaatcgagctaaggatacctgctttggaagcatgtttattctgttccccagcaactctggcctccaaaatgggagaaacgccagtgtgtttaaattgatagcagatatcacgacagatttaacctctgccatgtgttttttattttgttttttagcagtgctgactaagccgaagttttgtaaggtacataaaatccaatttatatgtaaacaagcaataatttaagttgagaacttatgtgttttaattgtataatttttgtgaggtatacatattgtggaattgactcaaaaatgaggtacttcagtattaaattagatatcttcatagcaatgtctcctaaaggtgttttgtaaaggatatcaatgccttgattagacctaatttgtagacttaagactttttattttctaaaccttgtgattctgcttataagtcatttatctaatctatatgatatgcagccgctgtaggaaccaattcttgatttttatatgtttatattctttcttaatgaaccttagaaagactacatgttactaagcaggccacttttatggttgttttt

SEQ ID NO: 29734 - DNA, 968 bp, Homo Sapiens
ccaaacctactgggctactaatacttctctcagcagttgatcaaatacaatagaccatgtaagctggggccgctcatccacttccagtttgctggtctccctgctagaaaacacattgtactgtgctttttctggaattcagtataatggcatcactgcctgtttttcacatcttttgtttcctgttcattttaaggaaacctactaaatccagttaatattaaatggacaccactcattaagaaatttctttatggcttctgctgaatacttaaatgccttactacagttatccagttgacatgtttttaattcatataaggtatattgggtatattgaagtatatattgtattacaaagacttgttcttgtattttaaaatgtcagtgcaaaaaatatatggtggaacctttctttaaagttgaaatgcagtattatttaaatctgaaaggttaaaaagctttcttcaccttatatatgttcttccactgtgactttttagttgaagactagtaaattaacttttagttagaagatgcctactgcttttgttgtttattttaatcagcagagcacagagacacataaaaactctgggaaatgactaggataaaaatatcagtatgtatctgttttagatattttgagttttgctttttttatgccttgaatattttatttcaaaaagtatctgaagcaaattctcagactgaactacttcttagacctcactgtaagaatattttattcaatgtctcatttatgatagatttgcaagctgctcatttttgaacagctttttgcatgggataggagcatgtctattctaacacatcagcttattcaaaagcaagaattttaaaaataagataaatgtaaagttgttttataaacgatcctgttaattaaaccacagacaccatatatccttctgcatcctttggccaataaaagttgctggagaacc

SEQ ID NO: 29735 - DNA, 7596 bp, Homo Sapiens
agttccacttccggcgtatgaggcggtgacaatgggagcagcgcgggcggcgccgggaggcagctgacaagcgtttgcggcttcgcttcatggccgctctcccgcccctcctgggatctgtggggagctggggagcccgcagcggcccggagccggagctggcgagccgagcggagacctgtgcgccgcgcctctgaggcgcagcatgtgaagcggagacggcatccagtggggggcgagcctctcagccggccgggatggctaccacggccgagctcttcgaggagccttttgtggcagatgaatatattgaacgtcttgtatggagaaccccaggaggaggctctagaggtggacctgaagcttttgatcctaaaagattattagaagaatttgtaaatcatattcaggaactccagataatggatgaaaggattcagaggaaagtagagaaactagagcaacaatgtcagaaagaagccaaggaatttgccaagaaggtacaagagctgcagaaaagcaatcaggttgccttccaacatttccaagaactagatgagcacattagctatgtagcaactaaagtctgtcaccttggagaccagttagagggggtaaacacacccagacaacgggcagtggaggctcagaaattgatgaaatactttaatgagtttctagatggagaattgaaatctgatgtttttacaaattctgaaaagataaaggaagcagcagacatcattcagaagttgcacctaattgcccaagagttaccttttgatagattttcagaagttaaatccaaaattgcaagtaaataccatgatttagaatgccagctgattcaggagtttaccagtgctcaaagaagaggtgaaatctccagaatgagagaagtagcagcagttttacttcattttaagggttattcccattgtgttgatgtttatataaagcagtgccaggagggtgcttatttgagaaatgatatatttgaagacgctggaatactctgtcaaagagtgaacaaacaagttggagatatcttcagtaatccagaaacagtcctggctaaacttattcaaaatgtatttgaaatcaaactacagagttttgtgaaagagcagttagaagaatgtaggaagtccgatgcagagcaatatctcaaaaatctctatgatctgtatacaagaaccaccaatctttccagcaagctgatggagtttaatttaggtactgataaacagactttcttgtctaagcttatcaaatccattttcatttcctatttggagaactatattgaggtggagactggatatttgaaaagcagaagtgctatgatcctacagcgctattatgattcgaaaaaccatcaaaagagatccattggcacaggaggtattcaagatttgaaggaaagaattagacagcgtaccaacttaccacttgggccaagtatcgatactcatggggagacttttctatcccaagaagtggtggttaatcttttacaagaaaccaaacaagcctttgaaagatgtcataggctctctgatccttctgacttaccaaggaatgccttcagaatttttaccattcttgtggaatttttatgtattgagcatattgattatgctttggaaacaggacttgctggaattccctcttcagattctaggaatgcaaatctttattttttggacgttgtgcaacaggccaatactatttttcatctttttgacaaacagtttaatgatcaccttatgccactaataagctcttctcctaagttatctgaatgccttcagaagaaaaaagaaataattgaacaaatggagatgaaattggatactggcattgataggacattaaattgtatgattggacagatgaagcatattttggctgcagaacagaagaaaacagattttaagccagaagatgaaaacaatgttttgattcaatatactaatgcctgtgtaaaagtctgtgcttacgtaagaaaacaagtggagaagattaaaaattccatggatgggaagaatgtggatacagttttgatggaacttggagtacgttttcatcgacttatctatgagcatcttcaacaatattcctacagttgtatgggtggcatgttggccatttgtgatgtagccgaatataggaagtgtgccaaagacttcaagattccaatggtattacatctttttgatactctgcatgctctttgcaatcttctggtagttgccccagataatttaaagcaagtctgctcaggagaacaacttgctaatctggacaagaatatacttcactccttcgtacaacttcgtgctgattatagatctgcccgccttgctcgacacttcagctgagattgaatttacaaaggaattcagtgtcagttcctttacagaggaatgtcttatacttcagcagccctcggttgatagaaagcacaggagataccttatgacacagccaacattttgtgaaacaatgactggaacaaaacagcagccatacttacctttgaggttttatttaaagtttggataccactagctatattttgcttttttcccctcacattgaattttaattccattcttgaatgtagaaatttcagattctctaaaactacatgtcactgtttttatcctagaaaatgttgctgtcagaaggcaaaggaaatgttaccagtgttttcggttcttgtacttttaacatattccatttagaaattttgccattctgttttccattaataataggtgaaatacaggaaaactacatttgttattcctcagtttttaatgaccttttcagcatcaattgttaatcagattattttaggttttcgtaaataatttttttgcctctttcaaaaggttaacaattaagcatactttctgcagttggttgattggatttttttctgaggtacagcattaatactagtccaaaaaatgtcataaactgaactaaaatgatgaactattttatgtagacattaggagtggatcggaatacttctgctttctgggtaaaacttaaaagtttactatttcttatttggtaaatagattttaagccaattctagtaagaaattaataaaactaccttattttgtatttcacttaaggtggaggaccttaactaaaggaccatatttattcattattttaatattataagggaagtaaaaaaaagtgaggtatagtctaaatggtgcatataggaaatactgacagtgtttagcaacatgcagccctttgagatttctgtcgtaatgctaaacttgaataagatggaatggctgaacatgtggttagtcttttattttaagaagaattgagaattgatagatttggagatgagctttgcaaaggctgtttgcttttcatgtctataggtctgtcattgtcctttttcaaagcatttctgaagttattcctacttggatatagttaatggaattggcttaatttgatgacataataaatcacttataaaattttaaatatcaagtgaaaatttagaaaggccattactattctataaaccttataaacttgctctgggagaatgcattctaaattatatatagtgtttcagctcccattgtggtgttcatagtcttctaggaacagataaacttaagtattcaattcactcttggcattttttctttaatataggctttttagcctatttttggaaaactgcttttcttctgagaaccttattctgaatgtcatcaactttaccaaaccttctaagtccagagctaacttagtactgtttaagttactattgactgaattttcttcattttctgtttagtccagtgttaccaaggtaagctggggaatgaagtataccaacttctttcagagcattttaggacattatggcagctttagaaggctgtcttgtttctagccaagggagagccagcgcaggttttggatactagagaaagtcatttgcttgtactattgccattttagaaagctctgatgtgaattcaaattttacctctgttacttaaagccaacaattttaaggcagtagttttactggccatttaagctctttgtacagtgtcaatttgtaaaaaagaaaaaacgaaaaaaaatctcaaataaaacatgagataacattttaagacttccaaatcagagaagtgcttcaaattattttgtttggattaatttttaaaatgtaaagcatatacttgttgcttagttattttgtttattattttcatgtttgagttctgtgcaatattttctattatgtccgttgataggacagtgacaaaattcgtaagtgaatacttaatttaaaagtgttaacattaatgctcaataaacaaattccctgcagttgttttttttatttcactctttttatattttagagccatccatcctgaattttataaatgattttttatttaaaaatttgagatttttaaaatttttcacagcacaggtcttctcattttcttttttagcaaaaaatacttgactatataaacaagactagaaatttatcctaaacagatggtctttctctgagggaaaaaaaaaaatgtgtcatgtgaggcaatatgcattctttgtattctgattttttaagtgttttcatatttatagccatcacaaaattttgcccaaagtgtatggctcagaagagatgatcaataactaaaatgtttttcgttttgcacatggtaaaattttaggtagagagtggagctttgtataattggtaactttaaccaacatttacgtaagtacggtctttgcagtattacacaataccgcatgagctaatatgcagtatttaggtaatgcattgaatgaagttgaaaatatgctcttaacacactgtgcattgtttttctaaaattgagaaatatctgaaatacagaatacgaatttaataaaggaagcctaccttatgtaaattatgatgttgaaaatgacagtcaaccagagtagatgaagtgtccttatgaagaattattaaatagtagctggatggatctttagatggatgaccacctgaccattccaggacaatttttggtcccattttgaggattgccatagttgcaagtccttaggatcttccttgttttaaaaaactatcaaagtaggttaaattaaaatctaatttaaattaggttaatttatattacattgtagatcattcttttttcccccctctttcacttctaaatattttgctttctaaatactagccttctggttcacagtgaaataatttaattatcaatcagtagattgattccaagtggagaattcactgcttccctaaaatgcgtttttcttacctgtaatggtgaatatttacaaggatctggataaagagattttgatttttgaaatgccacaaaaccccttaaagtggtcaagtacctaaggtagtggctaaggcatgcttgaactgtgtttgagagacagcagttcagtcagtacataatttgttggtgactaacaaagctcacatctgggagattaactttttttaacgcaaaaatattctgcacattacccatatattgttgaattttacatacaaagcattttgtgctttcattcaattagtttaactatattcagtttctgtattatttctctctgatctatcctgtaattattctatactttagaagaaaagatcagttcatattgttagactgaataattctacatgaagttaaaagttagcaatttaaaaaattttgctgcataataaagataattatagttacatgtattgatttaagtctcacacactgtgctaataagtcctttgcacatattattggattctagagcaaccctaggatttgggtactattatttccatttgacagatgaaaaacctaatgcatagaaagataagtagaccagtcaaggtctacagctagtaaaatgctcagattgaaacctaaatcttttctcactcacttttaggttctatatgctattctccttacgtaacgttaaatagatcctttagtttgataggttcattagttttgcttaatcgttgcttccaatatgattcttattgtagtatttatattacaaagttggcatacagggtcaatatctaatttactgttgtgtttttcttaatatgttcaatgtatggtcatactttttaaatttgattttttaaatattataagtggtcatgaaattttaatgttaagtttgtacctaatagaaatatgtctatcacaaatctttattggtattattttatatacttttccagcttgataattttcacaatagaaagagaccaaatattttgtactatattttgtgacatagaagtaaatgacaactctaccttggaagatatgaagaaatcagtgtttttatgttcaaaaactattttaaatgtcataggcttgccaattgtgttaactatttagtacattggtagtttttaaatgactaatgctggagtgaaaatgtaaggcaaaatatttagtatattaacagtagatagtcattttcatgtaatcagaattgcatgttaagggttttaaaagctgtcataactcttaccttttatttctaccagtgatcaatcatttctctttacaaatttagggaggaaacaactgttcaaatgtataggggacagaaacctgacatttagagaacagaaattttaattgccaaattaaagcagctaggctgcccctgggcttaacaaaattcctatttttgaactagacccgaggtattttatcattattatttgataggtaccattaacctttgttttgtgattatcgacttttggggggaaagatgagtaattaaacacactcgcccattttctaagtggtttagaaggttgcagtctgcctcaccatacaaagccagtttaaataggaatatatcacatcatacttcacatagcagtcaacctcagaggaaagtcatttattcagaaggcatagattttgctagacagcagtgatgcattacaaatatataattatttgcactaatatttgagcaggtggaatggattagaacatggtcaacatcatgctgctgataacatgtatttttctatattaatatgtactgtgcaacatgtattaaaattgtcaataattcattttagccaagatactaatatttatattactgtgtttaagagacagtatccaactgagccacttttaatttaaaagtctgaaactggaattaagtttactttcaaaaatcacttaaattactttataatcagtgaaaggtcagtaaaatgtagaattataagtgcctagtgacttaataggaggaaatatggagggttaaggaaggaagtaggaacctggaataagaaagctaagtttcatttatagttccaatgagtgactttctttgttttcaccactgggaatcttaaatgaagaaagtgtcgtatcccttccagttatctttatgttaataaactaagtgaagtttggatagaactaacaaaggaattagtctccattggtggacttccagagtttt

SEQ ID NO: 29736 - DNA, 2381 bp, Homo Sapiens
agaaacgtgacacaccagccctctcggaggggtttcggaccgaagggaagaagctgcgccgtgtcgtccgtctccctgcgcgccgcgggcacttctcctgggctctccccgaactctcccgcgacctctgcgcgccctcaggccgccttccccgccctgggctcgggacaacttctggggtggggtgcaaagaaagtttgcggctcctgccgccggcctctccgcctcttggcctaggaggctcgccgcccgcgcccgctcgttcggccttgcccgggaccgcgtcctgccccgagaccgccaccatgaacaagctttacatcggcaacctcaacgagagcgtgacccccgcggacttggagaaagtgtttgcggagcacaagatctcctacagcggccagttcttggtcaaatccggctacgccttcgtggactgcccggacgagcactgggcgatgaaggccatcgaaactttctccgggaaagtagaattacaaggaaaacgcttagagattgaacattcggtgcccaaaaaacaaaggagccggaaaattcaaatccgaaatattccaccccagctccgatgggaagtactggacagcctgctggctcagtatggtacagtagagaactgtgagcaagtgaacaccgagagtgagacggcagtggtgaatgtcacctattccaaccgggagcagaccaggcaagccatcatgaagctgaatggccaccagttggagaaccatgccctgaaggtctcctacatccccgatgagcagatagcacagggacctgagaatgggcgccgagggggctttggctctcggggtcagccccgccagggctcacctgtggcagcgggggccccagccaagcagcagcaagtggacatcccccttcggctcctggtgcccacccagtatgtgggtgccattattggcaaggagggggccaccatccgcaacatcacaaaacagacccagtccaagatagacgtgcataggaaggagaacgcaggtgcagctgaaaaagccatcagtgtgcactccacccctgagggctgctcctccgcttgtaagatgatcttggagattatgcataaagaggctaaggacaccaaaacggctgacgaggttcccctgaagaccctggcccataataactttgtagggcgtctcattggcaaggaaggacggaacctgaagaaggtagagcaagataccgagacaaaaatcaccatctcctcgttgcaagaccttaccctttacaaccctgagaggaccatcactgtgaagggggccatcgagaattgttgcagggccgagcaggaaataatgaagaaagttcgggaggcctatgagaatgatgtggctgccatgagcctgcagtctcacctgacccctggcctgaacctggctgctgtaggtcttttcccagcttcatccagcgcagtcccgccgcctcccagcagcgttactggggctgctccctatagctcctttatgcaggctcccgagcaggagatggtgcaggtgtttatccccgcccaggcagtgggcgccatcatcggcaagaaggggcagcacatcaaacagctctcccggtttgccagcgcctccatcaagattgcaccacccgaaacacctgactccaaagttcgtatggttatcatcactggaccgccagaggcccaattcaaggctcagggaagaatctatggcaaactcaaggaggagaacttctttggtcccaaggaggaagtgaagctggagacccacatacgtgtgccagcatcagcagctggccgggtcattggcaaaggtggaaaaacggtgaacgagttgcagaatttgacggcagctgaggtggtagtaccaagagaccagacccctgatgagaacgaccaggtcatcgtgaaaatcatcggacatttctatgccagtcagatggctcaacggaagatccgagacatcctggcccaggttaagcagcagcatcagaagggacagagtaaccaggcccaggcacgaaggaagtgaccagcccctccctgtcccttcgagtccaggacaacaacgggcagaaatcgagagtgtgctctccccggcaggcctgagaatgagtgggaatccgggacacctgggccgggctgtagatcaggtttgcccacttgattgagaaagatgttccagtgaggaaccctgatctctcagcccccaaacacctacccaattggcccaacactgtctgcccctcggggtgtcagaaattctagcgcaaggcacttttaaacgtggattgtttaaagaagctctccaggccccaccaagagggtggatcacacctcagtgggaagaaaaataaaatttccttcaggtttt

SEQ ID NO: 29737 - DNA, 1618 bp, Homo Sapiens
tcagagttcacgaggcagccgaggaagaggaggcttgaggcccagggtgggcaccagccagccatggccacagccgagaccgccttgccctccatcagcacactgaccgccctgggccccttcccggacacacaggatgacttcctcaagtggtggcgctccgaagaggcgcaggacatgggcccgggtcctcctgaccccacggagccgcccctccacgtgaagtctgaggaccagcccggggaggaagaggacgatgagaggggcgcggacgccacctgggacctggatctcctcctcaccaacttctcgggcccggagcccggtggcgcgccccagacctgcgctctggcgcccagcgaggcctccggggcgcaatatccgccgccgcccgagactctgggcgcatatgctggcggcccggggctggtggctgggcttttgggttcggaggatcactcgggttgggtgcgccctgccctgcgagcccgggctcccgacgccttcgtgggcccagccctggctccagccccggcccccgagcccaaggcgctggcgctgcaaccggtgtacccggggcccggcgccggctcctcgggtggctacttcccgcggaccgggctttcagtgcctgcggcgtcgggcgccccctacgggctactgtccgggtaccccgcgatgtacccggcgcctcagtaccaagggcacttccagctcttccgcgggctccagggacccgcgcccggtcccgccacgtccccctccttcctgagttgtttgggacccgggacggtgggcactggactcggggggactgcagaggatccaggtgtgatagccgagaccgcgccatccaagcgaggccgacgttcgtgggcgcgcaagaggcaggcagcgcacacgtgcgcgcacccgggttgcggcaagagctacaccaagagctcccacctgaaggcgcatctgcgcacgcacacaggggagaagccatacgcctgcacgtgggaaggctgcggctggagattcgcgcgctcggacgagctgacccgccactaccggaaacacacggggcagcgccccttccgctgccagctctgcccacgtgctttttcgcgctctgaccacctggccttgcacatgaagcgccacctttgagccctgccctggcacttggactctcctagtgactggggatgggacaagaagcctgtttggtggtctcttcacacggacgcgcgtgacacaatgctgggtggttttcccacgaatggaccctctcctggactcgcgttcccaaagatccacccaaatatcaaacacggacccatagacagccctgggggagcctcttacggaaaatccgacaagccttcagccacagggagccacacagagatgtccaaactgtcgtgcaaacccagtgagacagaccgccaaataaacggactcagtggacactcagaccagctcccagatggccctggacagcaggagagggtgtgggatgaggcttcccagagaccctgggtctagaaagcggctcctgaaggtcccttattgtggctgatattaactgtcaatggttatgggtcctataaaaatgcccctcccagataaaaaa

SEQ ID NO: 29738 - DNA, 3780 bp, Homo Sapiens
tgtgtctgagcctgtggagcgattaaaccgtgcgcggagctgcttctttggcggcagcggcggcggcggtggccggtgcggacgcgcggagctcgccggagacgccgggtggccggagccgtggagcggcggcggagcgggcgccgcggggggtgtggcgcggagaatgattacggacctgaagccaaagaacaagatgcgctagtggacagattgctgaccaggggcttgagagctgggttctattttccctcctcaaactgactttgcagccacggagaggcaggggaaatggaaggtgatgcagtcgaagccattgtggaggagtccgaaacttttattaaaggaaaggagagaaagacttaccagagacgccgggaagggggccaggaagaagatgcctgccacttaccccagaaccagacggatgggggtgaggtggtccaggatgtcaacagcagtgtacagatggtgatgatggaacagctggaccccacccttcttcagatgaagactgaagtaatggagggcacagtggctccagaagcagaggctgctgtggacgatacccagattataactttacaggttgtaaatatggaggaacagcccataaacataggagaacttcagcttgttcaagtacctgttcctgtgactgtacctgttgctaccacttcagtagaagaacttcagggggcttatgaaaatgaagtgtctaaagagggccttgcggaaagtgaacccatgatatgccacaccctacctttgcctgaagggtttcaggtggttaaagtgggggccaatggagaggtggagacactagaacaaggggaacttccaccccaggaagatcctagttggcaaaaagacccagactatcagccaccagccaaaaaaacaaagaaaaccaaaaagagcaaactgcgttatacagaggagggcaaagatgtagatgtgtctgtctacgattttgaggaagaacagcaggagggtctgctatcagaggttaatgcggagaaagtggttggtaatatgaagcctccaaagccaacaaaaattaaaaagaaaggtgtaaagaagacattccagtgtgagctttgcagttacacgtgtccacggcgttcaaatttggatcgtcacatgaaaagccacactgatgagagaccacacaagtgccatctctgtggcagggcattcagaacagtcaccctcctgaggaatcaccttaacacacacacaggtactcgtcctcacaagtgcccagactgcgacatggcctttgtgaccagtggagaattggttcggcatcgtcgttacaaacacacccacgagaagccattcaagtgttccatgtgcgattacgccagtgtagaagtcagcaaattaaaacgtcacattcgctctcatactggagagcgtccgtttcagtgcagtttgtgcagttatgccagcagggacacatacaagctgaaaaggcacatgagaacccattcaggggaaaagccttatgaatgttatatttgtcatgctcggtttacccaaagtggtaccatgaagatgcacattttacagaagcacacagaaaatgtggccaaatttcactgtccccactgtgacacagtcatagcccgaaaaagtgatttgggtgtccacttgcgaaagcagcattcctatattgagcaaggcaagaaatgccgttactgtgatgctgtgtttcatgagcgctatgccctcatccagcatcagaagtcacacaagaatgagaagcgctttaagtgtgaccagtgtgattacgcttgtagacaggagaggcacatgatcatgcacaagcgcacccacaccggggagaagccttacgcctgcagccactgcgataagaccttccgccagaagcagcttctcgacatgcacttcaagcgctatcacgaccccaacttcgtccctgcggcttttgtctgttctaagtgtgggaaaacatttacacgtcggaataccatggcaagacatgctgataattgtgctggcccagatggcgtagagggggaaaatggaggagaaacgaagaagagtaaacgtggaagaaaaagaaagatgcgctctaagaaagaagattcctctgacagtgaaaatgctgaaccagatctggacgacaatgaggatgaggaggagcctgccgtagaaattgaacctgagccagagcctcagcctgtgaccccagccccaccacccgccaagaagcggagaggacgaccccctggcagaaccaaccagcccaaacagaaccagccaacagctatcattcaggttgaagaccagaatacaggtgcaattgagaacattatagttgaagtaaaaaaagagccagatgctgagcccgcagagggagaggaagaggaggcccagccagctgccacagatgcccccaacggagacctcacgcccgagatgatcctcagcatgatggaccggtgatggcggagccttgtgcgtcgccaggacttctctgggctgtgtttaaacggcccgcatcttaatttttctcccttctttctttttttggctttgggaaaagcatcattttaccaaacataccgagaacgaaaacttcaaggatgatgttagaaaaaaatgtgatttaactagaacttgctgtctgatgttagcaaatcatggaatgttctgagtccctgagggtttactgtgaagtgctgaggacagtgttgacaactaactcgttttcctagatggaaacggagacattgacccctccctccatgtggtaaaccactccagaatggccaccaggcttcccagagttctatggtcttcttcccaagagagtttttaattgtaaatgcatacttgggaaggacttagagttttaaactgttttttgcttttgcttttccctgactccctttgcttggagtcagctgcacaccagtagtatggcatgctacgatcaggttctgtcctgaaagctttgcctctttcttggcaaagtttctggtatggtcaagcttgtaaataactttttttacattttaatcttttccattaattaagaggttgaaaagaagtgcagtgtaagaaaacccagcattttaattacttgcaaattaagttaccacagactctgtagtgtgtaaatgttgacaaggaattggatcacaatcatgtagcagaatggcacccagaccactgcccaccagtgacggacatgcacgtggcagatcatgatttccagcccacggagccagcatttgaaccttgtataattaactttcagttatgatttcccatcgacattttctttgccctgtttgtagctgattgttgtgttttataaatcttctgttaaggcagaagggtgattatgagtggttcacagcagcccttataagctgggccagaaaatttcactaggtcagtaatttaaaccttggatcttcaaaaaataaaataatgtgaagcaaaaccaactaaaaagtgattcttgcacatgaactgtcacatgtttaaaaatgtgttttttagagagcctcagtcttactgatttcaaacacttttttcttctgtgtattgcttttaagagagccatcagttagctatcagactctaggttgatgcattttgtacttagctgtactgtgtgatatttttcattattttaggacgccaacatgagacctgtaataaaatatgtaatggggttgaaagctggggaggaggatctactgctgtacagctaataaatcataacggattaacaagtga

SEQ ID NO: 29739 - DNA, 1664 bp, Homo Sapiens
aattcataaacaagagctccagttccctggaacctgagtcgggagacctgcagctcactttctccctgtttgctggccagcagggtttgtggccgcctctgctgtgacgccacagcctggtgaggagggggctgcagttcctcaggaaactgccagtggacaaagtcataaacaagagttccagttccctggaacctgagtcgggaggcctgcaactcactttctccctgtttgctggcccagacaggcctgtgctagagggctggatagtgtggtagtgtggtggatagagtgctgcctctatccacaacgcagccatatgctgactgaagataactttgtgtctggaagagccctctgatttcttacactaatggccttacacgacatggaggattttacatttgatggaacaaagcgcttaagtgtcaactacgtgaagggaattcttcaaccgacagacacctgtgacatctgggataagatctggaacttccaagccaagcctgatgacctgcttatttctacctatcctaaagcaggaacaacatggactcaggagatagtggaattaatacaaaatgaaggtgatgtggagaaaagtaaacgggcaccgactcatcaacgatttcctttcctcgaaatgaaaatcccatccttaggatctggtttggaacaagctcatgcaatgccctcaccacggatcctgaaaacacatcttccctttcacttgctgccaccatccttgctagagaaaaactgtaagataatctatgtagcaagaaatcccaaggacaacatggtgtcctattaccatttccaaagaatgaataaagctcttcctgctccaggaacatgggaagagtattttgagacttttctggctgggaaagtgtgctggggctcctggcatgaacatgtgaaaggatggtgggaagccaaagacaaacaccgtattctctatctcttctatgaggacatgaagaagaacccaaagcatgaaattcagaagctggcagaatttattgggaagaaattagatgacaaagttctagataaaattgtccattacacttcgtttgatgtcatgaaacagaatccaatggcaaactattcatcgattcctgctgaaatcatggaccactccatttctccattcatgagaaaaggggcagtgggagactggaagaaacacttcaccgtggctcagaatgagagatttgatgaagattacaagaagaaaatgactgataccagactaactttccacttccagttctagtaaggaagaaaaactgaaaatgttttagtttattacccagtatatttgggtaataatgaaagtttaattctcataacaaatgatatcagattccagttatcagaatagtttactgtgtttgctcttattcactctactaaaaaattattttaaaaggctggaggcaaggtggtgacaggcagcagggtggcgacatggagagagggaagctcaataaatcactaggtacaatcctggtatcattgccaattatcatcatatttacattttctacaatcatgtgcttattaacatattggaaatgcttcagtcctcacatgataatacactaacattttcagattaagttttggttcaagttaattttttttttttttttttt

SEQ ID NO: 29740 - DNA, 14123 bp, Homo Sapiens
tgcaacggaaacttttggctccacgaacagaaaagcaagagcaaaaactcagttaaatgcgttcttcctccatctttgcctagtccaaaaggaaaaaaaaagaaacagaaaaaagaaaaactgtttggaagagtagcgttgaggtttgctttttacctgtttttcctctagaacagccaggtggattcacatgatccaattttttaattgtcttctatgtcccactccgaataacccggatgccccagcacaatcagagagatcgttttttttaaaaaaaatttcagcctccaaaggtaggaggggagtgttaggggagaaagtactttaattaaaaatcaataactcgaggtttttgggatacggtttgccatttcctaattaagaaatgggtttgacagtccctttgtacacactgctatgcaaaccccaaagggttggcggctgtccgggcgatgacactccggtcccctgcgagaccccgggccagccaggcccgtccgccgccggcctctggggtccgtccccggctcgcgcagacctctcgcttctctcggctctgtctcctgcgctcagctctgctcggggccggccgcctcaggctcgccgccaccaggtcgttgcaaataccttttccctccccggggccccagcgcgcggccacctcccagcctccccccctcccaccctggcagcggggccctttcccggctcaggaacagcagcagcccgggccgcgccggcaggaagcgaggcccatgttgctgctgttccctggcgcgcctccccgccctccgggggccgccacggctcttccgcgctcccgggcacccccctccgcgcctgcgctgtgccccacgggggcggggctcagattcctgtcagcggcggcggcggtggcggcgaccgtcagttttcgctgaggagaaacacgaaacggaccctttggctctcccccttccccttccccgtcctgaacccctctcctggtcaccgagaatcagtccccgtggagttccccctccacctcgccatcgtttcctcggtcctcggcccagtggaagtcactaccctcgaggaggaggcagcggcagccgccctcgcgtcgccgcccccggttcggtgcccgcggtcccggagaggaggtgccgccgccaccgccgctccccccctcccgctgccctcgggccgggctgggtcgagctgcgatgccctcggacttcatctcattgctcagcgcggacctagacctggaatcgcccaagtccctctactcgcgagaatctgtctatgatcttctcccaaaggagttacagttacctccatctagagaaacatctgtagcatcaatgagtcagacaagcggtggtgaggcaggctcgcctcctccagctgttgttgctgctgatgcttcttcagctccctcctcttcctccatgggcggtgcttgcagctcctttaccacctcttccagccctaccatttattctacctcagtcaccgacagcaaggctatgcaagtggagagctgctcctcagccgtgggggtaagtaacagaggggtaagtgaaaagcagttaaccagtaacacagttcagcagcatccatcaacaccgaagaggcacacagtcttgtacatctcaccaccacctgaggacttgctggataacagtcggatgtcctgccaggatgaggggtgtggattggaatctgagcagagctgcagtatgtggatggaggattccccctccaacttcagtaacatgagcaccagttcctacaatgataacactgaggtacctcgtaaatcacgaaaacgaaatccaaagcagaggccgggggtcaaacgacgagattgtgaagaatctaatatggatatatttgatgccgacagtgccaaagcacctcactatgtgctttctcagcttaccacggacaacaaaggcaactcaaaagcgggaaatggaacattggaaaaccaaaaaggaactggagtaaagaagagccctatgttgtgtggacaatatcctgttaaaagtgagggaaaggagctgaagatagttgtacaacctgagacacagcaccgagctcggtacctgactgagggcagccgtggctcagtgaaagatagaacacagcaaggctttcctacagtaaagctggaaggccataatgaacctgtagtgttgcaagtgtttgtgggcaacgactctggacgagtgaaaccacatggattttatcaggcctgcagagtaactggacgaaatacaactccttgcaaagaagtggacattgaaggcactactgttatagaagtcggccttgatcctagcaacaacatgacactggcggtggactgcgtagggatattgaaattgaggaatgctgatgtcgaagccagaataggaattgctggttccaagaagaaaagcactcgtgccagattggtttttcgagttaatatcatgaggaaagatggctccactttgacactgcaaacaccctcttctccaattttgtgtactcagccagcaggagtgccagaaatcttaaagaaaagcttgcatagctgttcagtgaaaggagaagaagaagtgtttttaatcggcaagaactttctgaaaggaactaaagttattttccaagaaaatgtttctgatgaaaactcttggaagtcagaagctgaaattgatatggaactatttcatcagaatcatcttattgtgaaggttcctccctatcatgaccaacatataactttgcctgtgtcagtgggaatatatgtagtgacaaatgctggaagatctcatgatgttcaaccattcacttacactccagacccagcagcagctggtgctttgaatgtaaatgtgaagaaggaaatatctagtccagcaagaccttgctcttttgaagaggccatgaaagcaatgaaaactactggatgtaatttagataaggtaaatattatccctaatgccctgatgactccactcataccaagcagtatgattaagagtgaagatgttactccaatggaagtaacagcagaaaaaagatcttccactatttttaagactacaaagtctgttggatcaactcagcaaacattagaaaacatctcaaacatagcaggaaatggctctttttcatcaccatcatcttcccacctaccttctgaaaatgaaaaacagcagcagattcagcccaaggcatacaacccagagaccctgacaactattcaaacccaggacatctcacagcctggtacttttccagcagtttctgcttctagtcagctgcccaacagcgatgcactattgcagcaggctacacagtttcagacaagagaaactcagtctagagagatattacagtcagatggtacagtggttaatttgtcacaactgactgaggcatcacaacaacagcagcagtcaccactacaagaacaagcacagactttacagcagcagatttcatcaaatatttttccatcaccaaatagtgtgagtcagcttcagaatactattcagcagctgcaagcagggagtttcacaggcagtactgctagtggcagcagtggaagtgttgacttggtccaacaagttttagaggcacagcagcagttatcttcagttttattttctgctccagatggtaatgagaatgttcaagagcagcttagtgcagatatttttcaacaagtcagtcaaattcagagtggtgtaagccctggaatgttttcctcaacagagccaacagtccataccagaccagataatttattacctggaagagctgaaagtgttcatccacagtctgaaaacacgttatctaatcaacagcagcagcagcagcagcaacagcaagtgatggaatcttcagccgcaatggtgatggagatgcaacagagtatctgccaggcagctgcccagattcagtcagagttattcccttcaactgcttcagcaaatggaaaccttcagcaatcgccagtttaccagcagacttctcacatgatgagtgcattgtctaccaatgaggatatgcaaatgcagtgtgaattgttttcttctcctcctgcagtttctggaaatgaaacttctacaactaccacacagcaggttgcaacccctggcactaccatgtttcagacatcaagttcaggagatggagaagaaactggaacacaagcaaaacagattcagaacagtgtctttcagaccatggtccaaatgcaacatagtggggacaatcaacctcaagttaaccttttttcatccacaaaaagtatgatgagtgttcagaatagtggtacccaacaacaaggtaatggtttattccagcaagggaatgagatgatgtcacttcaatctggaaattttttgcagcagtcttctcattcacaggcccaactttttcatcctcaaaatcctattgccgatgctcagaacctttcccaggaaactcaaggttctctctttcatagtccaaatcctattgtccacagtcagacttctacaacctcctctgaacaaatgcagcctccaatgtttcactctcaaagtaccattgctgtgttacagggctcttcagttcctcaagaccagcagtcaaccaacatatttctttcccagagtcccatgaataatcttcagactaacacagtagcccaagaagcattttttgcagcaccgaactcaatttctccacttcagtcaacatcaaacagtgaacaacaagctgctttccaacagcaagctccaatatcacacatccagactcctatgctttcccaagaacaggcacaacccccgcagcagggtttatttcagcctcaggtggccctgggctcccttccacctaatccaatgcctcaaagccaacaaggaaccatgttccagtcacagcactcaatagttgccatgcagagtaactctccatcccaggaacagcagcagcagcagcaacagcagcagcaacagcagcagcaacaacaacagagcattttattcagtaatcagaataccatggctacaatggcgtctccaaagcaaccaccaccaaacatgatattcaacccaaatcaaaatccaatggctaatcaggagcaacagaaccagtcaatttttcaccaacaaagtaacatggccccaatgaatcaagagcaacagcccatgcaatttcagagtcagtccacagtttcctcacttcagaacccaggtcctacccagtcggaatcatcacagacccccttgttccatagctctcctcagattcagttggtacaagggtcacctagttctcaagagcagcaagtaactctcttcttatctccagcatccatgtctgccttgcagaccagtataaatcaacaagatatgcaacagtctcctctttattcccctcagaacaacatgcctggaattcaaggagccacatcttcgcctcaaccacaggctactttatttcacaacacagcaggaggcacaatgaaccaactgcagaattctcctggctcatctcagcagacatcaggaatgttcttatttggcattcaaaataactgtagtcagcttttaacctctggaccagctacattgcctgatcagttgatggccataagtcagccaggccaaccacaaaacgagggccagccacctgtgacaacacttctttctcagcaaatgccagagaattctccactggcatcctctataaacaccaaccagaacatcgaaaagattgatttgcttgtttcattgcaaaaccaagggaacaacttgactggctccttttaactggatataaattccacgaagaaaatcctgattccaagatgtcctgagatcttgtggttccatgagaattattactttaaaaacaaaacaaaatataaaaaactgtgtttgagtaaactgatagattttactctgactgcaaaagagcacacctatgctgcttgttgcagtaactaaccaccaatgttaacatcttcatattttatattcctaataacagtgatgactgagaatctatttgagtttccagctggcagaattaattgttattattttcctaggcgcaatttccttaaacgtacagtttaaattcaaggctggaccactcagttattattgctattagaaaataatatatcatgtttacttttgttcttcattattttctttcctgcattgttttagtcaagtaatggcttttgaaaaagtaaagttcaataataactaaggctgtgatttttttcaatataaaaggcacagctgttggccaaagtgaaggaatcttttttcagttttattggagaaactgaagggtaacattctaacaagtaaactgtatgtgcagataaaagtactcttgatttaacacaaaggcagatgatacacttataaaactgggaacagctggaatgcttcttgattttattttttcagagagttgttagttctctgggtttctactaaggggtttagccataactgtgcatagaaaaataattatctgtaaaaaatgaaggggataatatatgataaattatgttctgatatcctcctacagtagtttaaattgacagaaaaatttgaatgttttcttcttaacccagtcttaggctggtattccctttttatatatatctatattacttttcacctctttttcactttactttagagaactattaatatactactggcttcatgaccctgtagcatctttggccactttaatctagggtgacctagcaatcctgcagcacagggcagagagtactgtcttaggaattattaggagttgattcctgagaaacaacacatttttccccatgaacggtgctgttctgaagtcttcaaatttttccctctaataggaaacagtataaattttaattaaaaaaaaaaggcaaactaaaatttcttgaaatatcacttctccctgatctgcagtgagtataaattcacttgtcacctcagtgctttacagtttgaagtggtcacttacctgatggttcccacaagccttaggctttacagggttgtatcattgacttaaaatgaagaattaacttgtgttacatctataaagagcaaaataacacactccagaacttggcagttgtagcattagttatacagttttgggtgttcttgccacccgtgggatgcctgcttctcactaccacctgtgtctggacacatgcttatgtctcattttccttttggcatgtggaaagctgtcaatgcagtgtaaggccaacgtgtgtgtggcttctatgtgttgagataatgttttggtatccttgtccgtttcatttattttttaagtgtacaaaaaataacctgttaattgttgaaggctacttttctgttctttttttttttttttttctatcctgtacatttagttgaactgtgcggaattgtggtgttggttttgtttacacagccagatttttccttctttttgttttgtgatgatcttcctttgttctttgaatgtgctcttttgtctttttctcttttttctcatgttttcttccctccacctccacccctttctttctttctctctctgattgagaggcattgaattacgttttcagtagtacaggcttcttgccgatatgaagggaacttttcagaaagagacctactctgggtcatttaattttgaatacagttttcaatcgttcaagttttggatggtttatatctaatgtgtgtttcatttttttggaaagctatattttgtatttaggaaatggtatactattttgctatttgtactgagtgagtacattggcataaatatagaaatttatatatatacatatatataaactattcttttttgccacacatttttgtggtaaatttgtgagtttgtctgatgttctaccacaacgtggcgtctgataacagtgagggggggtggggtttgttatgtctttattgagtatttaagtatcttttgaaacaaatgacctgttcatctgtggccattccatcaggcagttagttccttgatgtcagtagtgggctaaaggcagcttactgtgtgtttgctggagctttcactcagccaagtgttagagtcaggaaacccattgaggcaatggcgtcaaatggtgtttcacaagaatgagccattcagtctttgctcactatatatttaatattttattattgttgttattgttattattaattggctttctgtattctatgccttttatttataaagacactaagaaaacccatgtttgtaattttaataacatttttcccatcttgtaatatccagagctactttataaattctctgaaccaaaagtattttcctcagtgtatctcttctcccccagcccctattgggaaaaattacccagtatagttcaggttatgaggaggatcagccacacaatccagtgcttcagtttgaaaatgtaaaattctaaccctaaagtagggttggttgaaatttcagacaaagcaaacccagcaggtataaaaagtagtataaatacaaatctgtaagttatttttgaattttctgaacttttttctaagagattacataggagactaaagaaatctatctgttcaagttctaattaggatgattgttaatactgcactgtggatgaagtggcgactggcttgtgtgctgacttctgtggtttagcaagaggtttattgttatcaaatgctaattggcaatgccaagtcactgggaccaattttctgttttataatatctaagtttagaacagaatatatacctgaactgtagtggtttgatcggatggagacagaaaacccgatttttattctcataaattttgtggttatttatacaagggctgtgctatgctaccatattcttgttcaataataataggtttgttgttttttttacattgttaaatgttccttacccctaaaggtcaatgttaagtacaacattctgaaaatacaatttggctacgaagagtattcatcttctttgaagctcagtggttgatatttgtgctaataatgcaatttcctgattactgttacaagttatagctacatatgggagagactcagtgagccagcaaaggccatagaaacaacaatttattaaatgtatttatggcagaaggacctaaataaactgtgagccaccttttcttctttatattgttacatttaagtgttcttgctttcagcaactcacattaatgcttggagcttatctctttctctctctctctctctctctctgtgtgtgtgtgtgtatgtgtgtgtgtgtgtgtgtgtgtttccttattgtcattccattatatatccacaccaacatgggtgacgataattcaaagtcatattttgcctctaagcttgatcatgttacctttatgattaaagtatcatgttatttagccaatgcaaatctgttttaaaacaaatagtttaaaaaaagaacaagtttttaagggctttattatagaagaagtattaatgaaggactttccttcctccctccctttcctcccctccctgcctcccttcttcccttccatctccccctcctccctgccttctttgtttctccttcccttattcctccctccctcctttctcccttccttcctttcttccattcatccttccttgccttttatttttattttttgtaatatcacatgtgctgtagtttggaattttattctagtgcatttcttgctcatcagaacctcagctaatctacctaggaaaaatagtatcaaaggaaatgagaaagttgtatctgagtccctccagaactaagataattctttttgaccatttaagcctttataaatgcgttttgaccatttaagcctttataaatgcttgttttaggaaagtgaatctgttagatgcatcaacaaataatgaccaggacaaaacgatttaataattaaagtctcaaatcaccatggttatacattttcaccagaaatagtaatcttacaatttttcatttttctgatgaagatttctgttccaatatctgtttcctaatagattttttaaattaattagctttcctctgctttatgaccacaggttttatccctaaccgagacagctgtcttatatctgcatgccttagactgtgtggagggactccatgaagaaagaccataggttagaaaaataactcatagtatataccctagtaagtgggttagtagaatctcataacatgtattaaaaagaggttttcttctctgcttgtttgtgtcactagagcaaaattgtagagataatgctcataatgcagtaaatatcagaataatatctacaatatcatttgtggatggtcccaggtcccagtgctctagttactttacttctttttttttttttgagatggagtcttgctctgtctctcaggctagagcagtgtgcgatctcagctcactgcagcctccacctcccaggttcaagcgattctcctgcctcagcctcccaagtagccaggattacaggcaccctccactaggcccggctaattttttttgtatttttttagtagagatggggttttgccatgttggccaggctggtttcgaactcctaacctccagtgatccacctgcctcggcgtcccaaagtgctaggattacaggcatgagccaccacatccggcctaattacttctttaatccccatttatttttatgccattctagcctcatttattaataaaattatgtttttactttctctttcaggaaattttttaaattaatattttatatctagatctaatgctatggaaaagtgcctttttatcatttataatttcatttttcactatttccaaaaacacataaacaaatagtttcagtaggtcccagcttttactttttccatttaaaccttcttttctccatttcttccctttggcttaagaataaaagaaaaggtacattgctagaattgtttctttgggagagggtaaaagattacagaattagactgttcagcctttatataaactaaatttgtcttcatctcaaccagctaatggtaggtcttatctgaatactcatgagaattttagcatctgtgaaactccatgcaccagatgtgtgtaaatttcaggaagaaagtgttgaaagcattttctctgatgttaattagatggaaataaatcactaaaacatagtttaggtaaagcctgattatgccacttttttttaactagacagggcaaagttgtttatgttagtgtacttcttgtctatcctcagttaatttacctagacaaaaagtgtcaaaggaaatgagaaaaaggttatatctgactccctccagacctaagataattccttttgatcagatacagtcagatggagtgccttggtttttgttaattttgcctctattccagctccttaccacagcggtggtgcttaaagaaaggatcatcagcaacaggtcaggatagttctacctttgggatagggctgctttccccgtgctagtatttctgtgactgttagtggcactgaggactgcaaacttttatgcaatattcttaataccctattgatattatgcactttaatcattccaaagaagccaagaatgctgtatagtgatgattccttcctaatgaattcatcttaactatttagaatgttatgtcccttttcttttggatagccaacttggtataaatgttatatggatttttctaaaatgactatataggacttaagactttgaaatgtaatttacttataaggggaaataattatgctttagcacatcattttagaaacgtcacattttagaaacattcagcttgctaacctacatgtttgggaattcattaaaaccagttgtctatatattttgtgccatgtatataagaacattacaatatatctttttctacatatgtagtatgtgcaaccagtggttctcagagtatggttctcagcccaccagctagtatcagtatcacctgggaactagttagaaatgtaaattctttggccccatcccagacatactgagtcagaaactctggaatagggcccccgcaatctgttttcacaagccctccaggtgattctgatgcacactttaaagtttaggaaccactgggctaagactctgttgagatatagagtttttcttccactcagactgatatagttatacattgttcttcatgtaaattcagcttaacctggttatctataatcttttattggcaaaagttaattctcagtactgcctatagagatacagtgtattttatgtacatacacaattagtctaattcttgataattcagttaatttagtttggcattttcctaccacttactaaaaggtttacattaaatgactgatttaaatatataggtgcaatgttctatgtttattttaattgttatgacatttaagtagctaatataattgaccggtgctaaagtctcctgtttatccataaaatgggtacattatgggcagtgtaatacaagctttcttttcattgcctagtactttaccagcagaccacagttttgccctggctagaccaaccctcagaacaaaatcatcattccttgtatttatatttgtatctgagatagtaaacaagatggctggccaggtcaacatggcaccttaacttatttttttaataggtaaaacttcttcaaaagtagcttgctttgtataagaactaagctatcagtatagatatagctatccttggagcttatgtttcagacaagaattatttactaaaataaataataaacaagataatgcattatacaatttgggcatttctcgtttctcaagtgtatgcatcatggtaaatataaactaaccacaagataggtagattgattcatttcattttaatctccttgtgtaattcagtacctccataattgttctaatcttcttcccactgtttacaaattaccagttaattaactcgtgaaagaaaaattcacatatcagaataaaaataaatgtatactcactttataaaaatcaccactgctgtctttccttaatactagcagtggaaatgtaagtggcttactctacaaattttggtgctggcaaatacataggcaaactgttgggagctgctctagttacattcctcccttcttattccctttttctcttcctcactttattgcataacatattcctgtacccaaagcattctaccacagttctatttgactcccacttgtaataactcctttaaaaaattccatgtttaaccatatgaccctgcttgcttactcatattctccctccctctccccttcctttctctctcttccagaagtcatttgcctggtttgaaatattttgtagggattgcttattatattattttagctgatgaacctcaggacaacgtctacacacacacacatacatacacgcacacaaaatctcagctgttgaagagtgggcttggaatcagacttctgtgtccagtaaaaaactcctgcactgaagtcattgtgacttgagtagttacagactgattccagtgaacttgatctaatttcttttgatctaatgaatgtgtctgcttaccttgtttccttttaattgataagctccaagtagttgctaattttttgacaactttaaatgagtttcattcacttcttttacttaatgttttaagtatagtaccaataatttcattaacctgttctcaagtggtttagctaccattctgccatttttaatttttatttaattttatttgcttgagcacactgatcaaccactgaactgccttcttccattgtcctgcaatgatataagggttacatttttgtgtatatggctttcatagttgggatttcagagcactgataccagatattttcagtttgttctctgggggaatttcatttgcatctatgtttttagctatctgtgataacttgttaaatattaaaaagatattttgcttctattggaacatttgtatactcgcaactatatttctgtaaacagctgcagtcaaaaataaaacactgaaagttaaaaaaaaaaaaaaaaaaaa

SEQ ID NO: 29741 - DNA, 5591 bp, Homo Sapiens
gctactcccaccccgccccgccccgtcattgtccccgtcggtctcttttctcttccgtcctaaaagctctgcgagccgctcccttctcccggtgccccgcgtctgtccatcctcagtgggtcagacgagcaggatggagggctgcatgggggaggagtcgtttcagatgtgggagctcaatcggcgcctggaggcctacctggcccgggtcaaggcgctggaggagcagaatgagctgctcagcgcggagctcggggggctccgggcacaatccgcggacacctcctggcgggcgcatgccgacgacgagctggcggccctgcgggccctcgttgaccaacgctggcgggagaagcacgcggccgaggtggcgcgcgacaacctggctgaagagctggagggcgtggcaggccgatgccagcagctgcggctggcccgggagcggacgacggaggaggtagcccgcaaccggcgcgccgtcgaggcagagaaatgcgcccgggcctggctgagtagccaggtggcagagctggagcgcgagctagaggctctacgcgtggcgcacgaggaggagcgcgtcggcctgaacgcgcaggctgcctgtgccccccgctgccccgcgccgccccgcgggcctcccgcgccggccccggaggtagaggagctggcaaggcgactgggcgaggcgtggcgcggggcagtgcgcggctaccaggagcgcgtggcacacatggagacgtcgctgggccaggcccgcgagcggctgggccgggcggtgcagggtgcccgcgagggccgcctggagctgcagcagctccaggctgagcgcggaggcctcctggagcgcagggcagcgttggaacagaggttggagggccgctggcaggagcggctgcgggctactgaaaagttccagctggctgtggaggccctggagcaggagaaacagggcctacagagccagatcgctcaggtcctggaaggtcggcagcagctggcgcacctcaagatgtccctcagcctggaggtggccacgtacaggaccctcctggaggctgagaactcccggctgcaaacacctggcggtggctccaagacttccctcagctttcaggaccccaagctggagctgcaattccctaggaccccagagggccggcgtcttggatctttgctcccagtcctgagcccaacttccctcccctcacccttgcctgctacccttgagacacctgtgccagcctttcttaagaaccaagaattcctccaggcccgtacccctaccttggccagcacccccatcccccccacacctcaggcaccctctcctgctgtagatgcagagatcagagcccaggatgctcctctctctctgctccagacacagggtgggaggaaacaggctccagagcccctgcgggctgaagccagggtggccattcctgccagcgtcctgcctggaccagaggagcctgggggccagcggcaagaggccagtacaggccagtccccagaggaccatgcctccttggcaccacccctcagccctgaccactccagtttagaggctaaggatggagaatccggtgggtctagagtgttcagcatatgccgaggggaaggtgaagggcaaatctgggggttggtagagaaagaaacagccatagagggcaaagtggtaagcagcttgcagcaggaaatatgggaagaagaggatctaaacaggaaggaaatccaggactcccaggttcctttggaaaaagaaaccctgaagtctctgggagaggagattcaagagtcactgaagactctggaaaaccagagccatgagacactagaaagggagaatcaagaatgtccgaggtctttagaagaagacttagaaacactaaaaagtctagaaaaggaaaataaagagctattaaaggatgtggaggtagtgagacctctagaaaaagaggctgtaggccaacttaagcctacaggaaaagaggacacacagacattgcaatccctgcaaaaggagaatcaagaactaatgaaatctcttgaaggtaatctagagacatttttatttccaggaacggaaaatcaagaattagtaagttctctgcaagagaacttagagtcattgacagctctggaaaaggagaatcaagagccactgagatctccagaagtaggggatgaggaggcactgagacctctgacaaaggagaatcaggaacccctgaggtctcttgaagatgagaacaaagaggcctttagatctctagaaaaagagaaccaggagccactgaagactctagaagaagaggaccagagtattgtgagacctctagaaacagagaatcacaaatcactgaggtctttagaagaacaggaccaagagacattgagaactcttgaaaaagagactcaacagcgacggaggtctctaggggaacaggatcagatgacattaagacccccagaaaaagtggatctagaaccactgaagtctcttgaccaggagatagctagacctcttgaaaatgagaatcaagagttcttaaagtcactcaaagaagagagcgtagaggcagtaaaatctttagaaacagagatcctagaatcactgaagtctgcgggacaagagaacctggaaacactgaaatctccagaaactcaagcaccactgtggactccagaagaaataaatcagggggcaatgaatcctctagaaaaggaaattcaagaaccactggagtctgtggaagtgaaccaagagacattcagactcctggaagaggagaatcaggaatcattgagatctctgggagcatggaacctggagaatttgagatctccagaggaggtagacaaggaaagtcaaaggaatctggaagaggaagagaacctgggaaagggagagtaccaagagtcactgaggtctctggaggaggagggacaggagctgccgcagtctgcagatgtgcagaggtgggaagatacggtggagaaggaccaagaactggctcaggaaagccctcctgggatggctggagtggaaaatgaggatgaggcagagctgaatctgagggagcaggatggcttcactgggaaggaggaggtggtagagcagggagagctgaatgccacagaggaggtctggatcccaggcgaggggcacccagagagccctgagcccaaagagcagagaggcctggttgagggagccagtgtgaagggaggggctgagggcctccaggaccctgaagggcaatcacaacaggtgggggccccaggcctccaggctccccaggggctgccagaggcgatagagcccctggtggaagatgatgtggccccagggggtgaccaagcctccccagaggtcatgttggggtcagagcctgccatgggtgagtctgctgcgggagctgagccaggcccggggcagggggtgggagggctgggggacccaggccatctgaccagggaagaggtgatggaaccacccctggaagaggagagtttggaggcaaagagggttcagggcttggaagggcctagaaaggacctagaggaggcaggtggtctggggacagagttctccgagctgcctgggaagagcagagacccttgggagcctcccagggagggtagggaggagtcagaggctgaggcccccaggggagcagaggaggcgttccctgctgagaccctgggccacactggaagtgatgccccttcaccttggcctctggggtcagaggaagctgaggaggatgtaccaccagtgctggtctcccccagcccaacgtacaccccgatcctggaagatgcccctgggcctcagcctcaggctgaagggagtcaggaggctagctggggggtgcaggggagggctgaagccctggggaaagtagagagcgagcaggaggagttgggttctggggagatccccgagggcccccaggaggaaggggaggagagcagagaagagagcgaggaggatgagctcggggagacccttccagactccactcccctgggcttctacctcaggtcccccacctcccccaggtgggaccccactggagagcagaggccaccccctcaaggggagactggaaaggagggctgggatcctgctgtcctggcttccgagggccttgaggccccaccctcagaaaaggaggagggggaggagggagaagaggagtgtggccgtgactctgacctgtcagaagaatttgaggacctggggactgaggcaccttttcttcctggggtccctggggaggtggcagaacctctgggccaggtgccccagctgctactggatcctgcagcctgggatcgagatggggagtccgatgggtttgcagatgaggaagaaagtggggaggagggagaggaggatcaggaggaggggagggagccaggggctgggcggtgggggccagggtcttctgttggcagcctccaggccctgagtagctcccagagaggggaattcctggagtctgattctgtgagtgtcagtgtcccctgggatgacagcttgaggggtgcagtggctggtgcccccaagactgccctggaaacggagtcccaggacagtgctgagccttctggctcagaggaagagtctgaccctgtttccttggagagggaggacaaagtccctggccctctagagatccccagtgggatggaggatgcaggcccaggggcagacatcattggtgttaatggccagggtcccaacttggaggggaagtcacagcatgtgaatgggggagtgatgaacgggctggagcagtctgaggaagtggggcaaggaatgccgctagtctctgagggagaccgagggagcccctttcaggaggaggaggggagtgctctgaagacctcttgggcaggggctcctgttcacctgggccagggtcagttcctgaagttcactcagagggaaggagatagagagtcctggtcctcaggggaggactaggaaaagaccatctgcccggcactggggacttaggggtgcggggaggggaaggacgcctccaagcccgctccctgctcaggagcagcactcttaacttacgatctcttgacatatggtttctggctgagaggcctggcccgctaaggtgaaaaggggtgtggcaaaggagcctactccaagaatggaggctgtaggaatataacctcccaccctgcaaagggaatctcttgcctgctccatctcataggctaagtcagctgaatcccgatagtactaggtccccttccctccgcatcccgtcagctggaaaaggcctgtggcccagaggcttctccaaagggagggtgacatgctggcttttgtgcccaagctcaccagccctgcgccacctcactgcagtagtgcaccatctcactgcagtagcacgccctcctgggccgtctggcctgtggctaatggaggtgacggcactcccatgtgctgactccccccatccctgccacgctgtggccctgcctggctagtccctgcctgaataaagtaatgcctccgcttcaaaaaaaaaaaaaaaaaaaaaaaaaaaaaaaaaaaa

SEQ ID NO: 29742 - DNA, 4132 bp, Homo Sapiens
gtgttttcctccaggctaagtccatcttccggcttgggcagacgctgccgcggaatccttgactctagttttctgagtcgattgtgatcatggctgctgagtctgatgttctgcatttccagtttgaacagcaaggagatgtggtcttgcagaaaatgaatcttttgagacagcagaatttattttgtgatgtatcaatttacattaatgacactgagttccaggggcacaaggtgattttggctgcttgctccacttttatgagagatcagtttttactcacacagtcaaaacatgtcagaatcaccatcttacagagtgcagaagttggcagaaaattgttactgtcttgctatactggagcacttgaagttaaaaggaaagagcttttgaaatacttgactgctgccagttaccttcagatggttcacattgtggaaaagtgcacagaagctttgtcaaagtatctggaaattgatctttctatgaaaaacaacaaccaacacactgacctgtgtcagtcttctgatcctgatgttaagaatgaagatgaaaattctgataaagactgtgagataattgaaatttcagaagatagtcctgtaaacatagatttccatgttaaagaagaggaaagcaatgctttgcagtctacagtagagagtctgacatcagagagaaaggaaatgaagtcaccagagctgtctacagtagacataggttttaaagacaatgaaatttgtatccttcatgtagaatccatcagtacagctggtgtcgaaaatgggcagttttcacagccttgtacctcttcaaaagcaagcatgtatttctctgaaacacagcattcattgatcaattctacagttgagagcagagtggctgaagttcctgggaatcaagatcagggcttattttgtgagaatactgaaggaagttatggtacagtgagtgagattcagaatctggaggaaggttattcactgaggcaccagtgccccaggtgtcctcgaggctttcttcatgttgaaaactatctgcgccaccttaaaatgcataaactattcttatgcttacagtgcggaaaaacatttacacagaagaaaaatctcaaccgacacatccgaggacacatgggcatacggccctttcagtgtactgtgtgcttgaagacatttactgccaaaagcacacttcaggaccacttgaacatacacagtggggatcggccatacaaatgccactgttgtgatatggatttcaagcacaagtctgctctcaaaaagcacttaacctctgtccatggcagaagcagtggtgaaaaactatctaggcctgatctcaaaaggcaaagtctactataattataatcacagacttgttatataacgtttgtattattctattacgcaagtctttctgtagagatgcagcatttgtaatatttcatccccccaatctttgtttcttatattttgtcggcttacacataatcattctttctgaacttctaacagttccaaagttatgggaggcacagtaaagctgatgggattctgtctcatctcataccttacatataagtctcagtagtatccctagagaaatagtgttcctctcttatatattcttgattctagtgacaaaggatccagcagtatttgcagattccgatttggagtctctaggtaattgatttaagtataaaatccaatcatataaaaactttaatgaattaggataacaagaagagaaaataaaggtaaaaacactattacctgtttctagtcactttagaacagatggcactaaaaaaatttttttttaactttttaccagctgttcttggattccaaactaaacaccaagatacttttcattttaaaatgtataaagtaacaattcagattcacttgggaatagcagaatttttttatacagggttaataatccttaaaatacttttatttccatgccttattagtatacatacttaagaaatggttcattgggcccgagtttcttgattttatttaatacaatcggatttaataattttgtggccagtaaaattataccattggcatgaagctgtgaaaaatgagaaattctacctttaccagggatatctgttctactgttttaaaagttcctctctattttattttttatttaacatgaagtaaaattgaaatttcttcttggtgtatagttctgtgaattttaacagaaagatttgtgcaccactactgcagtcggtacagaacagttccttcactcccaatagctctcttatgctgtccctttgtagtcagctccttctagctctaatcctggcaacagttctccgtcactattattttgccttttctggactgtcatataaacagaatcttatagtacgttccctcttgaaatgctttttcacccagcataatgactttgaggttcatccatgtcattttaaattttgaattggcaatatatattctagctgttactagatgagcaatttaaaaaggtgtagctattagtgttgtattttttcatttacattaatgtaatttccattcactatgtgttgataaaaatcttaaccatccctagagttttatatttccaaaaatatgccaaaaggaaaactatgactgtatgattattttagcgagagtcatatttgagatggtgttctgagccatagttctctaacatctccgtctacatataacacaaaacttttataaattattttaacaaagattaaaatatactgcagggcaaataatattctctaaaacacaggaactgcttttcgtaaagaagactgactagatgcatctttctttgaagctgttctagtcctcctctagttaacttagctttatgtagaatttctactgtatttaatttctattgaagcccttctgtattttaaaatgtaatatactttgtaccatttataaaaattgtgtgatgaatgaatcacatgttcgttgttataagtgttaacctttttttgacaattttgtgggaaagacattctccactgaattttaactttccttgagactttcaagaatgcaggtctcgtttgatgaaaaaaccgacttcataacccaatgttactagttagcgacattgtgctgaatttctccttgaactttttaactttatatgtaaaataactttgatcttggtcatttgaaagatcatttccaggtctaaaattccatgattttgtatttaattcttcctgagaacagaagaggggaaagcaagagaggacggttttgtgtctttatgaactttgttacttaagtactccattggagacataatttttctaattagtggatctttttccactggaaagtgtgatagctcattgctaatttttcattcatagttcattgcttccatttgacctaagattggccatttgttggtgtgaaaatattttcttttcagaaatagtttactagtgattgaagtacttttcttatttttgcttcctattataaaatggcgtggggggaagggggaaggatggagatgggaggagagggtaaaagaatagtactctgattttttaagaattagtatctactatcttggatatttgaaaaaaaattggttgaaactatgtttaagttttatgtgtgccttgtaagattgttgtaaaattttttgtgagcactttgagatttttgctgggggaggggtgttttgtgaaagtgatggttattatttatattatttattcctgttcagtagcacggaatgatctccaaacattcctaggagagtgtctgtttgcatgatatgtctaaaaattttcaggaaaatggaatctttttttaaagttcaggtatgacaaagtatagaatttattcatttaacatattcacatttagtttatgtttctgatatgacagaaaaatgaaaagtgtttgagttcagcctcttcatttactccatttacatataaaagatcttgaaaaggtagttgttacttcgttgtcagagaaaaacacttgccctttttcctgggatgtaactatcttacatgtttacataagaaataataaactggaggtgggaatggaaaaaaaaaagaaaaaaaaaaaaaaaa

SEQ ID NO: 29743 - DNA, 5767 bp, Homo Sapiens
gagggaggagagttcacttttacttcagtgtcagcgcgcggcggccgtggctggctctggcgagagagcaccgagggagtgggtcgcagatcttcgggcggctaggggaaatcggcgagaggcgggatccgagcgcgccggcggggcgcagagcccgcgagcctggccagcgagggtagccgcggggggcgcgccccgggcgggcccccggagacgcgcaggatgccacacgaagagctgccgtcgctgcagagaccccgctatggctctattgtggacgatgaaaggctctctgcagaggagatggatgagaggaggcggcagaacattgcttatgaatatctgtgccacttagaggaagccaaaaggtggatggaagtttgcttagttgaagaattgccaccaaccactgaattggaagaagggctccggaatggagtttaccttgcaaagttagccaagttctttgccccgaaaatggtatcagagaaaaagatctatgatgtggaacaaacacgttataagaagtctggccttcattttcgacacacagataataccgtccagtggttaagagcgatggagtctattggtctacccaagatattttatccagaaacaacagatgtctatgatcggaaaaacataccaagaatgatatattgcattcacgcactgagtttgtatctgttcaaactaggaatagcaccccagatccaggatttgttgggcaaagtagacttcacagaggaggaaatcagtaatatgagaaaagaacttgagaaatatggaatacagatgccatctttcagcaaaataggtggtattctggccaatgaactgtccgtggatgaagctgcattacatgctgcagttatagccattaatgaagcagttgaaaaaggaatagcagagcaaaccgttgtaacactaagaaacccaaatgcggttttaactttagtggatgacaaccttgcaccagaatatcagaaagaactctgggatgccaaaaagaaaaaagaggaaaatgcaagactgaagaatagctgtatttcagaagaagaaagagatgcttatgaagaactgctgacacaagcagaaatccaaggcaatattaataaagtcaacaggcaggctgcagtggaccatatcaatgctgtcattccggaaggtgaccccgagaatacgctgcttgcactgaagaaaccagaggcccagctgcctgctgtttatccctttgctgctgccatgtatcagaacgaacttttcaacctccagaaacagaacaccatgaactacttggcccacgaggagcttttgattgctgtggaaatgttgtctgctgttgctttactaaaccaggccttggaaagcaacgatcttgtgtctgtgcagaatcaactcagaagccccgcaataggcttaaacaatctggacaaggcatatgtggaacgttatgcaaacacactactctctgttaaactagaagttttatcccaagggcaagataacttaagctggaatgaaattcagaattgtattgatatggttaatgctcaaattcaagaagaaaatgaccgagttgtagctgtagggtacatcaatgaagctattgatgaagggaatcctttgaggactttagaaactttgctcctacctactgcgaatattagtgatgtggacccagcccatgcccagcactaccaggatgttttataccatgctaaatcacagaaactcggagactctgagagtgtttccaaagtgctttggctggatgagatacagcaagccgtcgatgaggccaacgtggacgaggacagagcaaaacaatgggttactctggtggttgatgttaatcagtgtttggaaggaaaaaaatcaagtgatattttgtctgtattgaagtcttccacttctaatgcaaatgacataatcccggagtgtgctgacaaatactatgatgcccttgtgaaggcaaaagagctcaaatctgaaagagtgtctagtgacggttcatggctcaaactcaacctgcacaaaaaatatgactactattacaacactgattcaaaagagagttcctgggtcacacctgaatcatgcttctataaagaatcatggctcacaggaaaagaaatcgaggacattattgaggaagtcacagtaggttacattcgtgagaatatatggtctgcttcagaagagttgcttcttcgctttcaagccacaagctcaggacccatccttagggaagagtttgaagctagaaaatcatttttgcatgaacaagaagagaatgtggtcaaaatacaggctttttggaaaggatataaacaacggaaggagtatatgcacaggcggcaaacgttcattgataatactgattctgttgtgaagattcagtcctggttccgaatggcaactgcaagaaagagctatctttcaagactacagtatttcagagatcataataatgaaattgtgaaaatacagtcactgttgagagcgaacaaagctagagatgactacaaaacattggttggctctgaaaacccaccattaacagtaattcgcaaatttgtatacctgctggaccaaagtgatttggatttccaggaggaactagaggttgcacgattaagggaagaagtagtgaccaagatcagggccaatcaacagctggaaaaagacctgaacctgatggacatcaagattggactgctggtgaagaacaggatcacactagaggatgtaatttcacacagtaaaaagctgaacaagaaaaaaggaggagaaatggaaatactgaataacaccgacaaccaaggaataaaaagtttgagtaaggagaggagaaaaacactagaaacatatcagcagctgttttaccttttacagaccaaccctttatacttggctaagctgattttccagatgccacagaacaagtccactaaatttatggatactgttattttcacactatataattatgcctctaatcagcgagaagaatatctacttctcaagctttttaaaactgctctggaggaagaaataaaatcaaaagtggaccaggtacaggacatagttactggtaaccctacagtcatcaagatggtcgtcagcttcaatagaggtgcccggggacagaacaccctgcgccaactcctggctccagtggtaaaagagatcatcgacgacaagtcgctgattatcaacacaaaccctgtagaggtgtacaaggcttgggtgaaccaactagaaacacagactggagaggccagcaagttgccttatgatgtgaccacagaacaagctctaacatacccagaagtgaaaaataaactggaggcttccattgagaacctgagaagggtcaccgacaaagtcctgaattctatcatttcttcccttgatctactgccttatggattgaggtatatagccaaagtactgaagaattcgatccatgagaaattccccgatgcaacagaagatgagctattaaagattgttggaaacctcctgtactatcggtacatgaatccagccattgtagctccagatggctttgatatcatcgacatgacagctggaggtcagataaattctgaccaaaggagaaacttaggatcagtggccaaggttcttcagcacgcagcctccaacaagctgtttgaaggagaaaatgagcatctctcatctatgaacaattatttatcagagacgtatcaggaattcaggaaatatttcaaagaagcatgtaatgtccctgagccagaagagaagtttaatatggacaaatacacagacctggtgacagtcagcaaaccagtcatttatatttcaattgaagaaatcatcagcacacactcactcctgttggaacaccaggatgcaattgcccctgagaaaaatgacttactgagtgaattgctggggtcgctgggagaggtgccaaccgtggaatcttttcttggggaaggagcagttgaccccaatgaccctaacaaggcaaatacactaagtcagctttcaaagaccgagatttctcttgtcttgacaagcaaatatgacatagaggacggtgaagctatagatagccgaagcctcatgataaagaccaagaagctgataattgatgtgatccggaaccagccagggaacacattgacagaaatcttagagacaccagcaactgcgcaacaggaggtagaccatgccacggacatggtgagccgtgcaatgatagattccaggactccagaagaaatgaagcatagccaatctatgattgaagatgcacagctgcctcttgagcagaagaagaggaaaatccagaggaatcttcggacgttggaacagactggacacgtgtcatccgaaaataaataccaagacattctcaatgagattgccaaggatattcgaaatcaaagaatctatcgtaagcttcgaaaagctgaattggcaaaacttcagcagaccctgaatgcacttaacaagaaggcagcattttatgaagagcaaatcaattattatgacacctacataaagacttgtttagacaacttaaaaagaaaaaatactcggagatcaattaaactagatggaaaaggagaacccaaaggggcgaagagagcgaagccagtgaagtacactgcagcaaagctgcatgagaaaggtgtcctgctagatatagatgatcttcaaacaaaccagtttaagaatgttacatttgatatcatagctactgaagatgtaggcattttcgatgtaagatcaaaattccttggtgttgagatggaaaaggtgcaactcaatattcaggatttacttcagatgcaatatgaaggagtagctgtaatgaaaatgtttgataaggttaaagtgaatgtaaaccttctcatatacctgctgaacaagaagttctatggaaagtgaagtgcctacagaaatttcttggattctgtatcatctggattaggaaatgaatttgtttaatatttttgtttttaaacatgattgaaatcactgcttataaatgtgtgattttttttaaatgaccaaaactgttctgaagaatgtacccaggtgcctttttgctaatttgatactataatagaatgagacataaaatgaattaatggaaacatatccacactgtactgtgatataggtactctgatttaaaactttggacatcctgtgatctgttttaaagttggggggtgggaaatttagctgactagggacaaacatgtaaacctattttcctatgaaaaaagttttaaatgtcccacttgaataacgtaattcttcatagtttttttaatctatggataaatggaaacctaattatttgtaatgaattatttagacagttctaagccctgtcttctgggagttatcaattttaaagagaacttttgtgcaattcaaatgaagtttttataagtaattgaaaatgacaacacaataacactttctgtataaaagtatatattttatgtgatttattcctactaaatgaaagtgcactactgcctcatgtaaagactcttgcacgcagagcctttaagtgactaaggaacaacatagatagtgagcatagtccccacctccacccctcacaatttatttgaatacttcaattgtgcctctcaattttttgtaatgctaaaaaatcagtatctagatggtttttaaatgtattctctggaaattgttttatgtaaaataaatgttacttaattccatt

SEQ ID NO: 29744 - DNA, 2191 bp, Homo Sapiens
cacgggcggagccggggccatggagccgccgctgccgggctaggcaggtcgtgccccgccgggccggcggcgatgtcgggctaccagcgccacccgggcgccaccccgctgtcccgagcccggagcctcgccattcccgacgctccagcgttctatgagcgccggtcttgtctcccccagctaaattgtgagcgcccccatggcagggacctggactcccccttcttcggcattcggccggcctttatgtgctatgtgcccagcccggtgctggcttccgtgggagacacagatgacagatttgaagatctggaagaggcaaatccattctcttttagagagtttctgaagaccaagaacctcggcctctcgaaagaggatccggccagcagaatttatgcaaaggaagcctcgaggcattccctgggacttgaccacaactccccaccctcccaaaccggcgggtatggcctggagtatcagcagccatttttcgaggatccgacaggggctggtgacctcctggatggggaggaggatgaggacaccggatggagtggggcctacctgccgtccgccatcgagcagactcaccccgagagggtccctgccggcacgtcgccctgcagcacatacctttcctttttctccaccccgtcggagctggcagggcctgagtctctgccctcgtgggcgttgagtgacactgattctcgcgtgtctccggcctctccggcagggagtcctagcgcagactttgcggttcatggagagtctctgggagacaggcacctgcggacgctgcagataagttacgacgcactgaaagatgaaaattctaagctgagaagaaagctgaatgaggttcagagcttctctgaagctcaaacagaaatggtgaggacgcttgagcggaagttagaagcaaaaatgatcaaggaggaaagcgactaccacgacctggagtcggtggttcagcaggtggagcagaacctggagctgatgaccaaacgggctgtaaaggcagaaaaccacgtcgtgaaactaaaacaggaaatcagtttgctccaggcgcaggtctccaacttccagcgagagaatgaagccctgcggtgcggccagggcgccagcctgaccgtggtgaagcagaacgccgacgtggccctgcagaacctccgggtggtcatgaacagtgcacaggcttccatcaagcaactggtttccggagctgagacactgaatcttgttgccgaaatccttaaatctatagacagaatttctgaaattaaagacgaggaggaagactcttgaggacccctgggtgttctcagcatgaagctccgtgtataccctgaggtcaccaccgctcgatctaaatgtgcagttgtgtccttaaatatgcagtcttcacccagagtaaagtgttgatcgcaagagtccagtgtcgtgccctcagccagttcttggccaccacaatgggagcagccctggccgagttgtctctgtggtttctatgcagcccttcttggcgaaattcctgcgatcttatagattctaatgagctcttggaagacattgtcataaaagccagtgattttaagaaaaagagtggttctggaatcagtgttttccagtcccatcccagaacatcagttgtaagataagtacaattggttgtccttgatttcataagtagaacaaacactaaatgtgcctctgagatggccaccccgggcagggacctgtgccttccaccgatgctcagggctccctctggctcccgggtcactcttgtggccccagtgggtggtccctgcagtcatggcctgagtgcgcaggggccaccgcgtggctgccgctgtcctcctccgggacccacggggaccaaggtcacacgttccgtgctgtgaagctgtccagatgtgcctctttggctgggggttctggtggacgtttcaagtggcattttgtacaatgcaggttagaattcaggaatttcaagtatgtgcccgggtctgtcaggtcccagttgcctttctgacggcccccctcagagggacggcgatgagcactaaatgcttttttgactattttcctatagattttttttaaaacttttttttcctcctgttccaattgatagctttcttatttaataaattctgtagttcaccaaaaaaaaaaaaaaaaa

SEQ ID NO: 29745 - DNA, 2200 bp, Homo Sapiens
gtgacgcgccctcctcgcggtgcccttcagccgccgccgcagctcaccgggcgccacatggacccagccggcccgagcgcgccccgccgctgaccgcccgcgccccgggaaggaagaacactcgctcccggccatacttgcgtgtgagttctgacccctggaggagccactgtggaagcagagcaatcgccatggagtttgtgatgaagcaggctctaggaggggccaccaaggacatggggaagatgctggggggtgacgaggagaaggacccagacgccgccaagaaggaggaggagcggcaggaggcgctgcgccaggcggaggaggagcgcaaggccaagtacgccaagatggaggcggagcgcgaggccgtgcgccagggcatccgagacaagtacggcatcaagaagaaggaggagcgcgaggccgaggcccaggccgccatggaggccaactccgaggggagcttgacgcggcccaagaaggccatcccgccgggctgcggggacgaggtggaggaggaggacgagagcatcctggacaccgtcatcaagtacctgcccgggccgctgcaggacatgctcaagaagtagccgcgcgcgggacagcggccccgcggagcccccgcccctccccctacagatcctccgcggaggcccctgagggacgagcagagcgcagcccccacgccgatataagccatagccccaggcccgccctgcccgcgcccgccgcctccctcacccggcaaggggcgcgcgcccccaggacccccccagtccgccccgtgctcctctgcccgcgggtggctggagccccatcgcctgggacgcccctttctcttgctgtttaccgcccacccagcagcgcccgaggccagggccgccgaagggcagccccgcgaccacccctgtgcgcgcgttcgcggcggtgggcgcctgtcgggcccgcactcaggagcacagccatagcagacggggggctgcgggcggggcgagggcggcggggcctgggtccccctcctgcacgcggactccggggttcggatcgctccgccgtgagtatttgcgtccgcacgcggccgctctccgccccccggcctggccccctcgcgcccctgtccatccgtctctgtccgcgtcctttcctctcctctctggaaggttttgcttcttacgaacgccacggccgtgttcacttctaaactaaaggaaacaaagcaataggtttgggggacgcccagcccccacccccgtcaccccgctcttcccaagtcctcgccccccgcccggcctcctagcctctccgcccacgcggctgctgcttctccctggggaggacccctgccctcggccattgaacactgcaccctccacaggagccgcagaggcccgaggcaccggacgctggagaccctgcgcccctgcccagcacctcctccgtgggcagctcctcgggtggggcctgcggggttccctgcgcgcagctggcgcgtgtgtggcctaatccacctggtggccctgcggggcggcatccgagcccctgtttctcctccattcatgtttaatttgcatcacaatttgttgaatctcaggtaaatgaggtctttgcatttaatgagttttatcttgacaggcgccgcctcgcccccgggccctttcgtccacatcaaaaatgcatcaagtctccacgtgtttcgggccagggcgtggcttggcattgaccttcatgaccttacatagctttagagaagccataacgttagactgcaatactaacgaccgacgcccctccgggcagagaccaccgcgcccctctgcgccccagcgacgcggcccgcggggacgtcgctgtccgtcctgctcgccctgtgccctctcactgacttctcccgggtcgtgtcttttaaaaactcctgttttcacaccttacaaagccagctctgagcagacagggcgtcctctcgtagaacctgcgcaccccgttcccagcgcatggcgccccgggccgcgagcttagcttagaccgtggtgtcctctgtccgtctgtcctgcgcctgcgcctcctcctgcatgtcggggcccctgcgtgtgttctctccggatggaatcacagccaataaacaccagtgatttcaaaaaaaaaaaaaaaaaaaaaaaaaaaaaaaaaaaaaaaaaaaaaaaaaaaaaaaaaaaaa

SEQ ID NO: 29746 - DNA, 2200 bp, Homo Sapiens
cttagctccgggcgggcggcggctgctgcagcgggacccgggagcggggcccggcgccgcccgggccgcggggcgatgtgagccccaggtgtatcccagagggatccgggtgacttctctgcagactgtttgccatgacagcccaccaaggacggggggaataaagtgggaacccttccccatgcccctcccacggtcagctccccgatggcctgggtgagggcaggctggctgctctgacaccatggggagctgctgcagctgcctgaacagagacagcgttccagacaaccaccccaccaagttcaaggtgacaaatgtggatgatgagggggtggagctgggctctggggtgatggagctgacgcagagtgagctggtgctgcacctgcatcggcgtgaggccgtccgctggccttatctctgcttgcggcgctatggctacgactccaacctcttctcctttgagagtggccgccgatgtcagacaggccagggaatatttgcatttaagtgttcccgggctgaggaaatcttcaacctccttcaggatctgatgcagtgcaacagcatcaatgtgatggaagagcctgtcatcatcacccgcaatagccaccccgctgagcttgacctccctcgagccccccagccacccaatgctctaggctacactgtctccagcttttccaatggctgccctggagagggcccacgattctcagctccccggcggctctcgacaagcagcctgcggcacccctcgcttggggaagagtccacccatgccctcattgctcctgatgagcagtcccacacctatgtcaacacaccggccagtgaagatgaccaccgcaggggccgccactgcctgcagcccctgcctgagggtcaggcacccttcctcccgcaggcccggggacctgaccaacgggacccacaggtgttcttgcagccaggccaggtgaagtttgtgttgggcccgacccctgctcggcggcacatggtgaagtgccagggcctctgtcccagcctgcatgaccccccacaccacaataataacaatgaggccccttctgagtgtccagcccagcccaagtgcacctacgagaacgtcaccggggggctgtggcgaggggctggctggagactgagcccagaggagccgggctggaatggccttgcccaccgccgggccgccctgctgcactatgagaacctgcccccactgccccctgtgtgggaaagccaagcccagcagctgggaggggaggctggggatgatggggactcgagggatgggctcacaccctcttccaatggcttccctgatggtgaggaggacgagaccccactgcagaagcccaccagcacccgggccgccatccgcagccacggcagctttcctgtgccactgacccgccgccgcggctccccaagggtcttcaactttgatttccgccggccggggcccgagcccccaaggcagcttaactacatccaggtggagctaaagggctggggtggagaccgccctaaggggccccagaacccctcgagcccccaagcccccatgcccaccacccaccctgcccgaagctcagactcctacgccgtgattgacctcaaaaagaccgtggccatgtccaacctgcagagagctctgccccgagacgatggcaccgccaggaaaacccggcacaacagcaccgacctgcctctgtagggacttcccggtcctcaccaccctctgccccaccatgatccagcctctgcctcacactcctgtcctctgaacccaccctccccagggttcagggttgctttgcagaaggcatggaggtgggaccagatgcttccctgtgctggctggagtccccagagatatcagccaccgagtctcctggtctgtctccaggctggggagagaagggtgaccaggcgaggagggagccgagacgtcaactgtgaagggttcctgtgattgcgtttagcgccctcccgttctgtccatttgtcttgtctgccgactgtccgtgtgtgttttttttggttggaattttgaaacattttgtacctgttgattttatttatcagtttatttttctatttattgttttaaatgtaatttaacatatttattattaatataattatttttaaattctgaaaaaaaaaaaaaaaaaaaaaaaaaaaaaaaaaa

SEQ ID NO: 29747 - DNA, 3540 bp, Homo Sapiens
tttccttttattggcgtttgtaaaatttcttcttttaaaattgttatattttagagacagggtctcgctctgtcacccaggctggagtgcagtggtgcaatcacagctcaccacagcctccaactcctgggctcaaggcatcctcccacgtaggccttccaaagcgctgagattgtaggcataagccaccaggcccagcctattacctttacgttgtacttagtcccagataaaaaatgaccttagatcagtcctttcctctttggctggggagaggggggcttaaattccggtactgtgaaacagaagaatggactcagtgctatgtgacaaatctatgtatgtaaatgtgtgtatatacacacacataaattatatatatgaatatattttcattttcatattttgcaaggagagtagccaatgctctggacctctggtcctttttgtagggtaccctctgaggccgggaacctttgctcaactctcaggctgtccagggaagctttaggcggtgataccgagctacagaccaatataagagctcggggctgtggcactgaagagaggaggcggccgttgggaactgaggtgggcccagggcttgagctgagttggcgagggtggaggtggtgccggtcccacgccgtggtggggaccgagctgcgggctggagggaggggcagcgccgagggggcgggacgggagagggctcgcggagtaggccaacggttggccccaaccgccactgactacagcctgcgcccgcctcttttcgttgccgttacctgtttccggcagtcgacacgctcttcgcttctcggggcttgtctccgtgtcctccgtctcagttgtttctccctctctatcctcctctgtctcagtctccccagccttggggccggtgcctcttccgggcttcggcgaatgagacctgcggacctgcccccgcgccccatggaagaatccccggcgtccagctctgccccgacagagacggaggagccggggtccagtgcagaggtcatggaagaagtgacaacatgctccttcaacagccctctgttccggcaggaagatgacagagggattacctaccggatcccagccctgctctacataccccccacccacaccttcctggcctttgcagagaagcgttccacgaggagagatgaggatgctctccacctggtgctgaggcgagggttgaggattgggcagttggtacagtgggggcccctgaagccactgatggaagccacactaccggggcatcggaccatgaacccctgtcctgtatgggagcagaagagtggttgtgtgttcctgttcttcatctgtgtgcggggccatgtcacagagcgtcaacagattgtgtcaggcaggaatgctgcccgcctttgcttcatctacagtcaggatgctggatgttcatggagtgaggtgagggacttgactgaggaggtcattggctcagagctgaagcactgggccacatttgctgtgggcccaggtcatggcatccagctgcagtcagggagactggtcatccctgcgtatacctactacatcccttcctggttcttttgcttccagctaccatgtaaaaccaggcctcattctctgatgatctacagtgatgacctaggggtcacatggcaccatggtagactcattaggcccatggttacagtagaatgtgaagtggcagaggtgactgggagggctggccaccctgtgctatattgcagtgcccggacaccaaacaggtgccgggcagaggcgctcagcactgaccatggtgaaggctttcagagactggccctgagtcgacagctctgtgagcccccacatggttgccaagggagtgtggtaagtttccggcccctggagatcccacataggtgccaggactctagcagcaaagatgcacccaccattcagcagagctctccaggcagttcactgaggctggaggaggaagctggaacaccgtcagaatcatggctcttgtactcacacccaaccagtaggaaacagagggttgacctaggtatctatctcaaccagacccccttggaggctgcctgctggtcccgcccctggatcttgcactgtgggccctgtggctactctgatctggctgctctggaggaggagggcttgtttgggtgtttgtttgaatgtgggaccaagcaagagtgtgagcagattgccttccgcctgtttacacaccgggagatcctgagtcacctgcagggggactgcaccagccctggtaggaacccaagccaattcaaaagcaattaattggcttaggacccaatttccatagatgcaaatggcagttacagacaggttaacagaagctactgaagtctacagataatcaaaaaacttaatattctgttccctaccttttttcacttttcctcctccaaagagcaaaatgaaaattttgccttagctactgcagtggaaagagcactgaactaggagttggaagacaaggatgtggtcctggctctgccactggcttgcttttggaccttggatgtgtcacctgaactctctggacctcaggtttccatctgtaaaatgagagtattggttctaagatttctcatcttctcatccctaggacaagcatagtgcctgcatgcttcatgatcagtaagtcctggctgcataaaggactctgatgtcaaaatggaaaccaggggacttaccttttcacatgacttacccctcatccgagtgtgaggttacaagcaggtgtcatggcaggaaggaagaccagatctgtatgatttgttccatttttaataacaaaaatatccacacccttttaataatgctcagagttctgtaggctctctatcctagaggaattgagcaaaacagaagaatcatgaagtctcctaccttctacagccttgtagttctgcttaccttctcttcctcatccagaaagcatcattttctagggagaacaatgagaatctcaatgccagtagtactggataatagtgcgtattgcttctggtggcattaccctgatgatgggctgaagttcatttattagggtggttcctgatgggaaaaggacatggattaggactttaaaacactggacagaatttcccacagtctttgccctcaaggagttcaccagtttatggggctagaagagcgagaaaattcaagaaaataaatgtagctggtgggagactttgtagatgttgggctatatgttggggtgatggtagctcctgatgtaattttcttagttgcatcttcaatatgcctggagtcgtctgtccaaggcttgtccaggcttctgggtttctctcaagtttgtttttctcaggatattgtcctggcccagctactcctttacctgtgagaagatcttcaccattaggaagatctctagacccccagatctcagaatcaggcctatttgtgtaggcccatggaaatcactacttgtgaagtagagatgcctttttgtctaaaaaaaaaaaaaaaaaaaaa

SEQ ID NO: 29748 - DNA, 2351 bp, Homo Sapiens
tgcgggcaggattcacgccgctgtgacccggaggtcctcagggggcgaagccccggcctaggcctcgcggagatgcccagctgcggtgcttgtacttgcggcgcggcggccgtccggctcatcacctcctcactcgcctccgcgcagagaggtatttctggtggtcgcattcatatgtcagttttaggaaggcttgggacatttgaaactcagattctgcaaagagctcctcttagatcctttacagaaacaccagcatactttgcctcaaaagatgggataagtaaagatggttctggagatggaaataagaaatcagcaagtgagggaagtagtaagaaatcaggctctgggaattctgggaaaggtggaaaccagctgcgctgtcctaaatgtggcgacttgtgcacacatgtagagacctttgtatcatccacccgttttgtcaagtgtgaaaagtgtcatcatttttttgttgtgctatctgaagcagactcaaagaaaagcataattaaagaacctgaatcagcagcagaagctgtaaaattggcattccaacagaaaccaccacctccccctaagaagatttataactacctcgacaagtatgttgttggccagtcatttgctaagaaggtgctttcagttgctgtgtacaatcattataagagaatatataataatatcccagctaatctgagacagcaagcagaggttgagaagcagacatcattaacaccaagagagttagaaataagaagacgggaggatgagtacagatttacaaaattgcttcagattgctggaattagcccacatggtaatgctttaggagcatcaatgcagcaacaggtaaatcaacaaatacctcaggaaaaacgaggaggtgaagtattggattcttctcatgatgacataaaacttgaaaaaagtaatattttgctgcttggaccaactgggtcaggtaaaactctgctggcacaaaccctagctaaatgccttgatgtcccttttgctatctgtgactgtacaactttgactcaggctggatatgtaggcgaagatattgaatctgtgattgcaaaactactccaagatgccaattataatgtggaaaaagcacaacaaggaattgtctttctggatgaagtagataagattggcagtgtgccaggcattcatcaattacgggatgtaggtggagaaggcgttcagcaaggcttattaaaactactagaaggcacaatagtcaatgttccagaaaagaattcccgaaagctccgtggagaaacagttcaagttgatacaacaaacatcctgtttgtggcatctggtgctttcaatggtttagacagaatcatcagcaggaggaaaaatgaaaagtatcttggatttggaacaccatctaatctgggaaaaggcagaagggctgcagctgctgcagaccttgctaatcgaagtggggaatcgaatactcaccaagacattgaagaaaaagatcggttattgcgtcatgtggaagccagagatctgattgagtttggcatgattcctgagtttgtgggacggttgcctgtggtggttccattgcatagcctagatgagaaaacacttgtacaaatattaactgagccacgaaatgctgttattcctcagtaccaggccttattcagcatggataagtgtgaactgaatgttactgaggatgctttgaaagctatagccagattggcactagaacgaaaaacaggtgcacgaggccttcggtccataatggaaaagctgttactagaaccaatgtttgaagtccctaattctgatatcgtatgtgtggaggttgacaaagaagtagtagaaggaaaaaaggaaccaggatacatccgggctccaacaaaagaatcctctgaagaggagtatgactctggagttgaagaagaaggatggccccgccaagcagatgctgcaaacagctaaactgtcatattgctgtcttgtatatacagcttttccttcttttgtttaggatcataattgtctctacagtctgatattaaaggcattggatctatcttggatatcatacatggtcagagaagcctttaggagaagaatcagatcatgtatataattgtaacatcacattgattttacggaagatgttatatggactttaatgacacaatgtttagagataaaatgtacattattttggttcagttttttaaaaaaaatatgctttaacaaaattcttaggaattcttttaagcaatgcaggtattgcgataactgtagattttacaataatgttactctacaaatgggaaaataaattctttaaaattgaatattga

SEQ ID NO: 29749 - DNA, 9126 bp, Homo Sapiens
ccagagccccctcgccccaaaggtcactgggactatttgtgcgaagagatgcagtggctctctgctgactttgctcaggagcgccgttggaaacggggtgtggcccggaaggtggtgcgcatggtgatccggcaccacgaggagcagcggcagaaagaggaacgggcccggagggaggagcaggccaagctgcgtcgaattgcttccaccatggccaaggatgtcaggcagttctggagcaatgtggagaaggtggtgcaattcaagcaacagtcccggcttgaggaaaagcgcaaaaaagccctggacctgcatttggacttcattgtggggcaaactgaaaagtactcggaccttctgtctcagagcctcaaccagccattaacctccagcaaagcaggctcttccccttgcctcggctcttcctcagctgcctccagtcctccaccccctgcttctcgcctggatgatgaagatggggactttcaaccccaagaggatgaggaagaggatgatgaggaaacgattgaagttgaagaacaacaggaaggcaatgatgcagaggcccagaggcgtgagattgagctgcttcgccgtgagggagaattgccactggaagagctgctccgttcccttccccctcagctgttggaagggccttccagcccctctcaaaccccctcatctcatgatagtgacacccgagatgggcctgaagaaggtgctgaagaagagccccctcaggtgttggagataaagcccccaccctctgctgtcacacagcgcaacaaacagccttggcatccagatgaagatgatgaagagtttactgccaacgaagaggaagcggaggatgaagaggatactatagcagctgaggaacagttggaaggggaggtggatcatgccatggagctgagcgagttggctcgagaaggtgagctttccatggaggagctattgcagcagtatgcaggagcctatgccccaggctctgggagcagtgaagatgaggatgaagatgaggttgatgctaatagctctgactgtgaaccagaggggcccgtggaagcggaagagcctcctcaggaggatagtagcagtcagtcagactctgtggaggaccggagtgaggatgaggaagatgaacattcagaggaggaagaaacaagtggaagttcagcatcagaggaatctgagtctgaagagtctgaggatgcccaatcacagagccaagcagatgaagaggaggaagatgatgattttggggtggagtacttgcttgccagggatgaagagcagagtgaggcagatgcaggcagtgggcctcctactccagggcccactactctaggtccaaagaaagaaattactgacattgctgcagcagctgaaagtctccagcccaagggttacacgctggccacgacccaggtaaagacgcccattcccctgcttctgcggggccagctccgggagtaccagcacattgggctagactggctggttaccatgtatgagaagaagcttaatggcattcttgctgatgagatggggcttgggaagaccatccagaccatctctctgcttgcccacttggcttgtgagaaaggtaactggggtccccatttaatcattgttcccaccagcgtgatgttgaactgggagatggagttgaaacgttggtgccccagctttaaaatcctcacttactatggagcccagaaagagaggaagctcaagcggcagggctggaccaagcccaatgcctttcatgtgtgtatcacatcttacaagctggtgctgcaggaccaccaggccttccgtcgcaagaactggcgctatctcattctggatgaggcgcagaacatcaagaacttcaagtcacagcgctggcagtcactcctcaacttcaacagccagagacgcctgctcctgacaggaactcccttgcagaacagcctcatggagctgtggtccttgatgcactttttgatgccccatgtcttccagtctcatcgcgagttcaaggagtggttctctaatcccctaactggcatgattgagggcagccaagagtataatgaaggtctagtcaaacgcctccacaaggttttgaggccttttttactgcgccgagttaaggtggatgttgagaagcagatgcccaaaaagtacgagcatgttatccgctgcaggctctccaagcgtcaacgctgtctctatgatgacttcatggcacagaccacaactaaggagacactagccacaggccatttcatgagcgtcatcaacattttgatgcagctgagaaaagtttgcaatcatccaaatctgttcgaccctcgaccggttacctcccctttcatcaccccaggcatctgcttcagcaccgcctctctggtgctaagggccacggatgtccatcccctccagcggatagacatgggtcgatttgaccttattggcctggaaggtcgtgtctctcgatatgaggcagacacatttctgccccggcaccgcctctctcgccgggtactgttagaagtggctactgctcctgaccccccaccccggcccaagccagtcaagatgaaggtcaacaggatgctgcagccagtacctaagcaagaaggccggacagtggtggtggtgaacaacccacgggcgcccctgggccctgtcccagttcgacctcctccaggtcctgagctctcagcccagcccacccctggcccagtcccccaagtgctgccagcatcactgatggtttcagcctcacctgccgggcccccgcttattcctgcatctcggcctcctggccctgtcctcttgcctccactgcagcccaacagtggttctctcccccaggtgttgccatcccccctgggggtcctgagtgggacctcacggcctcccacgccaaccttgtccctaaagccaacaccacctgccccagttcgcctgagcccagccccacctccaggctcctctagcctgttgaagcccctgacagtgccaccaggctacaccttccctcctgctgctgccaccaccacttctaccaccacggcaactgctaccaccacagcagtgccagctccgactcctgcaccacagcgcctcattctatctcccgatatgcaggctcgcctgccctcaggcgaagtggtcagcatcgggcagttagcctcactggcacaacgtccagtggctaatgcagggggaagcaaacctctcaccttccaaatccagggcaacaagctgactttgactggtgcccaggtgcgccagcttgctgtggggcagccccgcccgctgcaaatgccaccaaccatggtgaataatacaggcgtggtgaagattgtagtgagacaagcccctcgggatggactgactcctgttcctccattggccccagcaccccggcctccgagctctgggcttccagctgtgttgaatccacgccccacgttaacccctggccggctacccacacctactctgggtactgctcgagcccccatgcccacacccactctggtgaggcctcttctcaagctggtccacagtccttcacctgaagtcagtgcttcagcccccggagctgcccccttgaccatctcttctcctctccacgtgccatcctcactccctgggccagcctcttctccaatgccaattcccaactcctctccccttgctagtcctgtgtcctctacagtctcagttccattgtcatcttcactccccatctctgtccccaccacacttcctgccccagcctcggctccactcaccatccccatctcagcccccttgactgtttctgcttcgggcccagctctgttgaccagtgtgactccaccattggcacctgttgtcccagcggctcctggacctccctccttgcagccatctggtgcttccccgtcagcatcagccttgactctaggtttggccacagctccatccctgtcttcatctcagacacctggtcaccctctgttgttggctcccacctcttcacatgttccagggttgaactcaaccgtggccccagcatgctcacctgtcctggtgccagcttcggctctggccagtccttttccgtcagcaccaaatccagctccagctcaggcttcccttctggctccagcatcttctgcatctcaggctctagccacccctctggctcctatggcggctccacagacagcaattctggctccttctccagctcctcctctggctcctcttccggtcctggcaccatcgccaggtgctgctcctgtcctggcttcatcacagactccggttccagttatggctccatcgtctactccaggaacctctttagcctcagcttcaccggtaccagctccaacccctgtgttggctccatcatcaactcaaactatgctaccagccccggttccgtcacctctcccgagcccggcttctacgcagacactggccctagccccagctttagcacccactcttggaggctcatctccatctcagacactctctttgggaacggggaacccccagggaccctttccaactcagacattgtcattaactccagcatcatccctggtaccaactccagcccagacactgtctttggcaccaggaccaccactgggtccaactcagacgctgtctctggctccagcaccccctctggctccagcttctccagtgggcccagccccagctcacacgctgactttggctccagcatcgtcatctgcttcactcctggccccagcttcagtgcagacactgaccttgagccctgccccagttcctaccctgggcccggccgcagctcagaccttggcgctggccccagcctccacacagtccccagcttcccaggcatcttcccttgtggtttcggcatctggtgccgctcccttgcctgtcaccatggtatcccggctgcctgtttccaaggatgagcctgacacactgacattgcgctctggtccccccagccctccctccactgctacctcgtttggtggcccccggcctcgacgccagccccccccaccacctcgttcccctttttatctggactccctggaggaaaagcggaagcggcagcggtctgaacgcctggaacggattttccaacttagtgaggctcatggggccctggcacctgtgtatgggactgaagtcctggatttctgtaccctgccccaacctgttgccagccccatcggccctcgttctcctggccccagccaccccaccttttggacttataccgaggctgcccaccgggctgtactgtttccccagcagcgactagaccagctgtcagaaatcattgagaggttcatctttgtcatgcctcctgtggaggcacctcccccttccctgcatgcctgccacccacctccttggctggccccacgtcaggcagccttccaggagcaattggcctctgagctctggccccgggctcgtcctttgcaccgtattgtgtgtaacatgcgcacccagttccctgacttaagactcatccagtatgattgcggaaagttgcagacgttggcagtgctgttgcggcagctcaaggcagagggccaccgagtgctcatcttcacccagatgacccgaatgctggatgtattggagcagtttctcacctaccatggccatctctacctgcgcctggatggatctactagagttgaacagagacaggccttgatggaacggttcaatgcagacaaacgcatattctgcttcatcctttcaactcggagtgggggtgtgggcgtgaacctgacaggagcagacactgttgttttttatgacagcgactggaatcccaccatggatgctcaggcccaggaccgctgtcaccgaattggccagacccgggatgtccacatatataggcttatcagtgaacggacagtggaggagaacatcctaaaaaaggcaaatcagaagagaatgttgggggacatggccattgagggaggcaacttcaccacagcctatttcaaacagcagaccatccgagagctgtttgatatgcccctggaggaaccttctagctcatccgtgccctctgcccctgaagaggaggaagagactgtggccagcaagcagactcatattctggagcaggcattgtgtcgggcagaagatgaagaggatatccgtgcagccacccaggccaaggctgaacaggtggctgagcttgcagaatttaatgagaacgatgggtttcctgctggtgagggagaggaagctggccggcctggggctgaggatgaggagatgtcccgggctgagcaggaaattgctgccctcgtagaacagctgacccccattgagcgctatgccatgaaattcctggaggcctcactggaggaggtgagccgagaggagctcaaacaggcagaagagcaagtggaagctgcccgcaaagacctggaccaagccaaggaggaggtgttccgcctaccccaagaggaggaggaggggccgggggctggggatgagagttcctgtgggactggtggaggcacccaccggcgcagtaaaaaggccaaagcccctgagaggccggggactcgtgtcagtgagcgtcttcgtggagcccgggctgagactcaaggggcaaaccacactcctgtcatatccgcccatcaaactcgcagcaccaccacaccaccccgctgcagtcctgccagggagcgagttcccaggccagcacctaggcctcgacccactccagcttcagctccggctgcaattcctgcccttgttcctgtcccagtttctgccccagtacccatttcagccccaaatccaataaccattctccctgtccatatcttgccttctcctccccctccttcacagattcctccttgttcttctcctgcctgcacccctcctcctgcctgtacccctccaccagctcatacaccgcctccagcccaaacctgtcttgtaactccttcctctcctctcttgcttggtccaccttctgtgcccatctctgcctcagtcactaatctccccttgggcttgaggcctgaggcagagctgtgtgcccaggcattggcatctccagagtccctggagctggcttctgtggccagttcagaaacctcctcactttctcttgtgccccctaaagatctgttgccagttgctgtggagatcctgcctgtgtcagagaagaacctttctctcaccccttctgcacccagcctgaccttggaggctggcagcatccccaatggtcaagagcaggaggcaccagattctgctgaggggaccacccttacagtgctgcctgaaggtgaggagttgcccctgtgtgtgagtgagagcaatggcctggagctcccaccctcagcagcatctgatgagccacttcaggagccactggaggctgacaggacctcggaagagctgacagaggccaagaccccaacctccagcccagagaagccacaggaactcgttacagctgaggttgcagctccatccacctcatcttcagccacttcctcgcctgagggtccttcacctgcccgacctcctcggcgtcgcaccagtgctgatgtggaaattaggggtcaagggactggtcggccaggacaaccaccaggccccaaagtgcttcgaaagctgccaggacggctggtaactgtggtagaggaaaaggaactggtgcagcggcggcggcagcagcggggagctgccagcaccctagtgcctggggtctctgagactagtgccagcccgggaagcccgtctgtccgcagcatgtcagggccagaatcctcccctcccattggtgggccctgtgaagctgctccttcatcctcactgcccactccaccccagcagcccttcattgctcgccgtcacattgagctgggggtgactggtggtggcagccccgagaatggagacggagcactgctcgccatcaccccacctgctgtgaaacgtcggagggggaggccccccaagaagaacaggtctccagcagatgctgggagaggtgtggatgaggcaccctcatccaccttgaagggaaaaaccaatggggctgacccagtccctgggcctgagaccctaattgttgcagatcctgtcctggaaccacagcttattcctgggccccagcctcttggaccccagccagttcacagacccaatcccctcctgtcacctgtggagaaaagaaggcgaggacgaccccctaaagcacgagatttgcccatccctgggaccatttcctctgcaggggatggcaactccgaaagtcggacacagccacccccacacccatcacccctaaccccactcccaccactgctagtttgtcccactgctactgttgccaacactgtcaccactgtcaccatttcaacgtccccacccaaacggaagaggggccgacctcccaagaatcctccatcacctcggcccagccagctccccgtcttggaccgtgacagcacttctgttctcgagagctgtggattggggaggcgacggcaaccccagggccaaggggagagtgagggtagttcctctgatgaggatggaagccgccccctcacccgcctggcccgccttcggcttgaagcagaaggaatgcgaggacggaagagtggagggtccatggtggtggctgtaattcaggatgacctggacttagcagatagcgggccaggcgggttggaattgacaccacctgtggtctcactaaccccaaaactgcgctcgacccggctgcgtccagggtctctagtccccccactagagactgagaagttgcctcgcaaacgagcaggggccccagttggtgggagtcctgggctggcaaagcggggccgcctacagcccccaagtcccctggggcctgagggttcagtagaggagtctgaggctgaagcctcaggtgaggaggaggaaggggatgggaccccacgccgacgtcctggcccccgccggcttgttgggaccaccaaccaaggggaccagcgcatcctgcgcagcagcgcccctccctccctggctggccctgctgttagtcacagaggccgcaaggccaagacgtga

SEQ ID NO: 29750 - DNA, 3726 bp, Homo Sapiens; identical to SEQ ID NO: 23183

SEQ ID NO: 29751 - DNA, 1488 bp, Homo Sapiens
gttggtgagcatcatggcaaccgttacagccacaaccaaagtcccggagatccgtgatgtaacaaggattgagcgaatcggtgcccactcccacatccggggactggggctggacgatgccttggagcctcggcaggcttcgcaaggcatggtgggtcagctggcggcacggcgggcggctggcgtggtgctggagatgatccgggaagggaagattgccggtcgggcagtccttattgctggccagccgggcacggggaagacggccatcgccatgggcatggcgcaggccctgggccctgacacgccattcacagccatcgccggcagtgaaatcttctccctggagatgagcaagaccgaggcgctgacgcaggccttccggcggtccatcggcgttcgcatcaaggaggagacggagatcatcgaaggggaggtggtggagatccagattgatcgaccagcaacagggacgggctccaaggtgggcaaactgaccctcaagaccacagagatggagaccatctacgacctgggcaccaagatgattgagtccctgaccaaggacaaggtccaggccggggacgtgatcaccatcgacaaggcgacgggcaagatctccaagctgggccgctccttcacacgcgcccgcgactacgacgctatgggctcccagaccaagttcgtgcagtgcccagatggggagctccagaaacgcaaggaggtggtgcacaccgtgtccctgcacgagatcgacgtcatcaactctcgcacccagggcttcctggcgctcttctcaggtgacacaggggagatcaagtcagaagtccgtgagcagatcaatgccaaggtggctgagtggcgcgaggagggcaaggcggagatcatccctggagtgctgttcatcgacgaggtccacatgctggacatcgagagcttctccttcctcaaccgggccctggagagtgacatggcgcctgtcctgatcatggccaccaaccgtggcatcacgcgaatccggggcaccagctaccagagccctcacggcatccccatagacctgctggaccggctgcttatcgtctccaccaccccctacagcgagaaagacacgaagcagatcctccgcatccggtgcgaggaagaagatgtggagatgagtgaggacgcctacacggtgctgacccgcatcgggctggagacgtcactgcgctacgccatccagctcatcacagctgccagcttggtgtgccggaaacgcaagggtacagaagtgcaggtggatgacatcaagcgggtctactcactcttcctggacgagtcccgctccacgcagtacatgaaggagtaccaggacgccttcctcttcaacgaactcaaaggcgagaccatggacacctcctgagttggatgtcatcccccgaccccaccctgttttccaccagagttctgacactgtgactctgtataaaatggttgggaagctgc

SEQ ID NO: 29752 - DNA, 1432 bp, Homo Sapiens
cggagcgcgagcagagcgagacccccaggtcctgcgggcgcggaatatcctggaaccttcttttgtttgtcagcagccaaggtgtttccaggaagttcagagagaacagaatttaagaagtgcaacatggccaggggctgcctctgctgcttgaagtacatgatgttcctcttcaatttgatattctggctctgtggctgtgggctgctgggagtgggcatctggctctccgtgtcccaaggcaactttgccaccttctcccccagcttcccttcgttgtctgcagccaacctggtcattgccataggcaccattgtcatggtgacgggcttcctcggctgcctgggggccatcaaggaaaacaagtgcctcctcctcagctttttcatcgtcctgttggtcatcctcctagcagagctgatcttactcatcctcttctttgtctacatggacaaggtgaacgagaacgccaagaaggacctgaaggaaggcctgctgctgtaccacaccgagaacaacgtggggctgaagaacgcctggaacatcatccaggctgagatgcgatgctgtggtgtcactgactacacagactggtacccagtgctgggggagaacacggttcccgaccgctgctgcatggagaactcccagggctgcgggcgcaacgccaccacgcctttgtggagaacgggctgctatgaaaaggtgaagatgtggttcgatgacaataagcacgtgctgggcacggtggggatgtgcatcctcatcatgcagatcctgggcatggccttctccatgaccctcttccagcacatccaccggactggtaagaagtacgacgcatgagcgggctggccgggagtgcccaccccgccctgctgccctgtggagggaagaggattgagctttgtgtcacctgcctgcgctctccagatatgacccctgcacccaccccccacagcctgccctaccccacctaccctgcctcagcctcggacttctcagtgggtggagtgccagggaggaggaggcacacggagacctggggctcggggcccctggattcctgcatctgcatatgcgtatttgccaaagacgacagggtgggctggggtgcgctccggaggaacccccggcactgatgggcttctgcccctgcccttcctcacactgacactttgtccccacatggggtggggagcagagtgcccgccccgtggagataccgccccagcgggggctgcgacatccatggccaccatggggcacctggcggggcgggggtctgccggcctctgggcaaggcccctggagcatctcgcccaggctttttataccttacaatgtaacttttttattttattttactctatgattattcaggaatattatctctcagataagtttagggttaaaaaaaaaaaaaaaaaaa

SEQ ID NO: 29753 - DNA, 4490 bp, Homo Sapiens
caggcggcggcggcgcagttgcgagtgcaggctccttgccagaggcctccactcactccagacccctatagcccgtcgctgtcagctgtcaacaaaggatgcgaatgctggccgcttcctgtgggcttcgtgtcacccagaggtgagcccaggccaggatgggggactccagggacctttgccctcaccttgactccataggagaggtgaccaaagaggacttgctgctcaaatctaagggaacctgtcagtcgtgtggggtcaccggaccaaacctatgggcctgtctgcaggttgcctgcccctatgttggctgcggagaatccttcgctgaccacagcaccattcatgcacaggcaaaaaagcacaacttgaccgtgaacctgaccacgttccgactgtggtgttacgcctgtgagaaggaggtattcctggagcagcggctggcagcccctctgctgggctcctcttccaagttctctgaacaggactccccgccaccctcccaccctctgaaagctgttcctattgctgtggctgatgaaggagagtctgagtcagaggatgatgacctgaaacctcgaggcctcacgggcatgaagaacctcgggaactcctgctacatgaacgccgccctgcaggccctgtccaattgcccgccgctgactcagttcttcttggagtgtggcggcctggtgcgcacagataagaagccagccctgtgcaagagctaccagaagctggtctctgaggtctggcataagaaacggccaagctacgtggtccccaccagtctgtctcatgggatcaagttggtcaacccaatgttccgaggctatgcccagcaggacacccaagagttccttcgctgcctgatggaccagctgcacgaggagctcaaggagccggtggtggccacggtggcgctgacggaggctcgggactcagattcgagtgacacggatgagaaacgggagggtgaccggagcccatcagaagatgagttcttgtcctgtgactcgagcagtgaccggggtgagggtgacgggcaggggcgtggcgggggcagctcgcaggccgagacggagctgctgatcccagatgaggcgggccgagccatctctgagaaggagcggatgaaggaccgcaagttctcctggggccagcagcgtacaaactcggagcaagtggacgaggacgctgatgtggacactgccatggctgcccttgaccagcccgcggaggcccagcccccgtcaccacggtcctccagcccctgccggacgccagagccggacaatgatgctcacctacgcagctcctctcgcccctgcagccccgtccaccaccacgagggccatgccaagctgtctagcagcccccctcgtgcaagccccgtgaggatggcaccgtcgtacgtgctcaagaaagcccaggtattgagtgctggcagccggaggcggaaggagcagcgctaccgcagcgtcatctcagacatctttgacggctccattctcagcctcgtgcagtgtctcacctgtgaccgggtatccaccacagtggaaacgttccaggacttatcactgcccattcctggaaaggaggacctggccaagctccattcagccatctaccagaatgtgccggccaagccaggcgcctgtggggacagctatgccgcccagggctggctggccttcattgtggagtacatccgacggtttgtggtatcctgtacccccagctggttttgggggcctgtcgtcaccctggaagactgccttgctgccttctttgccgctgatgagttaaagggtgacaacatgtacagctgtgagcggtgtaagaagctgcggaacggagtgaagtactgcaaagtcctgcggttgcccgagatcctgtgcattcacctaaagcgctttcggcacgaggtgatgtactcattcaagatcaacagccacgtctccttccccctcgaggggctcgacctgcgccccttccttgccaaggagtgcacatcccagatcaccacctacgacctcctctcggtcatctgccaccacggcacggcaggcagtgggcactacatcgcctactgccagaacgtgatcaatgggcagtggtacgagtttgatgaccagtacgtcacagaagtccacgagacggtggtgcagaacgccgagggctacgtactcttctacaggaagagcagcgaggaggccatgcgggagcgacagcaggtggtgtccctggccgccatgcgggagcccagcctgctgcggttctacgtgtcccgcgagtggctcaacaagttcaacaccttcgcggagccaggccccatcaccaaccagaccttcctctgctcccacggaggcatcccgccccacaaataccactacatcgacgacctggtggtcatcctgccccagaacgtctgggagcacctgtacaacagattcgggggtggccccgccgtgaaccacctgtacgtgtgctccatctgccaggtggagatcgaggcactggccaagcgcaggaggatcgagatcgacaccttcatcaagttgaacaaggccttccaggccgaggagtcgccgggcgtcatctactgcatcagcatgcagtggttccgggagtgggaggcgttcgtcaaggggaaggacaacgagccccccgggcccattgacaacagcaggattgcacaggtcaaaggaagcggccatgtccagctgaagcagggagctgactacgggcagatttcggaggagacctggacctacctgaacagcctgtatggaggtggccccgagattgccatccgccagagtgtggcgcagccgctgggcccagagaacctgcacggggagcagaagatcgaagccgagacgcgggccgtgtgatctgctgggctagtctgtaagtcgccccggctggtccctccatggcactctgggtcctctcctcactctccagagaccctcacatgtccttttgaacatccaaagagcaggtccctgaaagcaccttcctggaggatgtgggagggccctggacatggcccggccccactgctgagtgcccgtgtccccacagccccatgtgccccaccccgcggaaggcgtgtttgtgcccagaagagaggccgggctgctgcagaaccccgccgtgtaaagaggcagaaaagttggtttggtttgcagtaacgctgcaactagaaaatatatgcacttcaggcttgttgaaacgaccaagactctgtgacgttaatttgggtctttgtcctggcagtgcctctgccagtcactgtcatcgttgtgtcccccacaactgtcctcttgctagctcggcccagctttgtccctggagcccgatgctacccctgtcagacagaggctgcggcctgggccagagtcagggagtagctgctgcttcacggcgtctccactgtgcgattggcccggagccccgaagactcggagggagctgctcagggccggtgagcgcagccagaagccctggccagtgaggagctcacaggtcctccctggtggtcccgccgcacctctgcatctcctgggcgtcaccaggaaggctctgaagtcccgggctgctctcagcacttctcctgcagactgaagactctggactcattgctgattggaacaccaggaggaggttggatttctgccagtgggggatgtttctggaggcagctggtcccccacaccgcgtcctgctgagcctgccccctggattggctgtaatttgcctcgaagttcagcagttcatcttcatgggaaatttgctgagcccccaccagggaaccggatgatgaaacagggatacctcacagcttggccatttgaggcaaaggcagcttcccgagctgatgctaaagaagacagactttcccttcctcccagcagcagcagtgcagagcccgcctggagggatgtgggggctgtgcagggtgcagcgctcaggtggatcctgggaagcagcctctggatgctgagtggagggagccactgagcacagcaaggcaccaaagcccctggagaaaccgccagggcgaggtgcgaccatcatcaggatcaaagcagacggggcgtgggtggggaaggggctctgggaccagaccccccacactactgcgtctttgtttctatcagtctttgtagaagcaggtggtggtggaaattccagcaggtgggtcccgcagaggccctgaggcctcacttttcggatcttctgtcccagatcctgctccctccctgctgagcctggggttcccctggcattggccccagccttctgaaagccggcgctgcagccagaggccgcacgctgcactgtcgcgacgcagagaggcttctgtgcaggctgggatcgggccccatgtctgtgctgtctagtttgtgttcaaaatgtcagaataaacacagaataaatgttaaaaaaaaaaaaaaaaaaaaaaaaaaaaaaaaaaa

SEQ ID NO: 29754 - DNA, 817 bp, Homo Sapiens
agtcctgcgtccgggccccgaggcgcagcagggcaccaggtggagcaccagctacgcgtggcgcagcgcagcgtccctagcaccgagcctcccgcagccgccgagatgctgcgaacagagagctgccgccccaggtcgcccgccggacaggtggccgcggcgtccccgctcctgctgctgctgctgctgctcgcctggtgcgcgggcgcctgccgaggtgctccaatattacctcaaggattacagcctgaacaacagctacagttgtggaatgagatagatgatacttgttcgtcttttctgtccattgattctcagcctcaggcatccaacgcactggaggagctttgctttatgattatgggaatgctaccaaagcctcaggaacaagatgaaaaagataatactaaaaggttcttatttcattattcgaagacacagaagttgggcaagtcaaatgttgtgtcgtcagttgtgcatccgttgctgcagctcgttcctcacctgcatgagagaagaatgaagagattcagagtggacgaagaattccaaagtccctttgcaagtcaaagtcgaggatattttttattcaggccacggaatggaagaaggtcagcagggttcatttaaaatggatgccagctaattttccacagagcaatgctatggaatacaaaatgtactgacattttgttttcttctgaaaaaaatccttgctaaatgtactctgttgaaaatccctgtgttgtcaatgttctcagttgtaacaatgttgtaaatgttcaatttgttgaaaattaaaaaatctaaaaataaa

SEQ ID NO: 29755 - DNA, 5388 bp, Homo Sapiens
gcaacagcggcggcggccgcggcggctggccggactcaggtgtttcggacgctattgcccttcgcgccagccgtcgagtgggcagcagcgggactcagccgggcgccaggttcctgccaggcagcgccgggaagcgcgggcggccgagaactccttcctgctacttcgcccagcgccgctgcttcggcttcccagcgaagtgggagaccttcctccctgtttgcagacgtccgtgggagacccttattttttccaccgctaaggttaagagattctggaatagaagcgtcgaaggagatcaagtgaaccttctacaactcctcggatgtcgccagtctccctttcggggcggaagactacgtttgagcatctcactgaggtgcaggaatggaagaacccaccttgcagcttttctgcagtgtggcttgcctgatctacccctaggaatgaagaggaggcttgtaataatccgatgaagtacagatgttgaagaggatatcgcaggacctaaacttgtgatcgtttgggggaggtcacacacgtttctgagtgggaatggatgggcgtgaatgacgtgccctcttaaaaagcacaacagtcctttaagaggagcaaaattgagttttcccattttggccaagattttgaagacagttcaatgtattctacatttgacataagatgagaactttctaaagtattctctccaagagcgtaaacgatgactaccccagccctgctgcccctctctggacgtaggataccacctctgaacctggggccgccttccttcccacatcacagggctaccttgagactttctgagaagtttattcttctccttattcttagtgccttcatcactctgtgttttggggcattctttttccttccagactcttcaaaacacaaacgctttgatttgggtttagaagatgtgttaattccacatgtagatgccggtaaaggggctaaaaaccccggagtcttcctgatccatggacccgatgaacatagacacagggaagaggaagaacgtctgagaaataaaattcgagctgatcatgagaaggccttggaagaagcaaaagaaaaattaagaaagtcaagagaggaaattcgagcagaaattcagacagagaaaaataaggtagtccaagaaatgaagataaaagagaacaagccactgccaccagtccctattcccaaccttgtaggaatacgtggtggagacccagaagataatgacataagagagaaaagggaaaaaattaaagagatgatgaaacatgcttgggataactataggacatatgggtggggacataatgaactcagacctattgcaaggaaaggacactcccctaacatatttggaagttcacaaatgggtgctaccatagtagatgctttggataccctttatatcatgggacttcatgatgaattcctagatgggcaaagatggattgaagacaaccttgatttcagtgtgaattcagaggtgtctgtgtttgaagtcaacattcgatttattggaggcctacttgcagcatattacctatcaggagaggagatattcaagattaaagcagtgcaattggctgagaaactccttcctgcctttaacacacctactgggattccttgggcaatggtgaatttgaaaagtggagtagggcgaaactggggctgggcatctgcaggtagcagcattctggctgaatttggtacactacatatggagttcatccacctcagctacttgacaggggacctgacttactacaaaaaggttatgcacattcggaaactacttcagaaaatggatcgtccaaatggtctttatccaaattatttgaaccccagaacagggcgctggggtcagtatcatacatctgtcggtggcctgggagacagtttttatgaatacttactgaaagcatggttgatgtcagataaaacagaccatgaggcaagaaagatgtatgatgatgctattgaggctatagaaaaacatcttattaagaagtctcgtggaggtcttacctttattggagaatggaagaatgggcacttggaaaaaaagatggggcatttggcctgctttgctgggggaatgtttgcactaggagcagatggttccagagcagataaagctggtcattatttagagctaggggcagaaattgcacgtacttgtcatgagtcatatgacagaactgcattaaagctaggtcctgaatcattcaagtttgatggtgcagtggaggctgtggctgtccggcaggctgaaaagtattatatcctccgtccagaagtaattgaaacctattggtacctatggcgattcactcacgatccaagatacaggcagtggggctgggaagcagcactggccattgaaaagtattgccgagttaatggtgggttttctggagtcaaagatgtatattcctctactcctacacatgatgatgtacagcagagcttttttcttgctgaaacattaaaatatttgtatctgctgttctccggtgatgaccttttacctttagaccactgggtgtttaatacagaggctcaccctctgcctgtgttacatttagccaacaccacactttcaggtaatcctgctgttcgatgaaagcagttccagaaggaccattctcacctgtgttttgtttacatggaccactacagaaattagtttgaaggggcggcttttgaaaacctggacctctatgtcaacatgacagggtgaaactattccccctaagactgttcaacttgtagatacatcaactttgaaattattccattttatacctgaccaaaacatgttctgatatgtgtaggacagagacctggatgtgctttgatcgttaatgaggtggtcacatgagaaatgatacctgttactactgtattgtttttagagtcctgaagtctggaggctagacttcctgaaagcaagtcaagaatatagagcaccttgcaggagttcaagatggcctttggaaccaattatgtatttgtttcctcctacagtggagcagcattcaaatcaaatatttacatattgcttatcactttttctccattttaataatggaatgaactaaaataaacaagaacaaaagaatagtataattatatcagtaacaagaagactcaaaaaagaaacaggagtacctatccctatctgaattttcaagttccccattggatgaccagactggcaaccatttcaaatcccagtctatttcattgaaatttcttggttaagtttaattttctctgggggcatgatctcacaaagaatactcaagtctttttcttcttatggaatcatcgaaactgctatttatcataatcaccacttatgagcctgggtttgggattttgtgcatgtagttcagtctagtgttggtagcatgacagaaagtggggaaaatgccgcagtttgttgccttgaaacctaagagcaatccttggttttgttgctacattatttttccagaccaacacatctaccaagtaaattttattcactttaatttcataataaagttagtagagtcactcaacttacaactttatttatgtggcttggcaaaaatcactataaggcagctctaaatttgccttgataagctaaataaattacttttataacttactaaagcagaacaaacagtgaaactttctaaaatattctatctggaatagggacaggggatcttttatttataatctcatcagatgagtgagttgttcacagatattttatgtttttttaattttctccaagaatatttatagaattccaaagaatcagaatagtttcaaaataattttcagtgataaaagagtgttgtaattaatcatattacactaaaattgggatacatctaaggaactttatcttactatcagtaggttttgcattgatatttctttttaaataaactactagttctttatattttgacaaaaagaacttaaattttatcaggaactgtaagataaatatctagtgcttataaattttctgtccttaaatttatgtgacagtgcaagatacttttgctcttttcatttaatataggcatcttccattgacattaataaaacttagaaacagtataattagtataacatttactctgaatttgaagatttcctgaaacaaagtttgtacaagaagcccaccttggaattctgaaggcttattttcttgtttgataagcttttcttttaaacttaggttttaagttggggaaagacttaattaactaatatagtattttctaaggttgatcatcttataccacgaatcgttaattttgacagttctactgatccgtaaatgataaccactgcaaattttttcagtataaaatttttcactgcaaaaaaatttcagtagaaaataaggatgcagggccagttacaatagtccttaagagagttaaattatagcacatgttttgacattgtaatatcttttactacttgaacatttaaatttctaaatgagaaaggtatatatattactgtaactgtagaagggaaaagggaaagtatttggttctaaaaaatgttagccttcctcgtaaaagtagcacaagcccacttatgaatcactgagaaaaagtgaaaaacttgagttggcaaagatgcagagcagcagtgcagatggcaatgaactctctgaattctcttttaccttatttagaagaatgcagagtaaagggaccttcttggttctgcaggaacttctcaagggatgaggagacagaacccctacttccaagtgctctatttgtattacccagatgactgaagcttaagagaaggcagggaagtatacaagcagagccagttctggtacaaacaaagaatttgacagggacaatggaagggtcttcttcaccactccttaccttctatgtgatggaaagactagagcttataaaagtacttccatttttttattctcctgaataccaaaggcaattaaagtcagctacaaatgacttgccagtgtcatgttttatttttgttatagatttttaaattatttccttcaagatcaattcttatcccatataatgcttagcttccaagaatattctttactttcttctgtcttttacagctctttgcattttgtagaccttaatactcaggttaaatattcattgcatttataagatcttctgcaaaaagcccagaaatggtccttttcaggtgcctcttcaaagagctgacaccttaccttgtgcctttggcacaaatgtgcagaatagatacatcagttggtgcataatcgaaaaaaataggaattttgaacactgttcttccttctacatttatttctct

SEQ ID NO: 29756 - DNA, 4181 bp, Homo Sapiens
atgaacgcggccctctgtaatggcggagcgtggcggggacgggggcgagagtgaacgattcaacccgggggagctcaggatggcccaacagcaggccttgaggttccgaggtccggctcccccaccaaatgcagtgatgcgaggcccaccacctctgatgcgacctcctccaccttttggtatgatgcgaggccctcctccaccaccacggccgccctttggacgtcctccttttgatcctaatatgccgccaatgcctcctccaggagggatacctccacctatgggccctccacacctccagagaccacctttcatgcctcctcccatgagttccatgcctcctcctccgggtatgatgtttccaccaggaatgcctcctgtgactgctcctggtactccagcactacctcctacggaggagatatgggttgaaaataaaactccagatgggaaggtttattattataatgctcggacacgtgaatctgcatggaccaagccagatggagttaaggttattcagcaatcagaactgacacctatgcttgcagcccaggcacaggttcaggctcaggcccaggcgcaggctcaggcccaggcgcaggctcaggcccaggcacaagctcaggcccaggctcaggctcaggcccaggcccaggcccaggcccaggcccaggcccaagcccaagcccaggcccaggctcaggctcaggcacaagctcaggcccaggcccaggctcaggtccaggcccaggtccaggcacaagtgcaagcacaagcagttggagcttccacccctacgaccagtagcccagcacctgcagtatccacttcaacatcatcatccaccccttcctctaccacttctaccacaacaactgctacttcagttgcgcagacagtatcaacacccacaacacaagatcagaccccaagttctgctgtttcagttgccacgcctacagttagtgtttcaactcctgctcctacagccacacctgtgcaaaccgttccccagccgcaccctcagacgttacctcctgctgttcctcattcagtacctcagccaacaacagcaatacctgcttttccaccagtaatggtacctccgtttcgtgttccccttcctggcatgccaattccacttccaggtgtagcaatgatgcaaatagtcagctgcccgtatgtaaagacagtcgctaccaccaagaccggtgtattgccaggaatggcccctcctatcgtacccatgatacatccccaggttgctattgcagcttcacctgctaccttagctggagcaacagcagtttctgaatggactgaatataaaacagcagatgggaagacatattattataataatagaacattagaatcaacctgggaaaaaccccaagaactaaaggaaaaagaaaagttagaagagaagattaaagagccaattaaagaaccctctgaagagcctctgccaatggagacggaggaggaggatcctaaagaagagcctataaaggagataaaggaggagcccaaagaagaggagatgactgaagaagaaaaggctgcccagaaggcaaagccagttgctactgctcctattcctggtactccatggtgtgtcgtttggactggtgatgagcgggtcttcttttataatcccaccactcgtctttctatgtgggaccgacctgatgatctgattggcagggcagatgttgacaaaattattcaggagccccctcataaaaaaggaatggaggaattgaagaaactaaggcacccaactccgacaatgctgtcgatccaaaagtggcaattctctatgagtgcaattaaagaggaacaagaattaatggaagaaattaatgaagatgagcctgttaaagcaaaaaaacggaagagagacgataataaagacattgactcagagaaagaagctgccatggaagctgaaattaaagctgcccgagaaagggccattgtccctctggaggctcgaatgaagcagttcaaggacatgctgctagagagaggggtgtctgctttttcaacgtgggagaaggagttgcacaagatagtttttgatccccggtacttacttctcaatcctaaagagagaaaacaggtgtttgatcagtatgtaaagaccagggcagaggaagaacgcagggaaaagaaaaataaaataatgcaagccaaggaagatttcaaaaaaatgatggaagaagcaaaatttaatccaagagcaacttttagtgaatttgcagccaagcatgctaaagattcaagattcaaagcaattgaaaagatgaaagaccgagaagccttgtttaatgagtttgtggccgctgctaggaagaaagagaaagaagattcgaagaccagaggtgagaagattaaatcggatttctttgaactattatctaatcatcacttggacagtcagtctcgatggagcaaagtaaaagacaaagtagaaagtgatccacgttacaaagcagtagatagttcatcaatgagagaagaccttttcaaacagtacattgaaaaaatagccaagaatttagactcagaaaaagaaaaggagcttgaaaggcaagcccgcattgaggcaagccttcgagaacgagaaagggaggttcaaaaggcccgttcagaacaaacaaaagaaatagatcgagagagagagcagcacaaacgagaagaagctatccagaatttcaaagctcttctgtctgacatggtacgttcttcagatgtgtcatggtctgatactcgtaggaccctccgaaaagatcaccgctgggaatctggatccttattggaaagagaggagaaagagaagctttttaatgaacacattgaagcacttaccaaaaaaaagagagagcactttaggcaacttctggatgaaacttctgcaattaccttaacatccacgtggaaagaagtaaaaaaaatcattaaggaagatcctcgatgtattaagttctcctccagtgacaggaaaaaacaaagagaatttgaagaatatatcagagacaaatatatcacagccaaagctgacttcaggacgcttttgaaagagaccaaatttataacatatagatccaaaaaattaatccaagaatcagatcagcacctgaaagatgtagaaaaaattttacagaatgacaaacggtatctagtactggactgtgtgccagaggagaggcgtaaactgattgtggcatatgttgatgacctggatcgccggggtccacccccacctcccacagcatcggagcccacgagacgatcaacaaaataattctaaatactcttccataggggcatctattcaaaatgcttgcatgagccaattttcaggtttttacatatatgtgcattagtcaacctattgcgaaaccatctgacaaacagaaggagaagcatttgtgaacagtttctgaacagaacactttggaaatatttatgcttttctttgtgtggcatgactgacatacatactcaaatataggctgtctctagtaaatcttaaaatcttgaagctaaaattcatccttttatgaggtgtggaagtcagtgacttggtgacgttcttcctagcagtgttaatacatgcaagaagtaagagcatttgtggcttgaacttgccagatgcaaataccacagactccaagaaaacccgagttggggtttgttttgttttgattttttttttttaaagcgggtaaaagagaaaacactgaaaattgaattcttatcttccagaggctacaattattataatggacaatacttttacctttgtctctaaagatcagattagttttatttgttcacttacgtgctttgattatcccctctgaattatagaccgagtcttgttgtttagcctaagagaagatttatgtagtaatttcttctcaggtatggaaccacggtcataactaacatgttggccagaatagaaccactggttaaacatattttattcaccattaagtgatctttatcaatattctggattagacaacaaattacctttctgggtgtttcttgtaaactatactcctgtttgaatgttaaactttgttgctaaagtttaattttaagatgtttgaatgttcagtttatgtatttgaactacaataaaccaaccctttttatat

SEQ ID NO: 29757 - DNA, 3254 bp, Homo Sapiens
ggagcgagagcccggcgatggcggctgcgccggccttgaagcactggcgcaccacgctggagcgggtggagaagttcgtgtcgccgctctactttaccgactgtaacctccgcggcaggctttttggggccagctgccctgtggctgtgctctccagcttcctgacgccggagagacttccctaccaggaggcagtccagcgggacttccgccccgcgcaggtcggcgacagcttcggacccacatggtggacctgctggttccgggtggagctgaccatcccagaggcatgggtgggccaggaagttcacctttgctgggaaagtgatggagaaggtctggtgtggcgtgatggagaacctgtccagggtttaaccaaagagggtgagaagaccagctatgtcctgactgacaggctgggggaaagagacccccgaagcctcactctctatgtggaagtagcctgcaatgggctcctgggggccgggaagggaagcatgattgcagcccctgaccctgagaagatgttccagctgagccgggctgagctagctgtgttccaccgggatgtccacatgctcctggtggatctggagctgctgctgggcatagccaagggcctcgggaaggacaaccagcgcagcttccaggccctgtacacagccaatcagatggtgaacgtgtgtgaccctgcccagcccgagaccttcccagtggcccaggccctggcctccaggttctttggccaacatgggggtgaaagccaacacaccattcatgccacagggcactgccacattgatacagcctggctttggcccttcaaagagactgtgaggaaatgtgcccggagctgggtgaccgccctgcagctcatggagcggaaccctgagttcatctttgcctgctcccaggcgcagcagctggaatgggtgaagagccgctaccctggcctgtactcccgcatccaggagtttgcgtgccgtgggcagtttgtgcctgtggggggcacctgggtggagatggatgggaacctgcccagtggagaggccatggtgaggcagtttttgcagggccagaacttctttctgcaggagtttgggaagatgtgctctgagttctggctgccggacacctttggctactcagcacagctcccccagatcatgcacggctgtggcatcaggcgctttctcacccagaaattgagctggaatttggtgaactccttcccacaccatacatttttctgggagggcctggatggctcccgtgtactggtccacttcccacctggcgactcctatgggatgcagggcagcgtggaggaggtgctgaagaccgtggccaacaaccgggacaaggggcgggccaaccacagtgccttcctctttggctttggggatgggggtggtggccccacccagaccatgctggaccgcctgaagcgcctgagcaatacggatgggctgcccagggtgcagctatcttctccaagacagctcttctcagcactggagagtgactcagagcagctgtgcacgtgggttggggagctcttcttggagctgcacaatggcacatacaccacccatgcccagatcaagaaggggaaccgggaatgtgagcggatcctgcacgacgtggagctgctcagtagcctggccctggcccgcagtgcccagttcctatacccagcagcccagctgcagcacctctggaggctccttcttctgaaccagttccatgatgtggtgactggaagctgcatccagatggtggcagaggaagccatgtgccattatgaagacatccgttcccatggcaatacactgctcagcgctgcagccgcagccctgtgtgctggggagccaggtcctgagggcctcctcatcgtcaacacactgccctggaagcggatcgaagtgatggccctgcccaaaccgggcggggcccacagcctagccctggtgacagtgcccagcatgggctatgctcctgttcctccccccacctcactgcagcccctgctgccccagcagcctgtgttcgtagtgcaagagactgatggctccgtgactctggacaatggcatcatccgagtgaagctggacccaactggtcgcctgacgtccttggtcctggtggcctctggcagggaggccattgctgagggcgccgtggggaaccagtttgtgctatttgatgatgtccccttgtactgggatgcatgggacgtcatggactaccacctggagacacggaagcctgtgctgggccaggcagggaccctggcagtgggcaccgagggcggcctgcggggcagcgcctggttcttgctacagatcagccccaacagtcggcttagccaggaggttgtgctggacgttggctgcccctatgtccgcttccacaccgaggtacactggcatgaggcccacaagttcctgaaggtggagttccctgctcgcgtgcggagttcccaggccacctatgagatccagtttgggcacctgcagcgacctacccactacaatacctcttgggactgggctcgatttgaggtgtgggcccatcgctggatggatctgtcagaacacggctttgggctggccctgctcaacgactgcaagtatggcgcgtcagtgcgaggcagcatcctcagcctctcgctcttgcgggcgcctaaagccccggacgctactgctgacacggggcgccacgagttcacctatgcactgatgccgcacaagggctctttccaggatgctggcgttatccaagctgcctacagcctaaacttccccctgttggctctgccagcccccagcccagcgcccgccacctcctggagtgcgttttccgtgtcttcacccgcggtcgtattggagaccgtcaagcaggcggagagcagcccccagcgccgctcgctggtcctgaggctgtatgaggcccacggcagccacgtggactgctggctgcacttgtcgctgccggttcaggaggccatcctctgcgatctcttggagcgaccagaccctgctggccacttgacccttcgggacaaccgcctgaagctcaccttttctcccttccaagtgctgtccctgttgctcgtgcttcagcctccgccacactgagtccctggggctggggttttgtttgtagaaggctctggggactcctaatttctgcttccccagcctaaagcagggatcagtcttttcttgtggaataaatccttggatcgggaa

SEQ ID NO: 29758 - DNA, 9344 bp, Homo Sapiens
gcggggcactttgaagaatcacgtgtgttgaggccctcttaaagagataggcacctacttttccctccaccctaaacaccgccctgagggcggcggcgaccgtggtaattgcaactgctcaggggcagggcttgccccagcgccgagtagtggcaacggcgtggttgcgtcgggggtgcctgggagcctggagtcccgggggcctgaaatcggcagcttcccgggcagacactctctccctcaggaagaggtgccgccgagtcagcgcggggcagtgtgagcgccccgaggtgctttctcagttgaggagaggtggggttacagggcacaggtgacagggccggagaaagatggagcagcccggggcggcggcgtcgggagcgggaggcggcagcgaggaacccggtgggggccggagcaacaagcggagcgcggggaaccgggccgccaatgaagaggaaacgaaaaacaaacccaaattgaacattcaaataaaaactttggcagatgatgtgcgtgaccgaattacaagttttagaaaatctactgtcaaaaaagaaaaacctcttattcaacatcctattgattctcaagtcgcgatgagtgagtttcctgcagctcagccattatatgatgaacgatctttgaatttgtcagaaaaggaagtattggatctctttgaaaaaatgatggaggacatgaaccttaacgaagagaaaaaagctcctttacgaaacaaagactttaccaccaaacgtgagatggttgtccagtatatttctgccactgccaaatctggtgggctgaaaaacagcaaacatgaatgcaccctgtcttcacaagaatatgttcatgaattacgatcgggtatatcagatgagaaacttcttaattgcctagaatccctcagggtttctttaaccagcaatccggtcagctgggttaacaactttggccatgaaggtcttggactcttattggatgagctggaaaagcttctggacaaaaaacagcaagaaaatattgacaagaagaatcagtataaacttattcaatgcctcaaagcatttatgaataataagtttggattacaaaggattctaggagatgaaagaagtcttttactattggcaagagcaattgaccccaaacaacccaacatgatgactgaaatagtaaaaatactttctgctatttgcattgttggagaagagaacattctagataaacttttaggggctataacaacagcagcagaaagaaataacagggaacgattttcaccaattgtggaaggtttagaaaatcaggaagccttgcaattacaggtggcctgcatgcagtttataaatgcccttgtcacttctccttatgagcttgattttcgaatacatttaaggaatgaattcctccgttcaggactaaaaacaatgttaccagatctaaaagaaaaagagaatgatgagcttgatattcagttgaaagtatttgatgaaaacaaagaagatgacctaactgaattatcacaccgtctcaatgacattcgagcagaaatggatgatatgaatgaagtctaccatcttctatataatatgctgaaggacactgctgctgaaaattacttcttatctattctacaacattttttgcttatcagaaatgattattatatcaggccacaatattataaaataattgaggaatgtgtttcacagatagtgctacactgcagtggtatggatccagacttcaaatacaggcaaagattagacatcgatttaactcatctgatagattcttgtgtgaacaaggcgaaagttgaagaaagtgaacaaaaagctgcagagttttcaaagaagttcgatgaagaattcacagctcgacaggaagctcaagcagagcttcaaaaaagagatgagaaaatcaaagaacttgaagcagaaatccagcaacttcgaacccaggcacaagtactctcaagttcatcaggaattccaggtcctcctgcagcacctccattgccaggtgtagggccgcctccaccaccacccgcgccacctctacccggaggagctcctcttcctcctccaccacctcctttacctggaatgatggggataccaccaccacccccaccaccacttttatttgggggacctcctccaccaccaccccttggaggagttcctcctcccccaggaatatcacttaatctaccttatggaatgaagcagaaaaaaatgtataaacctgaagtgtccatgaagagaatcaattggtcaaagattgaacccacagaattatctgagaactgtttctggttaagagtcaaagaagacaagtttgagaatccagatctctttgccaaattggcattgaattttgctactcagataaaagttcaaaagaacgcagaagcattagaagaaaagaagactgggcctacaaagaagaaagtgaaagaactgagaattttggatcccaaaacagctcagaatctgtccatctttctgggatcatatcgcatgccatatgaagacataagaaacgttattctggaggttaatgaagacatgctgagtgaggctttaattcagaaccttgtgaaacatcttcctgagcagaagatactcaacgaattagcagagcttaagaatgaatatgatgacctctgtgagcctgaacaatttggagttgtgatgagctctgtgaaaatgttacagcctcgtctcagtagtatcctgttcaagctcacatttgaagaacacataaacaacatcaaaccaagcatcatagcagtaactcttgcctgtgaagaactgaagaaaagtgaaagctttaacagacttttagagttagttcttcttgttggaaactacatgaactcaggctcaagaaatgcccagtctttgggatttaagatcaacttcctttgtaagatcagagatactaaatcagcggatcaaaaaacaacccttttgcattttattgccgacatttgtgaggaaaaatatcgagatatcctaaaatttcctgaagaactggaacacgtagaaagtgcaagcaaagtttcagctcaaattctcaagagcaaccttgcatcaatggaacaacaaattgttcatctggaacgtgacatcaagaaattcccccaagcagaaaatcaacacgataagtttgtggaaaagatgaccagctttacaaagactgcccgagaacagtatgaaaaactctccaccatgcacaacaacatgatgaagctctatgagaatcttggagaatacttcatttttgactcaaagacagtgagcatagaagagttctttggtgatctcaacaacttccgaactttgtttttggaagcagtgagagaaaacaataagagaagagaaatggaagagaagaccaggagggcaaaacttgcaaaagagaaagctgaacaagaaaagttagaacgccagaagaaaaagaaacaactcattgatataaacaaagagggtgatgagactggtgtgatggataatcttctagaagccctacaatcaggtgcagcattcagagaccgtcgaaagcggattccaaggaatccagataacagacgagtacctttggaaaggtcacgctctcgccacaatggagctatctcatctaagtgattcctgatgccaaagaatatgaaaatatttaagtaaaaacaaaatgatgcattttgagaagaacaaagtgtgcactcagcggctggaaaggaaataagtgcatttctgcaaagatcaagataagctggatgaagtagtgtgcatttgtaatactattgcaagactcctcccacaattattctaatctgaacacagttatcaggattacaaaatgtgttccattttagtgtaaagatgtgtatcatttgtaattgtgtgtgacctgactgtgatgatggaagtgtaagaaattgaagagttctaaggctttcaaaaacactcagtcaaaaatttaaaatcttaaatgtgtaagtcacccccaccaaaaacaaaagagaagaaaaagaatagaaagaattatccagtgtcagcttccaatccctagtacatatataatagaaaagggccaagaaaaatatgcatcttgatttggagagaggctaatattatgcacactgtaagagaagccattttggaaattcacgaaagtactgctccaccccagttgagttatttagaattttatctcaagtgaaagctgatggattcatctgctttggctgaaattaaacttatcattagtctagctagcatttcagcatgatattgcaagcacttctcattgctaaaaataaataaaccaaagtttaaccgaatcagttagggaaagtgatttaaactttatttaaagaggtattttctaattatgcacagatatctactttatacaaatactttatatggctatttttgagaaaaccctcacattttaatgtttatgctagggatgaacctggaaaattctattacgtttatttagatttcaaaggcaaatattgattcctatgctctgtggtttatttcttttttctattgcttctttctcccttgagtcccttgaaggcagggaaatagacttctagaaaacctgagaggaaaaagaattctttttacaggaggcagcagaaaactgtctgaaaggtcaattgttttatctccctttccactctctttccaatttcactttggtggtctgaagaagaaaaagaaattttatgtatgtatgtgtaaatatgtgtatatatttctatctcttgctacaataattccaactaagtgaacttcttctcaattatcatcatacttacttaccttatattaacaaattaagatgatgctgccaaaacaagtctagcagggaaaacaggttctacatttttcttaaataaattagggagtaaaagttatacttaacttgtctgtctattattttaaaatatgcattgaaataatgtggtataacttctctggagtgcaattttaagtctaattcatgcagatgattgattgtgattattgtaagaaatttcttacatgtatatttcttatgttagaaaatactgtttctactcattcaaagcacattgtagatattcagagagaagaacaaatggctggcttggcaaatccccatctgagataaagtaaacaagtgaccagcagcccacagataattcctttatatagatgtataatgattcaaactgctgcctttgcctccagtgcatccttacttaggtattatacttctttaaaaagctctgaagctgctacaatagaaaaatcaaaaagggtaacagtatctgaaatttcacagtcctatccgatctgaaaacacacatacacaaatgcacacacatgcacacacacatttcagggacatagcagtaacactgttttttaacaacaacaaaagtttaggttctaatttatgtaaatacctagtatgtgtatttttgactttacaaagtctttcttttctgaaatcttcgtggtatggcttttttaattcttttgacagcttatcagtctgtaggagaatgatcttgaaatgttaaccctgactaaaatttgggagcatatgccttgctatattatcaagctggtcaaggtagaaatactgatatgtatcatcaccttttccagatacaaacttgccttattttctagtttgtgaacaagaacgaatgaagtactattattgataacttacttatatatttttatttagagcaatcccacatgcttttcacaaacattaaaaaaaaaaacctttcagggtctttcatgaagttccaatagttgagtgagttaaaaggtttgtttcccagatttgtaatggtcctgctctagccatttgcagttttgttttagatgattggaaagtatatcaccaaaaaaagtatatagtgacatttttagtatgaaaccaaattacactaaggtcttttgttggccatattactgccacacatgagaagcaccatttatgcagattttcttcagaatatttttaaaaggtacagaatccttaaaatattaacaactaattgcatccattatctcctttggctgctgtaacaaattaccaccaataatatgatggcttaacacaacagaaacttatttgcttacatttttgaagggcagcaaagccatggctccctccagaggctctagaggagaatctttccttgccacgtccaccttttggtggctattggcattttttggcttatggccacatttctctttctgctgtgtcttcacatcaccctcctctgtatacctaatctgcctctgcctctgtttaataaggatccttatgatgacttttagggactacccagattactccaggataatctcctcacctcatgagtcttaacttaattacatctgcaaggcccccttctccaaataagataaattcatggttttggggattaggatgtggctatgtcttttaggaagccactcttagcccaccagagtctgccctttggcccaaaatttatgtctgtctcatgtgtaaaagacattcatcccatcctaacattaccaaaagtctcaacccattatatcaatcctaagtccaaaatttcattcaaatatcatcggttcaaaagttccaaagcttatcatttagatcatctaaatcaggtatgagtgaaactctgggtatggtctttcctgaggccaaatcctcttcctctgagaaccagtgaaacagaaaagttaatctgctttcaaattacaatggtgggaacaggcataggataacagttacagacatttctgtctcaaaaaggagagaatggaaattggaatggagtctcctgtcccaatcattttcaaaatctagccaggcaaatttctgttctatttcaaggcctggcagtaatcctctttctcagggctccaccctttgggcctgtagctcttctttcttggactatggattgggcctctgcctctgtgcctatgggttgcacttcttcctctgttcccacacttgggcctctgcctctgtacctgcagctctgctctcgggatggtgcttcctttatcttgaagggtggcacatgtttgcagctgagaagttttatcaacgggtttcctacctgtagaattctggcagtctcacaatcttctttcatttttttctgtctctgtcccttttaggcccagttggaagtgtttctgatggtagaacattctcaaaaatcttgtgggtcttctacgtatgtcacattgattcacacattcagaaaagagggtcctcacagatttttcctgaacaaccccatctctattcttggcttctgttgaaacagtcaaataaatccacaagttaatgcctaacctcttcagcactagccaaaggttgtcaagacacacccttgggcttatctacagagcacacttttctaacagtgaatctcctaattttagcatctttttttttttttttacaatcattccagattgtgaattcaggctcagaattacccagtcatcagatactgattccttttgtccacttatatagttattttctctttaaaaaaaaattttttttaatgtattagagatgaggtctcactctgtcacccaggctgcagtgtagtggtgcaaacatagctccctgtaacctcaaactcccaggctcaagggatcctcctgcatcagccttccaagtagctgggtctacaggtgcataccaccatgcctggctaattttttgcatttttttgtagagacttgatcttgctatgttgtccaggctgctctcgaactcctagcctcaagcaatccacccatcttggcctcctaaagtgccggattacaggtgtaagccaccatgcccagcctgttttgtcaatgtatctgttttctgtcttattttactataagcactaagaagaaactaagctatatctctaacactagacttgaaaatttcctcagctaaacatccaagttcatcatttattcaacttttcacactactgtagtagacaatttagatagataaactttttgccactatatgacaaggattccctttcttccattttccaataaaatcttcatttccttctaaaccatcactagaaatgcctttaacattcatactactaccatctggtaaaggcaatctagttttttctatcacatccaccaaaattcttctagtctctacccattatccaattccaaagcctttttcacattttaagacatttgttacagaagtacccaatccgtcccagttccacaatctgcattagattcccatggctgctgtaacaaattaccctctagcccagtggcttaaaacaatagaaatttattatcttgttgttttggaggccaaaagtccaaaattgaggggttggcagggctgaacgtcttctggagactctaagggaaacactcttcccgtgtcttccagtttcttgtggctgccatcattccttggtttgtgactgcatctccctctcctctgtcttcacatcacttcccctctgtatatataatctacctctgcctctctcttataaggacacttgtgacgggacttagggcccatccagattacccatgataattcccttattccaagattcttaattatatctgaaaggaccttttttccaaataaggtactatcacaggttccagggagtaggatattgaatatcttttttggggagggggcaccatgcagctcactacactattcattgcacacaaatgaatttttcactttttaagatgcattcttggtgctcaaaccagatcgaagtttgtctctaaaagctattgtctgcacaggctgctgcatgctctgttgttaaatggatggacaggctattctaaattttggttgatacttttgctactatgggcaattaacttgaaaaaaataatcgatcccaactctgtgctctgatgtacctcttctgccccttttatgacacctttgaccaaatgccttctatggttcacagtgcaggcacaaaactacctctgatacagaagggttctttacaagcttattttacataccgtgaatccctcacctaaagggagaggtgaaagcaaagactgctttgaatgggtattgagggagattgtgtccataccaagccaccctgaagaagtatttcacttgcagtagaactgtggatttgtgctgtcatttcaccttggaataaacacctatctctaagcaggaccaagaatgacttgcaatctatatgtaatggctacttacttattcaataaagttaagatatacgt

SEQ ID NO: 29759 - DNA, 9175 bp, Homo Sapiens
tatgtttagtcccatatgctcttcctgaatcttgccactgcccatcaagagatagaatacatttcccctccccttgaacatggaagcaaccaagctttaagaagcacagctttggagacactccatgagtctgcactgctttcaggggaactagcacttaagaccttgtgtaacaaaatggacactggggacacagctctaggacaaaaagctacctcaaggtctggagaaactgataaagcatcaggtagatggagacaggaacaatcagctgttattaagatgagcacttttggcagtcatgaaggacagcggcaaccacaaatagagcctgagcaaatcggaaacacagcatcagcacaactgtttggttctgggaaactggcctcccctagtgaagtggtgcagcaagtcgcagagaagcaatatccaccgcatcgtccgagtccttactcatgccaacactcactctctttccctcagcactcattgccacagggggtcatgcacagcaccaagccacatcagagcctcgaaggtcctccgtggcttttccctggccctttgccatccgttgcctctgaggacttatttccttttcctatacatggccacagtggtggttatcctagaaaaaagatttcaagtctgaaccctgcttatagccaatactcccagaaaagtattgaacaggcagaagaggctcacaagaaagagcacaaacccaaaaagcctggcaagtacatttgcccttactgcagcagagcgtgtgccaaacctagtgtactgaaaaaacacatcaggtcccatactggggagcggccatatccatgtataccttgtggtttctctttcaagacaaagagcaatttgtacaagcacaggaagtcacatgcccatgcaattaaggcaggattagtacctttcacagagtcagctgtatctaaattggacctagaggctggttttattgatgtagaagcagaaatacattcagatggtgaacagagtacagacacagatgaggagagttctttatttgccgaggcttctgacaaaatgagtcctggtccacccatcccactggacattgccagcagaggcggctatcatgggtcattggaagaatcattgggaggtccaatgaaggtgccgattttgattatccctaaaagtgggattcctctccctaatgaaagctctcagtatattggccctgatatgctaccaaatccatctttaaatactaaggctgatgattcgcacacagtcaaacagaaacttgcactaagactgtcagagaaaaaaggacaagattctgagccatcgctcaaccttctgagcccgcacagtaaaggaagcactgattctggttacttttctcgctcagaaagtgctgagcagcaaataagccctcccaacacaaatgcaaagtcttatgaagaaatcatctttggaaaatactgtcggcttagtccgagaaatgcactcagtgttacaaccacaagtcaggagcgtgccgcaatgggtaggaagggcataatggaaccattacctcacgttaacaccaggttagatgtcaagatgtttgaagatcctgtttcacagctgatcccaagcaagggagatgtcgaccccagtcaaacgagcatgctgaaatccactaagttcaacagtgagtccagacaaccccagattattccatcatctatcaggaacgaaggaaaactttatccagcaaacttccaaggcagcaacccggttctcttagaagctcctgtagactcttcaccccttattagaagcaactcagtgccaacttcttcagcaactaatctaactattcctccttctttgagaggaagtcactcatttgatgaaaggatgactggttccgacgatgtattctatccagggaccgtgggcataccccctcagcgcatgctaagaagacaagcggcatttgagctgccttcggtacaggagggccacgtggaagtcgagcaccatggcaggatgttgaagggtatcagcagttcatccctgaaggaaaagaaattgtctcctggggacagggttgggtatgactatgatgtctgtcggaaaccctataagaagtgggaggactctgaaacaccaaagcaaaactacagggacatttcctgcttgagttctttaaagcatggtggagaatatttcatggatcccgtggtgccattgcagggagtaccaagcatgtttggaactacctgtgaaaacaggaaacgccggaaagagaagagcgtaggggatgaagaggacacgcccatgatctgcagcagcattgtaagcactcctgtgggcatcatggcttccgattatgaccccaaactgcagatgcaggaaggagtcaggagtggatttgccatggctggacacgaaaacctttctcatggtcacacggaacgctttgacccatgtcggccccaactgcagcctggaagtccatctcttgtgtcagaggagtcaccttcagccattgattcagacaagatgtcagacctagggggcaggaaacctcctggaaatgtgatttctgtgattcagcacaccaactcactgagccgacccaattcatttgaaaggtctgagtcagccgaacttgtggcttgcacacaggataaagccccttccccttcagagacttgtgacagtgagatttcagaagccccagtgagtcctgagtgggctccacctggggatggtgcagaaagtggggggaaaccctctccatctcagcaggtgcagcagcagtcctatcacacacagcccaggctagttcggcaacacaacatccaggttcctgagattcgagtgaccgaggagcctgataaacctgagaaggagaaggaagcccagagcaaagagccagagaagcctgtggaagaatttcagtggccccagagaagtgagaccctttcccagctccccgcggagaagttgcctcccaaaaagaagcgtctgcgacttgcagatatggagcactcctcaggggagtccagctttgaatccacaggcacaggcctctcccgcagccccagccaagaaagcaacttgtcccacagctccagtttctccatgtcttttgaaagagaagaaaccagtaagctttctgcacttcctaagcaggatgagtttgggaagcattcagagtttctgactgtccctgctggttcatactcattgtctgtcccaggccatcaccaccagaaagagatgcgacgctgctcatcagagcagatgccttgtcctcacccagcggaagtcccagaagttcggagcaaatcatttgattatgggaatctgtcccatgctcctgtgtcgggagcagcagcctccacggtatcaccgtccagggagaggaagaaatgctttctggtgcggcaagcttccttcagtggctccccagaaatctcccagggcgaggttggcatggatcagagcgtgaagcaagagcagctggagcacctgcatgctggcctccggtccgggtggcaccatggcccgcctgctgtgctgcctcctcttcagcaagaggacccagggaagcaggtggcgggtccttgtcccccgctgagctcggggccactgcacctggcccagccacagatcatgcacatggacagtcaggaatctttgagaaatcccttgatccaaccaacatcctatatgacaagcaagcacttacctgaacagccacacttatttccacatcaagagacaattccattttctccaatccagaatgccttgtttcagtttcagtatcctacagtttgtatggttcatttaccagctcagcagcctccctggtggcaggcacatttcccacatccctttgctcagcaccctcagaagagctatggcaagccctcttttcagacagaaatccattcgagctatcccttagagcatgtggcagagcacactggaaagaaacctgctgagtatgcacacacgaaagagcagacctacccatgttattcaggagcatcagggctacacccaaagaaccttcttccaaagtttccatcagaccagagcagtaagtcaactgaaacgccctctgagcaggttcttcaagaagattttgcctcggcaaatgctgggtctttgcagtccctcccaggaacagtggttcctgttcggatccagacgcacgtaccatcctatggaagtgtcatgtacacaagcatttctcagatacttgggcagaatagccctgccattgtcatatgcaaagtcgatgagaatatgacccaaaggacactggtcaccaacgcagccatgcaagggataggattcaacattgcccaggtgctggggcagcatgcgggcttggagaagtaccccatttggaaagcacctcagactttgcccctcggcttagaatcctccatccccttgtgtttaccttccacctctgacagcgtggccaccctgggaggtagcaagcgaatgctttctccagccagtagcttggagctcttcatggaaaccaagcagcagaaaagggtcaaagaagaaaagatgtacggacagattgtggaggagcttagtgctgtggagctgaccaactcagacatcaaaaaggacctctcccgcccccagaaaccccagctggttcgacaaggatgtgcttctgagccaaaagatggcttgcagtcagggtcatcttccttctcctcgctgtcgccctcctcatctcaagactatccttctgttagcccgtcttccagggagccattcccgcccagcaaggagatgctttccggttcccgggcaccacttccggggcagaagtccagtgggccttctgaaagcaaagaatcttcagatgaattagatatcgatgagacggcatcggacatgagcatgagcccacagagttcttcattaccagcaggagatggtcagctggaagaggaagggaagggccacaagcggcctgttggcatgctggtccgcatggcctctgcccccagcgggaacgtggcagactcaactcttcttctcacggacatggcagatttccagcagattcttcagttccccagtctgcggacaacaactactgtgagttggtgcttcttgaattatacaaaacccaattatgtgcaacaggccaccttcaaatcctcggtttatgcttcatggtgcattagttcctgtaatccaaacccatcaggattgaacaccaagaccacgctggctcttctgaggtccaagcaaaaaatcactgcagaaatttatactctggctgctatgcataggcctggaaccggcaagcttacatcatcaagtgcttggaagcagtttactcagatgaaacctgatgcgtcctttttatttggcagcaaactagaaaggaaactagtgggaaatatcttaaaggaaagagggaaaggagatattcatggagataaagatattggatccaaacaaactgagccaatccgaattaaaatatttgaaggagggtacaaatcgaatgaagattatgtatatgtcagaggacgtggccggggaaagtacatttgtgaagaatgtgggattcgctgtaagaagccaagcatgctcaaaaaacacatccgtacccatactgatgttcggccttatgtatgcaagttatgtaactttgccttcaaaacgaaaggaaacctaacgaagcatatgaaatctaaagcacacatgaaaaaatgcctggaattgggagtctcaatgacatcggtggatgatacagaaactgaggaagcagaaaatttggaagatttgcacaaagcagcagagaagcatagcatgtccagcatttcaactgatcatcagttctccgatgctgaggaatcagatggtgaggatggagatgataatgatgatgatgatgaagatgaagatgactttgacgaccagggagatttaacaccaaaaacaagatcaagaagcaccagtcctcagcctcctagattctcctccttgcctgtgaatgttggcgccgtaccccacggggttccttcagatagttccctgggacattcttcgttgatcagctatttggttactttgccaagtattcgagttactcagcttatgacacccagtgattcatgtgaagatacccagatgacagaataccagaggctattccagagcaaaagtacggactcagaaccagacaaagacagattggacatacctagttgtatggatgaggagtgcatgctaccttcagagccaagctcctctcccagggacttctcaccctcaagccaccattcctctccaggatatgattcttcaccctgtcgagataattcaccaaagaggtatctgatacccaaaggagatttatctcccaggagacatttatcacctaggagagatctgtcacccatgagacatctttcaccaacaaaggaagctgcattgagaagagagatgtcccaaagagatgtttcaccaagaaggcatttgtctccaaggaggccagtgtctcctgggaaagatatcacagcaagaagagacctctcccctagaagagagagaagatacatgaccacaataagagcgccatctcccagaagggctttataccataacccaccattgtccatgggacagtatttgcaagcagagccaattgtattggggcctcctaatttaagaagaggattacctcaggttccttacttcagtctctatggagaccaagaaggtgcttatgaacatccaggctccagccttttccctgagggtcctaatgactatgtcttcagtcatcttccactccactctcagcaacaagtgcgagcccctatccccatggtgcccgttggtgggatccagatggttcactccatgccgccagccctttccagtttacatccttcacccacattgcccctgccaatggagggctttgaggagaagaaaggcgcgtcaggggagtccttctccaaggacccctatgtgctttctaagcagcatgagaagcgaggtcctcacgctttgcagtcatctggtccgcctagcactccctcctctcctcggctgttgatgaaacagagcacttcggaagacagcctaaacgcaacagagcgggaacaggaggaaaatatacagacttgtacaaaagccattgcctctctccggattgccacggaagaggcagctctgctcgggccagatcagccagcgcgggtgcaggagccccaccagaaccccctgggaagtgcacatgttagcattagacactttagtagacctgagccaggtcagccctgtacctcagccacccaccctgacttgcatgatggtgaaaaggacaattttggtacatcacagactccattagctcactccacgttttacagcaagagttgtgtggatgacaagcagttggactttcacagcagcaaggaattatcttcaagcacagaggaaagcaaagatccttcatcagaaaagagtcagctacattgatctatgatgcatggagactttcatttccacattttcccatttttttgtttttgtttttctagaaatggaggtaatccagtttatagcatgcctgtcctaagttacagtagtttgctattatatatacttttgttatatcaaaagaattaggtaaattaacaagtcatcatgagcctgaccaaaacaaaatttgaaattaacctattgggtctggtacttttaaaattgtacagatgtttgtgccttttctttactttgcttatattcttataagcattttttagcagtaatttgtacatattttagaatttgtgtatctgctttgtaataaatgtaatttctttccttttttggacacttggatctaaatgatgtaaagcaaaacagcatcaatatatatgtgaggttgcactaaaacatatttttatatgattaaaactgaacagcttttatgtacagctctgattctgtaatactaatatttatttactttgtttcataaattgtacattttttcttaatgttgtggattgcttttctatgtgaagcatgggatttactgttgcgtaactagaacaaaaatgtacattgtaaacaagatatttaaactagagtatcttattctgcacttatgcattagttaaaaaaagataaaggatgtatcagtcagttcttaactcttgtatatttttttgtctcttgtttgctggattgactataacttaagtgctgattgtgattttaaaatgatagtaccgtaaagcattaaagtaaacaatgtgctattgtgagttttttcaaagctttataaatcagttataaataatattaaaagtatttggtcttatgtgaacatgttgatctatatactcatctaaaaatatgggaaaacattccaccccatgtaaatatgtacaagtgcatcactggtacaattttatgtaactcagttggacactaggttgccacagacctatgctaggtgtctttaaaaaattaaggtgacaaagcacatgggactgtgtagagcttggttatcggccggcccggtggcttggcaggcagtctgtcgctgctcatggagaagacctgggcttagcaatctccttagttcttgctacacaggatggtgactggaactaaggctacacagagggtcgcacttggactctgagggttgggtgtggaagggggaaaaggggatggagacctgctccccagctcttcctgtcagccggtttacatgggaacagggttaacatctgtgttaggggaggtcaccttaccctttttcataggggaagagtgtcacactcctggctatctcagggggaatggggaaaagaatctttcaagggcaaagaactcgtgggaggatgtctgttgtatgtaatactcacaatggcttttggttagtgttgaaggtgggaagagcatttgtaggtccagaagagtgaaagagagggaggggtgcagcaacatgtgcacaggcacgcacatgtgtgcacgcacacatacaatctgggttatctttgtgctatatagtggattataattctgtgaaaccaagtttgtatattgaattacattaaggagtgttctttaaaaagagaaataaatatacaattacatgcttaaaaaaaaaaaaaaaaaaaaa

SEQ ID NO: 29760 - DNA, 1791 bp, Homo Sapiens
tcttttgattaaagcccaaattgtcattgggcagaagcaatcatgtgacagccaattcggtccaatttcaaccttgtctccatgaattcaatagtttaatagtagcgcggtccccatacggctgtaatcagtgaattagaaaaaaaacaccctagcagcgatattctatgatagattttttttcctctgcgctcgcctttttcctaggccttgcccccccaaagcccctccaaaagagggaactttttctctgagggggctccaaggagaaggccatgaattacgaatttgagcgagagattggttttatcaatagccagccgtcgctcgctgagtgcctgacatcttttccccctgtcgctgatacatttcaaagttcatcaatcaagacctcgacgctttcacactcgacactgattcctcctccttttgagcagaccattcccagcctgaaccccggcagtcaccctcgccacggcgctggcggccgccccaagccgagccccgcgggcagccgcggcagcccggtgcccgccggcgccctgcagccgcccgagtacccctggatgaaggagaagaaggcggccaagaaaaccgcacttctgccggccgccgccgccgccgccaccgccgcagccaccggccctgcttgcctcagccacaaagaatccctggaaatcgccgatggcagcggcgggggatcgcggcgcctgagaactgcttacaccaacacacagcttctagagctggaaaaagaatttcatttcaacaagtacctttgcagaccccgaagggtggagattgcagcgctgctggatttgactgagagacaagtgaaagtgtggtttcagaaccggaggatgaagcacaagaggcagacccagtgcaaggaaaaccaaaacagcgaagggaaatgtaaaagccttgaggactccgagaaagtagaggaggacgaggaagagaagacgctctttgagcaagcccttagcgtctctggggcccttctggagagggaaggctacacttttcagcaaaatgccctctctcagcagcaggctcccaatggacacaatggcgactcccaaagtttcccagtctcgcctttaaccagcaatgagaaaaatctgaaacattttcagcaccagtcacccactgttcccaactgcttgtcaacaatgggccagaactgtggagctggcctaaacaatgacagtcctgaggcccttgaggtcccctctttgcaggactttagcgttttctccacagattcctgcctgcagctttcagatgcagtttcacccagtttgccaggttccctcgacagtcccgtagatatttcagctgacagcttagacttttttacagacacactcaccacaatcgacttgcagcatctgaattactaaaaacattaaagcaaaacaaagcatcaccaaacaaaaactcctttgaccaggtggttttgccttcttttatttgggagtttattttttattttcttcttgacctaccccttccctcctttaagtgttgaggattttctgtttagtgattccctgacccagtttcaaacagagccatcttttacagattattttggagttttagttgttttaaacctaactcaacaaccctttatgtgattcctgagagcagtatgaggcctgcaagaaagtgatcatataattgtatcttcactttctttttatttttgtattacattgggatgcattgtcatgcatattttttgtagaataaattctcctttgctataagtaaaaaaaaaaaaaa

SEQ ID NO: 29761 - DNA, 13302 bp, Homo Sapiens
gaagcgcctgtgctctgccgagactgccgtgcccattgctcgcctcggtcgccgccgctttagccgcctccgggggagcggccgcctattgtctttctccgcggcgaaggtgaagagttgtcccagctcggcccgcgggggagccccgggagccgcacgtgtcctgggtcatgaaacttaatccacagcaagctcccttatatggtgattgtgttgttacagtgctgcttgctgaagaggacaaagctgaagatgatgtagtgttttacttggtatttttgggttccaccctccgtcactgtacaagtactcggaaggtcagttctgatacattggagaccattgctcctggtcatgattgttgtgaaacagtgaaggtgcagctctgtgcttccaaagagggccttcccgtgtttgtggtggctgaagaagactttcatttcgtccaggatgaagcgtatgatgcagctcaattcctagcaaccagtgctggaaatcagcaggctttgaactttacccgttttcttgaccagtcaggacccccatctggggatgtgaattcccttgataagaagttggtgctggcattcaggcacctgaagctgcccacggagtggaatgtattggggacagatcagagtttgcatgatgctggcccgcgagagacattgatgcattttgctgtgcggctgggactgctgaggttgacgtggttcctgttgcagaagccaggtggccgcggagctctcagtatccacaaccaggaaggggcgacgcctgtgagcttggccttggagcgaggctatcacaagctgcaccagcttctaaccgaggagaatgctggagaaccagactcctggagcagtttatcctatgaaataccgtatggagactgttctgtgaggcatcatcgagagttggacatctatacattaacctctgagtctgattcacatcatgaacacccatttcctggagacggttgcactggaccaatttttaaacttatgaacatccaacagcaactaatgaaaacaaacctcaagcagatggacagtcttatgcccttaatgatgacagcacaggatccttccagtgccccagagacagatggccagtttcttccctgtgcaccggagcccacggaccctcagcgactttcttcttctgaagagactgagagcactcagtgctgcccagggagccctgttgcacagactgaaagtccctgtgatttgtcaagcatagttgaggaggagaatacagaccgttcctgtaggaagaaaaataaaggcgtggaaagaaaaggggaagaggtggagccagcacctattgtggactctggaactgtatctgatcaagacagctgccttcagagcttgcctgattgtggagtaaagggcacggaaggcctttcgtcctgtggaaacagaaatgaagaaactggaacaaaatcttctggaatgcccacagaccaggagtccctgagcagtggagatgctgtgcttcagagagacttggtcatggagccaggcacagcccagtattcctctggaggtgaactgggaggcatttcaacaacaaatgtcagtaccccagacactgcaggggaaatggaacatgggctcatgaacccagatgccactgtttggaagaatgtgcttcagggaggggaaagtacaaaggaaagatttgagaactctaatattggcacagctggagcctctgacgtgcacgtcacaagtaagcctgtggataaaatcagtgttccaaactgtgcccctgctgccagttccctggatggtaacaaacctgctgagtcttcacttgcatttagtaatgaagaaacctccactgaaaaaacagcagaaacggaaacttcacgaagtcgtgaggagagtgctgatgctccagtagatcagaattctgtggtgattccagctgctgcaaaagacaagatttcagatggattagaaccttatactctcttagcagcaggcataggtgaggcaatgtcaccctcagatttagcccttcttgggctggaagaagatgtaatgccacaccagaactcagaaacaaattcatctcatgctcaaagccaaaagggcaaatcctcacccatttgttctacaactggagacgataaactttgtgcagactctgcatgtcaacagaacacagtgacttctagtggcgatttggttgcaaaactgtgtgataacatagttagcgagtccgaaagcaccacagcaaggcaacccagctcacaagatccacccgatgcctcccactgtgaagacccacaggctcatacagtcacctctgaccctgtaagggatacccaggaacgtgcggatttttgtcctttcaaagtggtggataacaaaggccaacgaaaagatgtgaaactagataaacctttaacaaatatgcttgaggtggtttcacatccacatccagttgtccctaaaatggagaaagaactggtgccagaccaggcagtaatatcagacagtactttctctctggcaaacagtccaggcagtgaatcagtaaccaaggatgacgcactttcttttgtcccctcccagaaagaaaagggaacagcaactcctgaactacatacagctacagattatagagatggcccagatggaaattcgaatgagcctgatacgcggccactagaagacagggcagtaggcctgtccacatcctccactgctgcagagcttcagcacgggatggggaataccagtctcacaggacttggtggagagcatgagggtcccgcccctccagcaatcccagaagctctgaatatcaaggggaacactgactcttccctgcaaagtgtgggtaaggccactttggctttagattcagttttgactgaagaaggaaaacttctggtggtttcagaaagctctgcagctcaggaacaagataaggataaagcggtgacctgttcctctattaaggaaaatgctctctcttcaggaactttgcaggaagagcagagaacaccacctcctggacaagatactcaacaatttcatgaaaaatcaatctcagctgactgtgccaaggacaaagcacttcagctaagtaattcaccgggtgcatcctctgcctttcttaaggcagaaactgaacataacaaggaagtggccccacaagtctcactgctgactcaaggtggggctgcccagagcctggtgccaccaggagcaagtctggccacagagtcaaggcaggaagccttgggggcagagcacaacagctccgctctgttgccatgtctgttgccagatgggtctgatgggtccgatgctcttaactgcagtcagccttctcctctggatgttggagtgaagaacactcaatcccagggaaaaactagtgcctgtgaggtgagtggagatgtgacggtggatgttacaggggttaatgctctacaaggtatggctgagcccagaagagagaatatatcacacaacacccaagacatcctgattccaaacgtcttgttgagccaagagaagaatgccgttctaggtttgccagtggctctacaggacaaagctgtgactgacccacagggagttggaaccccagagatgatacctcttgattgggagaaagggaagctggagggagcagaccacagctgtaccatgggtgacgctgaggaagcccaaatagacgatgaagcacatcctgtcctactgcagcctgttgccaaggagctccccacagacatggagctctcagcccatgatgatggggccccagctggtgtgagggaagtcatgcgagccccgccttcaggcagggaaaggagcactccctctctaccttgcatggtctctgcccaggacgcacctctgcctaagggggcagacttgatagaggaggctgccagccgtatagtggatgctgtcatcgaacaagtcaaggccgctggagcactgcttactgagggggaggcctgtcacatgtcactgtccagccctgagttgggtcctctcactaaaggactagagagtgcttttacagaaaaagtgagtactttcccacctggggagagcctaccaatgggcagtactcctgaggaagccacggggagccttgcaggatgttttgctggaagggaggagccagagaagatcattttacctgtccaggggcctgagccagcagcagaaatgccagacgtgaaagctgaagatgaagtggattttagagcaagttcaatttctgaagaagtggctgtagggagcatagctgctacactgaagatgaagcaaggcccaatgacccaggcgataaaccgagaaaactggtgtacaatagagccatgccctgatgcagcatctcttctggcttccaagcagagcccagaatgtgagaacttcctggatgttggactgggcagagagtgtacctcaaaacaaggtgtacttaaaagagaatctgggagtgattctgacctctttcactcacccagtgatgacatggacagcatcatcttcccaaagccagaggaagagcatttggcctgtgatatcaccggatccagttcatccaccgatgacacggcttcactggaccgacattcttctcatggcagtgatgtgtctctctcccagattttaaagccaaacaggtcaagagatcggcaaagccttgatggattctacagccatgggatgggagctgagggtcgagaaagtgagagtgagcctgctgacccaggcgacgtggaggaggaggagatggacagtatcactgaagtgcctgcaaactgctctgtcctaaggagctccatgcgctctctttctcccttccggaggcacagctgggggcctgggaaaaatgcagccagcgatgcagaaatgaaccaccggagtatgagctggtgcccctctggtgtgcagtactctgctggcctgagtgctgactttaattacagaagtttcagtctagaaggcttgacaggaggagctggtgtcggaaacaagccatcctcatctctagaagtaagctctgcaaatgccgaagagctcagacacccattcagtggtgaggaacgggttgactctttggtgtcactttcagaagaggatctggagtcagaccagagagaacataggatgtttgatcagcagatatgtcacagatctaagcagcagggatttaattactgtacatcagccatttcctctccattgacaaaatccatctcattaatgacaatcagccatcctggattggacaattcacggcccttccacagtaccttccacaataccagtgctaatctgactgagagtataacagaagagaactataatttcctgccacatagcccctccaagaaagattctgaatggaagagtggaacaaaagtcagtcgtacattcagctacatcaagaataaaatgtctagcagcaagaagagcaaagaaaaggaaaaagaaaaagataagattaaggagaaggagaaagattctaaagacaaggagaaagataagaagactgtcaacgggcacactttcagttccattcctgttgtgggtcccatcagctgtagccagtgtatgaagcccttcaccaacaaagatgcctatacttgtgcaaattgcagtgcttttgtccacaaaggctgccgagaaagtctagcctcctgtgcaaaggtcaaaatgaagcagcccaaagggagccttcaggcacatgacacatcatcactgcccacggtcattatgagaaacaagccctcacagcccaaggagcgtcctcggtccgcagtcctcctggtggatgaaaccgctaccaccccaatatttgccaatagacgatcccagcagagtgtctcgctctccaaaagtgtctccatacagaacattactggagttggcaatgatgagaacatgtcaaacacctggaaattcctgtctcattcaacagactcactaaataaaatcagcaaggtcaatgagtcaacagaatcacttactgatgagggagtaggtacagacatgaatgaaggacaactactgggagactttgagattgagtccaaacagctggaagcagagtcttggagtcggataatagacagcaagtttctaaaacagcaaaagaaagatgtggtcaaacggcaagaagtaatatatgagttgatgcagacagagtttcatcatgtccgcactctcaagatcatgagtggtgtgtacagccaggggatgatggcggatctgctttttgagcagcagatggtagaaaagctgttcccctgtttggatgagctgatcagtatccatagccaattcttccagaggattctggagcggaagaaggagtctctggtggataaaagtgaaaagaactttctcatcaagaggataggggatgtgcttgtaaatcagttttcaggtgagaatgcagaacgtttaaagaagacatatggcaagttttgtgggcaacataaccagtctgtaaactacttcaaagacctttatgccaaggataagcgttttcaagcctttgtaaagaagaagatgagcagttcagttgttagaaggcttggaattccagagtgcatattgcttgtaactcagcggattaccaagtacccagttttattccaaagaatattgcagtgtaccaaagacaatgaagtggagcaggaagatctagcacagtccttgagcctggtgaaggatgtgattggagctgtagacagcaaagtggcaagttatgaaaagaaagtgcgtctcaatgagatttatacaaagacagatagcaagtcaatcatgaggatgaagagtggtcagatgtttgccaaggaagatttgaaacggaagaagcttgtacgtgatgggagtgtgtttctgaagaatgcagcaggaaggttgaaagaggttcaagcagttcttctcactgacattttagttttccttcaagaaaaagaccagaagtacatctttgcatcattggaccagaagtcaacagtgatctctttaaagaagctgattgtgagagaagtggcacatgaggagaaaggtttattcctgatcagcatggggatgacagatccagagatggtagaagtccatgccagctccaaagaggaacgaaacagctggattcagatcattcaggacacaatcaacaccctgaacagagatgaagatgaaggaattcctagtgagaatgaggaagaaaagaaaatgttggacaccagagcccgagaattaaaagaacaacttcaccagaaggaccaaaaaatcctactcttgttggaagagaaggagatgattttccgggacatggctgagtgcagcacccctctcccagaggattgctccccaacacatagccctagagttctcttccgctccaacacagaagaggctctcaaaggaggacctttaatgaaaagtgcaataaatgaggtggagatccttcagggtttggtgagtggaaatctgggaggcacacttgggccgactgtcagcagccccattgagcaagatgtggtcggtcccgtttccctgccccggagagcagagacctttggaggatttgacagccatcagatgaatgcttcaaaaggaggcgagaaggaagagggagatgatggccaagatcttaggagaacggaatcagatagtggcctaaaaaagggtggaaatgctaacctggtatttatgcttaaaagaaacagtgagcaggttgtccagagcgttgttcatctctacgagctcctcagcgctctgcagggtgtggtgctgcagcaggacagctacattgaggaccagaaactggtgctgagcgagagggcgctcactcgcagcttgtcccgcccgagctccctcattgagcaggagaagcagcgcagcctggagaagcagcgccaggacctggccaacctgcagaagcagcaggcccagtacctcgaggagaagcgcaggcgcgagcgtgagtgggaagctcgtgagagggagctgcgggagcgggaggccctcctggcccagcgcgaggaggaggtgcagcaggggcagcaggacctggaaaaggagcgggaggagctccagcagaagaagggcacataccagtatgacctggagcgactgcgtgctgcccagaaacagcttgagagggaacaggagcagctgcgccgggaggcagagcggctcagccagcggcagacagaacgggacctgtgtcaggtttcccatccacataccaagctgatgaggatcccatcgttcttccccagtcctgaggagcccccctcgccatctgcaccttccatagccaaatcagggtcattggactcagaactttcagtgtccccaaaaaggaacagcatctctcggacacacaaagataaggggccttttcacatactgagttcaaccagccagacaaacaaaggaccagaagggcagagccaggcccctgcgtccacctctgcctctacccgcctgtttgggttaacaaagccaaaggaaaagaaggagaaaaaaaagaagaacaaaaccagccgctctcagcccggtgatggtcccgcgtcagaagtatcagcagagggtgaagagatcttctgctgaccctcttcctctctgctgaggcagctgcctcctgatcctggccagcccacctctcctgctgtccccgcgtgcacaagtctcttacactggacgcccactgctcctcagcgtccagtcctcctgggcggccccaggtcctggacaataagcaacagatgatattgagtgtcgggtggggaaggaggcccagactctgcttcggccatgatttgtgactgcccaggactctcaggttgggctggccctactcaggattacactgaaagtaatggcctcgtaagtacaggtgatggttttggacacgtcaggaattcctaaaggctgaaagagtgtatccaagtaaggtctgaacctccgaatgccttttatttgggggaacacaaaaccaaacagcagatgttttggacttgatctgtgtacgtacatggggacctgtctgcatatacacacggggaatgccagaagaaggcccagtctgcaccaggcgtctggtcaacttagcacaagggcagtgcctggacggacccggagcccccgcatatcagcagttcacccagtactcctcagagactggtttccctctaaacccatcccgggcacataccacccgtgttttgcatgtatttctcatttcattttagggatgacaaacatttgtgaaaccagtgagagaaggcttgatgtgtataaaagacgtgatgtgcaccacctcgatctcggtgtttcaggcactaaagcaacaaaacaacccatagtatctcattctgtcatcagatccagaagaaatatcctggttttccagcatgtttacccacatgttttggccatggataaagtgaagaggcctactcaccattatccctgcagcgtgacaccttttgattgtcactgaccactcagaaggggccacggcctcctggctgtgttcctgagcccccgtcgtgcctctcccagacagcagctgtctggcccttgctgggtgagggcacaccactgccaggggtcagcctcgcacccaggccaggcagaagctgtgctctgaagctaggacagctggctgagaagtgggttcaggcgaagggtgaagccatgtgtagcagttcctgccagtgcagatctggagaggagctggcccggaaggcgtggttgtgaaagcgcccttcttatgttaggaggccttggcaaaattggatttcttcaaaaatacatgtaaaggtctgttgttgaattgtactctgcccctggaagcagatacagatggctgcctgctgctcggctttgcttttgcttttcccaccgtgttttcatctttgttcacttgaggctttccccagctggtgtgtgcaggacagttcatggtaatgttgccctctgaggccccgtacaccagaagggaggccctggaaaattttgtgcttccaacgtggccttcaattcttgcttttttgcccctcggaagcatggggcttttgagcacacttaaaaaaagaaaaatctgtaacttggtgcttattgatgaattgcaagctggccttgcagatggagatatttatctttcagtttatttgaaagaggtctggtttaaaatttgtagcctacatttgttttatttattgtatttgtgtgtttgtgtttgtttttttttaagggtgagccaggtctagcccaacagtctaaactatccagtcaataccgagtgaagtggcagccagcactgttcactctgtgtcttttgaagtgccttgaaggcccagatgaaattttaaagggagggggtccatgtccttccctcccccaccccgcctcattctttaatcaaaggatgtcttctcccttgtttgagaatgaagaaactcgccacctctgacctacctttgcctttttctgtcatggagaatactcacccttcagaaacagaccaaaggccaaaacctgctgatttttctattgaaaatatgtccccttgcaaagaccctaaacaaaaagttaagtttctttctttcacctatttgtacaactccaagttacagctgaatctgtcgtgactttcctgagatctacccggggcttggctgtctgttctgggcactggctccgagttcccctcctgggatttgcaggagggcagtactgaacctgcattcttctccttgtaaatgtaggccgggtgcccctgttctccgggtttggaacaatacgaggttggtgctgatgggatttacttgcgtacgtgctcttcacaaaaacaccgtggatgctgaagttagagcacgtcgccacagagcttgacatcaatgttagagggtctcttactccccgcccagctgtgatgtttcatctgctttggttgttttggtggtcttttttaaaaatagagatttcacatctgcccagaccccactcaaaacgatttggtcaggttctggttggacaagtttaaaatcaaagtagtgcccggaattccctcaaaccacccaacttcatccaggaatacagtctgcagtgcagcaacagaaccgcttaccaagaactgtgcttacatacctttgtcatctctcttccccccttggaagttgtcctcagggggatttgttcctgtcctggggatttacctgggatggtggctgcctgtgcttttgctcatggccttgacagtgctctagttgctggatctaatggcctgtcttggtttctatcacatgagaaggggttgtttttttggggtgactcggactgaattccccatactgtttccacgccgggacaccatgttctccatcaagctaaagaaatcacgtgcctgaaactgtgcttaagttttgggggaaagatggagttcctatccagagcccccagatttccagaatcgagtgagcttcctggaaggagactgcgtcttctctcaattccagtcatctcagtcgttgtcgttaggtgacatgtgcactttaaatgctctcatcggttggcttcattttcaagacaatcaaatgtattgactgtgttttcttcttagaaaatggagagggttaaaaacatgcaaactgccactttcaacctttgccagtattccctctacccccgtgagagctatctggggggaagaatccttaccaaggtttttttggaaaggtacgaatcttaacttttttccccttctgtgtctcagggtaatactattcagagtcgcccctttgctcattttctcccgtatttgttaccttcctgaggcctcagtattagtcgtgagcacaaagttttgagacctttggcgttgtttcttgatgtgggaggggaggtgttagtgcatgcaagggttgaactagatagaccctgccttagtagagggtgggactataaccttagaggccagaacttgatccagaagttgctgtccacagaagtgctttctatttcatcatttttgtttctagggctctttttctgtagccaggtcttcccaaggattttagtatttgcattggagttgaggtttactctaatgatggtggcccagctgtgcccagaggacagccaggcaggccctgggagggagtttagaaagacagtcctggtgaatgggcttcaagtggtcacaaagagggtggctgtgaggtgaccccagacactgcagaacgatgtgcaccctctgcgttttggatgtccttggaatgtgggagcctagaaataaccctgtggatggaattggggcagcggctgctggagatctgtgtgccttgccttccttcagcaggaccgtctaggtgcgcagccacctatggatgcgtcccagccagccccgtcgctctcgtccatcctcagagacaaagaagagggcagggagtttgggcttggttttgaactttcctttcaatgtagcaaagcattcctagttaaccagagccttggaatctactgcctgctggccaggctttaaaatgaaaagtgttttaatgctgccataaaagggaggcgggggggaggaagggaaaataaaggcatctttccaagtactcatctaatttaattgtcaaaagattgataggccatgaattacttctccatctcactaagggttaaaggcgtgcaaccccccactggctgtgtcccctgccaccgaagtgagtgacctgccctacaaccaggtgggaccacctgtgctgcagtccggaggggcttctgcaggaagcactcaccccccacaccttccccggcctgagcttcccctacctttcgtcaccacctgagggcatgagcacaggccatggggcgtgcctggtgagtctgcctgtggttcaggcttagcctgtggtctcctgtgtgctgctgcccgcatgggatgcgcaggggaggcgtggggatccgcaggagggtggttgggatacaccggatacctctgctctcattgcttgtttgcaaatgctctatggacatttgtgtgctaaatcctattaaataaaaaagacgggttaaaacccagatgctgtatattcatttgtaattatgtataaagtgaagcagttttaaactgtaaagatttttttcagtgtgttttctcgaattttgccacaacatactggcttcgtattttatttatctttctttctagttaccagcttcagacccttgtaaagtctccctcagccctttcaaaaaataataaatttcctgtgaagtt

SEQ ID NO: 29762 - DNA, 3685 bp, Homo Sapiens
gcttccggaagcgggcgactcgcagctccacgcgacgccgaggggctccgcgccgggaccgggcgggtgctcggagtttcggggaccgcacgggaccgagggcaggaggagacatcacagctttcccagatcgggaggaaaaatatggaatgtgttttaccgctgactgaacacaaccaaatgaactgtcctgacagtagtttgcaaaccagcagctagcagtttgtccagcctctaacattgtccagcactttccagagcaaactcactgtttacaagaactcttggccttacgaagtttataacctcaagctttgtttatttaaaatattcctgcaaaagaaaagtacccggcacccactttccaaaatggccatggatgagtatttgtggatggtcattttgggtttcatcatagctttcatcttggccttttctgttggtgcaaacgatgttgccaactcctttggtacagccgtgggctctggtgtggtgaccttgaggcaggcatgcattttagcttcaatatttgaaaccaccggctccgtgttactaggcgccaaagtaggagaaaccattcgcaaaggtatcattgacgtgaacctgtacaacgagacggtggagactctcatggctggggaagttagtgccatggttggttccgctgtgtggcagctgattgcttccttcctgaggcttccaatctcaggaacgcactgcattgtgggttctactataggattctcactggtcgcaatcggtaccaaaggtgtgcagtggatggagcttgtcaagattgttgcttcttggtttatatctccactgttgtctggtttcatgtctggcctgctgtttgtactcatcagaattttcatcttaaaaaaggaagaccctgttcccaatggcctccgggcactcccagtattctatgctgctaccatagcaatcaatgtcttttccatcatgtacacaggagcaccagtgctcggccttgttctccccatgtgggccatagccctcatttcctttggtgtcgccctcctgttcgctttttttgtgtggctcttcgtgtgtccgtggatgcggaggaaaataacaggcaaattacaaaaagaaggtgctttatcacgagtatctgacgaaagcctcagtaaggttcaggaagcagagtccccagtatttaaagagctaccaggtgccaaggctaatgatgacagcaccatcccgctcacgggagcagcaggggagacactggggacctcggaaggcacttctgcgggcagccaccctcgggctgcatacggaagagcactgtccatgacccatggctctgtgaaatcgcccatctccaacggcaccttcggcttcgacggccacaccaggagcgacggtcatgtgtaccacaccgtgcacaaagactcggggctctacaaagatctgctgcacaaaatccacatcgacaggggccccgaggagaagccagcccaggaaagcaactaccggctgctgcgccgaaacaacagttacacctgctacaccgcagccatttgtgggctgccagtgcacgccacctttcgagctgcggactcatcggccccagaggacagtgagaagctggtgggcgacaccgtgtcctactccaagaagaggctgcgctacgacagctactcgagctactgtaacgcggtggcagaggcggagatcgaggcggaggagggcggcgtggagatgaagctggcgtcggagctggccgaccctgaccagccgcgagaggaccctgcagaggaggagaaggaggagaaggacgcacccgaggttcacctcctgttccatttcctgcaggtcctcaccgcctgtttcgggtcctttgctcacggcggcaatgacgtgagtaatgccatcggtcccctggtagccttgtggctgatttacaaacaaggcggggtaacgcaagaagcagctacacccgtctggctgctgttttatggaggagttggaatctgcacaggcctctgggtctgggggagaagagtgatccagaccatggggaaggacctcactcccatcacgccgtccagcggcttcacgatcgagctggcctcagccttcacagtggtgatcgcctccaacatcgggcttccagtcagcaccacgcactgtaaggtgggctcggtggtggccgtgggctggatccgctcccgcaaggctgtggactggcgcctctttcggaacatcttcgtggcctggttcgtgaccgtccctgtggctgggctgttcagcgctgctgtcatggctcttctcatgtatgggatccttccatatgtgtgatttgtcttcttccagctgcaaacagctaaagggatggtctggtgttggcgtgtgggagacatgtgtgctcgtgccacacatacacatcctggccgtgcacggctctctcatgaccagctctctgcctcccttccaggaggctccatcccacactgttcacccaggctgcggagactcaccttcccgagctaacttaactactgtacataataatatgtattaaactggtatcgtggtgatataatgtggtgcagttacttatatattaaatatctattgtatccatagaataggcagcattatttcaaacatattcaagttgggagtggagatcattgcctagaagtcaatattcaataaatcttgtacataactatttcgatggcaaatgttaagccttctaaaaggaaagtgtagattggaaaatgattttttttccaaatgatgtttttgccttctaatatactgtaaggtaatgagcttcagaacaggcaacctgaccctgcagaggtcgcgtgctgtgggatgacagcgggacgggagctcacaagtgctttcactgaagatttgttcatatactgtgtattgattgttgtgtaatatatcatcattgcttttgtaaatacgtaaaactgtaattttttaatggtgtgcttcccttatacttttttgatcagagaattttggaaagtaccaaagaagcaggggaatcattggccagtgttacgttttcacattgtctgtctcccaccctcactgatcacgcctgccccagagcagtgtgtggcggtgacaccgtcacccagcatgcgccacgccgtggctcccaccagcagtgccaccgccaccacaccccagatcccacccaccttgcagtggcctttccttgtcatcagagtagagaatgcacaggtgttggtgagggcgtgtggctgagcactacatgtcaagtccagagtcagtttctatcccaattctccctgcagcctgaagaacggatccttgtctccaatgtcagcacaaaggaggctttttctgtgctttgacattctagcacttcagggatgagagggagggagaatcctggatgctggatggagtatttctctgaggcccacacaaagctggacacccccaggctctactccatcccattggagtctcttctttttttgatagcgggagggaggaagtacgactaatgttggagcctgaaactatggaaatgctgctaaaatttttatattgacaaacattttcttggtacttcattgtcatttttcattaatcaaccatattaaatttataataaaaaatgcccctcagaaaaaaaaaaaaaaagaaaaaaaaaaaaaaa

SEQ ID NO: 29763 - DNA, 7869 bp, Homo Sapiens
ggcacgaggtttggggcatctccgcggtccggcccggggccccgggatctcggctgtccttcctcccggcataagatgcacatttttctgctctggagccgggaatgaaatattcttgagttcttacaactttatgacgagacccatgtgtggtgctattgagaaattcattgggaagttggaagacatttcaaacaacaggttgttttggtttctatagtacaattggggtggcattctgttttgtgaaaggaggaaggacttaggccagaaaactcatatgctatggttaactggttcccagcctccgagaatcttgttttccatggtgtaaaacttactcagcatcaggataagggataacgactctatggatatacagaatccttcaccatggtaaaactcgcaaacccgctttatactgagtggattttggaggccatcaaaaaagtgaaaaagcagaaacagcgtccttcagaagaaaggatatgcaatgctgtgtcttcatcccatggcttggatcgtaaaactgttttagaacaattggagttgagtgttaaagatggaacaattttaaaagtctcaaataaaggactcaattcctataaagatcctgataatcctgggcgaatagcacttcctaagcctcggaaccatggaaaattggataataaacaaaatgtggattggaataaactgataaagcgggcagttgagggcttggcagagtctggtggctcaactttgaaaagcattgaacgttttttgaaaggtcagaaggatgtgtctgcattattcggaggcagtgctgcctctggctttcaccagcagttacgattggctatcaaacgtgccattggccacggcagactccttaaagatggacctctttatcggctcaacactaaagcaaccaacgtggatgggaaagagagttgtgagtctctttcctgtttacctccagtgtcccttcttccacatgaaaaggataagccggttgctgaaccaatccccatctgtagtttctgtcttggtacaaaagaacaaaaccgagaaaagaagccagaggaactcatctcctgtgccgactgtggcaacagtggccatccatcctgtttaaagttttcccctgaactaacggttcgagtgaaggccttacggtggcagtgcatcgagtgtaaaacatgcagctcctgtcgagatcaaggcaaaaatgcggataacatgctcttttgtgattcatgtgaccgaggttttcacatggagtgttgtgatccgccactcacccgtatgccaaaaggcatgtggatatgtcaaatatgtcgacctaggaaaaaaggacgaaaacttctacaaaagaaggcagcacagataaaacggcgctatactaatccaataggacgtccaaaaaacaggttaaagaaacaaaacacggtatcaaaaggtcccttcagcaaagttcgaactggccctggaaggggtaggaaacgaaaaatcactctttccagccaatcagcatcatcatcatcagaagaaggatatttagagcggatagatggcttggacttctgcagagatagcaatgtctccttgaggttcaacaagaaaaccaaagggctcattgatggccttaccaaattttttaccccttcccctgatgggcggaaagctcggggggaagtggtggactactctgagcaatatcgaatcagaaagaggggcaacaggaaatcaagcacttcagattggcccacagacaatcaggatggctgggatggcaaacaagaaaatgaggagcgactttttgggagccaggaaatcatgactgagaaagatatggaattatttcgtgatatccaagaacaagcactgcagaaagttggagtgactggtccccctgatccacaagtccgctgtccctctgtcattgagtttgggaagtatgaaattcacacctggtactcctccccatatcctcaagaatactcaaggctgcccaaattgtatctttgtgaattttgtctaaaatatatgaaaagtagaactattctgcagcagcacatgaagaaatgtggttggttccatcctcctgccaatgagatttacagaaagaataatatttctgtctttgaggttgatgggaatgtgagtaccatttattgtcaaaacctgtgtcttttggcaaagttgtttcttgaccacaaaaccctctattacgatgtggagccatttcttttttatgtactaacacagaatgatgtcaagggctgccaccttgttggctacttttctaaggaaaagcactgccaacagaagtacaatgtttcctgtataatgattcttcctcaataccagcgtaagggctatggcaggtttctcatcgatttcagttatttgttatcaaagcgtgaaggccaagcagggtctccagagaaaccgttatctgatctgggtcgtctttcctacatggcatattggaaaagtgtaatattggagtgcctttatcaccaaaatgacaagcagatcagcattaagaagttaagcaagttgactggaatctgccctcaagacatcacttccacactccaccacctacgaatgctggacttccgtagtgaccaatttgtgattatccgccgggaaaaacttatccaggatcacatggcaaagcttcagctgaatttgcgacctgtagatgtagatccagaatgtttgcgctggactccagtcatagtgtccaactctgtggtctcagaggaggaagaagaggaggctgaggaaggagaaaacgaagagccacagtgccaggaaagagaattagagatcagtgtgggaaagtctgtgtctcatgagaacaaagaacaagattcttattcagtagaaagtgaaaagaaaccagaagttatggctccagtcagttctacacgtttgagcaaacaagtccttcctcatgatagtcttcctgcaaatagccagccatctcggaggggccgctgggggaggaagaacagaaaaacccaggaacgttttggtgataaagattctaaactgctcttggaagagacgtcttcagctcctcaggaacaatatggagaatgtggggagaaatcagaagccacccaggaacaatacactgaaagtgaagaacagctggtggcttctgaggagcagccaagccaggacgggaaacctgaccttcccaagagaagactcagtgagggggttgagccctggcgaggacagctcaagaaaagccctgaggctctgaagtgcagattaacagaaggaagtgagaggctgccccgtcgctacagtgagggtgacagggctgtcctcaggggcttcagtgagagcagcgaggaggaggaggagccggaaagccctcggtcaagctcgccaccaattctcacaaagcccacgctgaagcgaaagaaaccatttctccaccgaaggaggagagtccgaaagcgcaaacaccacaatagcagtgtagtcacagaaactatttctgagaccactgaagtgttagatgaaccttttgaagattctgactccgagaggccaatgccaagattagaacccacatttgagatcgatgaagaagaggaggaagaggatgaaaatgaacttttccctagagaatacttccgtcgtttgtcttcgcaggatgtactcaggtgtcagtcctcttctaagaggaagtctaaagatgaagaagaagatgaagagtcagatgatgctgatgacactcctatcttaaagccagtatctcttttgcgaaaacgtgatgtgaagaattctcctcttgagccagatacatccacacctttgaaaaagaaaaagggatggcccaaaggcaagagccgcaaaccaatccactggaagaaaagacctggtcgaaaaccaggatttaagttgagtcgggaaatcatgccagtttctactcaagcatgcgtcattgagcccatcgtttccattcctaaagctggacgtaaacccaagatccaggagagtgaagaaactgttgagccaaaagaagacatgcccctacccgaggagaggaaggaggaggaggagatgcaagcagaggcagaagaggctgaagagggtgaggaagaggatgcagccagcagtgaagtcccagcagcctctccagcagacagcagcaatagtcctgagaccgaaaccaaggagcctgaggtggaggaggaagaagagaagccccgtgtctcagaggagcagaggcagtcagaggaggagcagcaggaattagaggagccagagccagaggaggaggaagatgcagctgcagagactgcccagaatgacgaccacgacgctgatgatgaggatgatggccacctggagtccacaaagaaaaaggagctagaggaacagcccacgagggaagatgtcaaggaggagcctggtgttcaagagtcttttttagatgctaatatgcagaagagtagggaaaagataaaggataaagaggaaaccgagctggattccgaagaggagcagccttcccatgacacgtccgtggtgtcagagcagatggctgggtctgaggacgaccacgaagaagactcccacactaaggaagagttaatcgaattaaaagaggaggaagagattcctcatagtgagctggatctggaaactgtacaggcagtgcagtctttgactcaagaagaaagcagtgagcatgagggcgcctaccaggactgtgaggaaactcttgcggcgtgtcagaccctgcagagttacacccaggctgacgaggaccctcagatgtccatggttgaagactgtcatgcgtcagaacataatagccctatctcctccgttcagtctcaccccagccagtcagtccgttcggtcagcagtcccaacgtgcctgcccttgagagtggctacacccagatcagcccagaacaaggatccctgtccgcaccctctatgcagaacatggagaccagccccatgatggatgtgccttccgtatcagaccactctcagcaggtggtggacagcggcttcagtgacctgggcagcattgagagcaccactgaaaactatgagaacccaagcagttacgactccacgatgggcggcagcatctgtgggaacagctcttcccagagcagctgctcctacggtgggctgtcgtcctccagcagcctcacccagagcagctgtgtggtcactcagcagatggccagcatgggcagcagctgcagcatgatgcagcagagcagcgtccagcctgctgccaactgcagcatcaagtcacctcagagctgcgtggtggagaggcctcccagtaaccagcagcagcagccgccaccaccgcctccacagcagccacagccgccgccgccacaaccacaaccagcaccacagcctccaccaccccagcagcagccgcaacagcagccgcagcctcagccccagcagcctccacccccaccccctccccagcagcagcccccgctgtcacagtgtagtatgaataacagtttcaccccagctcctatgatcatggagataccagaatctggaagcactgggaacataagtatctatgagaggattccaggggattttggtgccggcagctactctcaaccatcagccaccttcagcctagccaagctgcagcagctgaccaacaccattatggaccctcatgccatgccttatagccattctcctgctgtgacttcctatgcaaccagtgtttctctgtccaatacaggactggctcagctggctccatctcatcccttagctgggactcctcaagcacaagccaccatgacgccacccccaaacttggcatccactaccatgaacctcacatctcctctgcttcagtgcaacatgtctgccaccaacattggcattcctcacacgcagagattgcaagggcaaatgccagtgaaggggcacatttccatccgctccaagtctgcgccactgccctctgcggctgctcaccagcagcagctgtatggccgtagcccatcggcagttgccatgcaggctggccctcgcgcactggctgttcagcgtggcatgaacatgggggttaatctgatgcctactcccgcctataatgtcaattccatgaatatgaacaccttgaatgccatgaacagctatcgaatgacacagcccatgatgaacagcagttaccatagtaaccctgcctacatgaaccagacagcacagtatcctatgcagatgcagatgggaatgatggggagccaggcctatacccagcagcctatgcagcctaaccctcatgggaacatgatgtacacaggcccctcccatcacagctacatgaacgctgctggcgtgcccaagcagtcactcaacggaccttacatgagaagatgagcaagatgaacttgcaatcaaaaacttaaatatatataaataaaggaaccttttatactgacaaaccagagaaaaatggacctttttccagttaaaatattgctgtagatttagaggaatttttctttggtttattttattttttagaaaacctgatcttctcttttttttgggttcattttgttgtgggttttggttttcttcacaatcttgaacattttacagtagaactcatctaaaaatggatttggggatggggaaacatgcacaaaatcttttcataattaaaaagagccttactttctttacataccacatggacagaatttgtgtaaaagtgaattatctttattttaaaatgtatgtttcccctcactgtttgcagctcccaatgttgtcatttttaaatgttatatacatctcaagggttaaccagaccctttcctccaaacccaacctttcatttcctacttcattccagcaggaggcacttaggggagactcggatggggacatggagaacaacccaagctccttaaacttattattattgttaatattattattattattattaataaagtgaggcaggaaaatgcttctccttttaaaatcccctccactcctcacacacacacacctcttgaaacccttccccaagaatgtttctttatagacggacttcattgaaatctttgttgttcttgaatcaagtgtaatataatttttttcttcttttttaaaatattcccactcagcactcagagacacaaaaatactgtaagtctcaattaacagcagaatctcagagaaaagctgtttgcaatccaaatccagcctttggaggaatagagatggtcaattaacaatcaaaaagaggagattaacctcttgtttttttaccacctggtgaatcagccataacgcacacacacgccacccagcctcttgtttctagtatgtactttgaaatgctaactgagggtcttgatgcttgagcctttgactgataaaactcaaatagcagtccccagtgatttgcctcttaggttctttcttaaattgttggtggatgactgtacattttagtgatttgaaaaataactgacaaaccattgaaacagtttattttatgttggaagagatggcgcagatgtgtgtcagaagggagatcacggtgtgagtttcgtagctatttaagtgatacatacctctagtttttgtatgtcttttgagatcctgagttcatcccctgtgaatcagagtgcacaagcacctctcctgtgagtggctaatgagaagagggacagaccgaccaccagcacagtagggcagatctggacagcagaatgttataacgcaagttcatgtgttgctcccaactccattctcttttctctcgtgcaaccagtttgcccattctcttcctattacttgctccagggataggtaaaaaaaaaa

SEQ ID NO: 29764 - DNA, 4234 bp, Homo Sapiens
ccgggatggctggaccgggcagcacgggggggcagatcggggctgcggccctggcaggcggcgcgcggtccaaggtagccccgagcgtggacttcgaccatagctgctcggacagtgtcgagtacctgacgctcaacttcgggcccttcgaaacagtgcatcgctggcggcgcctcccgccctgcgacgagttcgtgggtgcccggcgcagcaagcacacagtggtggcctataaagatgccatttatgtatttggtggagacaatgggaagaccatgctcaatgacctcctgcggttcgatgtgaaagactgctcctggtgcagggcctttaccactgggaccccaccggccccccgttaccaccactcggccgtcgtctatgggagcagcatgtttgtctttgggggttacactggggacatttattccaattctaacttgaagaataaaaacgacctctttgaatacaagtttgcaactggccagtggacggagtggaaaattgaaggacggttgccagtcgctaggtcagcccatggggccacggtgtacagtgacaagctgtggatctttgctggctatgacggcaacgccaggttgaatgacatgtggacaattggcctccaggaccgagagctcacctgctgggaggaggtggcccagagtggcgagatccccccatcttgctgcaacttccccgtggctgtgtgccgggacaagatgtttgtattctctgggcaaagcggagccaaaataaccaacaacctcttccagtttgaattcaaggacaagacgtggacacgcatcccaactgaacacctgctccggggctccccaccacccccgcagcggcgctacgggcataccatggtggcctttgaccgccacctctatgtgtttgggggtgcggccgacaacacgctgcccaacgagctgcactgctatgacgtggacttccagacctgggaggtcgtccagcccagctccgacagcgaggttggtggggctgaagtgcccgagcgagcctgtgcttccgaggaggtgcccaccctgacctatgaggagcgggttggcttcaagaagtcccgagatgtgtttggcctggactttggcaccacctcagccaagcagcccacccagcctgcctcggagctgcccagtgggaggctcttccacgcggctgctgtcatctcggacgccatgtacatcttcgggggcacggtggacaacaacatccgcagcggggagatgtacaggttccagttctcctgttaccctaaatgcacgctgcacgaggactacgggcggctgtgggagagccgccagttctgcgacgtggagttcgtgctgggtgagaaggaggagtgcgtgcagggccacgtagccattgtcacagcgcggagccgctggcttcgcaggaagatcacgcaggcgcgggagaggctggcccagaagctggagcaggaggccgccccagttcccagggaggcccccggcgtggctgctggtggggcccggccgcccctgctgcacgtggccatccgggaggccgaggcccggcccttcgaggtgctcatgcagttcctctacaccgacaagatcaaatacccacggaaaggccatgtggaggatgtgctgctcatcatggatgtgtacaaactggcactgagcttccagttgtgccgcctggagcagctgtgccgccagtacatcgaggcctccgtggacctgcagaacgtgctggttgtgtgcgagagtgccgcccggctgcagctgagccaactcaaggagcactgcctgaacttcgtggtaaaggagtcccacttcaaccaggtgatcatgatgaaggagttcgagcgcctctcctctccactgatagtggagattgtgcggcggaagcagcagccgccccctcgcactcccttggaccagccagtggacattggcacatctctgatccaggacatgaaggcatacctggagggagcgggcgcggaattctgtgacatcactctgttgcttgacgggcacccacggccagcccacaaggctatcctggccgcccgctccagctactttgaagccatgttccggtccttcatgcccgaagatgggcaggtgaacatctccatcggggagatggtgcccagcaggcaggccttcgagtccatgctgcgctacatctactacggcgaggtcaacatgccgcccgaggactcgctctacttgtttgcggccccctactactacggcttctacaacaaccggctgcaggcgtactgcaagcagaacctggagatgaacgtgacggtgcagaacgtgctgcagatcctggaggcagctgacaaaacgcaggcactggacatgaagcggcactgcctgcacatcattgtgcaccagttcaccaaggtctccaagttgcccaccctgcggtcgctgagccagcagctgctgctggacatcatagactccctggcctcccacatctcagacaagcagtgcgcagagctgggcgccgacatctgaggccctgtggcgcctgcccattgtgaagaatcgccgtgcctgcctgccctgcctactgagaagactaccggctatgcgcatgcctatggcagtgggtgcacctgccaggccaagggtcagggtgcccagagcctccaaagagagctgaggggatgtggggccccaaactcattaattcactgaagacacaggtcccacagggagcggatgatgaagcagaccccctcctgtcatcaccctctcctggtgtagtgtggatgcgaggccacggctcagtgatgggctcaccacccagaagtggggagagactttgggcctcccacccagtggggcttggcctggcttctgtggcctgggcgtgttgtggactcaggcactggggcctgtcaccaaggctcctccaacatgcgggaggaggcttagcagacttgcgctgcaccagcgaatctgcctgggctgctcctgtcccacccaccctcactgagatccatgtaaggggctcctcttcccacctggaacttgtgagtggggacccatgatgtatgggtctcacctgacttgaggtgaattttggagtgaagggccctgaggtcagctcccaggtcggtcgtgctgggccaggcctggttttcacaggggctgaaggatcccagtccacctgtgtgcatgtcagggctcggccgggaagaagccagcaaagtcccccgtgtcccttgctgagtattctgtcacagacaagcctccattaaagccacagcagtgctacccaccacacacaccttgctggcccggccaccactgctggcttcagccccttgagcagcccatggcttagcagacccccagatgtaggtcagtggccttacctgtctctatccatgctgtcaactcctgcctccacctggggtcacccagtcacattgggaagggctgtgaaggcctccaggctggccccttccaggggaatcctggaggcctggggtgggctcctgccccttctgccctgccttgcccctgcactatgctcttggctcctgtggaaggagggctgccctcttgccctagtgagggccccatgtggatccactctagtgctgggagccagcgctcccttactgggaacaggattccaggacccctttcttgttgtggctgccatgaagccacagctccttggggaagtgacctgctctcctttgggtgtatgcaggtgtgtggggggccctgagtggcaagttgcttagctaacaggagatccataggcagcctgcaggctaggaagtggcctagtgcaagatgagctgggaacaagggaggagagagcaggagctggggcagaggctgagccgggaggcccttgaggtgaggacacagcaggcccaggaccatggctggggaggatatgtcagcacctggaagtggagtgcaggctgcagcgcccagccatgtgggccaggtgcattcactcagagtggggccacacacccatctacccagtttccacaagatgtggctcctgccacacccacagggcagcctcctccaaatccctcctggaggggcctacccagaagcctccttgaaccagtctgcaaccctgctctatgctgacccttgtcactgaaccctgatctagacttatatgaataaatgaaattacatgccaagggccctaaaaagcaaattttaaaaaaaaaaaaaaaaaa

SEQ ID NO: 29765 - DNA, 2063 bp, Homo Sapiens
gttcgaggagctgctgctgctgaggcggcggcaactgcattgaggtggtggcggcgctgccggccccggccgctcgctctcggctcgccttccagcctcgcctgagcccgccgggcccgcgccggccagcgcctgccctatgagtgtgtcactggttgttatccgattggagctcgcggaacactcgcctgtccccgccggcttcggcttcagcgccgcggccggggaaatgtctgatgaggagataaaaaagacgacactagcctcagctgtagcctgtttagaaggcaagtcaccaggagagaaagtagcgattatccatcagcatctcggccgtcgagaaatgacagatgtgatcattgagaccatgaagtccaacccagatgaactaaaaactacagtggaagaaaggaagtcttcagaagcctcccccactgcgcaaagaagtaaagatcacagtaaggaatgcataaacgctgccccagattctccgtccaaacagcttccagaccagatttcattcttcagtggaaatccatcagttgaaatagttcatggtattatgcacctatataagacaaataagatgacctccttaaaagaagatgtgcggcgcagtgccatgctgtgtattctcacagtccctgctgcaatgaccagtcatgaccttatgaagtttgttgccccatttaacgacgtaattgaacaaatgaaaattatcagagactctactcccaaccaatatatggtgctgataaagtttcgtgcacaggctgatgcggatagtttttatatgacatgcaatggccgccagttcaactcaatagaagatgacgtttgccagctagtgtatgtggaaagagctgaagtgctcaaatctgaagatggcgccagcctcccagtgatggacctgactgaactccccaagtgcacggtgtgtctggagcgcatggacgagtctgtgaatggcatcctcacaacgttatgtaaccacagcttccacagccagtgtctacagcgctgggacgataccacgtgtcctgtttgccggtactgtcaaacgcccgagccagtagaagaaaataagtgttttgagtgtggtgttcaggaaaatctttggatttgtttaatatgcggccacataggatgtggacggtatgtcagtcgacatgcttataagcactttgaggaaacgcagcacacgtatgccatgcagcttaccaaccatcgagtctgggactatgctggagataactatgttcatcgactggttgcaagtaaaacagatggaaaaatagtacagtatgaatgtgagggggatacttgccaggaagagaaaatagatgccttacagttagagtattcatatttactaacaagccagctggaatctcagcgaatctactgggaaaacaagatagttcggatagagaaggacacagcagaggaaattaacaacatgaagaccaagtttaaagaaacaattgagaagtgtgataatctagagcacaaactaaatgatctcctaaaagaaaagcagtctgtggaaagaaagtgcactcagctaaacacaaaagtggccaaactcaccaacgagctcaaagaggagcaggaaatgaacaagtgtttgcgagccaaccaagtcctcctgcagaacaagctaaaagaggaggagagggtgctgaaggagacctgtgaccaaaaagatctgcagatcaccgagatccaggagcagctgcgtgacgtcatgttctacctggagacacagcagaagatcaaccatctgcctgccgagacccggcaggaaatccaggagggacagatcaacatcgccatggcctcggcctcgagccctgcctcttcggggggcagtgggaagttgccctccaggaagggccgcagcaagaggggcaagtgaccttcagagcaacagacatccctgagactgttctccctgacactgtgagagtgtgctgggaccttcagctaaatgtgagggtgggccctaataagtacaagtgaggacgaaggccggccttcgtggccttagagatggatgaggc

SEQ ID NO: 29766 - DNA, 2837 bp, Homo Sapiens
tagtcctcctgctacaccactgaccaacaggaaagtttgtgtctccagagtggacacatccataaagaggccaaacccagtcaaggtctaagcatctgatggctataactttgcttctttgaaagataataaaaagcttctgacctcccatcaacagccaacctgatttcaaagagccaagaggcctcagattcgtcaacattcctttaacgagctgagaaacttttcatggtaaactcagcagctgagtaacaggatgatggcaccacaacaggtagataatcaaggcaggaggtcaaagcattggagccaacacccgcccaggatggggtataaaagggctgggaggagaggaggcttcagtctcagtggttcagctttcccagctgatctgaagctcctgtgcagcctcagcccaacaccatgacctcttcctacagcagctcctcatgccctctgggttgcaccatggctcctggagcaagaaatgtctctgtctctcccatcgacattgggtgccagcctggggcagaggccaacattgcccccatgtgccttttggccaacgtggcacatgccaaccgagtccgtgtggggtccactcccctgggccgccccagcctctgtctgccgcctacctgccacactgcttgtcccttgccagggacctgccacattcctggcaacattggaatctgtggggcctatggtgaaaacaccctgaatggccatgagaaggagaccatgcagttcctgaatgaccgcctggccaactacctggagaaggtgcgccagctggagcaggagaatgcggagctggaggccacactcctcgagaggagcaagtgccacgagtccaccgtgtgccccgactaccagtcttacttccacaccatcgaggagctccaacagaagatcctgtgcagcaaggccgagaatgccaggctgattgtacaaattgacaatgccaagctggctgccgatgactttaggatcaagctggagagtgagcgctccctgcgccagctggtggaggcagacaagtgtgggacacagaagctcctggatgatgcgaccctggccaaggccgacctggaggcccagcaggagtccctgaaggaggagcagctctccctcaagagcaaccacgagcaggaagtaaagattctgaggagtcagctgggggagaagctccggattgagctggacattgagcccaccattgacctgaacagggtgctgggggagatgcgggctcagtatgaggccatgttggagaccaaccgccaggatgtggaacagtggttccaagcccagtctgaaggcatcagcctgcaggacatgtcctgctccgaggagctgcagtgctgccagtcggagatcctggagctgagatgcacggtgaatgccctggaggtggagcgccaagcccagcacaccttgaaggactgtctgcagaactccctgtgtgaagccgaggaccgcttcggcacggagctggcccagatgcagagcctcatcagcaacgtggaggagcagctgtctgagatccgggccgacctggagcggcaaaaccaggagtaccaggtgctgctggacgtgaagacccggctggagaatgagattgccacgtaccggaaccttctggaaagcgaggactgcaaactcccctgcaatccgtgctccacgtctccctcctgcgtgactgccccctgtgctcctcgcccaagctgtggcccctgcaccacctgtgggcccacctgtggagccagcaccaccggaagccgattctgaattcctgtggacccacaggggctggctaaggcgagggatacccaaagagagatgcttgttatacctttagaaaatctggcttctaactttctgtatgtataggcctgtccaaaggctatgagataccagggacagtggaatcttgatggaaatccttcctttcctgctcttggttttcccaggtgagctctatgccctcagtggctggattgcagccacccatggtggctcagaatatctggattggagaggcataaggttgaaaagcattttggagtaggaacacggcatgatttaaaattgcacttgcacttcaagaacaccaactttaacttgaaatttttatagtttatgacaaaggaagtgaagaacagacttcactgtctgagatttcccacatttcttgggttgtttctaacattggcagcctggattatggccctagggagagggaaatagaatcagaattgtacctgaccctgtcttttctaattcccttctcctatcctcctgcctccctatcttggaaactgattaagtggaaactttccttgtatcaaatcctgagttttctctacttcagggtttctagctttgacaaaggaccaggcttgccttttctgtggcaacacagcctcttacatatggcttccatagcttcttgctatgtgaaaggaactttcagattaagaaatttctctcttttttctctataaattctgactctccagacttgtctggctataacccctgtccctgtctaattctcccagtctaaaatctaaacaatgacttcatttttttctagtactttctcctgaagtattgaaacctattgattcaatgggtagagatttgctaagtatgatgtgcttccacctcttctcttcatactctctaccttccttaccatgattcagccacactggcctttctgttccttggacatgcctggagacctgtccctgctcttccttctctctggggtgctcttccccctccttataaatgttcaggtcagcggaaatgttccttcctctgag

SEQ ID NO: 29767 - DNA, 5225 bp, Homo Sapiens
gcctttggcttcagcgcttcgcccccgcgctgtgccctctgtcggcggcgtggggcagctgtagcagcgttggcggcaggaggcggcggccgcgtcgacgtcgacccagactggagcgacgtttaaagaaggggcagaatcgctggggagtgcggcttcttcttgttgggggactcccagccttccgcgcgtccggaggaggagaagcggcggcgccgggaagcaggcatggagagtagaaaactgatttctgctacagacattcagtactctggcagtctgctgaactccttgaatgagcaacgtggccatggactcttctgtgatgttaccgttattgtggaagaccgaaaattccgggctcacaagaatattctttcagcttctagtacctacttccatcagctcttctctgttgctgggcaagttgttgaactgagctttataagagcagagatctttgcagaaattctcaattatatctatagttctaaaattgttcgtgttagatcagatttgcttgatgagttaattaaatcagggcagttattaggagtgaaatttatagcagagcttggtgtcccattgtcacaggttaaaagcatctcaggtacagcgcaggatggtaatactgagcctttacctcctgattctggtgacaagaaccttgtaatacagaaatcaaaagatgaagcccaagataatggggctactataatgcctattataacagagtctttttcattatctgccgaagattatgaaatgaaaaagatcattgttaccgattctgatgatgatgatgatgatgtcattttttgctccgagattctgcccacaaaggagactttgccgagtaataacacagtggcacaggtccaatctaacccaggccctgttgctatttcagatgttgcacctagtgctagcaataactcgccccctttaacaaatatcacacctactcagaaacttcctactcctgtgaatcaggcaactttgagccaaacacaaggaagtgaaaaattgttggtatcttcagctccaacacatctgactcccaatattattttgttaaatcagacaccactttctacaccaccaaatgtcagttcttcacttccaaatcatatgccctcttcaatcaatttacttgtgcagaatcagcagacaccaaacagtgctattttaacaggaaacaaggccaatgaagaggaggaggaggaaataatagatgatgatgatgacactattagctccagtcctgactcggccgtcagtaatacatctttggtcccacaggctgatacctcccaaaataccagttttgatggatcattaatacagaagatgcagattcctacacttcttcaagaaccactttccaattccttaaaaatttcagatataattactagaaatactaatgatccaggcgtaggatcaaaacatctaatggagggtcagaagatcattactttagatacagctactgaaattgaaggcttatcgactggttgcaaggtttatgcaaatatcggtgaagatacttatgatatagtgatccctgtcaaagatgaccctgatgaaggggaggccagacttgagaatgaaataccaaaaacgtctggcagcgagatggcaaacaaacgtatgaaagtaaaacatgatgatcactatgagttaatagtagatggaagggtctattatatctgtattgtatgcaaaaggtcatatgtctgtctgacaagcttgcggagacattttaacattcattcttgggagaagaagtatccgtgccgttactgtgagaaggtatttcctcttgcagaatatcgcacaaagcatgaaattcatcacacaggggagcgaaggtatcagtgtttggcctgtggcaaatctttcatcaactatcagtttatgtcttcacatataaagtcagttcatagtcaagatccttctggggactcaaagctttatcgtttacatccatgcaggtctttacaaatcagacaatatgcatatctttccgatagatcaagcactattcctgcaatgaaggatgatggtattgggtataaggttgacactggaaaagaacctccagtagggaccactacatctactcagaacaagccaatgacctgggaagatatttttattcagcaggaaaatgattcaatttttaaacaaaatgtaacagatggcagtactgagtttgaatttataataccagagtcttactaaactcctttgaaatactagaaagttttgttttggatgatggggcaggggtttcagaagatctgtaaaacaaattaaggtgcgaacaagttaatttgatctgccacattatctgaaggaagtgtagtgggatttttgttgataatttttagaagcaaattttcctgaaagttttgagtagaggtgagaccccctccccaagtatctgtttatatagttagttttcagctcatttaaaagaggcaaaaattaaaagcttggagagatagtttcctgaatagaatttgaagcagtctgaatgttctttgaaaataactggagttattagcataccctagtacatcttacagctttccccttccatgttagcactttactgctgaattctcaattttcttaacattgagacaataaatgtgtgttttgtcttgtatatggcataaagagtaaataagttttagagttgttctggaaaatgtcagaataagtcagtacttgggttgtgtaatctgctagtccaagcgaacagcaacctcctgctaccctccctctatgaaaatagccatgcagacaagtctctcatctgaagaacaaattagatttagctaattagaattaatcctggctttcattgccatagtctgtaaaagactttggtggctagaccactttataccttcgcagtgtggtctctgggggcaaaaaactaatgaaaacaatctctgtaatggcagataggaggagatgaaaagttctgttgcatggatttttaattctctggctaccacatagtagagaatggaatgaagatttccttttggcttcttaaggttaaaaatattcccatgaacatgaaaattttcaaattttgaatctgaaagccaccaaatgtatctttatgtataaatccttgtaaatgatagattccatgggtgagactttacatattttgggtgggaggctactggcatatatttttaaatgttcatattgcgtagaatctccactaggaagtctttatttgaaatagttgaatcagtgatctagtattttcctttcggcaagatttgttaggtttttaccccttctaaaataagttttattccatctgcaaattgctgcaatattatagtaatcagaaactacataaggaatgttatataggcttgtcagttcccatttttcttgacaacaataaataccacttttaaaaatgacacatatttaaacacttagaaaataaagttaacacttactgaagtgctagtactaaactgtgctagtactaaaagaaaacaggttggaacatacatatagcctagcatttataacagaattgttgaacgtctgtaaatgattttttttttttttgcaaaggaaaaaattgatactggaaaagattgttgtgcatagttattagtcatttgtaaccttgcttaagtatttcttagtccaacatagatattttctttctcctgaccatgtattttaaaatatagtctatttcttgactttgaacttaaagctttaatcataatttctcatgtatacatcgttcttctgatggtaagctggatttgaaggtagtggtttcagtgtttcttaagttggtagctgagggtatcaggcatcagttcatgcaataatacaagaaaaaaaatcctttgcttgccaagaggtagagtgatgtgcatttatctgttttctgttctgtaagtctagaccttcaaaccatttgtaaactaacccctgggaaatttgaaattacctgataacttaagactctgtgatctctggaatcaccatatgtttcttttttgtgtagatattaataacattactctttgactatagtgtgcactctgaaatgtactcagtgaaaatttgttttgagtttcattaatgctatttcaccagttagacataattacttctaccgatgtgaatgatacggatgccggcagagcttccagatctttcagactcaactgctaggtcaattagtttgtcataataaaacttggcagattctacaagtctattatgacaaaccaggaactaattctataatggaaaactatccattctgaataataggtatgtaattatttgctgctgctgctgtgctctgtaaattctgaatatgacatttaaactctgtgcctactaaaggtatcttctggagtttttgggaggagagaaactggaaaattaaattgtatttttgccagaagactcttacttgcatgtgtctcagggtcttcagtttttctataagtttccatatccaaagttcagaattcatgtgaaatacttctttggggcaaaagtccttcattcctggtatttattggattggaaatctgtagcaagatgctgtttaaaattaccatattgtttttttatcttatacttagctctctggctattgaacttccttttcttgtttgaagttagcttcaaatttgctcctatgctaaattacctgtaaatattctggataggaactacttgaaatagtaatttgttaaaagatatgacaaaatgaaaatgcttaaactacagaaatttaaaaatgccataacaatcttgcgagactaactttaaaatatactttaaatgattattatgattttggtggtaacgatcccccacacacaaccactatgaagaaataatgccgcatttttcccccattgtaccaaaaagataaaaaaatggtaaacactgatcaaggtattttgtattgtcaaggcatgcatattctaaagaattaaatgctaacttaacagcactggctttctggctggtcaactatatgaaaccttgttcattcctccgagtactgtaatgttcacacttgtacaatcttccctgtcatgactttaagttctacttttcattaaccatggcctgatattagttcttagagcttcttgtggcaaaaataaaatgatttaattctaaaaaaaaaaaaaaaa

SEQ ID NO: 29768 - DNA, 3482 bp, Homo Sapiens
ccctaccgcccccaattccgccctgcccccgccgcggcggcgctagccgccactgagggaccgaccctataaaggccgctccgcgaggggtgcgcagcattcggcagagggcgcttcgacgggctgggctgtgcgcctgcgcagtgtgggtcgctcccgattccctgccccggccggccccgcctcggctccgcaccctcgccccgctctcagccgccgctctgccccgcagcagccagccccgtgtccggcagtatgttcagctgggtcagcaaggatgcccgccgcaagaaggagccggagctcttccagacggtggctgaggggctgcggcagctgtacgcgcagaagctgctacccctggaggagcactaccgcttccacgagttccactcgcccgcgctggaggacgctgacttcgacaacaagcctatggtgctcctcgtggggcagtacagcacgggcaagaccaccttcatccgacacctgatcgagcaggacttcccggggatgcgcatcgggcccgagcccaccaccgactccttcatcgccgtcatgcacggccccactgagggcgtggtgccgggcaacgcgctcgtggtggacccgcggcgccccttccgcaagctcaacgcgtttggcaacgctttcctcaacaggttcatgtgtgcccagctgcccaaccccgtcctggacagcatcagcatcatcgacacccccgggatcctgtctggagagaagcagcggatcagcagaggctatgactttgcagccgtcctggagtggttcgcggagcgtgtggaccgcatcatcctgctcttcgacgcccacaagctggacatctccgatgagttctcggaagtgatcaaggctctgaagaaccatgaggacaagatccgcgtggtgctgaacaaggcagaccagatcgagacgcagcagctgatgcgggtgtacggggccctcatgtggtccctgggcaagatcatcaacacccccgaggtggtcagggtctacatcggctccttctggtcccacccgctcctcatccccgacaaccgcaagctctttgaggccgaggagcaggacctcttcaaggacatccagtcactgccccgaaacgccgccctcaggaagctcaatgacctgatcaagcgggcacggctggccaaggttcacgcctacatcatcagctccctcaagaaagagatgcccaatgtctttggtaaagagagcaaaaagaaagagctggtgaacaacctgggagagatctaccagaagattgagcgcgagcaccagatctcccctggggacttcccgagcctccgcaagatgcaggaactcctgcagacccaggacttcagcaagttccaggcgctgaagcccaagctgctggacacggtggatgacatgctggccaacgacatcgcgcggctgatggtgatggtgcggcaggaggagtccctgatgccttcccaggtggtcaagggcggcgcctttgacggcaccatgaacgggccgttcgggcacggctacggcgagggggccggcgagggcatcgacgacgtggagtgggtggtgggcaaggacaagcccacctacgacgagatcttctacacgctgtcccctgtcaacggcaagatcacgggcgccaacgccaagaaggagatggtgaagtccaagctccccaacaccgtgctagggaagatctggaagctggccgacgtggacaaggacgggctgctggacgacgaggagttcgcgctggccaaccacctcatcaaggtcaagctggagggccacgagctgcccgccgacctgcccccgcacctggtgccgccctccaagcgcagacatgagtgatggcgcccggccccgcacctgccatttgcacgcccggccgggaggcagagacggggggaggggaagcctcaccatttctcaaggtccataaagactgagcggatgtttcctcgcctctcgaaaaggaaaaccaccatctttcttttaaggctgttcctgggcctggcgggggaggcaggggtgagaggatggaattgtgtgcacaagaactgtggctattttaatatataacgttagaggctgcgttctttgtcgccgcctcccctgtgtgccagccctgtgtgcacggcctctgccccccggcctttgctgtggctggagctggacagtgcagcgactgcgaccgtgggggagccaggtcgcccttttggcagctgctaggctgaggctgcatggacaggaacaccaggcaccctccgtgtgcttctgagctgaggttgcttcacgggaccgtggcttccttcctcacctggctctgcctcccccgtgctctcgggcgaagtgggttcttgtgccttcccctcccgggcccaggctccccgtgcgcgggccctgccctttcctcccgcgccccaccggctccgacgcgcaaccccgctcagcagtcacagaagcagggcccagccaccttggtctttttttgggagttcaggggagtaggagaatgtcttccagaaaaatacataagctagtttctgttctgtaaagtgatatctttcatacttgaccaaagttcccaataacttcccaaccactgttcaaaagctgtgatttttgtctccccttcccaccctccagccaaggagcagccctgcccagggggcattaggtgtgggtacccggggagcaccccgttcctggaccccagtgttgcatttcctggctgaggaagggtggtcatcccagctcctgccctaccctctcacttaactggagctttgggacgcaccctccacagtgggaggtggtggtgggtggcggtggcggggcctcacgacagcttggtgctggtaagaggaagcccgtggttctggctaggctctcatgtccagacagcggggaccaggggaaaacccagccccttctgtaatcccccttcatttcctaccttccttcctcctctgtttagcaaaggagggcagctcacttggatgtccttacaacgcccctggcccccaggttgagcaataagaaaccagaaccttgcggcccagtggcccgggccagttcaggccgcctccccctcctctgcctggggccattgagcccagcctccagggcccgggcgcgtttgcaggccagtggccactgtccgggctgtgatggcaccaaggcaggtggagcaccaggtaccacacagctgggcttcccaccaggctttcccgcgggggtctcagggagcttctccccagcgctgctcggagtctgcaggaactggccttgttctccttagcccgtcactccatacagtattaggtgaggatggatgcgggcgctgtccttgccgggaagtcactgttgaagttgcagtggcttgttcacacctgtgggaagagaagtgaagactttctccttgcattaaaaagtctgaactgtgaaaaaaaaaaaaaaaaaaaaaaaaa

SEQ ID NO: 29769 - DNA, 1575 bp, Homo Sapiens
ctcttcccggctccagctccgccgccagctccagcctttgctccccctcccaaagtcccctccccggagcggagcgcacctagggtccctcttccgtccccccagcccagctacccgttcagaccagcagcctcggggggcacccccccgccagcctgcctccctcccgctcagccctgccagggttccccagccatgaatctcttccgattcctgggagacctctcccacctcctcgccatcatcttgctactgctcaaaatctggaagtcccgctcgtgcgccggaatttcagggaagagccaggtcctgtttgctgtggtgttcactgcccgatatctggacctcttcaccaactacatctcactctacaacacgtgtatgaaggtggtctacatagcctgctccttcaccacggtctggttgatttatagcaagttcaaagctacttacgatgggaaccatgacacgttcagagtggagttcctggtcgttcccacagccattctggcgttcctggtcaatcatgacttcacccctctggagatcctctggaccttctccatctacctggagtcagtggccatcttgccgcagctgttcatggtgagcaagaccggcgaggcggagaccatcaccagccactacttgtttgcgctaggcgtttaccgcacgctctatctcttcaactggatctggcgctaccatttcgagggcttcttcgacctcatcgccattgtggcaggcctggtccagacagtcctctactgcgatttcttctacctctatatcaccaaagtcctaaaggggaagaagttgagtttgccggcatagccccggtcctctccatctctctcctcggcagcagcgggaggcagaggaaggcggcagaagatgaagagctttcccatccaggggtgacttttttaagaacccacctcttgtgctccccatcccgcctcctgccgggtttcagggggacagtggaggatccaggtcttggggagctcaggacttgggctgtttgtagttttttgccttttagacaagaaaaaaaaatctttccactctttagtttttgattctgatgactcgtttttcttctactctgtggccccaatttttataaagtgtttttgagtgtcctatgggccggggcagggtccaagatcttttcccttccccaggcccctcggctccctcccagatcccacccccagccccactggttgccaaacactaaatctgccgacacccatctgccccacctcctgccatggccatgaaccgcgacccccactaaatttctagattggggatagggagaaagggaggcccaggaaggtctcccctgattttttttcatagtaatttttttccccagagtttgaattttttggtcttctcctggttttttggcaaattaggggggcccggggctcaagtgcgggaagggggctggcccgaggatcccatggctctcacaccatgtttttgtacagaactgatggttgaatctttgttctcttgaaataaacagaagaaaatgaaacctttaaaaaaaaaaaaaaaaaa

SEQ ID NO: 29770 - DNA, 2733 bp, Homo Sapiens
aagggaagatggagacaatactggagcagcagcggcgctatcatgaggagaaggaacggctcatggacgtcatggctaaagagatgctcaccaagaagtccacgctccgggaccagatcaattctgatcaccgcactcgggccatgcaagataggtatatggaggtcagtgggaacctgagggatttgtatgatgataaggatggattacgaaaggaggagctcaatgccatttcaggacccaatgagtttgctgaattctataatagactcaagcaaataaaggaattccaccggaagcacccaaatgagatctgtgtgccaatgtcagtggaatttgaggaactcctgaaggctcgagagaatccaagtgaagaggcacaaaacttggtggagttcacagatgaggagggatatggtcgttatctcgatctccatgactgttacctcaagtacattaacctgaaggcatctgagaagctggattatatcacatacctgtccatctttgaccaattatttgacattcctaaagaaaggaagaatgcagagtataagagatacctagagatgctgcttgagtaccttcaggattacacagatagagtgaagcctctccaagatcagaatgaactttttgggaagattcaggctgagtttgagaagaaatgggagaatgggacctttcctggatggccgaaagagacaagcagtgccctgacccatgctggagcccatcttgacctctctgcattctcctcctgggaggagttggcttctctgggtttggacagattgaaatctgctctcttagctttaggcttgaaatgtggcgggaccctagaagagcgagcccagagactattcagtaccaaaggaaagtccctggagtcacttgatacctctttgtttgccaaaaatcccaagtcaaagggcaccaagcgagacactgaaaggaacaaagacattgcttttctagaagcccagatctatgaatatgtagagattctcggggaacagcgacatctcactcatgaaaatgtacagcgcaagcaagccaggacaggagaagagcgagaagaagaggaagaagagcagatcagtgagagtgagagtgaagatgaagagaacgagatcatttacaaccccaaaaacctgccacttggctgggatggcaaacctattccctactggctgtataagcttcatggcctaaatatcaactacaactgtgagatttgtggaaactacacctaccgagggcccaaagccttccagcgacactttgctgaatggcgtcatgctcatggcatgaggtgtttgggcatcccaaatactgctcactttgctaatgtgacacagattgaagatgctgtctccttgtgggccaaactgaaattgcagaaggcttcagaacgatggcagcctgacactgaggaagaatatgaagactcaagtgggaatgttgtgaataagaagacatacgaggatctgaaaagacaaggactgctctagtgttgagggatgtagctcagcttttgggctagcccaggcttccctaagatctgctttttctatttctcccaaccaaatcctcttaaagaccctttgctatgtagtctcatggtctagcatgcatcttgtagaaacaaggcatgctggcagattgcagggttgagatgtgttttatctgttttatattttaaaagattctgccagaaaataaaaccagaccttgttctaaagcccagggttatggaccaactcagtgcttcaggtcttaatgcctccatacctcttcctcaccaactttactagtagctgagatttaatgggcacctattatgctacatatcatgttaggtaaatctgacctgacctctttccccaccctcctttgttgctgcttccctgaatgagtattaccccaggatgaggtctgccatcagcttagttagccattgatgcaaatactagggaaagactaggaggatgagccagggttgctactaaggactaagtgtcgcaccaaggtttgccttttgtatttgcataaagaaaggagttggagctgggtgcagtggcttgtgcctgtagtcccagctacttgggaggctgaggcaggagggttgcttgagactagcctaggtaacatagtgagaccctgtctcattaaaaaaaaaaaaaaaaggcatggtggcacgcactgtagtcccagctactcaggagactgaggctagaagatcctttgaacctaggagtttgagaccagcctgggcgatatagtgaggccccatctcaaaaaaaaaaaaaagcggggggggggagttgggctgtgttggaatgggcctgcagcccaacaaacaagggaactaggaccgacagtgacttcaccagcttgctaggtcagaatgagagactggtgggtctgtctacctgtttcttctacaagatccctatttgactgtaaaagtagctaatactcacatgttctccaatcccaggtagccatggtagagttgggtagagttgagcagccgccccaggatccaaatgtggtgtctgaaatggaaagaactaaggcaaccaggaaggcactgatctgccttataagcacagtcatctgaaagtcaggcctgctgcaggacaggatcccccagagaccccatttgcctctcaacactcagaccttcaactgttttttaataaatctactttttaaaaaaaaaaaata

SEQ ID NO: 29771 - DNA, 1378 bp, Homo Sapiens
cgacgcgggagccgcacgcgccggacgaggctcgctgcgctccctgttgcccagcgcgggcccgttgaggcggagccctcagttcccggccaggacacggtctgggccgccgaatctccggccgaagagcggcggcggcagcggcggaaaaaaatgaagaatgaaattgctgccgttgtcttctttttcacaaggctagttcgaaaacatgataagttgaaaaaagaggcagttgagaggtttgctgagaaattgaccctaatacttcaagaaaaatataaaaatcactggtatccagaaaaaccatcgaaaggacaggcctacagatgtattcgtgtcaataaatttcagagagttgatcctgatgtcctgaaagcctgtgaaaacagctgcatcttgtatagtgacctgggcttgccaaaggagctcactctctgggtggacccatgtgaggtgtgctgtcggtatggagagaaaaacaatgcattcattgttgccagctttgaaaataaagatgagaacaaggatgagatctccaggaaagttaccagggcccttgataaggttacctctgattatcattcaggatcctcttcttcagatgaagaaacaagtaaggaaatggaagtgaaacccagttcggtgactgcagccgcaagtcctgtgtaccagatttcagaacttatatttccacctcttccaatgtggcaccctttgcccagaaaaaagccaggaatgtatcgagggaatggccatcagaatcactatcctcctcctgttccatttggttatccaaatcagggaagaaaaaataaaccatatcgcccaattccagtgacatgggtacctcctcctggaatgcattgtgaccggaatcactggattaatcctcacatgttagcacctcactaacttcgtttttgattgtgttggtgtcatgttgagaaaaaggtagaataaaccttactacacattaaaagttaaaagttcttactaatagtagtgaagttagatgggccaaaccatcaaacttatttttatagaagttattgagaataatctttcttaaaaaatatatgcactttagatattgatatagtttgagaaattttattaaagttagtcaagtgcctaagtttttaatattggacttgagtatttatatattgtgcatcaactctgttggatacgagaacactgtagaagtggacgatttgttctagcacctttgagaatttactttatggagcgtatgtaagttatttatatacaaggaaatctattttatgtcgttgtttaagagaattgtgtgaaatcatgtagttgcaaataaaaaatagtttgaggcatgaaaaaaaaaaaaaaaaaaaaaaaaaaa

SEQ ID NO: 29772 - DNA, 2061 bp, Homo Sapiens
tgttccgcgatcttctcaggctctcctagcagcatccatcgccgccaccctatcttcactggcttcaccttctccttctctcttcgttgctgagcgacaagcttcctagcgctatgactgtcgtctccgtcccgcagcgggagccgctcgtcctgggtggccgccttgcgccgcttggcttttcctcccgaggttactttggggccctcccgatggtgaccacggctccgcctcctttaccccggatcccggacccccgggcactgcccccgaccctcttcctccctcatttcctagggggagatggcccgtgtctgaccccccagcctcgcgctccagcagctctgcccaaccgcagcctcgccgtggcgggaggcactcctcgggcagcgccgaagaagcggcgaaagaagaaggtgcgggccagccccgcagggcagctgcccagccgcttccaccagtaccagcagcaccggccgagtctggagggcggccggagccccgcgaccggcccgagcggagcgcaggaggtcccgggcccggccgccgccttggccccgagtcctgcagccgcagccggcacggagggagccagccccgaccttgccccgctgcggcccgcggctcccggccaaacccccctcaggaaagaggttttaaaatcaaagatgggaaaatcggagaaaattgcccttccccatggccagcttgttcatggtatacacttgtatgagcaaccaaagataaacagacagaaaagcaaatataacttgccactaaccaagatcacctctgcaaaaagaaatgaaaacaacttttggcaggattctgtttcatctgacagaattcagaagcaggaaaaaaagccttttaaaaataccgagaacattaaaaattcgcatttgaagaaatcagcatttctaactgaagtgagccaaaaggaaaattatgctggggcaaagtttagtgatccaccttctcctagtgttcttccaaagcctcctagtcactggatgggaagcactgttgaaaattccaaccaaaacagggagctgatggcagtacacttaaaaaccctcctcaaagttcaaacttagatttcagatttcagtatgtgtgtaaaacataatttttcccatatccctggactcttgagaaaattggtacagaaatggaaatttgccttgttgcaacatacaattgcaaaagatgagtttaaaaaattacatacaaacagcttgtattatattttatattttgtaaatactgtataccatgtattatgtgtatattgttcatacttgagaggtatattatagttttgttatgaaagtatgtattttgccctgcccacattgcaggtgttttgtatatatacaatggataaattttaagtgtgtgctaaggcacatggaagaccgattttatttgcacaaggtactgagatttttttcaagaaacagctgtcaaatctcaaggtgaagatctaaatgtgaacagtttactaatgcactactgaagtttaaatctgtggcacaatcaatgtaagcatggggtttgtttctctaaattgatttgtaatctgaaattactgaacaactcctattcccatttttgctaaactcaatttctggttttggtatatatccattccagcttaatgcctctaattttaatgccaacaaaattggttgtaatcaaattttaaaataataataatttggcccccccttttaaaatagtcttgactctttgtgtgtgactgtttctcatgtttgaatgtgtgactaggagatgattttgtgtggttggatttttttgacttctactttactggctgagtgtgagccgccatgcctggccataatctacattttcttaccaggagcagcattgaggtttttgagcatagtacttgactactctagaggctgagacgggagcatctcttgagcctgagaagtggagattgcaattgagctaggatcaggccactgcactccagcctgggtaacagacgctgtctcaaaaaaaaggccaagagaaagtaagggagacaga

SEQ ID NO: 29773 - DNA, 3241 bp, Homo Sapiens
ggcttccccgccccgccccgtccccgggcgtctccattttggtctcaggtgtggactcggcaagaaccagcgcaagagggaagcggagttatagctaccccggccgcggagccggctcactgcactacccccgcccccttctttcctccagacgccgaagtcgcgggcgctcatggcgggcctggaggtactgttcgcatcggcagcgccggccatcacctgcaggcaggacgcgctcgtctgcttcttgcattgggaagtggtgacacacggttactgcggcttgggtgtcggtgaccagccgggtcccaatgataagaagtcagaactgctgccagctgggtggaacaacaataaagacctgtatgtcctccggtatgagtataaggatgggtccagaaagctccttgtgaaagccatcaccgtggagagcagcatgatcctcaatgtgctggaatatggctcacagcaagtggcagacttgaccctgaacttggatgattatatcgatgcagaacacctgggtgacttccacaggacctacaagaacagtgaggagcttcggtctcgtattgtgtctggaatcatcacacctatccatgagcagtgggaaaaggctaatgtaagcagtccccaccgggagttcccccctgctaccgccagagaggtggacccactccggattcctccacaccacccacacaccagtcggcagcctccctggtgtgatcccctgggcccgtttgttgtcgggggagaagacttagacccttttgggcctcggagaggtggcatgattgtggatcccctgagatctggcttcccaagagcacttattgacccttcctcaggcctcccgaaccgacttcctccaggcgctgtgcccccaggagctcgctttgacccctttggacccattgggaccagcccacccggacctaacccagaccatctccccccgccgggctacgatgacatgtacctgtgaaggcctcaagaatgtaacatcccaggcttccctccattctcctggagctgccaccgctgtccccatcagcaaccatgttcttgcaggctgggggcaagggattctgctcatgtgtttgcagaccggctgggatagcctccccaccccttatcagagccaagacacctgctgcagctctccacctagctgcagatagctcccaaagagaaatcagtgtgtctctttcaccatcagctcctcccctttcaccaccagctcctctccacttcccaagggagactccggcaaccttcagcaacatatatcctcgaccagatgcagtgctataagaacagaacgcattttggatgttattattaagaaccaaatgtcaatacagaattcatgttgccggtttcccacttttctttttacattaatgcatagctgcttccatttatgagactttagagtttgagtttctgtagggctgaatgactctttttcctgcccagggcccattcttgcttctcaggcaccttccgtttattaattgccattgctcctgacatcactaagatgggtccccttctggctgcatgaatggaaatgagtgactggaaatcccataggccacaagaatgactttcacaagggcaggaacattgtggaaagactgcatcattctgatgaggcaaaatcctccagctattcctgtctgggccagttttgtaggtccatctgtgcatgggcagcagtagtcaaaaagccaaggaaaaaacagagcagacctgaaggctaatcttatttttgccactaacttagtgaatgaccctaagcaagttccttctcctcttagggccttgtgccaagcctatgaaattggaggtggctttcctgctctaaagcattttgatgtctcattctgtgtttggtaacccctataaactggggcagaggaaaagaatgatggttcaaggccatacttcccttgaaccttgtgtggttcttgcctaactctgtggtttttggaccccatggggcccagacagagcacaggagcatgggctgcctctgagtgtggtgttgaacttcgggaggagcagggagccctgcaccttgtgtcctggcccacctgacctttggtgttctccggatccttttcagcccgaggcctgacagacgcgggcagtgatgagccctgttctggagtggaaagagcacgatagagcaccaggctaagaggcacgagatcaaggcggtagtcacttccgctctgcagctagcatttcaaccatatgtggatcctttcatttctcagctccctggattccttcccctaaattaggacctattatttacctgtaggtaagcaagctactgtagctcttctgaggtatctgccaggctgttttctgtagcctcagattgcctatctgcttagcctgagaacaggtagatgaaaactaaactgatgcctaggcccagggtcagtctcagatggaagctgggcctgggtggggaggctagcatgcgtggctccctgggtatttctgtcagtccccatggcaagcagtgatttagtaaaacaccccagagtcagggaagccaaccaccttgaaacctttagaacatctctgctttggagaaagacccagagatcaggcagaggtgcagattcaatcattactcataacctttgagagctggcaaatgggaggagtgttagtctttgttttggaattggaccattcttgcaaccaaaaggacttagagcagtttgctcataaagacatcctttattataaaaggaagtatttaaaggatgatagagaccatcagatagaagcagggaaggtagataacttttaggaccttgatgtgaggaaaagataaaatttaaacaataaatttgccacttagattttctagcagcaaagtccgaaaagatagttatatacaaaattctgttttctgaaaacaaaattgtgattcaccttcagaattggccattttttttgtgagtttccttgcatcaaggacactgagaaacacagtcattgtcttaggtgttctatgggaggaagtgaatagagcctttaggaacttcctggtcaagcttatggtgcttattttgatctgggccacttccctccttccagtcatgagtaatcatcaaggagcaagttggagtgtttcaggtgtatattttgtagaacccaaaagattggagccttaacaataaacatcagcactaagtgacctgttaaaaaa

SEQ ID NO: 29774 - DNA, 2184 bp, Homo Sapiens
cgctatgcagagaaagcccccctggctcttctctctcaatccataatccagcgatgctgcagctgtaaaagcattaatagaaaatcaatccacaacctcgcggggcagcgatcgtcgagcgccgtttccaggctgccttccctggggtcgggagcggccccgctccccccgtggctggcgcggaatgtggtgatccgtcccggggcggggatgacttcatgcagccggagctccgcggcgggagcggaggctgctgctggcaggtggggcgcgggccggcgcgagctgaccgagcactcggcgggcgcggcgggactgcggcccgtggcggcgtgcgcggggacctgcgctgactaggtccggggaagtttcctgactttctgagaagccctggtttccccaaagaagtgatttctgatagaaatctgaaggtcatctccaagaaaaaagagatctagtatagtcaatgaattaaagacaagaaggtttccaatcagtccctgctatgtggatatttggtagcaatgactgatgtggaaactacatatgcagattttattgcttcaggaagaacaggtagaagaaatgcaatacatgatatcctggtttcctctgcaagtggcaacagcaatgaattagccttgaaattagcaggtcttgatatcaacaagacagaaggtgaagaagatgcacaacgaagttctacagaacaaagtggggaagcccagggagaagcagcaaaatctgaaagctaacaccccactttgaccctcgaccacacctgaaaatgtctcaaatctccaggagtatctggaatgcatttgtttccatgagtgaaaagaggaaaaagaaaatggctgtgctgcattgcaggaacctgctcattatcatgttaaaaatgagggcagaggctgtggctgcaggcagacttttccctacctctgtcattagcaatggttgaaatcatgtggcttgtgtttgggcgtcatttttgtatggatcctttcacttgatcatatgacgaaatgcttatagagagtagctccgacctagatgatgattcttcctgtagcatctggcccctcacaatgtcagaggatttaattgtgtctaattgcgaagggttgattgaaccccagagtttaaatatctctggctcaagtgttcacccagtaaaagaaagatccagaaagcactgtttttagcattacgtatctgtgtgttactgctgtgttatttacactgttttgtattgtacaatatatatgctcagcactgcccccttctctgattgcttatgaaaaacaaaatgatgtacattactgtgaatttttataccactcatttttaaaagggctgtcttttcattttagttttccatactgtggtggtgtacacaggatagaacacccttttttaaaacacagtctttccccttgctcattgtatgttgatgagttgattaagtctaacagattcatcaagactccattgctttattatagagacatttgaaaatatccattaatgtgaatatcacctgaattcagtctgtttggtgtctgcacagactggaattcaatctgtcaaatttgttttattctcaagtggagaacttctcccacataatatatatatatatatatattttaatttatgagaattttggacaattggaaaggtagaaaagaaaagccaagatcatactaaggactggaaatattttgttctatggaatcaaatttctcacaatgctgtatgatactatttaaatttggaggacaacttatcttcactaagctgaatcaggtggagaaagtaatctccttgcaatcatgtggacaccaatcacaaaagtaaagccctggtgttgtgttttcatgtcttttttcagccctctcagatccaaatgttattatgcactttttaatgtttgtaaacttttactaataattagtgtgaattgcattctgatacaataatgattatcattagaagctaacaaaattctcattaatactgtgtttgatggcctctgctgtgttttaacatcgtgcttcttatatggaaagtttttgtgagctgtgtaatccctctggtcagtattatgaaatcatttgtcagtggtaataaataaggaaccagtaatatgccaatggttcatgaattactggacaaatagca

SEQ ID NO: 29775 - DNA, 7315 bp, Homo Sapiens
caggtttcttgctgtatggatcactgattgaataatagatggctttacctcgtctcacaggagccttgcgttccttttcaaatgtcaccaagcaagataattataatgaagaagtggctgacttaaagataaagcgatctaaacttcatgaacaagttttagatttgggcctgacatggaagaagataataaaatttttgaatgaaaaactggagaagagtaaaatgcaaagtataaatgaagacttaaaagatatattacatgctgcaaagcagatagttggaactgataatgggagagaagcaattgaaagtggggctgcatttctcttcatgacatttcacttgaaggactctgttggtcacaaggaaacaaaggctatcaaacagatgtttggcccctttccttcatcatctgccactgcagcttgtaatgctactaatcgaattatttctcattttagtcaagatgattttactgctcttgtgcagatgacagaaaaagaacatggcgatagggttttttttggtaaaaatttagcattttcatttgacatgcatgatttggaccactttgacgaactgccaataaatggtgaaactcagaaaactataagcctagattataagaagtttctgaatgaacatctccaggaggcttgcaccccagaactcaagcctgtggaaaaaacaaatggctcctttttgtggtgtgaagttgaaaagtacctaaattcaactttgaaggaaatgactgaagtgccaagagtagaagatctttgctgtactttatatgatatgcttgcttctattaaaagtggtgatgaacttcaggatgagctatttgaactgctgggacctgaaggacttgaacttattgagaaactcctccagaacagaattacaattgtggatagatttcttaattcttcaaatgatcataggtttcaggctcttcaagacaattgtaaaaaaattttaggagaaaatgctaaacccaattatggttgtcaagtcactattcagtctgaacaagaaaagcagttaatgaaacaatatcgacgtgaagaaaaaagaattgccagacgagaaaaaaaggctggagaagatttagaagtttcagaaggacttatgtgctttgatcctaaggaattgcggatacaaagagaacaggcacttctgaatgctagaagtgttccaattctgagcaggcagagagatgcagacgttgaaaaaatacattatccccatgtgtatgattcccaggctgaagccatgaaaacatcagcatttattgctggtgcaaagatgattttgccagaaggaatccaaagagagaataacaagctttatgaagaagtaaggatttcctacagcgaaccaatgccactcagctttgaggaaaagccagtttatatccaagacttagatgagatcggacagctggcttttaaaggaatgaagagactcaatagaatccagtcaatagtgtttgagactgcctacaacaccaatgagaacatgctgatttgtgcccctacaggagctggaaaaaccaacattgcaatgctgacagtcttgcatgaaattcgccaacattttcaacaaggtgttatcaaaaagaatgaatttaagattgtatatgttgctccaatgaaagccttggcagctgaaatgacagattacttcagcagacgtctagagccactaggcatcattgtgaaagaattgactggtgacatgcagttgtccaaaagtgaaattttacgaactcagatgcttgtgaccacaccagaaaaatgggatgtagtgacaagaaagagtgttggggatgtagctctttcccagattgtaaggctccttattcttgatgaagttcatttgctgcatgaagatagaggaccagtattagaaagcatagttgcccgtactttacggcaggtggaatccacacagagtatgataaggattctcggactgtctgcaactttacctaactacctcgatgttgccacatttttacatgttaatccatacattggacttttcttctttgatggccgttttcgaccagtacctcttggacagacatttttggggattaaatgtgcaaataagatgcagcagttgaataacatggatgaagtatgttatgaaaatgttttgaagcaagtaaaggctggacaccaggtgatggtgtttgtacatgctcgaaatgccactgtaagaacagctatgtctctaatagaaagagcaaaaaattgtggccatattcccttctttttttctacccaaggacatgactatgtacttgcagaaaaacaggtacaaaggtcgagaaataagcaagtacgagaattattcccagatggttttagtattcatcatgcaggaatgcttcggcaggacagaaatttagttgaaaacttgttttctaatgggcatatcaaagtcctagtgtgtacagctacgttagcctggggtgtcaatcttcccgcccatgctgttattattaagggaacacaaatatatgctgcaaaaagaggctcctttgttgaccttggaattttagatgtcatgcagatatttggtcgagctggacgaccacaatttgacaaatttggggaaggaataattataacaacgcatgataaactcagccattacctcactttgctcactcaacgaaacccaattgagagtcagtttctggaaagccttgcagataacctaaatgcagagattgctctgggaacagttactaatgtggaagaagcagtgaagtggataagttacacttatctttatgtacggatgagagcaaatccattagcatatggcatcagtcacaaggcttatcagattgacccaacattaagaaagcatcgagaacagttggtcattgaagttggacgaaaactagacaaagctcagatgattcgttttgaggagcgaactggatatttttcctcaactgatttgggtagaactgccagccattactatattaaatacaacaccattgagacctttaatgaactctttgatgctcacaaaacagaaggtgatatctttgccatagtctccaaagctgaagaatttgatcaaattaaggtcagagaagaggaaatagaggagttagataccttattaagcaatttttgtgaactctccactcctggaggtgtagagaatagttatgggaaaataaacatcttacttcaaacttatatcagccgaggagaaatggacagtttctcccttatatcagattctgcatatgttgcacagaatgcagctagaattgtccgtgctctttttgaaattgctctgaggaaacgttggcctaccatgacctacaggctcctgaatcttagtaaagtcattgacaagaggctttggggttgggctagccctttgagacaattttcaatcctaccaccacacatcctaacaagattagaagaaaaaaagcttactgtggataagctgaaagacatgaggaaagatgaaataggtcacattttacatcatgtgaatattggactgaaggtcaaacaatgtgttcatcagattccttctgttatgatggaagcatccattcagcccatcacaaggactgtcctccgagtgacactcagcatctatgctgatttcacttggaatgatcaggtacatgggacagtaggagaaccttggtggatttgggtagaagatcctacaaatgatcatatttatcattcagagtattttctagctctaaaaaaacaagtcattagtaaagaagcccaactactggtatttacaatccctatttttgagcctttgccttcccaatactacatccgagcagtgtctgatagatggttgggtgctgaggcagtatgtattatcaactttcaacatctaattctaccagagagacatcctcctcatacagaattactggatcttcagcctttaccaatcacagctttgggatgtaaagcatatgaagccctgtacaacttcagccactttaaccctgtacagacacaaatatttcatacattgtatcacacggattgtaatgtcctacttggagcacctactggatcgggaaagactgttgcagctgaattagccattttcagagtcttcaacaaataccctacttcaaaggcggtatatattgcacccctaaaagccctagtacgtgaaagaatggatgattggaaagttagaatagaagaaaaacttggtaaaaaagttattgaactaacaggggatgtgactcctgatatgaaatccattgccaaggctgaccttatcgtcactacgccagagaagtgggatggagtcagcagaagctggcaaaataggaactatgttcagcaagtcactattctcatcatagatgagatccatctgcttggggaggaaagaggccctgttctagaggtcattgtatctcgaacaaattttatctcatcacacacagaaaagcctgttagaatagttggactatctactgcattagctaatgccagagaccttgctgattggctcaatattaagcagatgggcttgtttaacttccgaccatcagtacgcccagttccactggaagttcacattcaaggctttccaggtcaacattactgtcctcgtatggctagtatgaacaagcctgcatttcaggcaattagaagccattctccagccaaacctgttttgatatttgtctcatcaagacgtcaaactcgtcttactgctttggaattgatcgccttcctggctactgaagaagatccaaagcagtggttaaacatggatgaaagagagatggagaacatcattgcaacagtaagagattccaacctcaagctgacccttgctttcgggataggaatgcatcatgctggactacatgagagggaccgaaaaacagtagaggaactatttgtaaactgtaaagttcaggttcttattgctacaagcacattagcctggggtgtaaactttccagctcatttagtaattattaagggaacagaatactatgatggaaaaacaagacgttatgtggattttcccattacagatgtcctccagatgatggggcgtgctgggaggccgcagttcgatgaccaaggcaaagctgtaattctagttcatgacataaagaaagacttttataaaaaatttctttatgaacctttcccagtagaatcaagtttattaggagtgctctctgaccacttaaatgcagagattgctggtggtacaattacatctaagcaagatgcattggattatatcacctggacttactttttccgacgtcttatcatgaatcccagctattacaatttgggtgatgtgagccatgattctgtgaacaagtttctgtcccatctgattgagaagtccctgattgaattggaactttcctactgtattgaaattggagaggataatcgcagcattgaacctctaacttatggccgaattgcctcctattactatttgaagcatcaaacagttaaaatgttcaaggaccgcttgaagcctgaatgcagtactgaagaactgctttcaattctaagtgatgcagaagaatatacagatttgccagtgagacacaatgaagatcatatgaatagtgaactggcaaaatgtcttcccattgaatcaaatcctcattcatttgacagccctcacaccaaagcacatctcctgctacaggcacatctcagccgagccatgctaccctgcccagattatgacactgataccaaaacagtcttggaccaagctctcagagtatgtcaggcaatgctggacgtggctgcaaatcagggctggctggtgactgtcctgaatatcaccaacctgattcagatggtgatccagggtcggtggttaaaggactcttctcttcttacactaccaaacatagaaaaccatcatcttcaccttttcaagaaatggaagccgattatgaagggcccacatgctaggggtcggacctccatcgagtcccttcctgaactgatccatgcctgtggagggaaagaccatgtatttagctccatggtagaaagtgagctacatgctgcaaaaacgaaacaggcatggaatttcttatctcacttgccagtgataaatgttggcataagtgttaaaggctcgtgggatgacttagttgaaggacataatgaactctctgtctcaactctgactgcagacaaacgagatgacaacaaatggatcaaattgcatgctgaccaagagtatgtgcttcaagtgagcttgcagagagtccactttgggttccacaagggaaagccagagagctgtgcagttactcctcgatttcccaaatcaaaagacgaaggatggtttttgatattaggagaagtggataagagagaacttattgctttgaaaagagtaggatatattcgaaatcatcatgttgcttccctttctttttatacccctgaaatacctggaaggtatatctacacattatatttcatgagtgactgctaccttggcctggaccagcagtatgacatctatctcaacgttacacaagcgagtctttctgcacaggtcaacaccaaggtctctgattccctgactgacctggcattaaagtaacttgacctgaacaatccatttgaaaggagtggctaagaattctctctgttcagtcatctagacaaatcgaattacttgatgtttgccttgaaagaatcaacttctaacctcaaccatccaggaaattgacagtggctgcagtattgactccagtgacataaagttaaccacagtggccttttaacaaatgttgccttttataatgttatctttatgagtttcttgatatgtaagatgaaaaagcatttagaataatcttttaatttgtgtatatttgggatgatatttaggagctatcaatcaaattttacatctcacaatgtactgtttacatggatattggctgctttttttaaggaaaaccacattgagatgtgacaagtgttaggacttgtcacagatttctaactctgccgcataaactataaatctgtaaggtggtacacagcgtgtcttgttagcaaaatttatactttgatatgatcacatgtagaagtagcttcaagaatttcttgtagtcataaatgtttaataatatatgatgtaaaattatattatggagcctaatgatgataacaaagaaaacaatatactgatcttagaaaatgtagacatggttaactgggaaataaaatatagagtggcacttcaaaaaaaaaaaaaaaaag

SEQ ID NO: 29776 - DNA, 1305 bp, Homo Sapiens
cctgagggtgcgactccgccgcgatggtgacccggttcctgggcccacgctaccgggagctggtcaagaactgggtcccgacggcctacacatggggcgctgtgggcgccgtggggctggtgtgggccaccgattggcggctgatcctggactgggtaccttacatcaatggcaagtttaagaaggataattaattacacaaacccttcacagactgctctggtgcctggtggtgctagctcctcccacctcagcacctgctgcatctggagcagcccaagcctcaggatggacaagaggaaacccacagctcagcttcaggcttcttatgtttctgaaaacagcttggatattttaatgcacgttgcattaaacctcactgaaacctgctccgtgcccggatgttgatcatgctggtggcttggttactgtgactgtagctggagtggcacaggtgacccaggcgtcctttcagctccagaatgttgcaagtctaggagagtgttccaatggctgacagaaactgcctatttgaaatggctcataagtagtatctgcagtgtgttcatccgttgctgccttaacaagtcacccacacgtagtggcttaaagcaacgaacattcactctctcacagtctgtgtcagtcggggatttgggagtgatgtatctgggtggttgtggcccagagtctctcatgaggttgcagttaagacatcagccaaggccacttcgtctgaggaaggctcaactggggctggagccacttccaagccagtgccctcacgtggctgtcggtgacagccacagttccttcccatgggggcccctacacgaagctgcttgagcatcctcacggcatggcctctgccttccccagagcaggtgaaccaagggagaggaaggagcaagccacagtgcttctatgagccaccctgagaagtctcacgtgatcacttccgccacagcctgtttatcaaaagcaagccccccaggcccagcccacgtgcagagggaggagaatgaggttctgtgttttgaagggaagaatatcagaattggtagacatttcaaactgtcacattagggatacaaaaatgaacaggctgggagtggtggctcagcctacaatcccaacactttgggaggctgaggaaggggcatcacttgaaccaggagttcagtactaacctgggcaacaaagaggcccctgtctctgataaaaagaaaaaaaatgaaaaaataaaaatgaacaggtataaaaagaaaaaaaaaaaaaaaaaaaaaaaaaaaaaaaaaaaaaaaa

SEQ ID NO: 29777 - DNA, 3616 bp, Homo Sapiens
gcccgcgtcgggcgcctggctctgtacgcgagcccggggatctgcggccttcgtgccccccctcccccgcccgccctctcgtggagcccggcgccggcggcggctgcccgggcggggggttgcggcgctcaggagaggccccggctccgccccgggcctgcccagggggagagcggagcggtccgcagccgggtcgggtcggggcccctcccgggaggagcgtggagcggcggcggcggcggcggcagaaatgatggaagaattgcatagcctggacccacgacggcaggaattattggaggccaggtttactggagtaggtgttagtaagggaccacttaatagtgagtcttccaaccagagcttgtgcagcgtcggatccttgagtgataaagaagtagagactcccgagaaaaagcagaatgaccagcgaaatcggaaaagaaaagctgaaccatatgaaactagccaagggaaaggcactcctaggggacataaaattagtgattactttgagtttgctgggggaagcgcgccaggaaccagccctggcagaagtgttccaccagttgcacgatcctcaccgcaacattccttatccaatcccttaccgcgacgagtagaacagcccctctatggtttagatggcagtgctgcaaaggaggcaacggaggagcagtctgctctgccaaccctcatgtcagtgatgctagcaaaacctcggcttgacacagagcagctggcgcaaaggggagctggcctctgcttcacttttgtttcagctcagcaaaacagtccctcatctacgggatctggcaacacagagcattcctgcagctcccaaaaacagatctccatccagcacagacagacccagtccgacctcacaatagaaaaaatatctgcactagaaaacagtaagaattctgacttagagaagaaggagggaagaatagatgatttattaagagccaactgtgatttgagacggcagattgatgaacagcaaaagatgctagagaaatacaaggaacgattaaatagatgtgtgacaatgagcaagaaactccttatagaaaagtcaaaacaagagaagatggcgtgtagagataagagcatgcaagaccgcttgagactgggccactttactactgtccgacacggagcctcatttactgaacagtggacagatggttatgcttttcagaatcttatcaagcaacaggaaaggataaattcacagagggaagagatagaaagacaacggaaaatgttagcaaagcggaaacctcctgccatgggtcaggcccctcctgcaaccaatgagcagaaacagcggaaaagcaagaccaatggagctgaaaatgaaacgttaacgttagcagaataccatgaacaagaagaaatcttcaaactcagattaggtcatcttaaaaaggaggaagcagagatccaggcagagctggagagactagaaagggttagaaatctacatatcagggaactaaaaaggatacataatgaagataattcacaatttaaagatcatccaacgctaaatgacagatatttgttgttacatcttttgggtagaggaggtttcagtgaagtttacaaggcatttgatctaacagagcaaagatacgtagctgtgaaaattcaccagttaaataaaaactggagagatgagaaaaaggagaattaccacaagcatgcatgtagggaataccggattcataaagagctggatcatcccagaatagttaagctgtatgattacttttcactggatactgactcgttttgtacagtattagaatactgtgagggaaatgatctggacttctacctgaaacagcacaaattaatgtcggagaaagaggcccggtccattatcatgcagattgtgaatgctttaaagtacttaaatgaaataaaacctcccatcatacactatgacctcaaaccaggtaatattcttttagtaaatggtacagcgtgtggagagataaaaattacagattttggtctttcgaagatcatggatgatgatagctacaattcagtggatggcatggagctaacatcacaaggtgctggtacttattggtatttaccaccagagtgttttgtggttgggaaagaaccaccaaagatctcaaataaagttgatgtgtggtcggtgggtgtgatcttctatcagtgtctttatggaaggaagccttttggccataaccagtctcagcaagacatcctacaagagaatacgattcttaaagctactgaagtgcagttcccgccaaagccagtagtaacacctgaagcaaaggcgtttattcgacgatgcttggcctaccgaaaggaggaccgcattgatgtccagcagctggcctgtgatccctacttgttgcctcacatccgaaagtcagtctctacaagtagccctgctggagctgctattgcatcaacctctggggcgtccaataacagttcttctaattgagactgactccaaggccacaaactgttcaacacacacaaagtggacaaatggcgttcagcagcgggtttggaacatagcgaatccgaatggatctgatgaaacctgtaccaggtgcttttattttcttgcttttttcccatccatagagcatgacagcatcgattctcattgaggagaaaccttgggcagctccggccaggccttgtaggaaaaggccccgcccgaggttccagcgtcaacggccactgtgtgtggctgctctgagtgaggaaaaaattaaaaagaaaaactggttccatgtactgtgaacttgaaaacttgcagactcaggggggtccctgatgcagtgcttcagatgaagaatgtggacttgaaaatacagactgggctagtccagtgtctatatttaaacttgttcttttcttttaataaagtttaggtaacatctcctgaaaagcttgtagcacaaaggctcagctggggatggtgtttgacttcggaggaaaaaagttgctattgcccgttaaaggcactagagttagtgttttatccctaaataatttcaatttttaaaaacatgcagcttccctctccccttttttatttttgaaagaatacatttggtcataaagtgaaacccgtattagcaagtacgtggcaatgttcattccaatcagatgcagctttctcctccgtctggtctcctgtttgcaattgcttccctcatctcagtagggaaaaaattgagtgggagtactgagatgtgtgggtttttgccattggacaaagaatgaggttagaagactgcagcttggagtctctctaggttttcaactatttcttcacaatttgaacacttgacggttgtcccttttaatttatttgaagtgctatttttttaaataaaggttcatctgtccatgcagtcctcttggattctctgaatgtagtaactatgaagctatgccaaaggtaggcagaaaatgggcttgggagccagacactccagggatcagtagttcctacccatagtctttgtgtgcttgctaaatggtgtacatttcttgttaaccacgttattaaaacttgatcagcacataaaaaaaaaaaaaa

SEQ ID NO: 29778 - DNA, 2758 bp, Homo Sapiens
gaattcaggggggaaaggaggagctggagacagattgtaggaccgagcgcgggcaggcgggaggcaacggagctaccagccgctcctctctgctatatgaaatatgggagacgacagaccgtttgtgtgcaatgccccgggctgtggacagagatttacaaacgaggaccacctggcagttcataaacacaagcatgagatgacattgaaatttggcccagcccgaactgactcagtcatcattgcagatcaaacgcctactccaactagattcctgaagaactgtgaggaggtgggactcttcaatgaactagctagctcctttgaacatgaattcaagaaagctgcagatgaggatgagaaaaaggctgctgctgggccccttgacatgtctctgccttccacaccagacatcaaaatcaaagaagaagagccagtggaggtagactcatccccacctgatagccctgcctctagtccctgttccccaccactgaaggagaaggaggttaccccaaagcctgttctgatctctacccccacacccaccattgtacgtcctggctccctgcctctccacttgggctatgatccacttcatccaacccttccctccccaacctctgtcatcacacaggctccaccatccaacaggcaaatggggtctcccactggctccctccctcttgtcatgcatcttgctaatggacagaccatgcctgtgttgccagggcctccagtacagatgccgtctgttatatcgctggccagacctgtgtccatggtgcccaacattcctggtatccctggcccaccagttaacagtagtggctccatttctccctctggccaccctataccatcagaagccaagatgagactgaaagccaccctaactcaccaagtctcctcaatcaatggtggttgtggaatggtggtgggtactgccagcaccatggtgacagcccgcccagagcagagccagattctcatccagcaccctgatgccccatcccctgcccagccacaggtctcaccagctcagcccacccctagtactggggggcgacggcggcgcacagtagatgaagatccagatgagcgacggcagcgctttctggagcgcaaccgggctgcagcctcccgctgccgccaaaagcgaaagctgtgggtgtcctccctagagaagaaggccgaagaactcacttctcagaacattcagctgagtaatgaagtcacattactacgcaatgaggtggcccagttgaaacagctactgttagctcataaagactgcccagtcactgcactacagaaaaagactcaaggctatttagaaagccccaaggaaagctcagagccaacgggttctccagcccctgtgattcagcacagctcagcaacagcccctagcaatggcctcagtgttcgctctgcagctgaagctgtggccacctcggtcctcactcagatggccagccaaaggacagaactgagcatgccgatacaatcgcatgtaatcatgaccccacagtcccagtctgcgggcagatgatgcctcctctggtggagaggtcctcagccagagctcgcccgcccaagagccaagagagatgtcatcttatcccctcccatctgccttggacatggcaatatgggtggggggaattgtgtgttgtgagtaatggacagatatggggctttttagccatgtggtcatgtacgtttgacacctgtgctgggggcctcccagccccggagcctcatagatcatcccccagggtggggtttctgatgcatccacagccaaaggcctttccagatggtccgaacaatcacccctgccccatgcacgtgtatctgtctcttttaacactaacccttggcacttctaggtttggggtttctcagttccctctcttcccactaagccgtggctgttacctttttgttccttaccagcatgccacttcctgccagatagagggaggctagatttgatgacatattacccgctgacccagccccagccaccccatggactcaggactcaggtctcccatagctgcttatttacccgtttcctttttcctcttccttaattctagttaaaacattcacttacggagaatgtaaggttacctttgatgtatgaagtagcagtattttccagtttttccataagctttattccttctctctacctgccaccaaaaagaaagaaaccctcaagagttctaattctttttcatctatttgcacagctatttgggtacctcattttgtcccttgactttagtgtagtggtggggtctttcccaccaccccactaagccttggcaacctcattttgtggccttattattaaagattgcttggtagtgaaaagggaagggcccagaatctgactggctgattctgtctcctcccctccctccttctttagtttaaccatcagggcagacaggaacaaagtatttcaaagcttgttccatcaagttagggattaatcgattcctttatgttttataagagtttaccggccaaagcatattgtcatctttggtcatttttctgctcctgcttctctctcttcattggggtatcaacattaccgcccctgtctctcttcattcccctatcaacattaccgcccctgtctcttctgtaactacttcagactcagccctcctggaggctgtcatgtaggggactctcgaggttcctttgttctaccccatctctcccccccgaattc

SEQ ID NO: 29779 - DNA, 1743 bp, Homo Sapiens
gtaatttcgacctgtcctttcccgggagttagcgatccctcaacccctgcactgcgctagtcctaaagaggaaatgtctctacgctgcggggatgcagcccgcaccctggggccccgggtatttgggagatatttttgcagcccagtcagaccgttaagctccttgccagataaaaaaaaggaactcctacagaatggaccagaccttcaagattttgtatctggtgatcttgcagacaggagcacctgggatgaatataaaggaaacctaaaacgccagaaaggagaaaggttaagactacctccatggctaaagacagagattcccatggggaaaaattacaataaactgaaaaatactttgcggaatttaaatctccatacagtatgtgaggaagctcgatgtcccaatattggagagtgttggggaggtggagaatatgccaccgccacagccacgatcatgttgatgggtgacacatgtacaagaggttgcagattttgttctgttaagactgcaagaaatcctcctccactggatgccagtgagccctacaatactgcaaaggcaattgcagaatggggtctggattatgttgtcctgacatctgtggatcgagatgatatgcctgatgggggagctgaacacattgcaaagaccgtatcatatttaaaggaaaggaatccaaaaatccttgtggagtgtcttactcctgattttcgaggtgatctcaaagcaatagaaaaagttgctctgtcaggattagatgtgtatgcacataatgtagaaacagtcccggaattacagagtaaggttcgtgatcctcgggccaattttgatcagtccctacgtgtactgaaacatgccaagaaggttcagcctgatgttatttctaaaacatctataatgttgggtttaggcgagaatgatgagcaagtatatgcaacaatgaaagcacttcgtgaggcagatgtagactgcttgactttaggacaatatatgcagccaacaaggcgtcaccttaaggttgaagaatatattactcctgaaaaattcaaatactgggaaaaagtaggaaatgaacttggatttcattatactgcaagtggccctttggtgcgttcttcatataaagcaggtgaatttttcctgaaaaatctagtggctaaaagaaaaacaaaagacctctaaaacttcaacaagaccttcaagatcacagaaatttttaaaatttgattccagttaataacagaggtggtgccagaatgcctggactgcagtggatgtgccccacctctttgcttaaaaaaaaaaatgtcaatagccaggcatagtggctcacgcctgtaatcccagcactttaggaggccaaggcgggtggatcacctgaggtcaggagttcgagaccagcctggccaacatggtgaaatcctgtctccactaaaaacacaaaaattagtcaggcgtggtagtgggtgcctgtaatcccagctactcgggaggctaaggcaggagaatcacttgaacctgggagggggaggttgcagtgagccaagatcgctccattgccctccagcctgggtgacaagagcaaaactccatctcaaataaataaaaaggaaaaaaaagtcaataaactgtacaaatttaattacagtaattcatttggcttttagtgtatcttctttgtcccaattaaacagttgcttgctgtgatgtaatcttaaaaaaaaaaaaaaaaa

SEQ ID NO: 29780 - DNA, 2331 bp, Homo Sapiens; identical to SEQ ID NO: 23062

SEQ ID NO: 29781 - DNA, 5822 bp, Homo Sapiens
gatcccaaagatgtgctccacaaatccaggcaaatgggtcacctttgatgatgatcctgctgttcaatcttctcaaaagtcaaagaattttcctctggagaatcaaggtgtctgtagaccaaatggactgaagctgaaccttcctggcctcagggaatttcccagtggatcttcctccaccagcagcactcctctctcctcccccattgtagatttttatttcagtccaggacctccaagtaactctcctctttctacacctaccaaagacttcccaggttttcctggcatccccaaagcagggactcatgtgctttatcctattccagaatcatcttcagacagcccactcgcaatatcaggaggagaatcttccttactgcctaccagaccaacatgtttatcccatgccttgttacccagtgaccactcatgtacacatccaactcccaaagtaggtcttccagatgaagttaatcctcaacaggctgaaagcctaggattccaaagtgatgatctcccccagtttcagtattttcgagaggactgtgctttttcaagtccattttggaaagatgaaggcagtgattcccatttcacccttgacccaccaggaagcaaaaagatgttctcatcaagaaacaaggagatgcctattgaccaaaaaagcctaaataagtgttcactcaactatatctgtgagaagcttgaacatctccagtcagctgagaaccaagactcacttagaagtttgtctatgcactgtctatgtgctgaagaaaatgcctcttcctttgtcccccacacactcttcaggagtcagccaaaatccggatggtctttcatgctgagaattcctgagaagaagaatatgatgtcttcccggcaatggggaccaatttttctgaaagttttgcctggaggaattttgcagatgtattatgaacagggattagaaaaaccatttaaagagatacagcttgatccatattgtaggctttctgaacccaaggttgagaacttcagtgtagcaggaaaaatccacactgtgaagattgaacatgtgtcttacacagaaaaaaggaaataccattctaagacagaagtagttcatgaacctgacatagagcagatgctgaagttggggtccacatcgtaccatgacttccttgactttctgactactgtggaggaggagctgatgaagttgccagctgtttcaaaaccaaaaaagaactacgaggagcaagaaatttccttggaaattgtggacaacttttggggtaaagtcacaaaagaaggaaaatttgttgaaagtgctgtgataactcaaatttattgcctctgctttgtgaatgggaacctggaatgctttttaaccttgaatgaccttgagttgccgaagcgagatgaatcctattatgagaaggactcagaaaaaaaggggattgatattcttgactaccattttcataagtgtgtgaatgtacaagaatttgagcaatcaagaatcattaagtttgtacctctggatgcctgccggtttgagctgatgcgtttcaagactttgtataatggggataatcttcccttttccttgaagtctgtagtggttgtccagggagcatacgtggaacttcaggcttttgtcaacatggcctcattggcgcagaggtcatcctatgctggttccttaaggtcctgtgacaatataaggatacactttcctgtcccatcgcagtggatcaaggccctttggaccatgaacctccagaggcagaagtctctgaaagctaaaatgaaccgccgagcatgtctggggagtttacaggaacttgaatctgaacctgtcattcaagtcactgtggggtcagcaaaatatgagagtgcctaccaggcagtggtatggaagatagatcggcttccagacaaaaattcaagtctagatcatccccattgtctgtcatacaaattagagcttggatcagaccaagaaattccctctgattggtatccatttgctactgttcagttttccgtgcctgacacctgtgcctcaaggacagaggtcaggtctctgggagtggagagtgatgtccagccacagaaacatgttcagcagcgagcttgctacaacatccaggttgaaatagaaaagaagtggattaaaatcgatggagaagacccagataaaattggtgactgcataactcagtaggagtagcaagagtttatgatgacagcccacttgtcaaatatgtaattcaccgaaaccacaccaagtcctgctactgtagagtggaaatgacttctgaatagcggttttaggacaggtctgatggctgtgtttagagaagtttagacctaaaaccgaacaatctgtattttttgcttttcatgtgtttttgtcctaggggttcgatctaaaatgtttctataattcgtgtgatgttttgcttcctattgaaactcaaaggcactgttactcgttgtgtgaccccgcagccagtatgatttttgattactcagtggctgactgttttgctctctggattactgaggtgccgtcttcatttcttcccatctcttcttgctgcttagtgtctgtactagagggtaagggaatcaaaggagacataaaccaaaatagttaattttccctctttcttgcctctgaaatgtggctaggtgtagaatgatgttgaaaccacaggctaaaatgtagatctggaagtatctgtgcttttgaattacttatttacctgtcctcttaccgttggtaaataataattggctatatttggtacctgtctctctcctactgtattgtcattttcaaaatgtgtttgttttctggcgcgtgctgcaaagaagctatttctgttgtcctacatattttagtataaatcactaagacatatttcctttcacttggcaggattcctttcaaaatggaatctgagtattagacactagttaacatatttgtgtatattaaatatgaatttttaaaatttataaatactattttccaaaagtacagactctaaggacatattttgataaagtattatttgtaatgaacacaagcctctcttgagtagaagtctaaatcacattatgattattttatactagttctgctatcatgctgttttatgctaattctgcttattttagagtatttttcattaaaaggtgagcaaagtgaaagatacttggtattttacccagatttctaagtggcaacatttttattcttcagagtcaggtaaatgactataatagtttggtttctaatgaaaagtcaatagcattagcagttataattctgtttataatttcctttcagcatttacagtgaaaagtgagaattttaaaatttatgaaatctatattccaggtattgtttttagtctgaaaaacaaactcccccatgtggtattaatataccttcaatttatgttgagtcttaaacataattaggagatatttttctctatttgctagatttgttttgagtcaaaactgatttagtgttcttccaaacaacatttatgtgttggcctacagagtttatttcatgtgttttttttaatatttaatattatattacattcattgaaatctgttcaaaaacagattaagacaaacatttatgatggtctgtatcaatcagcagattttattgcttttcattattttactgtaaaggcaaagaatgcaataggtgatggttggttgaaaggaattgttattgctgtttttattttttactttttttgagacagagtctcactctgttgcccagcctggagtgcagtgtgtcatcttggctcactgcaacctccgcctcctgggttcaagggattctcctgcctcagcctccaactagctgggattacaggcacaagccaccatgcctggctaaaattcttttgtatttttactacagacggagtttccccatgttggccgggctagtctcgaactcctgacctcaggtgatccaccagcctcggcctcccaaagttctgggattaaatgcgtgagccaccatgcccggccgctattgctctttttaacttcatttgatgccttgcttataatatcatatgcttgaggctcactgttgatgtagagtagggcaaatctgtgtgtgtatgtcattaaaaaaattctaccatctttctttatcatctggtgtgggcgcactctacagtgacttcagtctgctcagaacgaatgtggaggccggccgaaactgatgctgcccacagtcccagtgaagttaggtgggttaattactgccattcctttctaagtgtgttttatggcatcctgcccacaaagaactcacagtctgattaggatgaacttaatgactatttacacctcaaaatatattcagcaaagggttcacttagttgcccctcatgcttcacaggttgactagtatctgtgggtacctccctgcccaggttattcactcacaagccaccgggccttcaggacatctcaagattcagtcttgacaatataatagcaaaagctggactaaagcccaaatggattgtctgtggcaatgcagaagctgatagcattaacagcagggtgttacagcataattgttaattcgcacatctattaggatccttaaatattcattacttaatgttaaattaacattctgtgtagggaggggaggcttattcaattcttctgacctcagaactggcagaaggtcagatgtgactacagaactctaggtgaaaaatcaggtagggttcaaattaagtagaactgcccttgccggaatagtgatcttcaaaaaacccttgcttttaggggagggaagcggggaaggaaaggaatgagggaggaaatattcctttctagcattcattttgcttagatcactccattgtgagtttgaccattttggagtcaaatgagcagacttccaaggagttgaccagtttgtgactagtctggtcacctttccagttacaggatcatattaactgtgtaaatgaattcatgggtagatgatttgtgcagatctgaatttaagaacatttcctttttctgtgggaatcacaagagtttatccactaaaaaaagatatgtaaaaaagatactttccagcacataaataaaggctggaattttacaacctgatgtatatattagacagttctaggatgttagttcccttcattccagagctatgcttgtgatacagccccttttcttataaagtcagttagaaggacttccttaacaatgactattataatgtcttacttaaaatacagttttgtattctgtcaatgcaaatataagacaggttgagccttaatcatgtaacaaaatattttgtagattacatattgatttttcaaaaattaaaaatgtatttcaaactattcttactgtgctgtgaatttatatcttcttctgcaagacctggggctatttttttttcttaaggtatgaaatcaatttcaataaccttaaacaattgaccctctgtcaggcatatgtcaggctccactcttaaggagtcagtgaccatgacctctttgcatatcctggaaaaatgacatcatcaaagtatagttgataatgttataaaggatgattttaaaaatagggtataatcatgactcacaaagatatgaggctgggtgtggtggctcacgcctgtaatcccagctctttgggaggctgaagcgggtggatcatgaggtcagaagatcaagaccatactggctaacacggtgaaaccccgtctctactaaaaatacaaaaaaaaaaaa

SEQ ID NO: 29782 - DNA, 1531 bp, Homo Sapiens
ccggcccacgccagctcccggccgcggcacagcagccccggcgctccccgcgccgccccgcgcaggcgcccccgccccgccgtcgccgccgccgcagccaggagccgctgcaccatgccccgcatagatgcggacctcaagctcgacttcaaggatgtcctgctccgacctaagcggagcagcctcaagagccgagccgaggtggatcttgaacgcaccttcacgtttcgaaattcaaagcagacctactcagggattcccatcatcgtggccaacatggacactgtgggcacgtttgagatggcagccgtgatgtcacagcactccatgtttacagcaattcataagcattactccctggatgactggaagctctttgccacaaatcacccagaatgcctgcagaatgtagccgtgagttcaggcagtgggcagaatgatctggaaaagatgaccagcatcctggaagctgtgccacaggttaagtttatttgcctggatgtggccaatgggtattcagaacattttgtggaattcgtgaaacttgtccgtgccaaatttcctgaacacaccattatggcagggaacgtggtgacaggagaaatggtagaagagcttattctttccggagcagatatcatcaaagtgggagttggaccaggttctgtgtgcaccacccgcaccaagacgggagtggggtacccccagctgagtgccgtcattgagtgtgccgactctgcccatggcctgaagggccacatcatctctgatggaggctgtacgtgtccaggggatgtcgccaaagcctttggagctggagcagattttgtcatgctgggaggaatgttttcgggtcatacggagtgtgctggagaagtgattgagaggaacggacggaagctcaagctcttctacgggatgagctctgacaccgccatgaacaagcacgcaggaggagttgctgagtacagagcctctgagggtaagactgtggaagttccttacaaaggagatgtggaaaacactatcctggatattctcgggggactgaggtccacgtgcacctacgtgggggccgccaaactcaaggagctcagcaggagggcaacattcatccgggtgacccagcagcacaacaccgtgttcagctaaccctggggacaaagcagcgtctggctcgagtggaagcgtccaaacctgcttttcccatctccccccaagtctgttccgtcagagcttctggctgctcctgaatggtggaatgctgtgtcctctcttctgtctcctgccgcctggaggcttcggggctctcccgcctgccttgtcggggcccagacgcaaggcaccgattgggccaacatcagagccctgctgcccagaactcataacctcattgttcaaaccaacacttgcacctttctctttttctctttctctctccctttctttgtttttctttcttttttaaaagaagatggtttcactttaatataatgctattatcttaagacttaaaaaaaaaaaaaaaaaa

SEQ ID NO: 29783 - DNA, 1540 bp, Homo Sapiens
cgagcttggctgcttctggggcctgtgtggccctgtgtgtcggaaagatggagcaagaagccgagcccgaggggcggccgcgacccctctgaccgagatcctgctgctttcgcagccaggagcaccgtccctccccggattagtgcgtacgagcgcccagtgccctggcccggagagtggaatgatccccgaggcccagggcgtcgtgcttccgcgcgccccgtgaaggaaactggggagtcttgagggacccccgactccaagcgcgaaaaccccggatggtgaggagcaggcaaatgtgcaataccaacatgtctgtacctactgatggtgctgtaaccacctcacagattccagcttcggaacaagagaccctggttagaccaaagccattgcttttgaagttattaaagtctgttggtgcacaaaaagacacttatactatgaaagaggttcttttttatcttggccagtatattatgactaaacgattatatgatgagaagcaacaacatattgtatattgttcaaatgatcttctaggagatttgtttggcgtgccaagcttctctgtgaaagagcacaggaaaatatataccatgatctacaggaacttggtagtagtcaatcagcaggaatcatcggactcaggtacatctgtgagtgagaacaggtgtcaccttgaaggtgggagtgatcaaaaggaccttgtacaagagcttcaggaagagaaacccaagacaaagaagagagtgtggaatctagtttgccccttaatgccattgaaccttgtgtgatttgtcaaggtcgacctaaaaatggttgcattgtccatggcaaaacaggacatcttatggcctgctttacatgtgcaaagaagctaaagaaaaggaataagccctgcccagtatgtagacaaccaattcaaatgattgtgctaacttatttcccctagttgacctgtctataagagaattatatatttctaactatataaccctaggaatttagacaacctgaaatttattcacatatatcaaagtgagaaaatgcctcaattcacatagatttcttctctttagtataattgacctactttggtagtggaatagtgaatacttactataatttgacttgaatatgtagctcatcctttacaccaactcctaattttaaataatttctactctgtcttaaatgagaagtacttggtttttttttttcttaaatatgtatatgacatttaaatgtaacttattattttttttgagaccgagtcttgctctgttacccaggctggagtgcagtggcgtgatcttggctcactgcaagctctgcctcccgggttcgcaccattctcctgcctcagcctcccaattagcttggcctacagtcatctgccaccacacctggctaattttttgtacttttagtagagacagggtttcaccgtgttagccaggatggtctcgatctcctgacctcgtgatccgcccacctcggcctcccaaagtgctgggattacaggcatgagccaccg

SEQ ID NO: 29784 - DNA, 2528 bp, Homo Sapiens
gagttccagcagtccgcgagctgccgtcggctccgcggggggggcgggccgggcaccccggggcgcggaggagcgctcctcgcttctctccttcccccctgccgcactccgccggaccctcccgccggcccgcgccgctgcactcgccctctcctctcgccccccggcaaactttcggcccctccccgcccctcgcccgttattcgtcgtggctcaagcccggccacgccgccccaagggctcctcccgacctcccggcctgccgctccggccactgcgggatccagaaacatgtcgaccacacttctgtccgccttctacgatgtcgacttcttgtgcaagacagagaaatccctggccaacctcaacctgaacaacatgctggacaagaaggcggtggggacgcctgtggccgccgcccccagctcgggcttcgcgccgggattcctccgacggcactcggccagcaacctgcatgcactcgcccaccccgcgcccagccccggcagctgctcgcccaagttcccgggcgccgctaacggcagcagctgcggcagcgcggcggccggcggtccgacctcctacggcacccttaaggagccgtcggggggcggcggcacagccctgctcaacaaggagaacaaattccgggaccgctcgtttagcgagaacggcgatcgcagccagcacctcctgcacctgcagcagcagcagaaggggggcggcggctcccagatcaactccacgcgctacaagaccgagctgtgccggcccttcgaggagagcggcacgtgcaagtacggcgaaaagtgccagttcgcgcatggcttccacgagctgcgcagcctgactcgccatccgaagtacaagaccgagctgtgccgcacctttcataccatcggcttctgcccctatgggccgcgctgccacttcatccacaacgcggacgagcggcggcccgcgccgtcggggggcgcctccggggacctgcgtgcctttggcacgcgcgatgcgttgcacctgggcttcccgcgggagccgcggcccaagttgcaccacagcctcagcttctcgggcttcccgtcgggccaccatcagcccccgggcggcctcgagtcgccgctgctgctcgacagccccacgtcgcgcacgccgccgccgccctcctgctcttcggcctcgtcctgctcctcctccgcctcctcctgttcctcggcctccgcggcctccacgccctcgggcgccccgacatgctgcgcctccgcggcggccgcggctgcggccgctctgctgtacggcaccgggggcgccgaggacctgctggcgccgggggccccgtgcgcggcctgctcgtcggcctcgtgcgccaacaacgccttcgccttcggtccggagctcagcagcctcatcacgccgctcgccatccagacccacaactttgccgccgtggccgccgccgcctactaccgcagtcagcagcagcagcagcagcagggcctggcgccccccgcgcagccgccggcgccgcccagcgcgaccctccccgccggggccgccgcacctccctcgccgcccttcagcttccagctgccgcgccgcctgtccgactcgcccgtgttcgacgcgccccccagccccccggactcgctgtcggaccgcgacagctacctaagcggctccctgagctccggcagcctcagcggctctgagtctcccagcctcgaccctggccgccgcctgccaatcttcagccgcctctccatctccgacgactgaggcaagagggcgccagtgaggaggaagggaaggcggttcagagatgttggaggacacccctcgccatctcgcccttgctgggggcacgggagtggggggggtgacatgggccctaggcagactgcaagcccgaccgagcacttggactcgaactctgtgccgggaggggcccccacccctcctttttcggtttcctcttgtctttttttttttatttttattacgaagtttcattctttttgagcaaaaaagtcgaactttttctgttgaacaaaatattcacaacagggcagttgtgatacgaatagaacaaaaaaaaaaaaaaaacacttaaactttgttaggactccgatgagtttgggacttcaggaaaaatcaacccagcaccagcagctaccaaccaccattccatctcttcacttgaacagcattagttaagtccagatgtgggaacccttctcttggaagaagttcctaattgtgtctcagaccggtgtaaacaaaccagccagccgccaccttgctaaacctataagctttttaaaatccaatatattctgccaagaatatgccttgatagttagccctcagcccataggtgttttttgttttttaacagaattatatatgtctgggggtgaaaaaacccttgcattccaaaggtccatactggttacttggtttcattgccaccacttagtggatgttcagtttagaaccattttgtctgctccctctggaagccttgcgca

SEQ ID NO: 29785 - DNA, 1063 bp, Homo Sapiens
gtgctgcggcgagctccgtccaaaagaaaatggggtttggtgtaaatctgggggtgtaatgttatcatatatcactctacctcgtaaaaccgacactgaaagctgccggacaacaaatcacaggtcaaaattatgagttcttcgtattatgtgaacgcgctttttagcaaatatacggcgggggcttctctgttccaaaatgccgagccgacttcttgctcctttgctcccaactcacagagaagcggctacggggcgggcgccggcgccttcgcctcgaccgttccgggcttatacaatgtcaacagccccctttatcagagcccctttgcgtccggctacggcctgggcgccgacgcctacggcaacctgccctgcgcctcctacgaccaaaacatccccgggctctgcagtgacctcgccaaaggcgcctgcgacaagacggacgagggcgcgctgcatggcgcggctgaggccaatttccgcatctacccctggatgcggtcttcaggacctgacaggaagcggggccgccagacctacacgcgctaccagacgctggagctggagaaggagttccacttcaaccgctacctgacgcggcgccgccgcattgaaatcgcccacgcgctctgcctcaccgagcgccagattaagatctggttccagaaccgccgcatgaagtggaagaaagagcataaggacgaaggtccgactgccgccgcagctcccgagggcgccgtgccctctgccgccgccactgctgccgcggacaaggccgacgaggaggacgatgatgaagaagaggaagacgaggaggaatgaggggccgatccggggccctctctgcaccggacagtcggaaaagcgtctttaagagactcactggttttacttacaaaaatgggaaaaataaaagaaaatgtaaaaaacaaaaacaaaaacaaaaaagcaacccagtccccaacctgcactctacccacccccatcacctactccagctcccaacttttgtggactgagcggccgcagagactgggtcgccttggattccctctgcctc

SEQ ID NO: 29786 - DNA, 1640 bp, Homo Sapiens
tggaaaaataattacctgacttgattgttctgtgagcagataaaaagtacatatacagttcatacaataatcttatgtatgtaaaaccccgttacgatgtcggcgacggggcccatcagtaactattacgtggactcgctcatctctcacgacaatgaagacctcctagcgtccaggtttccggccaccggggctcatcccgccgccgccagacccagcggtttggtgccggactgtagcgattttccgtcctgtagcttcgcgcccaagccggcagtgttcagcacgtcgtgggcgcccgtgccctctcagtcgtccgtggtatatcacccgtacggcccccagccccacctcggcgccgacacgcgctacatgcggacttggctcgagccgctgtccggcgccgtctccttccccagcttcccggccgggggccgtcactacgccctcaagccggacgcctaccccgggcgccgcgcggactgcggcccaggggagggccgcagctacccggactacatgtacggctcgcccggggagctgcgcgaccgcgccccgcagacactgccctcgcccgaggcggacgcgctcgccggcagcaagcacaaagaggagaaggccgacctggaccccagcaaccccgtggccaactggattcacgcccgctccacgaggaagaagcgctgcccctacaccaagtaccagacgctggaactggagaaggagtttctcttcaatatgtatttaaccagggaccgtcggtatgaggtggcccgggttctcaatctcaccgagcggcaggtcaaaatctggtttcagaatcgaaggatgaagatgaaaaagatgaataaagagaaaaccgacaaggagcagtcctaaaccctacccagcctgctgcctcagcacagccaagggaaaaacaaaaaccccacaaaataccccaacacaggcgggggagagacgaaaaagaaaaggaaagagcaagatagacaaaagccaatcagcttaaaaagaaaaacaaggaaggggaaaagaaaactcttgcgatttgggagggttcagtgttgagatattggtgttttagagttagttctacccagcgaggaggaggcggggagagaaactgcgttctctttccccagcgcaaccgaaataaatgacacatacaaatgtgatttttttcctcctttcttcagagaagccagtacttgaatcgctatatttctatttttttttccctgtatcgtatttggtccaggtcatccctccccgggcctggggcgctctgcgtgcagattttgtacaaaaaaaaaaaagacacacacacatacatgataatgattcccagcccaggagctgaggggtgagggctggggaccatgccgcgggctaggtcgggcccgtgcaggccggcgccttgggctgtacatagtgttccctctcatccccagggttcgtccccagcgtccgtcctgtaacgtgcttctgtttgttatggtagaacagccctgtgttaatatattgaagtcacttaaccagaaaaaaaaaaaaaaaaaaaaaaaaaaaaaaaaaaaaaaaaaaaaaaaaaaaaaaaaaaaaaaaaaaaaaaaaaaaaaaaaaaaaaaaaaaaaaaaaaaaaa

SEQ ID NO: 29787 - DNA, 3500 bp, Homo Sapiens
ggaaaggaggaagaaggagattgtgatggagaaagggggtctgtgaaacgtcaggcacagcacaaaggctttgccacgtaattacaggctcctattaagtcgagatctgccctcccaggggtctccaattttcttgtattccctacaaagcctcctctgcatgccagtttgtgccttttgaagtgccagagagcttcttgatccaactgagaaggaaaaaggagcccagcaagaagagggggagagagagaaggggaaaggggggaacccaccagcaccctccgtcggactcttgaagccttttttttttaattcttaatttttttttttactctttacaaaaagtaaagtgagaatcctgctctctaatacatctgcaagacatcaccctctcctcctgaaactttagtcactcctgagaatccacaggagtgcagagaggggggaacacgttttcttgaagatgttttaaagctggaacaagccttcttctgttggtgcttgaactcttgcctgggaataacttttttaacctttaaaaaaaccattcactttgattcttctctcccaccccttcttctctcttcttctgtttgcctaactcccccgccctgctggcctccgctttcctctctcccccttgttattatttttagtctgtgcgtgtggacacttttggagagttggaagggatttttttctcctgacttgaacatagggtgactttttaatattgtattttactgtggattatctctttggaccgcgccggacttggcctcaggaaatcaaccaatgctgcggaaggcggctggtgcacaacgctctgctctacagaagggggtcccccaccctcttttccaattttttttttttggccttcctctccttccctccctcttcctccctctctctctctctctctccactacccccctctttcttccccactcggctcctctcccccctcgcgcccacagcgtttggtgttgattcgagcgggaagaggggggtgggtgggatcggtgggggagaccatgacctccagctacgggcacgttctggagcggcaaccggcgctgggcggccgcttggacagcccgggcaacctcgacaccctgcaggcgaaaaagaacttctccgtcagtcacctgctagacctggaggaagccggggacatggtggcggcacaggcggatgagaacgtgggcgaggctggccggagcctgctggagtcgccgggactcaccagcggcagcgacaccccgcagcaggacaatgaccagctgaactcagaagaaaaaaagaagagaaagcagcgaaggaataggacaaccttcaatagcagccagctgcaggctttggagcgtgtctttgagcggacacactatcctgatgcttttgtgcgagaagaccttgcccgccgggtgaacctcaccgaggcgagagtgcaggtgtggtttcagaaccgaagagccaagttccgcaggaatgagagagccatgctagccaataaaaacgcttccctcctcaaatcctactcaggagacgtgactgctgtggagcagcccatcgtacctcgtcctgctccgagacccaccgattatctctcctgggggacagcgtctccgtacagatcctcgtccctcccaagatgttgtttacacgaggggcttcataacggattctaacggaagacactgaaaagcgccatggctacttattctgccacatgtgccaacaatagccctgcacagggcatcaacatggccaacagcattgccaacctgagactgaaggccaaggaatatagtttacagaggaaccaggtgccaacagtcaactgaggaaaaaaaataattaaacaggcctaagaagaaatcaaaaaccataagacacctatcctgctctgttatttcttcatctgctggggggaaaaagtaaattacaaacaaacaaacaaagcagaactaaaatattgggaccatggcagagaaaagcaggagaggagcaaaatgaaaattagttaacaaatgttcctcctccctctgggataccaccaccacttgtttctgtgtgtgtttattttgtttttctttcattcatgctttgcttaatgtactccaggcttcttcagataggttcagcccacccacccccatgattgtatgaagttttaaaaaaaactacagcagccaaagaaactatatatatatatatatatatatatatccagaatgattgcctctactgtcctcattgacttgtttgaaccttagtgccttaccctgtcctcttcccagttctctttatagaagctctaggagctttcgaaaagccaaagtctttctgaagaatctgtgctggacagacataattccctttctcattgtctccatctttgttggtcatggtaaggtttttccatcagcctctgaaaaaatagttgtgcacaacatctgctcactggactgtctgatccaatgtaattggctgcgtctggctaattctaagcactaaagtctacatctaagctatagatttaagcttgaagctacagattatatcactatcaccaccacccctcaccctatgcaatcaatcaatcaatcatcttaagttaaagatatttgttgtctttgaatgatttgctgtcacagactatttggtagaagaaatatttttcacctgagagaggaagagaaatttctctagtaacacaaagagtgagttctaaaaggcatgcccacatctctttcgtgccttaaggatagtgagatgcacacttatatatatactgtatatatttatatatttatatatatatttcatatatatatataatattgcaagcttaagtttgcaatttcccaaacaatacaaaaagcaaattacacaccctcaccactgttcttatctctatagtgatgaaacattaattagggatcttgctgcttttctttttctacacgaagttttcattaaagccacagaataattgatagggcagctgtttgagaacaggtcccattttcacattagggctttaaatgaattagaaactatttgaggctataaaaatgtccttgagtttggagcctgagctctggtgaaatgctgatacatctgatctatcatgggaattgcagttagagagagtaaggaataccatttagtcatctatccgttcttcacttagcaggaatatgaaagaaaggcacatgtttaagaggaatacctaaaggtttttctaaattccaacatttaaaaggcaattgtgggctatttttattttttaatattttgaaataaagtttagtgtctagggctgggagccaggactgatcttccatttctttttctttgttcccagccatgcttttgtaacttgccaggtggacttgaccaactacattaccatgctgtgcctcagtttacccatttgtaaaatgggattaataatacttacctacctcacaggggtgttgtgaggctctatt

SEQ ID NO: 29788 - DNA, 13509 bp, Homo Sapiens
ggggcatttccgggtccgggccgagcgggcgcacgcgcgggagcgggactcggcggcatggcgggctccggagccggtgtgcgttgctccctgctgcggctgcaggagaccttgtccgctgcggaccgctgcggtgctgccctggccggtcatcaactgatccgcggcctggggcaggaatgcgtcctgagcagcagccccgcggtgctggcattacagacatctttagttttttccagagatttcggtttgcttgtatttgtccggaagtcactcaacagtattgaatttcgtgaatgtagagaagaaatcctaaagtttttatgtattttcttagaaaaaatgggccagaagatcgcaccttactctgttgaaattaagaacacttgtaccagtgtttatacaaaagatagagctgctaaatgtaaaattccagccctggaccttcttattaagttacttcagacttttagaagttctagactcatggatgaatttaaaattggagaattatttagtaaattctatggagaacttgcattgaaaaaaaaaataccagatacagttttagaaaaagtatatgagctcctaggattattgggtgaagttcatcctagtgagatgataaataatgcagaaaacctgttccgcgcttttctgggtgaacttaagacccagatgacatcagcagtaagagagcccaaactacctgttctggcaggatgtctgaaggggttgtcctcacttctgtgcaacttcactaagtccatggaagaagatccccagacttcaagggagatttttaattttgtactaaaggcaattcgtcctcagattgatctgaagagatatgctgtgccctcagctggcttgcgcctatttgccctgcatgcatctcagtttagcacctgccttctggacaactacgtgtctctatttgaagtcttgttaaagtggtgtgcccacacaaatgtagaattgaaaaaagctgcactttcagccctggaatcctttctgaaacaggtttctaatatggtggcgaaaaatgcagaaatgcataaaaataaactgcagtactttatggagcagttttatggaatcatcagaaatgtggattcgaacaacaaggagttatctattgctatccgtggatatggactttttgcaggaccgtgcaaggttataaacgcaaaagatgttgacttcatgtacgttgagctcattcagcgctgcaagcagatgttcctcacccagacagacactggtgacgaccgtgtttatcagatgccaagcttcctccagtctgttgcaagcgtcttgctgtaccttgacacagttcctgaggtgtatactccagttctggagcacctcgtggtgatgcagatagacagtttcccacagtacagtccaaaaatgcagctggtgtgttgcagagccatagtgaaggtgttcctagctttggcagcaaaagggccagttctcaggaattgcattagtactgtggtgcatcagggtttaatcagaatatgttctaaaccagtggtccttccaaagggccctgagtctgaatctgaagaccaccgtgcttcaggggaagtcagaactggcaaatggaaggtgcccacatacaaagactacgtggatctcttcagacatctcctgagctctgaccagatgatggattctattttagcagatgaagcatttttctctgtgaattcctccagtgaaagtctgaatcatttactttatgatgaatttgtaaaatccgttttgaagattgttgagaaattggatcttacacttgaaatacagactgttggggaacaagagaatggagatgaggcgcctggtgtttggatgatcccaacttcagatccagcggctaacttgcatccagctaaacctaaagatttttcggctttcattaacctggtggaattttgcagagagattctccctgagaaacaagcagaattttttgaaccatgggtgtactcattttcatatgaattaattttgcaatctacaaggttgcccctcatcagtggtttctacaaattgctttctattacagtaagaaatgccaagaaaataaaatatttcgagggagttagtccaaagagtctgaaacactctcctgaagacccagaaaagtattcttgctttgctttatttgtgaaatttggcaaagaggtggcagttaaaatgaagcagtacaaagatgaacttttggcctcttgtttgacctttcttctgtccttgccacacaacatcattgaactcgatgttagagcctacgttcctgcactgcagatggctttcaaactgggcctgagctatacccccttggcagaagtaggcctgaatgctctagaagaatggtcaatttatattgacagacatgtaatgcagccttattacaaagacattctcccctgcctggatggatacctgaagacttcagccttgtcagatgagaccaagaataactgggaagtgtcagctctttctcgggctgcccagaaaggatttaataaagtggtgttaaagcatctgaagaagacaaagaacctttcatcaaacgaagcaatatccttagaagaaataagaattagagtagtacaaatgcttggatctctaggaggacaaataaacaaaaatcttctgacagtcacgtcctcagatgagatgatgaagagctatgtggcctgggacagagagaagcggctgagctttgcagtgccctttagagagatgaaacctgtcattttcctggatgtgttcctgcctcgagtcacagaattagcgctcacagccagtgacagacaaactaaagttgcagcctgtgaacttttacatagcatggttatgtttatgttgggcaaagccacgcagatgccagaagggggacagggagccccacccatgtaccagctctataagcggacgtttcctgtgctgcttcgacttgcgtgtgatgttgatcaggtgacaaggcaactgtatgagccactagttatgcagctgattcactggttcactaacaacaagaaatttgaaagtcaggatactgttgccttactagaagctatattggatggaattgtggaccctgttgacagtactttaagagatttttgtggtcggtgtattcgagaattccttaaatggtccattaagcaaataacaccacagcagcaggagaagagtccagtaaacaccaaatcgcttttcaagcgactttatagccttgcgcttcaccccaatgctttcaagaggctgggagcatcacttgcctttaataatatctacagggaattcagggaagaagagtctctggtggaacagtttgtgtttgaagccttggtgatatacatggagagtctggccttagcacatgcagatgagaagtccttaggtacaattcaacagtgttgtgatgccattgatcacctatgccgcatcattgaaaagaagcatgtttctttaaataaagcaaagaaacgacgtttgccgcgaggatttccaccttccgcatcattgtgtttattggatctggtcaagtggcttttagctcattgtgggaggccccagacagaatgtcgacacaaatccattgaactcttttataaattcgttcctttattgccaggcaacagatcccctaatttgtggctgaaagatgttctcaaggaagaaggtgtctcttttctcatcaacacctttgaggggggtggctgtggccagccctcgggcatcctggcccagcccaccctcttgtaccttcgggggccattcagcctgcaggccacgctatgctggctggacctgctcctggccgcgttggagtgctacaacacgttcattggcgagagaactgtaggagcgctccaggtcctaggtactgaagcccagtcttcacttttgaaagcagtggctttcttcttagaaagcattgccatgcatgacattatagcagcagaaaagtgctttggcactggggcagcaggtaacagaacaagcccacaagagggagaaaggtacaactacagcaaatgcaccgttgtggtccggattatggagtttaccacgactctgctaaacacctccccggaaggatggaagctcctgaagaaggacttgtgtaatacacacctgatgagagtcctggtgcagacgctgtgtgagcccgcaagcataggtttcaacatcggagacgtccaggttatggctcatcttcctgatgtttgtgtgaatctgatgaaagctctaaagatgtccccatacaaagatatcctagagacccatctgagagagaaaataacagcacagagcattgaggagctttgtgccgtcaacttgtatggccctgacgcgcaagtggacaggagcaggctggctgctgttgtgtctgcctgtaaacagcttcacagagctgggcttctgcataatatattaccgtctcagtccacagatttgcatcattctgttggcacagaacttctttccctggtttataaaggcattgcccctggagatgagagacagtgtctgccttctctagacctcagttgtaagcagctggccagcggacttctggagttagcctttgcttttggaggactgtgtgagcgccttgtgagtcttctcctgaacccagcggtgctgtccacggcgtccttgggcagctcacagggcagcgtcatccacttctcccatggggagtatttctatagcttgttctcagaaacgatcaacacggaattattgaaaaatctggatcttgctgtattggagctcatgcagtcttcagtggataataccaaaatggtgagtgccgttttgaacggcatgttagaccagagcttcagggagcgagcaaaccagaaacaccaaggactgaaacttgcgactacaattctgcaacactggaagaagtgtgattcatggtgggccaaagattcccctctcgaaactaaaatggcagtgctggccttactggcaaaaattttacagattgattcatctgtatcttttaatacaagtcatggttcattccctgaagtctttacaacatatattagtctacttgctgacacaaagctggatctacatttaaagggccaagctgtcactcttcttccattcttcaccagcctcactggaggcagtctggaggaacttagacgtgttctggagcagctcatcgttgctcacttccccatgcagtccagggaatttcctccaggaactccgcggttcaataattatgtggactgcatgaaaaagtttctagatgcattggaattatctcaaagccctatgttgttggaattgatgacagaagttctttgtcgggaacagcagcatgtcatggaagaattatttcaatccagtttcaggaggattgccagaaggggttcatgtgtcacacaagtaggccttctggaaagcgtgtatgaaatgttcaggaaggatgacccccgcctaagtttcacacgccagtcctttgtggaccgctccctcctcactctgctgtggcactgtagcctggatgctttgagagaattcttcagcacaattgtggtggatgccattgatgtgttgaagtccaggtttacaaagctaaatgaatctacctttgatactcaaatcaccaagaagatgggctactataagattctagacgtgatgtattctcgccttcccaaagatgatgttcatgctaaggaatcaaaaattaatcaagttttccatggctcgtgtattacagaaggaaatgaacttacaaagacattgattaaattgtgctacgatgcatttacagagaacatggcaggagagaatcagctgctggagaggagaagactttaccattgtgcagcatacaactgcgccatatctgtcatctgctgtgtcttcaatgagttaaaattttaccaaggttttctgtttagtgaaaaaccagaaaagaacttgcttatttttgaaaatctgatcgacctgaagcgccgctataattttcctgtagaagttgaggttcctatggaaagaaagaaaaagtacattgaaattaggaaagaagccagagaagcagcaaatggggattcagatggtccttcctatatgtcttccctgtcatatttggcagacagtaccctgagtgaggaaatgagtcaatttgatttctcaaccggagttcagagctattcatacagctcccaagaccctagacctgccactggtcgttttcggagacgggagcagcgggaccccacggtgcatgatgatgtgctggagctggagatggacgagctcaatcggcatgagtgcatggcgcccctgacggccctggtcaagcacatgcacagaagcctgggcccgcctcaaggagaagaggattcagtgccaagagatcttccttcttggatgaaattcctccatggcaaactgggaaatccaatagtaccattaaatatccgtctcttcttagccaagcttgttattaatacagaagaggtctttcgcccttacgcgaagcactggcttagccccttgctgcagctggctgcttctgaaaacaatggaggagaaggaattcactacatggtggttgagatagtggccactattctttcatggacaggcttggccactccaacaggggtccctaaagatgaagtgttagcaaatcgattgcttaatttcctaatgaaacatgtctttcatccaaaaagagctgtgtttagacacaaccttgaaattataaagacccttgtcgagtgctggaaggattgtttatccatcccttataggttaatatttgaaaagttttccggtaaagatcctaattctaaagacaactcagtagggattcaattgctaggcatcgtgatggccaatgacctgcctccctatgacccacagtgtggcatccagagtagcgaatacttccaggctttggtgaataatatgtcctttgtaagatataaagaagtgtatgccgctgcagcagaagttctaggacttatacttcgatatgttatggagagaaaaaacatactggaggagtctctgtgtgaactggttgcgaaacaattgaagcaacatcagaatactatggaggacaagtttattgtgtgcttgaacaaagtgaccaagagcttccctcctcttgcagacaggttcatgaatgctgtgttctttctgctgccaaaatttcatggagtgttgaaaacactctgtctggaggtggtactttgtcgtgtggagggaatgacagagctgtacttccagttaaagagcaaggacttcgttcaagtcatgagacatagagatgatgaaagacaaaaagtatgtttggacataatttataagatgatgccaaagttaaaaccagtagaactccgagaacttctgaaccccgttgtggaattcgtttcccatccttctacaacatgtagggaacaaatgtataatattctcatgtggattcatgataattacagagatccagaaagtgagacagataatgactcccaggaaatatttaagttggcaaaagatgtgctgattcaaggattgatcgatgagaaccctggacttcaattaattattcgaaatttctggagccatgaaactaggttaccttcaaataccttggaccggttgctggcactaaattccttatattctcctaagatagaagtgcactttttaagtttagcaacaaattttctgctcgaaatgaccagcatgagcccagattatccaaaccccatgttcgagcatcctctgtcagaatgcgaatttcaggaatataccattgattctgattggcgtttccgaagtactgttctcactccgatgtttgtggagacccaggcctcccagggcactctccagacccgtacccaggaagggtccctctcagctcgctggccagtggcagggcagataagggccacccagcagcagcatgacttcacactgacacagactgcagatggaagaagctcatttgattggctgaccgggagcagcactgacccgctggtcgaccacaccagtccctcatctgactccttgctgtttgcccacaagaggagtgaaaggttacagagagcacccttgaagtcagtggggcctgattttgggaaaaaaaggctgggccttccaggggacgaggtggataacaaagtgaaaggtgcggccggccggacggacctactacgactgcgcagacggtttatgagggaccaggagaagctcagtttgatgtatgccagaaaaggcgttgctgagcaaaaacgagagaaggaaatcaagagtgagttaaaaatgaagcaggatgcccaggtcgttctgtacagaagctaccggcacggagaccttcctgacattcagatcaagcacagcagcctcatcaccccgttacaggccgtggcccagagggacccaataattgcaaaacagctctttagcagcttgttttctggaattttgaaagagatggataaatttaagacactgtctgaaaaaaacaacatcactcaaaagttgcttcaagacttcaatcgttttcttaataccaccttctctttctttccaccctttgtctcttgtattcaggacattagctgtcagcacgcagccctgctgagcctcgacccagcggctgttagcgctggttgcctggccagcctacagcagcccgtgggcatccgcctgctagaggaggctctgctccgcctgctgcctgctgagctgcctgccaagcgagtccgtgggaaggcccgcctccctcctgatgtcctcagatgggtggagcttgctaagctgtatagatcaattggagaatacgacgtcctccgtgggatttttaccagtgagataggaacaaagcaaatcactcagagtgcattattagcagaagccagaagtgattattctgaagctgctaagcagtatgatgaggctctcaataaacaagactgggtagatggtgagcccacagaagccgagaaggatttttgggaacttgcatcccttgactgttacaaccaccttgctgagtggaaatcacttgaatactgttctacagccagtatagacagtgagaaccccccagacctaaataaaatctggagtgaaccattttatcaggaaacatatctaccttacatgatccgcagcaagctgaagctgctgctccagggagaggctgaccagtccctgctgacatttattgacaaagctatgcacggggagctccagaaggcgattctagagcttcattacagtcaagagctgagtctgctttacctcctgcaagatgatgttgacagagccaaatattacattcaaaatggcattcagagttttatgcagaattattctagtattgatgtcctcttacaccaaagtagactcaccaaattgcagtctgtacaggctttaacagaaattcaggagttcatcagctttataagcaaacaaggcaatttatcatctcaagttccccttaagagacttctgaacacctggacaaacagatatccagatgctaaaatggacccaatgaacatctgggatgacatcatcacaaatcgatgtttctttctcagcaaaatagaggagaagcttacccctcttccagaagataatagtatgaatgtggatcaagatggagaccccagtgacaggatggaagtgcaagagcaggaagaagatatcagctccctgatcaggagttgcaagttttccatgaaaatgaagatgatagacagtgcccggaagcagaacaatttctcacttgctatgaaactactgaaggagctgcataaagagtcaaaaaccagagacgattggctggtgagctgggtgcagagctactgccgcctgagccactgccggagccggtcccagggctgctctgagcaggtgctcactgtgctgaaaacagtctctttgttggatgagaacaacgtgtcaagctacttaagcaaaaatattctggctttccgtgaccagaacattctcttgggtacaacttacaggatcatagcgaatgctctcagcagtgagccagcctgccttgctgaaatcgaggaggacaaggctagaagaatcttagagctttctggatccagttcagaggattcagagaaggtgatcgcgggtctgtaccagagagcattccagcacctctctgaggctgtgcaggcggctgaggaggaggcccagcctccctcctggagctgtgggcctgcagctggggtgattgatgcttacatgacgctggcagatttctgtgaccaacagctgcgcaaggaggaagagaatgcatcagttattgattctgcagaactgcaggcgtatccagcacttgtggtggagaaaatgttgaaagctttaaaattaaattccaatgaagccagattgaagtttcctagattacttcagattatagaacggtatccagaggagactttgagcctcatgacaaaagagatctcttccgttccctgctggcagttcatcagctggatcagccacatggtggccttactggacaaagaccaagccgttgctgttcagcactctgtggaagaaatcactgataactacccgcaggctattgtttatcccttcatcataagcagcgaaagctattccttcaaggatacttctactggtcataagaataaggagtttgtggcaaggattaaaagtaagttggatcaaggaggagtgattcaagattttattaatgccttagatcagctctctaatcctgaactgctctttaaggattggagcaatgatgtaagagctgaactagcaaaaacccctgtaaataaaaaaaacattgaaaaaatgtatgaaagaatgtatgcagccttgggtgacccaaaggctccaggcctgggggcctttagaaggaagtttattcagacttttggaaaagaatttgataaacattttgggaaaggaggttctaaactactgagaatgaagctcagtgacttcaacgacattaccaacatgctacttttaaaaatgaacaaagactcaaagccccctgggaatctgaaagaatgttcaccctggatgagcgacttcaaagtggagttcctgagaaatgagctggagattcccggtcagtatgacggtaggggaaagccattgccagagtaccacgtgcgaatcgccgggtttgatgagcgggtgacagtcatggcgtctctgcgaaggcccaagcgcatcatcatccgtggccatgacgagagggaacaccctttcctggtgaagggtggcgaggacctgcggcaggaccagcgcgtggagcagctcttccaggtcatgaatgggatcctggcccaagactccgcctgcagccagagggccctgcagctgaggacctatagcgttgtgcccatgacctccaggttaggattaattgagtggcttgaaaatactgttaccttgaaggaccttcttttgaacaccatgtcccaagaggagaaggcggcttacctgagtgatcccagggcaccgccgtgtgaatataaagattggctgacaaaaatgtcaggaaaacatgatgttggagcttacatgctaatgtataagggcgctaatcgtactgaaacagtcacgtcttttagaaaacgagaaagtaaagtgcctgctgatctcttaaagcgggccttcgtgaggatgagtacaagccctgaggctttcctggcgctccgctcccacttcgccagctctcacgctctgatatgcatcagccactggatcctcgggattggagacagacatctgaacaactttatggtggccatggagactggcggcgtgatcgggatcgactttgggcatgcgtttggatccgctacacagtttctgccagtccctgagttgatgccttttcggctaactcgccagtttatcaatctgatgttaccaatgaaagaaacgggccttatgtacagcatcatggtacacgcactccgggccttccgctcagaccctggcctgctcaccaacaccatggatgtgtttgtcaaggagccctcctttgattggaaaaattttgaacagaaaatgctgaaaaaaggagggtcatggattcaagaaataaatgttgctgaaaaaaattggtacccccgacagaaaatatgttacgctaagagaaagttagcaggtgccaatccagcagtcattacttgtgatgagctactcctgggtcatgagaaggcccctgccttcagagactatgtggctgtggcacgaggaagcaaagatcacaacattcgtgcccaagaaccagagagtgggctttcagaagagactcaagtgaagtgcctgatggaccaggcaacagaccccaacatccttggcagaacctgggaaggatgggagccctggatgtgaggtctgtgggagtctgcagatagaaagcattacattgtttaaagaatctactatactttggttggcagcattccatgagctgattttcctgaaacactaaagagaaatgtcttttgtgctacagtttcgtagcatgagtttaaatcaagattatgatgagtaaatgtgtatgggttaaatcaaagataaggttatagtaacatcaaagattaggtgaggtttatagaaagatagatatccaggcttaccaaagtattaagtcaagaatataatatgtgatcagctttcaaagcatttacaagtgctgcaagttagtgaaacagctgtctccgtaaatggaggaaatgtggggaagccttggaatgcccttctggttctggcacattggaaagcacactcagaaggcttcatcaccaagattttgggagagtaaagctaagtatagttgatgtaacattgtagaagcagcataggaacaataagaacaataggtaaagctataattatggcttatatttagaaatgactgcatttgatattttaggatatttttctaggttttttcctttcattttattctcttctagttttgacattttatgatagatttgctctctagaaggaaacgtctttatttaggagggcaaaaattttggtcatagcattcacttttgctattccaatctacaactggaagatacataaaagtgctttgcattgaatttgggataacttcaaaaatcccatggttgttgttagggatagtactaagcatttcagttccaggagaataaaagaaattcctatttgaaatgaattcctcatttggaggaaaaaaagcatgcattctagcacaacaagatgaaattatggaatacaaaagtggctccttcccatgtgcagtccctgtccccccccgccagtcctccacacccaaactgtttctgattggcttttagctttttgttgtttttttttttccttctaacacttgtatttggaggctcttctgtgattttgagaagtatactcttgagtgtttaataaagtttttttccaaaagta

SEQ ID NO: 29789 - DNA, 1694 bp, Homo Sapiens
ctctctgcccacctctgcttcctctaggaacacaggagttccagatcacatcgagttcaccatgaattcactcagtgaagccaacaccaagttcatgttcgacctgttccaacagttcagaaaatcaaaagagaacaacatcttctattcccctatcagcatcacatcagcattagggatggtcctcttaggagccaaagacaacactgcacaacagattaagaaggttcttcactttgatcaagtcacagagaacaccacaggaaaagctgcaacatatcatgttgataggtcaggaaatgttcatcaccagtttcaaaagcttctgactgaattcaacaaatccactgatgcatatgagctgaagatcgccaacaagctcttcggagaaaaaacgtatctatttttacaggaatatttagatgccatcaagaaattttaccagaccagtgtggaatctgttgattttgcaaatgctccagaagaaagtcgaaagaagattaactcctgggtggaaagtcaaacgaatgaaaaaattaaaaacctaattcctgaaggtaatattggcagcaataccacattggttcttgtgaacgcaatctatttcaaagggcagtgggagaagaaatttaataaagaagatactaaagaggaaaaattttggccaaacaagaatacatacaagtccatacagatgatgaggcaatacacatcttttcattttgcctcgctggaggatgtacaggccaaggtcctggaaataccatacaaaggcaaagatctaagcatgattgtgttgctgccaaatgaaatcgatggtctccagaagcttgaagagaaactcactgctgagaaattgatggaatggacaagtttgcagaatatgagagagacacgtgtcgatttacacttacctcggttcaaagtggaagagagctatgacctcaaggacacgttgagaaccatgggaatggtggatatcttcaatggggatgcagacctctcaggcatgaccgggagccgcggtctcgtgctatctggagtcctacacaaggcctttgtggaggttacagaggagggagcagaagctgcagctgccaccgctgtagtaggattcggatcatcacctacttcaactaatgaagagttccattgtaatcaccctttcctattcttcataaggcaaaataagaccaacagcatcctcttctatggcagattctcatccccgtagatgcaattagtctgtcactccatttggaaaatgttcacctgcagatgttctggtaaactgattgctggcaacaacagattctcttggctcatatttcttttctttctcatcttgatgatgatcgtcatcatcaagaatttaatgattaaaatagcatgcctttctctctttctcttaataagcccacatataaatgtactttttcttccagaaaaattctccttgaggaaaaatgtccaaaataagatgaatcacttaataccgtatcttctaaatttgaaatataattctgtttgtgacctgttttaaatgaaccaaaccaaatcatactttttctttgaatttagcaacctagaaacacacatttctttgaatttaggtgatacctaaatccttcttatgtttctaaattttgtgattctataaaacacatcatcaataaaatagtgacataaaatca

SEQ ID NO: 29790 - DNA, 2479 bp, Homo Sapiens
cgggcggacgagagagctgcgagctaacgggtccggacgacggcggcggcggcggcggcggcggcgacggctttctgcgcgggcggcggcggcggccggagcggcgagcatggcccgcgcggcgccgggcgctgactgagggtcgtgctgcggcagcctggcgcccgacatgtgaaggggaacctgccaggggattactgtgagctcacagcaggataggctggccccgggggagtggggatgggcagaacctgggccaggagtattaggaaggagacctggaccctggtagggagctcagcacaagctcgcctgacccagatggtattggacacagtgccccgctgaacagcagctgttcccagcgccagaggaccccacagccacagtaggagctttgcgacccctacgcaactgcagctggggctggggccaccaggagaagggaccagcacctcagatgggaagcagaagggcaagacctactgcggaaaggatctcgatctctgcagcggagttttcccacactcacagagcttcctgtttttgtcctctcagggttggggtctggctcccctcctctggcagaggttttgggccaggaggtgggacaacacttgcatggaacccaagtcccctgaagcccctgtgctctctgttgtgattggagttctagggcttccccgctgccgggaacgaggggccgcctcattgtctgctcatgaaccacaaggaccccgactgctccagactggattatttcaagccgccaaagagggggacccctagagctggcagccagcaatcccaagggactagagggctgcaatggactgacctccccctcaccagggtggcaggagaggcagagcctctgtggcctagctagtgacggagagacccgatgaagccctaagcaggggccccgcctgactcagggacaggacagccactcctgccaacgtgtgttctccctacatgagggagggcgtggcaagggacccctgccactgtcccctgctgcagcacgtgcccctatgccctttgcatgtggtgccagaataggcaggctacgccgtggctggcccctcagcgggctgggaaaagagtggccacggtgaccgtcacccgcctgccggcaccatgaagtgctccctgcgggtgtggttcctctccgtggccttcctgctggtgttcatcatgtccctgctcttcacctactcgcaccacagcatggccacgctcccctacctggactcaggggccctggatgggacgcaccgggtgaagctggtgcccggctatgccggcctgcagcgcctcagcaaggagaggctctcgggcaagagctgtgcctgtcgccgctgcatgggcgatgccggtgcctccgactggtttgacagccactttgacggtaacatttcccccgtctggacccgagagaacatggatcttccaccggacgtccagaggtggtggatgatgctgcagccccagttcaagtcacacaacaccaatgaggtgctggagaagctgttccagatagtgcctggcgagaacccctaccgcttccgggacccccaccagtgccggcgctgtgccgtggtggggaactcgggcaacctgcggggctctggctatgggcaggacgtggacgggcacaacttcatcatgaggatgaatcaggcgccaaccgtgggctttgagcaggatgttggcagccgaaccacccaccatttcatgtaccctgagagtgccaagaacctgcccgccaacgtcagcttcgtgctggtgcccttcaaggtcctggaccttctgtggatcgccagcgccttgtccacggggcagatccgattcacctacgccccagtgaagtccttccttcgagtggataaagaaaaggtccagatctacaacccagccttcttcaagtatatccacgacaggtggacagagcatcacgggcggtacccttccacggggatgctggtgcttttctttgccctgcatgtgtgtgatgaggtgaacgtgtacgggttcggggccgacagccggggcaactggcaccactactgggagaacaaccggtacgcgggcgagttccggaagactggcgtgcacgacgcggacttcgaggcccacatcatcgacatgctggccaaggccagcaagatcgaagtctaccggggcaactgagccgggcctcgccgcgacccttccggcccatctatcgggcaccggggctccggcccgggacccaggaccagcaacccgcgaccaatcatgctgcagcccaggggcgtctgctgtgccccgccaatcacgagactgggggaccggccgggcctggcaccaatctgcgctgcggtcgggcggagcttctgtttctcccagccaatcatgtgactcaaggaaaacttccggcgctgtgtccagtctcctccaatcaatggccttcgggggcgggccagcggccgct

SEQ ID NO: 29791 - DNA, 4645 bp, Homo Sapiens
ccgcggcggagccagaggctgcaggaagagcccgcgggggcccggagggtgcgattcctcggcccccgcaaaacaatgtgtgttgtgagccaggacgcaacttgccggaggcggcgggggcgcgccgagcccgcctgagaccgcgctgaccttctccccccgccgtccgttgggcccgagcgcccagctcctcgctccccagttcgcgggggccgggccgagccgcggggcggggccgcccctccgtcgccgctgcctcctcccccacccccagccgcggaggatgcggacggcccccggcggcgtctagcggccccgggcccaggcgcgatggtgcagcagcggggcgcgagggccaagcgggacggcgggccgccgcccccgggacccgggccggccgaggagggggcgcgcgagcccggctggtgcaagaccccgagcggccacatcaagaggccgatgaacgcattcatggtgtggtcgcagcacgaacggcggaagatcatggaccagtggcccgacatgcacaacgccgagatctccaagcgcctgggccgccgctggcagctgctgcaggactcggagaagatcccgttcgtgcgggaggcggagcggctgcggctcaagcacatggcggattacccggactacaagtaccggccgcgcaaaaagagcaagggggcgcccgccaaggcgcggccccgcccccccggtggtagcggtggcggcagccggctcaagcccgggccgcagctgcctggccgcgggggccgccgagcagcgggagggcctttggggggcggggcggcggcgcccgaggacgacgatgaagacgacgacgaggagctgctggaagtgcgcctggtcgagaccccggggcgggagctgtggaggatggtcccggcgggacgggccgctcggggacaagcggagcgcgcccaagggccgtcgggcgagggggcggccgccgccgccgccgcctccccgacaccgtcggaggacgaggagccggaggaagaggaggaggaggcggcagcggctgaggaaggtgaagaggagacggtggcgtcgggggaggagtcgctgggctttctgtccaggctgccccctggcccggccggcctggactgcagcgccctggatcgcgacccggacctgcagcctccctcgggcacgtcgcacttcgagttcccggactactgcacccccgaggttaccgagatgatcgcgggggactggcgcccgtctagcatcgcagacctggttttcacctactgagcccaccgtcagcggggcgcgcacgcccccaaaccagctgtttacatacaggaatcaggtattggggcccctcggaggccgaggctggcaccccatctcccgcgcagcctgccccctcctggacgtgcccatcccccctcagatccagacatgcccctcccccgcagacacaccccaaggcagcccaacccccaccccttccccgacacccaagcccctccccacgtcgccccctcctgcacagccaccagcagccagccccctccgatacacctcccgtcctctcctacagacctgcacccctccccccttttgcacacgcccctcctcgtggccggaggacccgccccctcctttgctccggaatctctcctccctcgcccggcccgccttctctgggttaggggggcgatgcggccgggtggcaacgcacgcgcctcctgcgcccctcccttccctggggggaggggcgcaccccttttatccccggagcgctagggcccgcccctccgctggggcccacccccttcgtgcgcatgcttaatgcttctggggaggagggggctggtcccagcggagccgcactcttcgcccgctccgggcaaaagcgggggcgagtgtagagcgatcctgggaaatcctttgatccgggagccctaggtttcctctccagccaacggggcgtcgctgccttaatgggaggagcactcggaagggttggtttgggcctgaaactctcccaagtggcatagccccttttccggtatggggtctcctacacccacgcgcaccacctctccggtcgcgtggctgcctctacagcctacctatacgtccctttttccccccaactgggaattgagaggtaaggtctttctctggaaatccagcagtagaggaagggaccacccaagaaaactaaaaaccaaggcaccttaccagtctgtctggggacaggatccctgctgcaccttccccaccccctcctgggaagtgccccctcacctcagggcacccgcaacctgggctcctccctgagcgcaccggcccttcctgtcacccaggtccaccctcagtactcaagctgcagtatacagcgggaaaaactgaggcactttggtgctaggggtttgggactgaggcgtggagagcagatgtgatggcaggaagactctcgcttttaaacatctggtttgggagagaccatcgacttggccagtgagactgagaatggattccgagtagtgatgggccgtttgcacctcggtttttccacgtgagaaatggggagaacgctgctgttaggaggaagttgtgtccagttcagggtgccctcgggagccctgtccctgttgctgtggcccctctcacgccgccatctctctgccccgccccgcccctccggcctccccacaccccccttgccctcactacctgtatctcaccggcgtgtgttcaccctcccgggtggctcacacactctcattcacacacacaaatctcaggaacaaacggtcccagagtcctccggacccctgcccagggtctctgcaggtctctgccccacgcgttcccgtcgctgacaaagccaccagctgcctcctttaagcttggtgctccggctctgggcctttcttgcgctctattttttttttttttttttttaagaaaaacaacaacaacaaaaaaagacaatgaaaaaaaaaacgtcatgtgagtgaagagatgtcactgtctgtggtcttggagaactagtctcgtagctgaggggtggggtccctctgtctggggcactggcacccacagcaggactccgccagtctgatgccaggactgaataaagtgtatttgccccgaccttgccctgtggttctgcatgtctgtgctcttcctcaaccctccctaaacagtttgccagattcaagtccgtgtgatttgggcccgagctgggtgtcccagggcaagccaccttgcctgtctaggcctctatgtcaggactccctggccttcatgaagaatagcaaactcatccctgtagggaccaggcaggtaacatagacgagtgactctgggtggacagtggtgtcatgacccacttcaaggggcctacctcctgccagttgtgaccctgtgggaatgcagtccacagtggccaggtggccagatttttcaagaaaagctggatggatgtttctgagtcatcttaatttcaaaatgagactcatattttaaaatttctgtgggccaaatgaaacaagtatgcaggcaggtctggtccgagggggctggcttggccatgcctttctgtgcctttaatgaggactaagaagcaagattgggccacactgtctggactcaaagcccagctccaccactgagcacccgtgtgactctttccatatgtataacgtggggataataataatagctgcttcacaggatgaaatgaagtttgaggtgagaagcattcaccatggtgcccatcgtgttactccattgtcagaggaggaaacggggtcaggcaggaaagcaacttaaaggagggcctgcaagcagccagggtcagagacagggcttggttctgcttcctggtgaagcatggcttcggggtgctgcctctccctccctgtttgaatctgcagattgtgttaggcccccagctgagggcctggagtggtgggattggtcccagtgcctggcgcacattggcctgcagagtagattaactgaatgaccaaagagcaacagaagtctagtgattcttgtctttgaggttctgactggtgttttacaactgagtccaaggcttttccctcctttgtccctctgacacccctccccctaattctcatctgtcagatccagtgtattcctaagctgggacaaagcctctgttttcccagtaggagccagggctgagtgtggaaattacagtgactgcttcttctcagcttctctggttgaaagcaagctggcgaagtaagaggaggtagagttgagaaggtgtggaagatagggacagctgcccccagaactcccttcaagggaggacttccccagctatgggaagtgccatcagggtggccgcagctgcagagagccacttcacctgagaccacgcccttcctggggcagcctgtatctggtgtctgagtgaggcatggtataaacacctggtcatttcaatccaacatgggacggacactgacagacagtactcccagcaggcccaggccagccagggcttcgtcaggcctgcagcacaatttgacttcctatgcccaggcctgcttcctcttcttcctcttcttttcacaggtgcttattcctaataaacatcttgcaacccaaaaaaaaaaaaaaaaaa

SEQ ID NO: 29792 - DNA, 2513 bp, Homo Sapiens
cggggaaaaggcttgtgaacggcgtttctgcgtctgccgtggacagcgaagtctgcggttcctgagccggagtttgcgccggagtgcctgtgaagaaaacggggtattgccctgaggcttatattctgcctcagttgtcttttcttgaaatattataaatcagaatgtctgcacagtcagtggaagaagattcaatacttatcatcccaactccagatgaagaggaaaaaattctgagagtgaagttggaggaggatcctgatggcgaagagggatcaagtatcccctggaaccatctcccagacccagagattttccgacagcgattcaggcagtttggataccaggattcacctgggccccgtgaggctgtgagccagctccgagaactttgccgtctgtggctcaggccagagacgcacacaaaagaacaaatcttggagctggtagtgctggagcagtttgttgccatcctacccaaagagctacagacttgggttcgagatcatcatccagagaatggagaggaggcagtgacagtgctggaggatttggagagtgaacttgatgaccctggacaaccggtttctctccgtcgacgaaaacgggaagtactagtagaagacatggtatctcaagaagaagctcagggattaccaagttctgagcttgatgctgtggagaaccagctcaagtgggcatcctgggagctccattccctaaggcactgtgatgatgatggtaggactgaaaatggagcactagctccaaagcaggagcttccttcagcattagaatcccatgaagttcctggcactctcagtatgggtgttcctcaaatttttaaatatggagaaacctgtttccccaagggcaggtttgaaagaaagagaaatccctctcgaaagaaacaacatatatgtgatgaatgtggaaaacacttcagtcagggctcagcccttattcttcatcaaagaattcacagtggggagaaaccttatggatgtgttgagtgtgggaaagcattcagccgaagttccattcttgtgcaacaccagagagtccacactggagaaaaaccttacaaatgtcttgaatgtgggaaagcctttagccagaattcggggcttattaatcatcagagaatccatactggggagaaaccttatgaatgcgttcagtgtgggaaatcgtatagtcaaagctcaaatctttttagacatcagagaagacacaatgcagaaaaacttctgaatgttgtggaagtttaagaaattgaaaaaaaaaaaagaatcagcactcaggtctttttcttcagaaatgaagacaaaatttaaaatatggaatgatgcagaatagttttttccctattgactgtcagaaaatccactgggaaatgtaaaaatcttcactcaccattatgatatttatcttgaaagaaatggtgtcatacctgcctagaaactgaaattttaaaacttaattcaggtcttaatgcctaaattttccatgtgatgtttatagtctgtattacttctccaaataatgaactacctgattcattgtccctttcttgaaagtttcttttttaagacaaatacattatttctgcattgatcattgaaatgttctttatatggatacattcccttatatattaaaaggcaacaggaattacaaagtctgaaaaccattttaaaccatcttttaaaaatttacccttatttccttttacctaatttgaatatgcatttgagaaaataagaggataaaggatgctaagagcctcaaaatgaaccataagtctcagataagaagtgatggtgataaacatcaaaaagtgaatggaacaccttgattggggaagatatgcaaatactttgatctaagaattgaaatgtatcaagaatttatattttgcctgcagaaaattcaaaagctactcatcctctctataatttggagtcatcttactaatgaaaataatgttttcccatatattattaaaaagcatacagtctaaataataaacagttgtaaaataatgaaggtagaaattataacactagggaaaaatttgtagcggatggcagtgttgaaggcaaatgtaaacataagggtaatggtctgtcatggcttttagaaaaagatgatagagttcatcattattttgccttcatctttgttaaggacagaaaattccctgacaggtgggcaagtatcaggttacctattttttattcctttggtacaaaagggttgaacgtcaggctaaaaaagcagccatgcatttattattaagcattttctaccgacaaggcactgtgctaggtactgtaatctaccataagtaggtaggtatttcttccactgtaaatcataggggtttgctgttttatgtgagttagcctcttccccttgtctgagcattcctcaggggaggtcacctgtgaggttcccagaactgtagttttttttaccagggtgttgtatttggaggaggaccggaattc

SEQ ID NO: 29793 - DNA, 5579 bp, Homo Sapiens
ggaccccggtgtctggcttcccccgagccgggaccccgcgatggccaagcgcagctcgctgtacatccgcatcgtggaggggaagaaccttcccgccaaggacatcactggcagcagcgacccctactgcatcgtgaaggtggacaatgagcccatcatcaggacagccacagtgtggaagaccctgtgccccttctggggtgaggagtaccaagtgcacctgccgcccaccttccacgctgtggctttctatgtcatggatgaggatgccctcagccgggacgacgttatcggaaaggtctgccttacaagggacaccatagcctctcaccctaagggtttcagcgggtgggcccacctgacggaggtcgaccccgacgaggaggtgcagggcgagatccacctgcggctggaagtgtggccaggggcccgggcctgccggctacgctgctctgtgctggaggccagggatctggccccaaaggaccgcaatggcacatctgaccccttcgtccgagtgcgctacaagggccggacacgggagacctcgatcgtgaagaagtcatgctacccacgctggaatgagacgtttgaatttgagctgcaggagggggccatggaggcactgtgcgtggaggcctgggactgggaccttgtcagccgaaacgacttcctgggcaaagtggtgattgatgtccagagactgcgggtggtgcagcaggaggagggctggttccggctgcagcccgaccagtccaagagccggcggcatgacgagggcaacctgggctccttgcagctggaggtgcggctgcgggacgagacggtgctgccctccagctactaccagccactggtgcacctgctgtgccacgaggtcaagctgggcatgcagggcccagggcagctgatcccactcatcgaggagacaaccagcaccgagtgtcgccaggacgtggccacgaacctgctcaagctcttcctggggcaggggctggccaaggacttcctggacctgctcttccagctggagctgagtcgcaccagtgagaccaacaccctgttccggagcaactctctggcctcaaagtccatggagtcttttctgaaggtggccgggatgcagtacctgcacggcgtcctgggccccatcatcaacaaggtgtttgaggagaagaagtacgtggagctggaccccagcaaagtggaagttaaggatgtagggtgctccgggctgcaccgcccgcagaccgaggccgaggtgctggagcagagcgcgcagacgctgcgcgcccacctgggggccctgctgagcgcgctcagccgctcggttcgcgcgtgccccgccgtggtgcgcgccaccttccgccagctcttccggcgcgtgcgcgagcgcttccccggcgcccagcacgagaatgtaccgttcatcgccgtcaccagcttcctgtgcctgcgcttcttctctcccgccatcatgtcgcccaagctcttccacctgcgggagcgccacgcggacgcccgcaccagccgcaccctgctcctgttggccaaggcagtccagaacgtgggcaacatggacacgccggcttccagggccaaggaggcttggatggagccgctgcagcccaccgtgcgccagggcgtggcgcagctgaaggacttcatcaccaagctcgtggacatcgaggagaaggacgagctggacctgcagcggacgctgagtttgcaggcgccacctgtgaaggaggggccactcttcatccacaggaccaagggcaagggccccctcatgtcctcctccttcaagaagctctacttctccctcactaccgaggccctcagcttcgcgaagatgcccagctccaagaaaagcgccctcatcaagttagccaacatccgggcagcggaaaaggttgaggaaaagagctttggcggctcgcacgtcatgcaggtcatctacacggacgacgccggcaggccccagactgcctacctgcagtgcaagtgtgtgaatgagcttaaccagtggctgtctgcgctgcggaaggtgagcatcaacaacaccggactgctgggctcctaccaccctggcgtcttccgtggggacaagtggagctgctgccaccaaaaagagaagacaggtcagggctgcgataagacccggtcacgggtgaccctgcaggagtggaatgaccctcttgaccatgaccttgaggcccagctcatctaccggcacctgctgggcgtggaggccatgctgtgggagaggcaccgggagctgagcgggggcacagaggcaggcacggtgcccacgagccctggcaaagtccccgaggactcattggcccggctgctccgggtgctgcaggacctccgcgaggcccatagctccagcccggccggctccccaccctcagagcccaactgcctcctggagctgcagacgtgaggcccgccctacgctccccttgctgagtcccctgccaagcgctcggagcccccccaggacactctgcaccccctcaccccggtcctcctcattagggtgcagggcctaggtctcttccaggtgggggaggggggagagtcaggaataaggggatccccagaagtgcagagctgagcaggcttgggcctgtcatggctggccggaagtgtccccagctccctacagacgctgtagccatcactgcctctccagggaccctcctctcctgcccaggacagacccagccagaaccactgctaggatgggccgcacccaggggtctggcctccagggacctagagaatgggagggagaacggggccccaggagacccggccgccaccccacccgctacccttgggtgccacagggctgtgctgttgccaacagtaaacctgctcttactgtccaggctctggggtcttgtgatgagggtctggggagaaagtgggcccggggggaccccggaggctgtcggtggatgtgccgatgatggggctgacagtatgggctctgggcatccctgttcccccccctttcttccccccactcttctggggtcgggggttcctttcccttcccagttgctgtccctgggtcccctctttcatgtcccacaggccacagagcccagtgtgtccaaccagctgttctctcctcaaagcagcccccaagcaagtcccttctctagggtgtccctgaggacagcacagaggcgggactcagagaccccattcctcttcacgcagcccttaccccaagccctctagctgtgtggctggcagtgttggccacgtaggggctcccatccccccaccattgtgtcacatgggctgccaggctcagctcccagctgcgtccacagtgacctggatcagggtggggacaaggactggaccctccttctccagaaggccttcagctcttgccttgccatgcagtcacctccttccccctctgaccccagatcccaaaggtgcaccgttgccccagcccctttctggccccatggggtttctctgatgccttcatcatagaggcccggggctggtccgatggttggcaaaacttgactccggcccagtccccactcttggggacttagaacccctgctgtcctgggatctggcctgcctttctttggtcagtccctgtggtcccccaccagctccccctcccatagggctgcccaccaagccctgcccccagcccaagaggagcccccactgcctgcggggcagtgatgtctggccaccggctcacaccaatgacttggtcctggggtggcagaagcagcaggtgacaggagcagggcccctgtccctctcttctggccctgtggtacccaggccacacgttgtgcccgctcttggggctgaccggctgtagggaccaccagccgctgctactgtgggccgccccggggcagggtgggcagggcttttgtgggttatgaggacacagaagtccctgaggcccccagacctggctcagccaacctccttcctcccccggttgccccccactctaaagcctcctccctcccagcgtccactggctccaggctcctcacaacagcagctcatagacacggggcgtctccaggtggtcccagccctccagatgtttctagctctccaggtgggcgctgttttcacgtctgcctgcatccattcattccttcattcctcacctttatcctgttatctctatttttttaagctaccaggaaggaaagggaagaagagatcacgaaactgggacccccagaagggaggagtgggctttgaacttagacatctacctcagagctcaaataggttgtttaaaatcacattcaattttcagatgaaggggaactttatagttttttttttttttttttttttttttggggcggagtctcactgtgttgcccaggctggagtgcaaatggcttgatcttggttcactgcaacctctgcctcccaggttcaagcaattctcttgcctcggcctcccgagtagctgggactggaggcgtgtgccaccatgcccagctaattcttgtatttttagtagagacggagtttctccatgttggccagactggtctcgaactcctgacctcaggtgatctgaccgccttggcctccgaaagtgctgagattacagttgcgagccactgtgcgtggccagaactttataataagagacttgaagctgggtgtgacggtgcacgcctctggtcccagctgctcgggaggccgggacagaaggatcaccttgaggccaggagtttaaggccagcctgggcaacatagcaaaacctagtccctaaaattaaaaaaaaaaaaaaaaaaaaaggaaaataaaggagacttgaaatttttgaactaaatagtggtgatggctacacattgtgaatgtaattaacaccactgagttaaacacttaaaatggttaaaatggcaaattgtatgttatacctattttactacaataaaaagtataaaaaagagaagatatttaggtgacttacagcaaccaattgcaacaaaacaaaatgttaagaaatgatctttttatgaggcaattggaaatttgaacactgatcaactataggatgattggaattattaatttttaaaggtgtgataagatgctgcacttggctgggcacagtggcacatgcctgtaatcccagctacttggcaggctgaggtgggagaatcgcttgagctcaggagttcgagaccagcctgggcaacgtggcgaaatccccgtctttacaaaaacaaacaaacaaacaaaaaagatattgcagttgtgttgtaagcgtccttatctttcagagctacatagtggaatgtttatggaatatttaggataaatgatataggcatttgggatttgctgcaaaatgacccagaggcaggggtcagggggagaggtagagatgagacaagaggtagaggggagaggtagaggtagccacgagctgataattacagacaagagatgcggagtatgtgggggctcattatcctgcatagtctatctttgtatatctttgaacttttcaagaataaaaaagcttaaaaagtat

SEQ ID NO: 29794 - DNA, 4270 bp, Homo Sapiens
ggggaatcgcgtaatggcggacacaggcagggcgagcgcggctgggggcgtagcgcgctgagggggtccggccgtttggcagcccgcgaggcggtccgcgggagcacactctgtgcggagactgggcggccggccgacccttcctgtcgctgacggcgactgcgggaggccaggttgtttttcaccattcagaacattgcctgaagcaggtccaccatgccgttagtaacgaggaacatcgagccaaggcacctgtgccgtcagacgttgcctagcgttagaagcgagctggaatgcgtgaccaacatcaccctggcaaatgtcatccgacagctgggcagcctgagtaaatatgcagaggacatttttggagagctctttactcaggcaaatacctttgcctctcgggtaagctcccttgctgagagggtcgaccgactacaggttaaagtcactcagctggatcccaaggaagaagaagtgtcactgcaaggaatcaacacccgaaaagccttcagaagttccaccattcaagaccagaagctttttgacagaaactctctcccagtgcctgtcttagaaacatacaatacctgtgatactcctccccctctcaacaatcttaccccttacagggacgatggaaaagaggcactcaaattctacacagacccttcatacttctttgatctttggaaggagaagatgctgcaggacaccaaggatatcatgaaagagaagagaaagcataggaaagaaaagaaagataatccaaatcgagggaatgtaaacccacgtaaaatcaagacacgtaaggaagagtgggagaaaatgaagatggggcaagaatttgtggagtccaaagaaaagctggggacttctgggtatccacccactttggtgtaccagaatggcagcattggctgtgttgaaaacgtggatgcaagtagctatccgccaccaccacagtcagactctgcttcttcaccttctccttccttctccgaggacaacttgcctcctccaccagcagaattcagttacccagtggacaaccaaagaggatctggtttggctggacccaaaagatccagtgtggtcagcccaagccatccaccaccagctcctcctctaggctctccaccaggccctaaacccgggtttgctccaccacctgcccctccgccacctccgcctccaatgataggcatcccacctccaccaccgcctgtaggatttgggtctccagggacgcctccaccaccctcacccccatctttcccacctcaccctgattttgctgcccctccacctcctcctccaccaccagcagctgactacccaactctgccaccacctcccttgtcccagccaacaggaggagcacctcctcctccccctcctcctcctcctccggggccccctcctccccctttcactggtgcagatggccagcctgctataccaccaccgctttctgataccaccaagcccaagtcctccttgcctgccgtgagcgatgcccgtagcgacctgctttcagccatccgtcaaggttttcagctgcgcagggttgaggagcagcgggaacaagagaagcgggatgttgtgggcaatgacgtggccaccatcttgtctcgtcgcattgctgttgagtacagtgactcagaagatgactcctctgaatttgatgaggacgactggtccgattaactctttctgcctgctgcccaccttctttttctttccttcctacctgccttctttgatgccaaccccaacagacccgtagggggagaaaagggaggaaaaaagtaattttaaggggccaaagctttccctgaagcaaccaaagatatatccaagtgcttcctccaagtcaacatgtatttcctctccccattttcaggccctgtggggctcctgaggttcagtagctgggatgttccctctttccttcaagtgcctgttgcatattgaaaggaaggagaaatcccaaagcagattcctttgatcgggtttctgttggagatggggcttcccttaggagccatattcaactacagccttctaaaacctgtgccctcagccacttcgaatgccagccaccttctggttctaaaacggggagtggtctgaatgaacacagctgacccctttcccgcgcactgaaagggcagagtaggccgaagggtccaagggccagactgcctcaccctctgccctaatcagcagggtgggcctgccttttgctaagcgatctctatgcctgggatgccctttattccaggaggcatcaagcctctaaagaatgtctcacctcctctgcccaaaaatgatgcctttctgtaggctggtgttgttgcctccctcccaggatccctttggtgagtatggtgttcaggatgcaccaccaccacctctagataccttcaggcaacacagcccagttttaacctctagtatccatgaccaaactatccctgacacatgaggacaggggcctcttctggctgtcaggagcaaagcctgaagacttggagctgcaggactggaagaacagtggagccccgtgggtctcaccctttaaggatgctgaggcctagagatgggaagtgacttgctcaaggtcacacaattggatagtgacatagctagagcgcagagttcctgattccaagtcacctgtgctttctgggaccaaagaatgggcacctgctggagtccgggcagagctttctcagttgtattgctactccagacctcaccataggttggggtcccagtaggaaggctcagggtctgtgccagccctgtcggtgctgctcagaccttcatagcctctcttgtcattctttgttgccccttttctgtcaccagccaaccacatagccttgggaccagcctctctgggggaccagaagtagtgagagaaggaaggggataggcagctttgacaggtgctgctttcaattcctctgcaactcctcccccttttatttccccaatttaaacaaagattctgccaactgtggaaacttcagtccctcaggctggcagccatgccagtacctgcctgggggtggggggtgcctggcagccatgaagcaggctgaaaggcagaggggctccaggtcctgtttccagctcccctcactgcacatggtgaagctcgctccctccctccctcccttcccgcttttcccagagctaatacacaggtgctattattcagaaaaaaactggtcagctctagccaacagtgaggtttcttttcttctgccctaactattgtgtagcctcttatgctgaaatcggcttctgctggcttctccggctttcagagccctgaaacaaagagaaacaggatctgtccctacccagcacagcaaatggttgtagtaattgccaaagccctcataaagccctccggcttgaggagagagtgtatagtcatgggttctgcctctgtgcccttgctggccgcttctcctctgccttctttcctggaactcagggtgtggggactgagcctgtaggggacagcatgccgtcttgctgtggccactcccaagtgtgccctcttccctctttacacatcaggtgtctctggcacaggacttggcactaagctccatgctgagacaccaggctatgtgggcccccaccttgtttcccagcctgcaccttagaagccgaaggtgctttcatcagaaccctaaaatggtcgttgaaggcgcctgggccgcagcccagcagtagttggagaggcaggcagagggcagtggttctcccaaataggagacctggggcctggccaggccagggtttgggcctaatggctttgactaaattacccccatcctccttgcccggaaaagggagagctagagccactcactgtcattctgctctgaccttgaagggggcggtgttggcctggcttctggaatggactgagtccatcgtggaaagggctgggggcaggaggaggtggggaggggcactgcctgcggaaggtaggattagatcattagctcagtgacctcctagggtttcgatgtgctatgttctcatcctacagttggtttggtaatgatctgcaagtcccggagagcaacagcacagctctgcctgacgctctcattaaaatctatgcagccaagctcggcactttgtagcagccggccttgcgaagcctcctcagctcggggggccggggacccagtgagccgagaggccctctgggctccacttatgcatatgcacc

SEQ ID NO: 29795 - DNA, 4749 bp, Homo Sapiens
acagagcgtgttgttagagctgtgctgagcgggtgtttgggttgttggctgctttcttccccctttctcacacacttgtatattattttgaggtggtgttcgcagagtttgaaaggagagagaattaaaaaaaaaagccgcaagcgtttcactcttttatttttataatccccttcaatttggggttaaaaaaaagacaagaaaacaggaaggaagagaaataaggaaatgagatgtggtaaaagaagctaaaaggtgccttttaaaagatcgttgctgtgaagtgaaaaaaatctccagagaaaccaaaaagcaccgccgagacctcttccgaaccaaaggagtttgtgtttgcttttagggaagaagaaagatcattcattcggaggaataacaaccaattaaaagacaaataaaaaaagtttggagtgggacgcagagcgagcgagaggagctgccggcgggcggtggggcgcggagcccgcactttcccggccgggtgagcggcggccgcggcgccgggctcggcgggtgcgcctcggcggagcgaacgtcggagcgttgccttgggagacgcgcgccggacaatgcccgcggcgggccagtgacgcccgcggggaatgcggagcggcccggcagccggcacccagccgccgccgcgcgttcctgccgcccgtgtcacgcgagacccggcgggggccgggaccgcccgagccgcccctcagaccgagccggccgcctccgctgccgcggccgcctcctcttcggggtcattaaagccaatgagccgcgcgcctctgccgagcgcagccaactaaatcggcttggatgattcgcgacctgagcaagatgtacccgcagaccagacacccggcaccgcatcagcctgctcaaccctttaaatttacaatttccgaatcctgtgatcggattaaggaagagtttcagtttttacaggctcaataccacagtctgaagctggaatgtgagaaactcgccagtgagaagacagagatgcagcggcattatgtcatgtattatgaaatgtcctatgggttgaatatagaaatgcacaagcaggcagagattgtcaagaggctgaatgctatctgtgcacaagtcattcctttcctgtcccaagagcaccagcaacaagtggtgcaggctgtggaacgggccaagcaggtgaccatggcagaactgaacgccatcattgggcaacaactccaggcccagcatttatcacatggacatggtctccccgtacctctgactccacacccttcagggctccagccccctgccattccacccatcggtagcagtgccgggcttctggccctctccagtgctctaggaggtcagtcccatcttccaattaaagatgagaagaagcaccatgacaatgatcaccaaagagacagagactccatcaagagctcttcagtatccccatcagccagtttccgaggtgctgagaagcacagaaactccgcagactactcctcagagagcaaaaagcagaaaactgaagaaaaggaaattgcagctcgttatgacagcgatggtgagaaaagtgatgacaacttggtggttgacgtttccaatgaggatccatcttcccctcgagggagcccagcacattcccccagagagaatggcctagacaagacacgcctgctcaagaaagatgccccgattagtccagcctctattgcatcttccagcagtactccctcctccaaatccaaagaacttagccttaatgaaaaatctactactcccgtctcaaagtccaatacccctactccacgaactgatgcgcccaccccaggcagtaactctactcccggattgaggcctgtacctggaaaaccaccaggagttgaccctttggcctcaagcctaaggaccccaatggcagtaccttgtccatatccaactccatttgggattgtgccccatgctggaatgaacggagagctgaccagccccggagcggcctacgctgggctccacaacatctcccctcagatgagcgcagctgctgccgccgccgctgctgctgctgcctatgggagatcaccagtggtgggatttgatccacaccatcacatgcgtgtgccagcaatacctccaaacctgacaggcattccaggaggaaaaccagcatactccttccatgttagcgcagatggtcagatgcagcctgtcccttttccacccgacgccctcatcggacctggaatcccccggcatgctcgccagatcaacaccctcaaccacggggaggtggtgtgcgcggtgaccatcagcaaccccacgagacacgtgtacacgggtgggaagggctgcgtcaaggtctgggacatcagccacccaggcaataagagtcctgtctcccagctcgactgtctgaacagggataactacatccgttcctgcagattgctccctgatggtcgcaccctaattgttggaggggaagccagtactttgtccatttgggacctggcggctccaaccccacgcatcaaggcagagctgacatcctcggcccccgcctgctatgccctggccatcagccccgattccaaggtctgcttctcatgctgcagcgacggcaacatcgctgtgtgggatctgcacaaccagaccttggtgaggcaattccagggccacacagatggagccagctgtattgacatttctaatgatggcaccaagctctggacaggtggtttggacaacacggtcaggtcctgggacctgcgcgaggggcggcagctgcagcagcacgacttcacctcccagatcttttctctgggctactgcccaactggagagtggcttgcagtggggatggagaacagcaatgtggaagttttgcatgtcaccaagccagacaaataccaactacatcttcatgagagctgtgtgctgtcgctcaagtttgcccattgtggcaaatggtttgtaagcactggaaaggacaaccttctgaatgcctggagaacaccttatggggccagtatattccagtccaaagaatcctcatcggtgcttagctgtgacatctccgtggacgacaaatacattgtcactggctctggggataagaaggccacagtttatgaagttatttattaaagacaaatcttcatgcagactggacttctcctcctggtagcactttgctctgtcatcctttttgttcacccccatccccgcatctaaaaccaaggatttcagatactcattgcagttgtggagtttaatcccctttcttaacctcacttcccacttgctattgaattgtgaatagtcattaaaaacctgtgataccaaatcttcagctgtctacttggaagaacatggaataagcatacttaacagtgaaaagaatctttaattatgtattatatctgtaatatatttattttgtttaaagaaggctttctaacaatgactgactaaataaagctgtctgctcctgcattgataatgaaggtgcgttgtatttgatacccctccccccctttttttggcaaaggaggggaaaggaaggtttaaaataattgatttaaaatgtcactaagtgtagactgatgactgtatagagatgtgaaatgtataattacacatggaagcaatatgttgctgtgttgttattaggttttttttgtttttgttttctacatcttttaaagacttttggaaatttggctgaacaattagaacacaacaggccaactcatactcatttggatctatttagacaacgttaaccaatatatctatagctttagattatattcgataaaagtaattggactttttttctttttttgactcgttgacaagtgtctttgtaatatgtttttagttccctttttttgttgtattataggcagatgaacaaattaaatttggcctcaaagagagaacttactcccttctggatatttttgccacatttctttgcaaaaggagatatatatatctttagtcagttttgttgttatgagaaattatgggttattttgtggcatgctctttgggagctgcacagttatggggaggactcccactgctgtgcaagttaagtcttttacaaaacaaggacagcagaggagggtttgcagagacctccctctgaaaaacacaaagaatggactctctcctgggatgaggacttgctttctttacctccggttctttccatgtcttagttggatgtccctgaaatggacacaggctgtgccattgtgccagaaacattgtgttatcttttatgttgttgttgttgctgttaaactataatatgtgacttctttttttattattttttgtttgaatgctttaaaaatcttttaagtctgtggatctgctgatgtacagtgcctttgctgctatggatcaaaatcaaaagaaccgtgtagatatactttattgtataagtagaaaattacttaatttcatactagaaatggatggatgctgcaagttgaaatggactgtccattgacgttcctaatgtggtagcagaaaaaaaaaaatggtgtcttaagtgcttagtgtttgatgtcattaacagtttcgtaaaactctacagtgtagaaagattttgatactaaactgtgcgttgtacatagttctaatgcattgtattgaccaccagtacttctataatggtagattgtttgtgaattcagacttttaagcattaaacataaataacttctagaa

SEQ ID NO: 29796 - DNA, 2178 bp, Homo Sapiens
ggccccccgagagaagaggtacggtcgaagccaggagccaggccgagcgggagctgaccaggcttgactcgggtacagaacgaggcaccagtccccttgcgaaccgaagggcctcgcagtggatggaggaggcccagccctgaggtcaacgccaaccaggctagcctggcacggggcctacagggtgggtaggcgggcgtgccgcagccgtccagggccttccctcaggtcccgggcgaggggcctacgctgcggcccggcaacaaggcccgactcggcccctcgggaccagagccccacccgatcggaagcggatcctttaccagggccataggccagtgactaggccgggcctgggcctcccatcggggccggactaggacgaggccccggggaggcccctggcctaccagacccttttctcaggccgacagccgccaggaagatgcaacgtgccctgccaggcgcccgccagcacttgggggccattctggccagcgccagcgtggtggtgaaggctctgtgtgcggcggtactattcctctacctgctctccttcgccgtggacacaggctgcctggcggtcaccccgggctacctctttcctcccaacttctggatctggaccctggccacccatgggctgatggagcagcatgtgtgggacgtggccatcagcctgacaacggtggtggtggccgggcgtttgctggagcccctctggggggccttggagctgctcatcttcttctcagtggtgaatgtgtctgtagggctgctgggggccttcgcctacctcctcacctacatggcttccttcaacctggtctacctgttcactgtccgtatccacggcgccttgggcttcctaggtggcgtcctggtggcactcaagcaaaccatgggggactgtgtggtcctgcgagtgccccaggtgcgcgtcagtgtgatgcccatgctgctgctggcgctgctgctcctgctgcggctcgccacgctgctccagagcccggcgctggcttcctatggcttcgggctgctctccagttgggtatatcttcgcttctaccagcgccatagccggggccgaggggacatggctgaccactttgctttcgccactttcttccctgagatcctgcagcctgtggtgggtttgctggcgaacttggtgcacagcctcctggtgaaggtaaagatatgccagaagacggtgaagcgctacgatgtgggtgccccatcctccatcaccatcagcctgccaggcacagaccctcaagacgccgagcggagaaggcaactggccctgaaggcactcaatgagcggctgaagagagtggaagaccagtccatctggcccagcatggatgatgatgaagaggagtctggggccaaggtggacagccccctgccctcagacaaagctcccacacccccagggaagggggctgccccagaatccagtctaatcaccttcgaggcagctcccccgacgctgtaactccagaccaccttgagtgtggcacctcccctcccaagccccccttgacatcctctcagctactccagggcacctgactgctctgaggagagggaagaaggcctgctggggctttccatggccttctgctgtttctcgccaacactacccaggactcttgctacctggttccaactccagacaaccactatgccaggcccggagcctctgaggcatcggccagtccaggccctcatctgaggtaagaatgtacatcagctggcagccccaagcaagtggctgcagggacactgatgccacagctcctgggccggccctcacatctgaaactggttgccgagagccctgagccaaggcaaggatttgccaaaaatgttctgggggcccagcaaatgcaggagccgacctggggctgcacatccctgcccatccccagaaagactgttcctgtcaggatttgtttccctctgctgtggcggtgactgcttctggaccagaacagctccagctcccaggtattttctacaggaccacttgagtgggcagccaagcccaggctcgcagtatcaataaagcagttctctgaggaatgacaaaaaaaaaaaaaaaaaaaaaaaaaaaaaaaaaaaaaaaaaaaaaaaaaaaaaaaaaaaaaaaaaaaaaaaaaaaaaaaaaaa

SEQ ID NO: 29797 - DNA, 5261 bp, Homo Sapiens
ggcgcccgaccccagccaccgccctgcggccagcgcgtcccccgactcgccgcccggagaccccgaggctccaacgagttcagaaatgtccagaaatgacaaagaaccgttttttgtgaagtttttaaagtcttcagacaattccaaatgtttttttaaagctctcgagtccataaaagaattccaatcagaagaatatcttcagattattacagaagaagaggcattgaagataaaggagaatgatagatcactttatatctgtgacccttttagtggcgttgtctttgatcacctcaaaaagcttggctgcagaattgttggtcctcaagtagtcatattttgtatgcaccaccagcgatgtgtcccaagagccgaacatccagtttataatatggttatgtctgatgtaaccatatcttgtacaagtctggaaaaagaaaaaagggaagaagttcataaatatgtacaaatgatgggcggacgagtatacagagaccttaatgtatcagtaactcaccttattgcaggagaagttggtagcaaaaaatatttagttgctgcaaacctgaagaaacctattttgcttccctcttggataaaaacactttgggagaagtcacaagagaaaaaaataactagatatactgatataaacatggaagatttcaagtgtcctatttttcttggttgcataatctgtgtgactggcttatgtggcttagacaggaaagaagttcagcaactcacagttaagcatggaggtcaatacatgggacaattgaaaatgaatgaatgtacacacctcattgtgcaagaaccaaaaggtcagaagtatgagtgtgccaagagatggaatgtacactgtgtgaccacacagtggttttttgacagtattgagaaaggtttttgtcaggatgaatccatatacaagacagaacctagaccagaagcaaagactatgcccaattcttcaactcctaccagccagatcaacacaattgatagtcgtactctttcagatgtcagcaatatttccaacataaatgcaagttgcgtaagtgaatcaatatgtaattcacttaacagcaaactggagcctacacttgaaaatctagaaaatctggatgtcagtgcatttcaagcacctgaagatttattagatggttgtcggatatatctttgcggttttagtggcagaaagctagataaactgagaagacttattaacagtggaggtggagttcgttttaaccagctaaatgaagatgtaactcatgttattgtgggagattatgatgatgaattgaagcagttttggaataaatcagcccacaggcctcatgtagtgggagcaaagtggttgctagagtgtttcagtaaaggttatatgctttctgaagaaccatatatccatgctaattaccagccagtggaaattccagtttcacatcagcctgaaagtaaagcagctcttttaaaaaagaagaacagcagcttctctaagaaagactttgctcctagtgaaaagcatgagcaagctgatgaagatctgctctctcaatatgaaaatggtagctccacagtagttgaggctaagacgtctgaagccaggccctttaatgattctactcatgctgagcccttgaatgattctactcacatttctttgcaagaagaaaaccagtcttctgtcagtcattgtgtccctgatgtttctacaattactgaagaaggcttatttagccaaaagagtttccttgttttgggttttagtaatgaaaatgaatctaacatcgcaaacatcataaaagaaaatgctgggaaaatcatgtcccttctgagcagaactgttgcggattatgctgtggttcctctgctggggtgtgaagtggaagccactgtgggagaagttgttacaaatacatggctggttacttgcatagactatcagactttgtttgatccaaagtcgaatcctctcttcacaccagttccagtaatgacaggaatgactcctttagaggattgtgttatttcatttagccagtgtgctggagcagaaaaagagtctttaacattcctagcaaacctccttggagcaagtgttcaagaatactttgttcgcaaatccaatgcaaagaaaggcatgtttgccagtactcatcttatactgaaagaacgtggtggctctaaatatgaagctgcaaagaagtggaatttacctgccgttactatagcttggctgttggagactgctagaacgggaaagagagcagacgaaagccattttctgattgaaaattcaactaaagaagaacgaagtttggaaacagaaataacaaatggaatcaatctaaattcagatactgcagagcatcctggcacacgcctgcaaactcacagaaaaaccgtcgttacacctttagatatgaaccgctttcagagtaaagctttccgtgctgtggtctcacaacatgccagacaggtcgcagcctccccagcagtaggacaaccacttcagaaggagccctcgttacacctggatacaccatcaaaattcctgtccaaggacaaactcttcaagccttcctttgatgtgaaggatgcacttgcagccttggaaactccaggacgtcccagccaacagaaaaggaaaccgagtacgccactctcagaagttattgtcaaaaacttgcaacttgctttggcaaatagctctcgaaatgctgtcgctctttctgccagccctcaactgaaagaggcccagtcagagaaggaagaagccccaaagccacttcacaaagtagtggtatgtgttagtaaaaaactcagtaagaagcagagtgaactaaatgggatcgcagcctctctaggagcagattacaggtggagttttgatgaaacagtgactcatttcatctatcaagggcggccaaatgacactaatcgggagtataaatctgtaaaagaaagaggagtacacattgtttccgagcactggcttttagattgtgcccaagagtgtaaacatcttcctgaatctctttatccacatacttataatcccaaaatgagcttggatatcagcgcagtgcaagatggccggctctgtaatagtcgactactctcagctgtgtcttcaacaaaggatgatgagccagatcctttgattttagaagaaaatgatgtagacaatatggccaccaataataaagagtcagcaccatcaaatggaagtggaaagaatgactctaaaggagttctgacacagaccttagagatgagagagaactttcagaagcagttacaggagataatgtctgcaacatcaatagtgaaaccccaagggcagaggacttccctttcaagaagtggttgtaacagcgcatcttcaacccctgacagcactcgctctgctcgcagtggacgaagtagagtcctagaggcactgaggcagtctcgtcagacagtacctgatgtcaacacagagccttcccaaaatgaacagatcatttgggatgaccctacagcaagggaggagagagcaaggcttgccagcaatttgcagtggcctagttgtcccacacaatactctgagcttcaggttgacattcaaaacttggaggattctccttttcaaaagcctttacatgattcagaaattgctaaacaggctgtctgtgatcctggaaacatacgtgtgactgaagctcccaaacacccaatctctgaagaactggaaactcccataaaagacagccacctgatccctacgcctcaagcccccagtattgcctttccactcgccaacccccctgtggctccgcaccctagagaaaagattataacgatagaggagactcatgaagaattaaaaaaacagtacatatttcagttatcatctctgaatcctcaagaacgtattgactattgtcatctgattgagaaactaggtggattggtgatagaaaagcagtgctttgatcccacctgtacacacattgttgtgggacatccacttcgaaacgagaagtatttagcctcagtggcagctgggaagtgggtgcttcatcgctcctaccttgaagcctgcaggactgctggacacttcgtgcaggaagaagactatgaatggggaagtagttccatacttgatgttttgactggaatcaatgtacagcaacgaagactagcacttgcagcaatgagatggagaaaaaaaatccagcaaagacaagaatctggcattgttgagggagcatttagtgggtggaaggttattttacatgtggatcagtctcgagaagcaggcttcaaacgccttcttcagtcaggaggagcaaaggtgctacctggtcattctgtacctttatttaaagaggccacacatcttttttctgacttgaataaactgaaaccagatgactcaggagttaatatagcagaagctgctgcccagaacgtgtactgcttgagaacagaatacattgctgattatctcatgcaggaatcacctcctcatgtagaaaattactgtctaccagaagctatttcatttattcagaataataaggaacttgggactggattatcacaaaagaggaaagctcctacagaaaaaaataaaatcaaacgacctagagtacactaatcgcatctaccctttagttaccaaacattaaatgtttttaaaaattgaaagcctgaatgtgactgtgatagatttgggtagtaatttaaagatgagtacctgaagaattctgcttcagagtataatgatgacccttcttgagttttgaacacctgaaattgtaatcactgaaatattaactgtttcttaataaaaagttacctgaaataacaacaaaatacaactcctcagctagcttgctgttaaaccacattgaagtctgttaaaagatatttatttttcttgtaaatatctgaagctgtagcttagtggaaattttagcaaggtaatggattttgctttaaaatgtctgccttacaaattcataacaacaagatttgtcagtcagcatttattcatgttttccctgatttttatcttctcaccattttacctcttttaacaggagcctgagcacaaggtttaatgaggaagctggggctataaatatgtgtgtatatatgtatatgtatgtttgtacaaatctccatgatgtttgccaagtttgaatgcgcaaaacttggaaaatgtgacaataaagaataaaagtagtaactcaaattagtat

SEQ ID NO: 29798 - DNA, 3359 bp, Homo Sapiens
ggaagcagcttgcaaatggcgtctccctcgctggagcggccagaaaaaggcgctggaaaaagtgaatttcgtaaccagaagccgaagccggagaaccaagatgaatcagaactccttacggttcctgatggttggaaggaaccagctttttccaaagaggacaatcccagaggacttttggaggagagcagtttcgcaactttgttcccaaaatacagggaagcttacttgaaagagtgttggccattggtgcagaaagccttaaatgaacatcatgttaatgcaaccctggacctgatcgaaggcagcatgactgtttgtactacaaagaagacttttgatccatatatcatcattagggccagagatctgataaaactgttagcaaggagtgtttcatttgaacaggcagtacgaattcttcaggatgatgttgcatgtgacatcattaaaataggttctttagtaaggaataaagagagatttgtaaaacgaagacaacggcttattggtcccaaaggatctacattgaaggcattggaactcttaactaattgttacattatggttcagggaaacacagtttcagccattggaccttttagtggcttaaaagaggttagaaaagtagtccttgatactatgaagaatattcatccaatttataacattaaaagcttaatgattaagagagagttggcaaaagattctgaattacgatcacaaagttgggagagatttttgccacagttcaagcacaaaaatgtgaataaacgcaaggaaccaaagaaaaaaactgttaagaaagaatatacgccattcccaccaccacaaccaggaagtcagatcgataaagaattggctagtggtgaatactttttgaaggcaaatcagaagaagcggcagaaaatggaagcaataaaggctaaacaagcagaagccatcagtaagagacaagaggaaagaaacaaagcatttattccacctaaggaaaaaccaattgtgaaacctaaggaagcttctactgaagctaaaattgatgtggccagcatcaaggaaaaggttaagaaagcaaagaataagaaactgggagctcttacagctgaagaaattgcacttaagatggaggcagatgaaaagaaaaagaagaaaaaaaagtaacatacccaaaactccttgactagaactatctccttttgtaaaggattttgagatatcaggcattagttgccttatttgtgagaaattttctgagggctttttttttttttggtggtggtggttgttcatagaagagtgttctttataaattatattattattgtattttttgaaaaatttatactagaaagtggtatatatgtctttgtatacattacgaccattgtgattatccattaaatccagtgtctgatgctattggttagtaatgatgtcccagcatttgatgttccctctctaatgataacaagtaaatatttaggtttatcccttttgaaagtttggttttacttttaacagtccatgaacagaaaattaaggcctctaaaatcagatcccctagttactcctctgttctgaatctggggaagtagtaaaccaaaaagacagggaaaaccagatatttagagtcgaagcagcatgcaaaaaataataatgtttttaactaatgaaggctactggagttactaagaatcacctaaaaatgtgctactgtaccttgctcattttgcagatttagaagctgaaacatgggttaggttacttactaaaagtccacctgtggcaacctgcaaataatgcttatttatactaaagatgagtttatctgatagagttaggaaatttcttcttttgagtaagagtattgctataacatatatttttttctgaaatgttttaaaatagaagtacacctaattgttattggttaaaaagaaagccatatgtgaatgaggttggtttttgggttttttctttcctgaattgtattagtccaaaagaactaaattagggtacttgtgctgtaccaaaatggtaattataacagacagtattagaattactgaattaacaatgagaaagagagaagtgtatctgttacgtggatatatgggccagcctggatatacaacagagtagtaacctgtgaaacaaacatagaatatcctcttagacattgttcctcataatgcactgacagaattcacatagctcttaatgaaacaatttaagattgatgtacgtacgtttgacttggtctcgctgtcggttaactgtaaagttagggggaagaaagaaaaaaaattaaaagggtagacacagttgagagttttattttaaaaagctaagtcttataattatgaccattaacttgctttggctttattgcagtgactttccaagtttaattattcaaaactttttgaactgactgaattaacttggtatttttaagttgactttttacataaactttataaaccttttataaaaaggaaactataccattactataaatggaaaatcattttacacatcatacctagcaggtaataaaatttaaaaaataaaaattaaatattagaatgtgagaaatttattaaaatatagttctaaaaataagtttcttcctgagaagaatgatactgtttatgatgaatccatagtgaaaagacagtgacctctctttcatccagtctagtatatcactaaatcatcattacgatgtttggctatcaagtcattaattactgtcctcctttcactgagctttattcaaattttgacaatcagagcactgggaagaaataaattccacaactgcctttagccttctggatactttcttttataaaatagaaaccttttccacaccagttctgcagcagtcgctattagatgctcgtggtagaacccatcaatcatctggtcctctgggtactggtgagcatccctggtcttcatacctgtgagtgggctttgtggtgaattactgtaaatatgctaccctcacttttcttggcagttatgtccatgaaatcaagagtgtgatgttctagttatttttttttatatatatttttaaatgttcaatattcaactattgaaacaaatgtacatctgtgaactagctaaaatcatcttatgtaccactaatatgcccagcacattttgtaaaacagtcctgatttggcctccaagggtatttattgaactaccagcagtatctaggagaccacgaaggaataccacgaaggaatttatgctccagtgcttgccataatttgtctgagaaggaatctgttaaataaaagcttttatcctctaaaaaaaaaaaaagaaaaaaaaaaaaaaaa

SEQ ID NO: 29799 - DNA, 1641 bp, Homo Sapiens
gaattcgggggctgcggagagggtgcttaactgaggggcatgatgggggaggcggccgtgccgcggggcttgtcgttgcgcgaggacagcttcacgcgcttctcgtcgcagaacaatgtgtacgggctggcaggcggcgccggcgggcgcggggagctgctggccgccacccttaaaggcaaggtgctcggcttccgttaccaagacctccgacagaaaatccggccagtggccaaggagctgcagttcaactacattcccgtggatgcggagattgtctccatcgacactttcaacaagtcaccccccaagcggggtctggttgtggggatcacgttcatcaaggattcaggggacaagggcagccccttcctgaacatttactgcgactacgagaccggctctgtgtacaaccttgtctctattgcccagagctgcctgaacctggagctccagttcactccgttccagctgtgccatgcggaggtccaggtcggggatcaacttgagactgtgtttctcttgagtgggaacgacccggccattcatctctacaaggagaacgagggcctgcatcagtttgaggaacagcccgtggaaaacctcttcccagagctgacgaacctgaccagtagcgtcctctggctggacgtccacaacttccccggcacgtcccggcgcctctcagctctgggctgtcagagtggttatgtccgtgtcgcccacgtggaccagcggagtcgagaggttctgcagatgtggtcggtcctgcaggacggtcccatctcccgagtgattgtgttcagcctctcggccgccaaggagaccaaggacaggccactacaagatgagtacagcgtgctcgtggccagcatgttggagccagcagtggtgtatcgggacctgctgaaccggggtcttgaagaccagcttctcctgcccggcagtgaccagtttgacagcgtcctctgcagcctggtcaccgatgtggatttggatgggcggccagaagtcctggtggccacctatggacaggaactgctgtgttataagtaccggggcccagagtcggggcttcctgaggcccagcacgggttccatctgctgtggcagcggagcttctccagtcccctgctggccatggctcacgtggacctgaccggggatgggctgcaggagcttgccgtggtctccctgaagggcgtgcacatcctgcagcacagcctgattcaggcctcagagctggtcttgacccggcttcgaacatcaagtggagcagaggagacgtcggcctacaggggttggaggacggggcaggtgcagggcctgctgagaatgcagcctcttaagcacccatgcacccactcttcccagacctggggcgactcatggcgtgctcacctccagccgctggtggggggtgtcctgaaggacaggatgctctccccagacctccccagggtggtgaagctgtgccctggggccccagctaacccactcctctctctgtacgtcaatgtccctatttgaaagcagggatgatcccattccaccctgtccactctggatgagaattggccacctgatggttatttatacgtccagaagaacatccccaaaaaaaaaaaaaaaaccgaattc

SEQ ID NO: 29800 - DNA, 1693 bp, Homo Sapiens
ggcggggtttcccgcgctcggcggaagcggaaggggcggggctccgcgctcctagtctccactgctgccgccgtcgccgccacccgagccggagcgggctgggccgccaaggcaagatggtggactacagcgtgtgggaccacattgaggtgtctgatgatgaagacgagacgcaccccaacatcgacacggccagtctcttccgctggcggcatcaggcccgggtggaacgcatggagcagttccagaaggagaaggaggaactggacaggggctgccgcgagtgcaagcgcaaggtggccgagtgccagaggaaactgaaggagctggaggtggccgagggcggcaaggcagagctggagcgcctgcaggccgaggcacagcagctgcgcaaggaggagcggagctgggagcagaagctggaggagatgcgcaagaaggagaagagcatgccctggaacgtggacacgctcagcaaagacggcttcagcaagagcatggtaaataccaagcccgagaagacggaggaggactcagaggaggtgagggagcagaaacacaagaccttcgtggaaaaatacgagaaacagatcaagcactttggcatgcttcgccgctgggatgacagccaaaagtacctgtcagacaacgtccacctggtgtgcgaggagacagccaattacctggtcatttggtgcattgacctagaggtggaggagaaatgtgcactcatggagcaggtggcccaccagacaatcgtcatgcaatttatcctggagctggccaagagcctaaaggtggacccccgggcctgcttccggcagttcttcactaagattaagacagccgatcgccagtacatggagggcttcaacgacgagctggaagccttcaaggagcgtgtgcggggccgtgccaagctgcgcatcgagaaggccatgaaggagtacgaggaggaggagcgcaagaagcggctcggccccggcggcctggaccccgtcgaggtctacgagtccctccctgaggaactccagaagtgcttcgatgtgaaggacgtgcagatgctgcaggacgccatcagcaagatggaccccaccgacgcaaagtaccacatgcagcgctgcattgactctggcctctgggtccccaactctaaggccagcgaggccaaggagggagaggaggcaggtcctggggacccattactggaagctgttcccaagacgggcgatgagaaggatgtcagtgtgtgacctgccccagctaccaccgccacctgcttccaggcccctatgtgccccttttcagaaaacagatagatgccatctcgcccgctcctgacttcctctacttgcgctgctcggcccagcctggggggcccgcccagccctccctggcctctccactgtctccactctccagcgcccattcaagtctctgctttgagtcaaggggcttcactgcctgcagccccccatcagcattatgccaaaggcccgggggtccggggaagggcagaggtcaccaggctggtctaccaggtagttggggagggtccccagccaaggggccggctctcgtcactgggctctgttttcactgttcgtctgctgtctgtgtcttctatttggcaaacagcaatgatcttccaataaaagatttcagatgctcaaaaaaaaaaaaaaaaaaaaaa

SEQ ID NO: 29801 - DNA, 2269 bp, Homo Sapiens
cgccaaaccctgtggtcaacggcgcgcgggtctccaggctccgtgttctaggcccgagttagaatcctgtcagctgaggaggtcgggcggggcagaggggcttcaccttgaaaatctcggggagactgtgggtacgagggggaagtgattatttttctgttgcccacttttcaatatgaaggaggatcaagttgtggcggaagaaccaggattccaagatgaagaggaatctttgtttcaagatattgacctgttacagaaacatggaattaacgtggctgacattaagaaactgaaatcagtaggaatctgtaccatcaaaggtatacagatgacaacaagaagagctctatgcaatgtcaaaggactctcagaagccaaagtagacaagattaaagaggcagcgaacaaactaattgaaccaggattcttgactgcatttgagtatagtgaaaagaggaaaatggttttccatatcaccaccgggagccaggaatttgataagttactaggaggtggaattgaaagtatggcaattacagaagcttttggagaatttcgtactggaaaaacccagctttctcataccctctgtgtgacagctcaacttccaggagctggtggctacccaggaggaaagattatcttcattgatacagaaaatactttccgtccagatcgccttagggacattgctgatcgctttaatgtagaccatgatgcagtactggacaacgtactttatgcacgtgcatatactagtgaacatcagatggagctacttgattatgtagcagcaaagttccatgaagaagctggcatcttcaagctattgattatcgattcaataatggcactttttcgagtggatttcagtggccgtggggagttggccgaacggcagcaaaaattggcccagatgttgtcacgactccaaaaaatctcagaagaatataacgtggctgtttttgtgaccaatcaaatgactgccgatccaggagcaactatgacctttcaggcagatcccaaaaaacccattgggggacacattctggctcatgcttcaacaacaagaataagcttgcgaaagggaagaggagagctcagaattgccaagatttatgacagtcctgagatgcctgaaaatgaagccaccttcgcaataactgctggaggaattggggatgccaaggagtaggtggtgaattgatgcaaattgcttcttagtgcttattaggagctgaagaaatggaaaagcagtctccaatttcacatcttgaaatagaggttttttcccacatgttactaaagaaaagtcagcaaagagatttaaatcttatatttatcttaaaagtccctgatttatgataactatacattgtatgtaaattcagggatatgtatatgtatgtttgtgtgtgtgtgtgtttgtgtgtgtatacctgacatatatagtagatatatatacctattgaaattctctcactctgtgtatgtatatatacctatggaaaactagttgttgggaaaggagtacgtgattccctccctttcacttttcaaagtgagccactaaacagaaagtctaagagttcagaaatgtcccattctcctaaggactttcccttcaccatttttctagggtatagtgccactgacttacatagctagatgtttttccacaagaggatttaagggaggaatgtttataggacacacacacaaaagctctttctatttataatatcaaactgcatattcacctttatagcaacagaaaacagacattaaattaagccaaattttaaatcatttgactttgacaagcagaaattacttttaaaaaatgtatttatggctgggcgtggtggctcacacctgtaatcccagcactttgggaggccgaggcaggtggatcacttgaggtcaggagttcaagaccagcctggccaacatggagaaaccccatctctactaaaaatacaaaaattagccaagtgcagtggcatgtgcttgtaatcccagctactctggaggctgaggcaggagaattgcttgaacccaggaggcagagattgcggtgagccaagatggcaccactgcactccagcctaggtgacagagtgagactccgtctcaaaaaaaaaaaaaaaacttttttaaaatgttaaaattaatttaaatgtaaaatttctgaatactaatcttagaaatgtgtaaaagatattattttgattgttaaacaaataaaatcctgttttcaaaatgc

SEQ ID NO: 29802 - DNA, 4223 bp, Homo Sapiens
gcggccgctgacagcaccagcatgtcttacagtgtgaccctgactgggcccgggccctggggcttccgtctgcaggggggcaaggacttcaacatgcccctcactatctcccggatcacaccaggcagcaaggcagcccagtcccagctcagccagggtgacctcgtggtggccattgacggcgtcaacacagacaccatgacccacctggaagcccagaacaagatcaagtctgccagctacaacttgagcctcaccctgcagaaatcaaagcgtcccattcccatctccacgacagcacctccagtccagacccctctgccggtgatccctcaccagaaggaccccgctctggacacgaacggcagcctggtggcacccagccccagccctgaggcgagggccagcccaggcaccccaggcaccccggagctcaggcccacctttagccctgccttctcccggccctccgccttctcctcactcgccgaggcctctgaccctggccctccgcgggccagcctgagggccaagaccagcccagagggggcccgggacctactcggcccaaaagccctgccgggctcgagccagccgaggcaatataacaaccccattggcctgtactcggcagagaccctgagggagatggctcagatgtaccagatgagcctccgagggaaggcctcgggtgtcggactcccaggagggagcctccctattaaggaccttgccgtagacagcgcctctcccgtctaccaggctgtgattaagagccagaacaagccagaagatgaggctgacgagtgggcacgccgttcctccaacctgcagtctcgctccttccgcatcctggcccagatgacggggacagaattcatgcaagaccctgatgaagaagctctgcgaaggtcaagcacccctattgagcatgcgccggtgtgcaccagccaggccaccaccccgctgctgcccgcttctgcccagccacctgctgctgcctctcccagtgcggcttcgccacccctggccacagctgctgcccacactgccatcgcctccgcctccaccacagcccctgcttcaagtcctgccgacagcccaaggccccaggcctcttcctacagccccgcagtggccgcctcttcagcacctgccacccacaccagctacagtgagggccccgccgcccctgcacccaagccccgggttgtcaccactgccagcatccggccttctgtctaccagccagtgcctgcatctacctacagcccgtccccaggggccaattacagtcccactccctacaccccctcccctgcccctgcctacaccccctcccctgcccctgcctacaccccctcacctgtccccacctacactccatccccagcaccagcctataccccctcacctgcccccaactataaccctgcaccctcggtggcctacagcgggggccctgcggagcctgccagccgtccaccctgggtgacagatgatagcttctcccagaagtttgccccgggcaagagcaccacctccatcagcaagcagaccctgccccggggaggcccagcctacaccccagcgggtcctcaggtgccaccacttgccagggggaccgtccagagggctgagcgattcccagccagcagccggactccactctgcggtcactgcaacaatgtcatccggggcccatttctggtagccatgggccgttcttggcaccctgaagagttcacctgtgcctactgcaagacttccctggcagatgtgtgctttgtggaagagcagaacaacgtttactgtgagcgatgttatgagcaattctttgccccgctgtgtgccaagtgcaacaccaaaattatgggggaagtaatgcatgccttgagacagacatggcacaccacctgcttcgtctgtgcggcctgcaagaagccttttgggaacagcctcttccacatggaagacggggagccctactgcgagaaagactacatcaatctgttcagcaccaagtgccatggctgcgatttccccgtggaggctggcgacaagtttatcgaagccctgggccacacttggcacgacacctgcttcatttgcgcagtctgccatgtgaatctggaggggcagccgttctactccaagaaggacagacccctgtgcaagaagcacgcacacaccatcaacttgtaggcggccaaggccgcctgtgctgacgaggcccggagctgctcctgctgctggcaacaaaggattcgggaggctgatgtttcttctgaggggaatggggagagagaggaagcgactgagccctttggaagtataattttaggttttttcttctgtacacagatcgtgcatttgcatagttcagactaggagccaaatgaagactcaaaaccaagctagttattaatccaagactggaattgtacttcagacatttagagcagaattccaagaactcaaaagtgaaaagcaacaagcagctttcccaaagcgatacacttgctttggtcaccagaggaggacagagcttagagcagctgtggagaatctgaagcattctgcggagttcttaagcgctcccctggcaaacaaattgaagtgccaaacagcactcgctgcagggtatttttagagtcatagctgagagcttgttagctaagacccattgggctttcctcaccaaaaaaggaagtgttattccattactagcgtcatggagctacctctgcgcatcagacttcagaccttgaacaaacttaaaaccttcttgggagcccggacgtccaaagagatgtcttctgggagccactgggcaattgccagggctccaggaagggctctggctcaggttgcagacagctgagaaaagatggccctgtcagccaccctctctcagtctgaaacatccaacatccccagaaggcttagctcctttttgaattgtgatgggaaagtagagttgggtttttccagttttgctctgtggtgtgtgagagatttttttaaaggctttgggttgtctttggcctttgtttagctttaagggttcgttagcatgagtgtccagtcgtgtgcatgaatttcaccccaacttgtgactgctcacttatgacgtctcccccagtaccctccatctcaaataggcttggtggcctgtggaaaagaagagagacagagagacagtgtctgaaacaggatggcagaataggctcacatgcccaaactctgggtggggaagaggaaacttactttctgccaccctcagtaagaacacacgaggaggcaggacctcccaccttcaggtctgcatcatccttttcaaatgttcctttaaatgcagcacactgagtttgtacaattgtgttaactgctggaagggacagatgcactgatatatatgcatttgctgttttggccaatattttgaaaatgtatgagctgagttgatctagctattatttaagtatttattgaagtagaggggccttcaaactactttatactagtgatagtttgagttaggtaagcatcttaaagctgtttggtgataaagaaggcagcttagattctgtggttggaaacagtgtagtcgcttccctttttaggaagccctgttaatatgctcattgaaaacatggcattgaagcaggcacttgcgtggatgtttctcacttgagcacgatatttaggctctcttccaactcactctattctgtcctcactcctgttttggatttttctctttgcatgtttgaaatgttttatgggaatgtattagaactcttttcttctaaggactgagacttccaggggattgccatcttacctgtctcttctccatgagggagaaggaagcagctagctatgtccctagctgcaggaagcccctattttttccaagcacgaagccaccagtctcccccaaggagcatcaggaagggacatggatgtgctcctgccacagggcccttcctacctttggatctgtgagaaggtgaatacaaagcagcaggcagagtaaaatctgctgggactgcctggagatttgtcaggagctgcagacaagtaccttggagcattctgttatttttggaaagttcaaatatgcagggacaaggaggttgctgactgtactgacaggctctaagtcattttctccaaaaactatctattcaattatcaggggctggtcttgaggaagg

SEQ ID NO: 29803 - DNA, 3363 bp, Homo Sapiens
agtgtgggctacccggccactgccctggagctgtggtgactgctgcgtttttctcccatgcacttgcacgtccaggactcctgggagaacttgggccacactccttccttgccctcttgagctcattcgtcaccctgttgggtgagcacagccctagctcaggccactgggcaagccacaccatccaaagaggaggtcctctgccccaggacccccacaccaccccagctccctgttttgctgaggcctggagcccccatggcctcactgagccgagccctacgtgtggctgctgcccaccctcgccagagccctacccggggcatggggccatgcaacctgtccagcgcagctggccccacagccgagaagagtgtgccatatcagcggaccctgaaggagggacagggcacctcggtggtggcccaaggcccaagccggcccctgcccagcacggccaacgtggtggtcattggtggaggcagcttgggctgccagaccctgtaccacctggccaagctgggcatgagtggggcggtgctgctggagcgggagcggctgacctccgggaccacctggcacacggcaggcctgctgtggcagctgcggcccagtgacgtggaggtggagcttctggcccacactcggcgggtggtgagccgggagctggaggaggagacgggactacacacgggctggatccagaatgggggcctcttcatcgcgtccaaccggcagcgcctggacgagtacaagaggctcatgtcgctgggcaaggcgtatggtgtggaatcccatgtgctgagcccggcagagaccaagactctgtacccgctgatgaatgtggacgacctctacgggaccctgtatgtgccgcacgacggtaccatggaccccgctggcacctgtaccaccctcgccagggcagcttctgcccgaggagcacaggtcattgagaactgcccagtgaccggcattcgtgtgtggacggatgattttggggtgcggcgggtcgcgggtgtggagactcagcatggttccatccagacaccctgcgtggtcaactgtgcaggagtgtgggcaagtgctgtgggccggatggctggagtcaaggtcccgctggtggccatgcaccatgcctatgtcgtcaccgagcgcatcgaggggattcagaacatgcccaatgtccgtgatcatgatgcctctgtctacctccgcctccaaggggatgccttgtctgtgggtggctatgaggccaaccccatcttttgggaggaggtgtcagacaagtttgccttcggcctctttgacctggactgggaggtgttcacccagcacattgaaggcgccatcaacagggtccccgtgctggagaagacaggaatcaagtccacggtctgcggccctgaatccttcacgcccgaccacaagcccctgatgggggaggcacctgagctccgagggttcttcctgggctgtggcttcaacagcgcaggaatgatgctgggtggtggctgtgggcaggagctggcccactggatcatccatgggcgcccggagaaggacatgcatggctatgacatcaggcgcttccatcactcgctcacggaccacccccgctggatccgagagcgaagccatgagtcctacgccaagaactactccgtcgtcttcccccacgatgagccgctggccgggcgcaacatgaggagagacccgctgcatgaggaactccttggacaaggctgcgtgttccaggagcggcatggctgggagcgaccgggatggtttcatccccgaggcccagctccggtcctcgagtacgactactacggggcttacgggagccgcgcgcacgaggactacgcctaccgcaggctgctggcagacgagtacaccttcgccttcccgccccaccacgacacgatcaagaaggagtgcctggcctgcagaggggccgccgctgtgtttgacatgtcctacttcgggaagttctacctggtggggctggatgcaaggaaggctgccgactggctcttctccgcagatgtcagccgacccccaggctccaccgtgtacacgtgcatgctcaaccaccgtgggggcaccgagagtgacctgactgtcagccgcctggcacccagccaccaggcctccccgctggcccccgcctttgaaggggacggttactacctggccatgggcggggccgtggcccagcacaactggtcccacatcaccaccgtgctgcaggaccagaagtcccagtgccagctcatcgacagctccgaggacctgggtatgatcagtatccagggcccagccagccgagccattttgcaggaggtgctggacgcagacctgagcaacgaggccttcccgttctccacccacaagctactgagagccgcagggcacctggtccgagccatgcggctgtcctttgtgggggagctgggctgggagctgcacattccaaaggcgtcctgcgtgcctgtgtaccgggctgtgatggccgcgggtgccaagcacggcctcatcaacgcagggtaccgcgccatcgactccctgagcattgagaaaggctaccggcactggcacgcggacctgcggccagacgacagccccctggaggcaggcctggccttcacctgcaagctcaagtcgccggtgcccttcctggggagggaggccctggagcagcagcgggccgcaggcctccgccggcgcctggtgtgcttcaccatggaggacaaagtacccatgtttggcctggaggccatctggaggaacggccaagtggtgggccatgtccggagggctgactttgggttcgccatcgacaagaccatcgcctacggttacatccatgaccccagcggtgggccggtctcgctggactttgtgaagagcggggactatgccctggagagaatgggggtgacctatggtgcccaggctcacctgaagtcgcccttcgaccccaacaacaagagggtgaagggaatctactgagggctcagaccacatgccccatcccatgctgtccatccattctcacaggtcccaaatggccctgggtcccaggaccctggacccagccagaacttgtgccctccctgtccttagcctaggcctagtcctgcgaaaacccccaaaccagatacggacagagaccaagatggcccatcctgtggtcactgactggaaggcagtctctaatccaccccaatcctcccagaaagcaaacctgtaagtgtcttgggctcagggaccatggcttgtagccctttccaagcttctaaaaggtgcttagtaaatacttgataagccccacgtgaaaaaaaaaaaaaaaaaaaaaaa

SEQ ID NO: 29804 - DNA, 3282 bp, Homo Sapiens
atgagttggttcaacgcctcccagctctccagcttcgctaagcaggccctgtcccaggcccagaagtctattgacagggttctggacatccaggaagaggagccgagcatctgggccgagaccattccgtatggagagccgggaataagttcccctgtcagtggaggatgggatacttcaacctgggggttgaaatcaaacactgaacctcagagtccaccaatagcctctcctaaagcaatcacaaagccagttcggaggactgtggtcgatgaatctgaaaatttcttcagtgcctttctctcgccaaccgatgtccagaccattcagaagagtccagtggtatcaaaacctccagcaaaatcacaacgaccagaagaagaagtgaaaagcagcttacatgaatccttgcacattggccagtcaagaactcctgaaacaactgaatcacaagtaaaagactcttctttgtgtgtttcaggggaaactctggcagcaggtacttcatcacctaaaactgaaggcaagcacgaagaaactgttaataaagaatcggatatgaaggtgccaactgtaagtttgaaagtatctgaaagtgtaattgatgtgaaaacaactatggaaagtatatctaatacgtctacgcagtctctcacagcagaaacaaaggacatagctttggaacctaaggaacaaaaacatgaagacaggcagagcaatacaccttctcctcctgttagtaccttttcatcaggtacttctaccaccagtgatattgaagttttagatcatgaaagtgtaataagtgagagctcagcgagctcgagacaagagactacagattcaaaatcaagtcttcacttgatgcagacatcttttcagcttctctctgcatctgcttgtcctgaatataatcgtttagatgatttccaaaaactcactgagagttgctgttcatctgatgcttttgaaagaatagactcatttagtgtacagtcattagatagccggagtgtaagtgaaatcaattcagatgatgaattgtcaggcaagggatatgctttagtgcctattatagttaattcttcaactccaaagtctaaaacagttgaatctgctgaaggaaaatctgaagaagtaaatgaaacattagttatacccactgaggaagcagaaatggaagaaagtggacgaagtgcaactcctgttaactgtgaacagcctgatatcttggtttcttctacaccaataaatgaaggacagactgtgttagacaaggtggctgagcagtgtgaacctgctgaaagtcagccagaagcactttctgagaaggaagatgtttgcaagacagttgaatttctgaatgaaaagctggaaaaaagggaggctcagttattatctcttagtaaggaaaaagcacttctagaagaagcttttgataacctgaaagatgaaatgttcagagtgaaagaagaaagcagtagcatttcttccttgaaagatgagtttactcaaagaattgcagaagcagaaaagaaagttcaactagcctgcaaagagagagatgctgctaaaaaggaaatcaaaaacataaaagaagaacttgccactagattaaatagtagtgaaactgcagaccttttgaaagagaaagatgagcagatccgagggttaatggaagaaggagaaaaactttcaaaacagcagctgcacaattctaacatcatcaagaaattaagagctaaagacaaggagaatgaaaatatggttgcaaagctgaacaaaaaagttaaagagctagaagaggagttgcagcatttgaaacaggtccttgatggcaaagaagaggttgagaaacaacatagagaaaatattaaaaaactaaattccatggtagaacgccaagagaaagatcttggccgtcttcaggtagacatggatgaacttgaagaaaagaaccgaagtattcaggctgccctggatagtgcatacaaagaacttactgatcttcacaaagccaatgctgcaaaggatagtgaggcacaggaagctgctctgagccgtgaaatgaaagctaaagaagaactttctgcagcattagagaaggcccaagaagaagcccgtcagcagcaagaaacattagccattcaagtgggggaccttaggcttgcattgcagcgtacagaacaagcggctgccagaaaggaggattatttacgccatgagatcggtgaacttcagcagagactccaggaagcagagaatcgaaaccaggaactgagtcaaagtgtttcatcaacaacaagaccattgcttcgacaaatagaaaatttgcaagcaaccctgggatcccagacatcgtcgtgggagaaattagagaagaatctttctgataggcttggtgaatcccagaccttgctggcagcagcagttgagagagaacgtgcagctacagaagaactccttgctaacaaaattcagatgtcttccatggagtcacagaattctcttttaagacaggaaaacagtagatttcaagcccagctagaatcagagaaaaataggctgtgtaaactggaggatgagaacaataggtaccaggttgaattggaaaacctaaaagatgaatatgtaagaacacttgaagagacgaggaaagaaaagacattgttgaatagtcagttagaaatggaaagaatgaaagttgaacaagaaaggaagaaagccatttttactcaagaaacaataaaagaaaaggaacgcaagccattttctgtttctagcactcccaccatgtcacgctcaagttcaataagtggtgttgatatggcaggactacagacatcttttctgtctcaggatgagtctcatgatcactcatttggaccaatgcctatatcagccaaatggaagcatctttatgctgcctgtaaggatgggagcaggatcaagcatattgaaaacctacagtctcagctaaagctaagggaaggggaaatcactcatttacagctagaaattggcaatctagaaaaaactcgatcaataatggctgaagaactagttaaattaacaaatcaaaatgatgaacttgaagagaaggtgaaggagatacccaaacttagaactcagctaagagatttggatcaaaggtacaacactattctgcagatgtatggagaaaaagcagaagaggcagaagaacttcgattagatctcgaagatgtaaaaaatatgtacaaaactcaaatagatgaacttttaagacaaagtctcagttaa

SEQ ID NO: 29805 - DNA, 10244 bp, Homo Sapiens
gcagccatgagcggcagcagcggcggagccgccgcccccgccgcgtcctccggccccgccgcggcggccagcgcggctggctcgggctgcgggggcggtgccggcgagggggcagaggaggcggccaaggacctggccgacatcgcggccttcttccgatccgggtttcgaaaaaacgatgaaatgaaagctatggatgttttaccaattttgaaggaaaaagttgcatacctttcaggtgggagagataaacgtggaggtcccattttaacgtttccggcccgcagcaatcatgacagaatacgacaggaggatctcaggagactcatttcctatctagcctgtattcccagcgaggaggtctgcaagcgtggcttcacggtgatcgtggacatgcgtgggtccaagtgggactccatcaagccccttctgaagatcctgcaggagtccttcccctgctgcatccatgtggccctgatcatcaagccagacaacttctggcagaaacagaggactaattttggcagttctaaatttgaatttgagacaaatatggtctctttagaaggccttaccaaagtagttgatccttctcagctaactcctgagtttgatggctgcctggaatacaaccacgaagaatggattgaaatcagagttgcttttgaagactacattagcaatgccacccacatgctgtctcggctggaggaacttcaggacatcctagctaagaaggagctgcctcaggatttagagggggctcggaatatgatcgaggaacattctcagctgaagaagaaggtgattaaggcccccatcgaggacctggatttggagggacagaagctgcttcagaggatacagagcagtgaaagctttcccaaaaagaactcaggctcaggcaatgcggacctgcagaacctcttgcccaaggtgtccaccatgctggaccggctgcactcgacacggcagcatctgcaccagatgtggcatgtgaggaagctgaagctggaccagtgcttccagctgaggctgtttgaacaggatgctgagaagatgtttgactggatcacacacaacaaaggcctgtttctaaacagctacacagagattgggaccagccaccctcatgccatggagcttcagacgcagcacaatcactttgccatgaactgtatgaacgtgtatgtaaatataaaccgcatcatgtcggtggccaatcgtctggtggagtctggccactatgcctcgcagcagatcaggcagatcgcgagtcagctggagcaggagtggaaggcgtttgcggcagccctggatgagcggagcaccttgctggacatgtcctccattttccaccagaaggccgaaaagtatatgagcaacgtggattcatggtgtaaagcttgcggtgaggtagaccttccctcagagctgcaggacctagaagatgccattcatcaccaccagggaatatatgaacatatcactcttgcttattctgaggtcagccaagatgggaagtcgctccttgacaagctccagcggcccttgactcccggcagctccgattccctgacagcctctgccaactactccaaggccgtgcaccatgtcctggatgtcatccacgaggtgctgcaccaccagcggcagctggagaacatctggcaacaccgcaaggtccggctgcatcagaggctgcagctgtgtgttttccagcaggacgttcagcaggtgctagactggatcgagaaccacggagaagcatttctgagcaaacatacaggtgtggggaaatctcttcatcgggccagagcattgcagaaacgtcatgaagattttgaagaagtggcacagaacacatacaccaatgcggataaattactggaagcagcagaacagctggctcagactggggaatgtgaccccgaagagatttatcaggctgcccatcagctggaagaccggattcaagatttcgttcggcgtgttgagcagcgaaagatcctactggacatgtcagtgtcctttcacacccatgtgaaagagctgtggacgtggctggaggagctgcagaaggagctgctggacgacgtgtatgccgagtcggtggaggccgtgcaggacctcatcaagcgctttggccagcagcagcagaccaccctgcaggtgactgtcaacgtgatcaaggaaggggaggacctcatccagcagctcagggactctgccatctccagtaacaagaccccccacaacagctccatcaaccacattgagacggtgctgcagcagctggacgaggcgcagtcgcagatggaggagctcttccaggagcgcaagatcaagctggagctcttcctgcagctgcgcatcttcgagagggacgccatcgacattatctcagacctcgagtcttggaatgatgagctttctcagcaaatgaatgacttcgacacagaagatctcacgattgcagagcagcgcctccagcaccatgcagacaaagccttgaccatgaacaacttgacttttgacgtcatccaccaagggcaagatcttctgcagtatgtcaatgaggtccaggcctctggtgtggagctgctgtgtgatagagatgtagacatggcaactcgggtccaggacctgctggagtttcttcatgaaaaacagcaggaattggatttagccgcagagcagcatcggaaacacctggagcagtgcgtgcagctgcgccacctgcaggcagaagtgaaacaggtgctgggttggatccgcaacggagagtccatgttaaatgccggacttatcacagccagctcgttacaagaggcagagcagctccagcgagagcacgagcagttccagcatgccattgagaaaacacatcagagcgcgctgcaggtgcagcagaaggcagaagccatgctacaggccaaccactacgacatggacatgatccgggactgcgccgagaaggtggcgtctcactggcaacagctcatgctcaagatggaagatcgcctcaagctcgtcaacgcctctgtcgctttctacaaaacctcagagcaggtctgcagcgtcctcgagagcctggaacaggagtacaagagagaagaagactggtgtggcggggcggataagctgggcccaaactctgagacggaccacgtgacgcccatgatcagcaagcacctggagcagaaggaggcattcctgaaggcttgcacccttgctcggaggaatgcagacgtcttcctgaaatacctgcacaggaacagcgtgaacatgccaggaatggtgacgcacatcaaagctcctgaacagcaagtgaaaaatatcttgaatgaactcttccaacgggagaacagggtattgcattactggaccatgaggaagagacggctggaccagtgtcagcagtacgtggtctttgagaggagtgccaagcaggctttggaatggatccatgacaatggcgagttctacctttccacacacacctccacgggctccagtatacagcacacccaggagctcctgaaagagcacgaggagttccagataactgcaaagcaaaccaaagagagagtgaagctattgatacagctggctgatggcttttgtgaaaaagggcatgcccatgcggcagagataaaaaaatgtgttactgctgtggataagaggtacagagatttctctctgcggatggagaagtacaggacctctttggaaaaagccctggggatttcttcagattccaacaaatcgagtaaaagtctccagctagatatcattccagccagtatccctggctcagaggtgaaacttcgagatgctgctcatgaacttaatgaagagaagcggaaatctgcccgcaggaaagagttcataatggctgagctcattcaaactgaaaaggcttatgtaagagacctccgggaatgtatggatacgtacctgtgggaaatgaccagtggcgtggaagagattccacctggcattgtaaacaaagaactcatcatcttcggaaacatgcaagaaatctacgaatttcataataacatattcctaaaggagctggaaaaatatgaacagttgccagaggatgttggacattgttttgttacttgggcagacaagtttcagatgtatgtcacatattgcaaaaataagcctgattctactcagctgatattggaacatgcagggtcctattttgacgagatacagcagcgacatggattagccaattccatttcttcctaccttattaaaccagttcagcgaataacgaagtatcagctccttttaaaagagctgctgacgtgctgtgaggaaggaaagggagagattaaagatggcctggaggtgatgctcagcgtgccgaagcgagccaatgatgccatgcacctcagcatgctggaagggtttgatgaaaacattgagtctcagggagaactcatcctacaggaatccttccaagtgtgggacccaaaaaccttaattcgaaagggtcgagaacggcatctcttcctttttgaaatgtccttagtatttagtaaagaagtgaaagattccagtgggagaagcaagtacctttataaaagcaaattgtttacctcagagttgggtgtcacagaacatgttgaaggagacccttgcaaatttgcactgtgggtggggagaacaccaacttcagataataaaattgtccttaaggcttccagcatagagaacaagcaggactggataaagcatatccgcgaagtcatccaggagcggacgatccacctgaagggagccctgaaggagcccattcacatccctaagaccgctcccgccacaagacagaagggaaggagggatggagaggatctggacagccaaggagacggcagcagccagcctgatacgatttccatcgcctcacggacgtctcagaacacgctggacagcgataagctctctggtggctgtgagctgacagtggtgatccatgacttcaccgcttgcaacagcaacgagctgaccatccgacggggccagaccgtggaagttctggagcggccgcatgacaagcctgactggtgtctggtgcggacaactgaccgctccccagcggcagaaggcctggtcccctgtggttcactgtgcatcgcccactccagaagtagcatggaaatggagggcatcttcaaccacaaagactcgctctccgtctccagcaatgacgccagtccacccgcatccgtggcttccctccagccccacatgatcggggcccagagctcgccgggccccaagcggccgggcaacaccctgcgcaagtggctcaccagccccgtgcggcggctcagcagcggcaaggccgacgggcacgtgaagaagctggcgcacaagcacaagaagagccgcgaggtccgcaagagcgccgacgccggctcgcagaaggactccgacgacagtgcggccaccccgcaggacgagacggtcgaggagagaggccggaacgagggcctgagcagcggtactctctccaaatcctcctcctcggggatgcagagctgtggagaagaggaaggcgaggagggggccgacgccgtgcccctgccgccacccatggccatccagcagcacagcctcctccagccagactcacaggatgacaaggcctcttctcggttattagtccgccccaccagctccgaaacaccgagtgcagccgagctcgtcagtgcaattgaggaactcgtgaaaagcaagatggcactggaggatcgccccagctcactccttgttgaccagggagatagtagcagcccttccttcaacccttcggataattcccttctctcttcctcctcgcccattgatgagatggaagaaaggaaatccagctctttaaagagaagacactacgttttgcaagaactagtggagacagagcgtgactatgtgcgggaccttggctatgtggttgagggctacatggcacttatgaaagaagatggtgttcctgatgacatgaaaggaaaagacaaaattgtgttcggcaacatccatcagatttacgactggcacagagacttttttttaggagagttagagaagtgccttgaagatccagaaaaactaggatccctttttgttaaacacgagagaaggttgcacatgtacatagcttattgtcaaaataaaccaaagtctgagcacattgtctcagaatacattgataccttttttgaggacttaaagcagcgtcttggccacaggttacagctcacagatctgttgatcaaaccagtgcagagaatcatgaagtatcagctgttactgaaggacttcctcaagtattccaaaaaggccagcctggatacatcagaattagagagagctgtggaagtcatgtgcatagtacccaggcggtgcaacgacatgatgaacgtggggcggctgcaaggattcgacgggaaaatcgttgcccagggtaaactgctcttgcaggacacattcttggtcacagaccaagatgcaggacttctgcctcgctgcagagagaggcgcatcttcctctttgagcagatcgtcatattcagcgaaccacttgataaaaagaagggcttctccatgccgggattcctgtttaagaacagtatcaaggtgagttgcctttgcctggaggaaaatgtggaaaatgatccctgtaaatttgctctgacatcgaggacgggtgacgtggtagagaccttcattttgcattcatctagtccaagtgtccggcaaacttggatccatgaaatcaaccaaattttagaaaaccagcgcaattttttaaatgccttgacatcgccaatcgagtaccagaggaaccacagcgggggcggcggcggcggcggcagcgggggcagcggcgggggtgggggcagcggcggcggcggggcccccagtggcggcagcggccacagtggcggccccagcagctgcggcggcgcccccagcacgagcaggagccggccctcccggatcccccagcctgtccgacaccacccccccgtgctggtctcctctgcagcctcgagccaggcagaggcagacaagatgtcaggtacgtccacccccgggccctccctgcctccccctggcgcggcccccgaggccggccccagcgcgcccagcaggcggccccccggcgcggacgccgaggggtccgagcgagaagcggagccgatccccaagatgaaggtgctggagagccccaggaaaggcgccgcgaacgcctcggggtcgagcccagacgcccccgccaaggacgcgcgcgctagcctgggcaccctgccgcttgggaagccccgggccggggccgcttcgccgctgaactcgccgctctccagcgcggtcccttctctcggcaaggagcccttcccccccagcagccccctgcagaaggggggctccttctggagctccatccccgcctcccccgccagccgacccggctccttcaccttcccgggggacagcgactccctccagcggcagacaccccgccacgcggcccctggcaaggatactgaccgcatgagcacgtgctcctcggccagcgagcagtccgtgcagtccacccagagcaacgggagtgaaagcagcagcagtagcaacatctccaccatgttggtgacacacgattacacggcagtgaaggaggatgagatcaacgtctaccaaggagaggtcgttcaaattctggccagcaaccagcagaacatgtttctggtgttccgagccgccactgaccagtgccccgcagctgagggctggattccaggctttgtcctgggccacaccagtgcagtcatcgtggagaacccggacgggactctcaagaagtcaacatcttggcacacagcactccgtttaaggaaaaaatctgagaaaaaagataaagacggcaaaagggaaggcaagttagagaacggttatcggaagtcacgggaaggactcagcaacaaggtatctgtgaagcttctcaatcccaactacatttatgacgttcccccagaattcgtcattccattgagtgaggtcacgtgtgagacaggggagaccgttgttcttagatgtcgagtctgtggccgccccaaagcctcaattacctggaagggccctgaacacaacaccttgaacaacgatggtcactacagcatctcctacagtgacctgggagaggccacgctgaagattgtgggcgtgaccacggaagatgacggcatctacacgtgcatcgctgtcaatgacatgggttcagcctcatcgtcggccagcctgagggtcctaggtccagggatggatgggatcatggtgacctggaaagacaactttgactccttctacagtgaagtggctgagcttggcaggggcagattctctgtcgttaagaaatgtgatcagaaaggaaccaagcgagcagtggccactaagtttgtgaacaagaagttgatgaagcgcgaccaggtcacccatgagcttggcatcctgcagagcctccagcaccccctgcttgtcggcctcctcgacacctttgagacccccaccagctacatcctggtcttagaaatggctgaccagggtcgcctcctggactgcgtggtgcgatggggaagcctcactgaagggaagatcagggcgcacctgggggaggttctggaagctgtccggtacctgcacaactgcaggatagcacacctggacctaaagcctgagaatatcctggtggatgagagtttagccaagccaaccatcaaactggctgactttggagatgctgttcagctcaacacgacctactacatccaccagttactggggaaccctgaattcgcagcccctgaaatcatcctcgggaaccctgtctccctgacctcggatacgtggagtgttggagtgctcacatacgtacttcttagtggcgtgtcccccttcctggatgacagtgtggaagagacctgcctgaacatttgccgcttagactttagcttcccagatgactactttaaaggagtgagccagaaggccaaggagttcgtgtgcttcctcctgcaggaggaccccgccaagcgtccctcggctgcgctggccctccaggagcagtggctgcaggccggcaacggcagaagcacgggcgtcctcgacacgtccagactgacttccttcattgagcggcgcaaacaccagaatgatgttcgacctatccgtagcattaaaaactttctgcagagcaggcttctgcctagagtttgacctatccagaagttctttctcattctctttcacctgccaatcagctgttaatctgaattttcaagagaaaacaagcaaacataactgatcagctgccggtatgttcatcgtgtgaaattgcattccaagtgagctgtgctcagcagtgcttggacacagagctgcaagctgcgctggggtggaggaccgtcacttacactctgcccaaggcagaggtcgcattgctgtatcacagtattttattcaggtttctgcaaaaaaataaaaagataacttttttaaacaaacatgaatagaattttgcaaatttaacgttttcaagatttattcaaggaaacaaaatgcctatgttcaaccactggtgttaatgaacaaagatactgtgcgtctctggggaagacgcacctaggtggcggccactcccatggccttgtctaggactcagagaccactcggctctgagcttccaggcgcctcgtctgtgtgcatctcacgcccgacgtggcttctgaaacgtgcattcaacctcaaacttttgcataaaatagaatgaatcgttttgctctgatgaaatgtaggccttacttgtatataagactgttcctgccttcggtctgtcattttcccacctgcctcccctacccaccccccacccaccacctggggcttcctctgggggtccgagggtcttcccatcacatgaagacatcaggttgggtcctgccccactgcccctccccctgttcctgccccaagccgtcaatcagattgtggagcagtacacagtcagatgaaaatactgtaaatgcactcattgggggttttttggttttacttcatatcatgtgcaatgttgtggctttaacattttatgcaactatttatgaagacctctgttgtacctgtaataaatatatagaaaaagcaaaaaaaaaaaaaaaaaa

SEQ ID NO: 29806 - DNA, 10302 bp, Homo Sapiens
atggccaagtatggagaacatgaagccagtcctgacaatgggcagaacgaattcagtgatatcattaagtccagatctgatgaacacaatgacgtacagaagaaaacctttaccaaatggataaatgctcgattttcaaagagtgggaaaccacccatcaatgatatgttcacagacctcaaagatggaaggaagctattggatcttctagaaggcctcacaggaacatcactgccaaaggaacgtggttccacaagggtacatgccttaaataacgtcaacagagtgctgcaggttttacatcagaacaatgtggaattagtgaatatagggggaactgacattgtggatggaaatcacaaactgactttggggttactttggagcatcattttgcactggcaggtgaaagatgtcatgaaggatgtcatgtcggacctgcagcagacgaacagtgagaagatcctgctcagctgggtgcgtcagaccaccaggccctacagccaagtcaacgtcctcaacttcaccaccagctggacagatggactcgcctttaatgctgtcctccaccgacataaacctgatctcttcagctgggataaagttgtcaaaatgtcaccaattgagagacttgaacatgccttcagcaaggctcaaacttatttgggaattgaaaagctgttagatcctgaagatgttgccgttcggcttcctgacaagaaatccataattatgtatttaacatctttgtttgaggtgctacctcagcaagtcaccatagacgccatccgtgaggtagagacactcccaaggaaatataaaaaagaatgtgaagaagaggcaattaatatacagagtacagcgcctgaggaggagcatgagagtccccgagctgaaactcccagcactgtcactgaggtcgacatggatctggacagctatcagattgcgttggaggaagtgctgacctggttgctttctgctgaggacactttccaggagcaggatgatatttctgatgatgttgaagaagtcaaagaccagtttgcaacccatgaagcttttatgatggaactgactgcacaccagagcagtgtgggcagcgtcctgcaggcaggcaaccaactgataacacaaggaactctgtcagacgaagaagaatttgagattcaggaacagatgaccctgctgaatgctagatgggaggctcttagggtggagagtatggacagacagtcccggctgcacgatgtgctgatggaactgcagaagaagcaactgcagcagctctccgcctggttaacactcacagaggagcgcattcagaagatggaaacttgccccctggatgatgatgtaaaatctctacaaaagctgctagaagaacataaaagtttgcaaagtgatcttgaggctgaacaggtgaaagtaaattcactaactcacatggtggtcattgttgatgaaaacagtggtgagagcgctacagctatcctagaagaccagttacagaaacttggtgagcgctggacagcagtatgccgttggactgaagaacgctggaataggttacaagaaatcaatatattgtggcaggaattattggaagaacagtgcttgttgaaagcttggttaaccgaaaaagaagaggctttaaataaagtccagacaagcaacttcaaagaccaaaaggaactaagtgtcagtgttcgacgtctggctattttgaaggaagacatggaaatgaagcgtcaaacattggatcagctgagtgagattggccaggatgtgggacaattacttgataattccaaggcatctaagaagatcaacagtgactcagaggaactgactcaaagatgggattctttggttcagagactagaagattcctccaaccaggtgactcaggctgtagcaaagctggggatgtctcagattcctcagaaggaccttttggagactgttcgtgtaagagaacaagcaattacaaaaaaatctaagcaggaactgcctcctcctcctcccccaaagaagagacagatccatgtggatattgaagctaagaaaaagtttgatgctataagtgcagagctgttgaactggattttgaaatggaaaactgccattcagaccacagagataaaagagtatatgaagatgcaagacacttccgaaatgaaaaagaagttgaaggcattagaaaaagaacagagagaaagaatccccagagcagatgaattaaaccaaactggacaaatccttgtggagcaaatgggaaaagaaggccttcctactgaagaaataaaaaatgttctggagaaggtttcatcagaatggaagaatgtatctcaacatttggaagatctagaaagaaagattcagctacaggaagatataaatgcttatttcaagcagcttgatgagcttgaaaaggtcatcaagacaaaggaggagtgggtaaaacacacttccatttctgaatcttcccggcagtccttgccaagcttgaaggattcctgtcagcgggaattgacaaatcttcttggccttcaccccaaaattgaaatggctcgtgcaagctgctcggccctgatgtctcagccttctgccccagattttgtccagcggggcttcgatagctttctgggccgctaccaagctgtacaagaggctgtagaggatcgtcaacaacatctagagaatgaactgaagggccaacctggacatgcatatctggaaacattgaaaacactgaaagatgtgctaaatgattcagaaaataaggcccaggtgtctctgaatgtccttaatgatcttgccaaggtggagaaggccctgcaagaaaaaaagacccttgatgaaatccttgagaatcagaaacctgcattacataaacttgcagaagaaacaaaggctctggagaaaaatgttcatcctgatgtagaaaaattatataagcaagaatttgatgatgtgcaaggaaagtggaacaagctaaaggtcttggtttccaaagatctacatttgcttgaggaaattgctctcacactcagagcttttgaggccgattcaacagtcattgagaagtggatggatggcgtgaaagacttcttaatgaaacagcaggctgcccaaggagacgacgcaggtctacagaggcagttagaccagtgctctgcatttgttaatgaaatagaaacaattgaatcatctctgaaaaacatgaaggaaatagagactaatcttcgaagtggtccagttgctggaataaaaacttgggtgcagacaagactaggtgactaccaaactcaactggagaaacttagcaaggagatcgctactcaaaaaagtaggttgtctgaaagtcaagaaaaagctgcgaacctgaagaaagacttggcagagatgcaggaatggatgacccaggccgaggaagaatatttggagcgggattttgagtacaagtcaccagaagagcttgagagtgctgtggaagagatgaagagggcaaaagaggatgtgttgcagaaggaggtgagagtgaagattctcaaggacaacatcaagttattagctgccaaggtgccctctggtggccaggagttgacgtctgagctgaatgttgtgctggagaattaccaacttctttgtaatagaattcgaggaaagtgccacacgctagaggaggtctggtcttgttggattgaactgcttcactatttggatcttgaaactacctggttaaacactttggaagagcggatgaagagcacagaggtcctgcctgagaagacggatgctgtcaacgaagccctggagtctctggaatctgttctgcgccacccggcagataatcgcacccagattcgagagcttggccagactctgattgatggggggatcctggatgatataatcagtgagaaactggaggctttcaacagccgatatgaagatctaagtcacctggcagagagcaagcagatttctttggaaaagcaactccaggtgctgcgggaaactgaccagatgcttcaagtcttgcaagagagcttgggggagctggacaaacagctcaccacatacctgactgacaggatagatgctttccaagttccacaggaagctcagaaaatccaagcagagatctcagcccatgagctaaccctagaggagttgagaagaaatatgcgttctcagcccctgacctccccagagagtaggactgccagaggaggaagtcagatggatgtgctacagaggaaactccgagaggtgtccacaaagttccagcttttccagaagccagctaacttcgagcagcgcatgctggactgcaagcgtgtgctggatggcgtgaaagcagaacttcacgttctggatgtgaaggacgtagaccctgacgtcatacagacgcacctggacaagtgtatgaaactgtataaaactttgagtgaagtcaaacttgaagtggaaactgtgattaaaacaggaagacatattgtccagaaacagcaaacggacaacccaaaagggatggatgagcagctgacttccctgaaggttctttacaatgacctgggcgcacaggtgacagaaggaaaacaggatctggaaagagcatcacagttggcccggaaaatgaagaaagaggctgcttctctctctgaatggctttctgctactgaaactgaattggtacagaagtccacttcagaaggtctgcttggtgacttggatacagaaatttcctgggctaaaaatgttctgaaggatctggaaaagagaaaagctgatttaaataccatcacagagagtagtgctgccctgcaaaacttgattgagggcagtgagcctattttagaagagaggctctgcgtccttaacgctgggtggagccgagttcgtacctggactgaagattggtgcaataccttgatgaaccatcagaaccagctagaaatatttgatgggaacgtggctcacataagtacctggctttatcaagctgaagctctattggatgaaattgaaaagaaaccaacaagtaaacaggaagaaattgtgaagcgtttagtatctgagctggatgatgccaacctccaggttgaaaatgtccgcgatcaagcccttattttgatgaatgcccgtggaagctcaagcagggagcttgtagaaccaaagttagctgagctgaataggaactttgaaaaggtgtctcaacatatcaaaagtgccaaattgctaattgctcaggaaccattataccaatgtttggtcaccactgaaacatttgaaactggtgtgcctttctctgacttggaaaaattagaaaatgacatagaaaatatgttaaaatttgtggaaaaacacttggaatccagtgatgaagatgaaaagatggatgaggagagtgcccagattgaggaagttctacaaagaggagaagaaatgttacatcaacctatggaagataataaaaaagaaaagatccgtttgcaattattacttttgcatactagatacaacaaaattaaggcaatccctattcaacagaggaaaatgggtcaacttgcttctggaattagatcatcacttcttcctacagattatctggttgaaattaacaaaattttactttgcatggatgatgttgaattatcgcttaatgttccagagctcaacactgctatttacgaagacttctcttttcaggaagactctctgaagaatatcaaagaccaactggacaaacttggagagcagattgcagtcattcatgaaaaacagccagatgtcatccttgaagcctctggacctgaagccattcagatcagagatacacttactcagctgaatgcaaaatgggacagaattaatagaatgtacagtgatcggaaaggttgttttgacagggcaatggaagaatggagacagttccattgtgaccttaatgacctcacacagtggataacagaggctgaagaattactggttgatacctgtgctccaggtggcagcctggacttagagaaagccaggatacatcagcaggaacttgaggtgggcatcagcagccaccagcccagttttgcagcactaaaccgaactggggatgggattgtgcagaaactctcccaggcagatggaagcttcttgaaagaaaaactggcaggtttaaaccaacgctgggatgcaattgttgcagaagtgaaggataggcagccaaggctaaaaggagaaagtaagcaggtgatgaagtacaggcatcagctagatgagattatctgttggttaacaaaggctgagcatgctatgcaaaagagatcaaccaccgaattgggagaaaacctgcaagaattaagagacttaactcaagaaatggaagtacatgctgaaaaactcaaatggctgaatagaactgaattggagatgctttcagataaaagtctgagtttacctgaaagggataaaatttcagaaagcttaaggactgtaaatatgacatggaataagatttgcagagaggtgcctaccaccctgaaggaatgcatccaggagcccagttctgtttcacagacaaggattgctgctcatcctaatgtccaaaaggtggtgctagtatcatctgcgtcagatattcctgttcagtctcatcgtacttcggaaatttcaattcctgctgatcttgataaaactataacagaactagccgactggctggtattaatcgaccagatgctgaagtccaacattgtcactgttggggatgtagaagagatcaataagaccgtttcccgaatgaaaattacaaaggctgacttagaacagcgccatcctcagctggattatgtttttacattggcacagaatttgaaaaataaagcttccagttcagatatgagaacagcaattacagaaaaattggaaagggtcaagaaccagtgggatggcacccagcatggcgttgagctaagacagcagcagcttgaggacatgattattgacagtcttcagtgggatgaccatagggaggagactgaagaactgatgagaaaatatgaggctcgactctatattcttcagcaagcccgacgggatccactcaccaaacaaatttctgataaccaaatactgcttcaagaactgggtcctggagatggtatcgtcatggcgttcgataacgtcctgcagaaactcctggaggaatatgggagtgatgacacaaggaatgtgaaagaaaccacagagtacttaaaaacatcatggatcaatctcaaacaaagtattgctgacagacagaacgccttggaggctgagtggaggacggtgcaggcctctcgcagagatctggaaaacttcctgaagtggatccaagaagcagagaccacagtgaatgtgcttgtggatgcctctcatcgggagaatgctcttcaggatagtatcttggccagggaactcaaacagcagatgcaggacatccaggcagaaattgatgcccacaatgacatatttaaaagcattgacggaaacaggcagaagatggtaaaagctttgggaaattctgaagaggctactatgcttcaacatcgactggatgatatgaaccaaagatggaatgacttaaaagcaaaatctgctagcatcagggcccatttggaggccagcgctgagaagtggaacaggttgctgatgtccttagaagaactgatcaaatggctgaatatgaaagatgaagagcttaagaaacaaatgcctattggaggagatgttccagccttacagctccagtatgaccattgtaaggccctgagacgggagttaaaggagaaagaatattctgtcctgaatgctgtcgaccaggcccgagttttcttggctgatcagccaattgaggcccctgaagagccaagaagaaacctacaatcaaaaacagaattaactcctgaggagagagcccaaaagattgccaaagccatgcgcaaacagtcttctgaagtcaaagaaaaatgggaaagtctaaatgctgtaactagcaattggcaaaagcaagtggacaaggcattggagaaactcagagacctgcagggagctatggatgacctggacgctgacatgaaggaggcagagtccgtgcggaatggctggaagcccgtgggagacttactcattgactcgctgcaggatcacattgaaaaaatcatggcatttagagaagaaattgcaccaatcaactttaaagttaaaacggtgaatgatttatccagtcagctgtctccacttgacctgcatccctctctaaagatgtctcgccagctagatgaccttaatatgcgatggaaacttttacaggtttctgtggatgatcgccttaaacagcttcaggaagcccacagagattttggaccatcctctcagcattttctctctacgtcagtccagctgccgtggcaaagatccatttcacataataaagtgccctattacatcaaccatcaaacacagaccacctgttgggaccatcctaaaatgaccgaactctttcaatcccttgctgacctgaataatgtacgtttttctgcctaccgtacagcaatcaaaatccgaagactacaaaaagcactatgtttggatctcttagagttgagtacaacaaatgaaattttcaaacagcacaagttgaaccaaaatgaccagctcctcagtgttccagatgtcatcaactgtctgacaacaacttatgatggacttgagcaaatgcataaggacctggtcaacgttccactctgtgttgatatgtgtctcaattggttgctcaatgtctatgacacgggtcgaactggaaaaattagagtgcagagtctgaagattggattaatgtctctctccaaaggtctcttggaagaaaaatacagatatctctttaaggaagttgcggggccgacagaaatgtgtgaccagaggcagctgggcctgttacttcatgatgccatccagatcccccggcagctaggtgaagtagcagcttttggaggcagtaatattgagcctagtgttcgcagctgcttccaacagaataacaataaaccagaaataagtgtgaaagagtttatagattggatgcatttggaaccacagtccatggtttggctcccagttttacatcgagtggcagcagcggagactgcaaaacatcaggccaaatgcaacatctgtaaagaatgtccaattgtcgggttcaggtatagaagccttaagcattttaactatgatgtctgccagagttgtttcttttcgggtcgaacagcaaaaggtcacaaattacattacccaatggtggaatattgtatacctacaacatctggggaagatgtacgagacttcacaaaggtacttaagaacaagttcaggtcgaagaagtactttgccaaacaccctcgacttggttacctgcctgtccagacagttcttgaaggtgacaacttagagactcctatcacactcatcagtatgtggccagagcactatgacccctcacaatctcctcaactgtttcatgatgacacccattcaagaatagaacaatatgccacacgactggcccagatggaaaggactaatgggtcttttctcactgatagcagctccaccacaggaagtgtggaagacgagcacgccctcatccagcagtattgccaaacactcggaggagagtccccagtgagccagccgcagagcccagctcagatcctgaagtcagtagagagggaagaacgtggagaactggagaggatcattgctgacctggaggaagaacaaagaaatctacaggtggagtatgagcagctgaaggaccagcacctccgaagggggctccctgtcggttcaccgccagagtcgattatatctccccatcacacgtctgaggattcagaacttatagcagaagcaaaactcctcaggcagcacaaaggtcggctggaggctaggatgcagattttagaagatcacaataaacagctggagtctcagctccaccgcctccgacagctgctggagcagcctgaatctgattcccgaatcaatggtgtttccccatgggcttctcctcagcattctgcactgagctactcgcttgatccagatgcctccggcccacagttccaccaggcagcgggagaggacctgctggccccaccgcacgacaccagcacggatctcacggaggtcatggagcagattcacagcacgtttccatcttgctgcccaaatgttcccagcaggccacaggcaatgtga

SEQ ID NO: 29807 - DNA, 5583 bp, Homo Sapiens
attggtctgtggacgccaaacttccgtgctaggactttctgcgtgtggaccgggggcctagtcctgcgtgggtccaacacagacaggagaaagctgcctgcttttgtgcctcccggaggtcctggtagaagcgaaacggggacaggagctgcagcgtcccaagcccagtgaggcgaagctactggagacagctctgccgggtccaaagttgggctcaccggctggaacttgaaaccggagcacgccggactcctgctgaagccatcatctctctctcctggccccgggcgccttggccggcgggcacaactggtttcggggccaaggtggtctggaagcctgactgtggcgtctggcctgggctcccgcgagcggaaaaggttcccctcctgtgagagggaaactatggaagttcctacgcccggagccagaactcctgctgctcccgcccgacccaaggtctagcttggcggcctcccacctgtgcttctgagggttctgcttccaagaggctgctggtgcccgggacaccagcagtttcgccatgggtgtttcgccatgggagtttcgccatgggtgactttggcctgagatgcgctccatggagcagattctggagttgctggtgttggaggagttcctgactatcctgtcccaggacatccacagcagggtgcagaagctgcaacgggcgagctgtgaagaagctgtaactcttttaaagtatatgtatgacttttaaaagagagagcttgtgaaactgagggaataggtgagtgagagagaggttttatctgccatcttcctcagggaggcccagcctcccctttattcatagagttctgggtctggtgggtccagaggactgagacatctcgctgtcttaattccccattcagattttcttgattgccctgagtagaccttacacgggccagtgattttttgttgttgttgttgttgttgtcttctctggaaccttcatcctccagatttccccccagtgcagtgaagagtgtgctattgcttttggtttccacggggaggcagtgtcgctgtcatagtgtccgctctggaggtagatcaaagggggctttcaactcctggctctgctccctactagctgtgcgactttgggcaagtgacttttgcttggctgggcttcactttctgcactggtcaaatgcagaaagggtaatagacccttctggggttgtttggaggattaaagggagagcagtatgtccgtaataatcgcactgctggcacacagctagtgcttgaaactgtgagctgctgttaggttaggggcagcagtctggtctcctctgcagagatgggtctcagttaattgtgaacttaaacagtttggcactgaggctttggggtcattgccccagggccacccaagtaagcttgtctaattgagaggaacaggagcagctggagaatgtgggggaggaaccgaagacctatgggggacatgtgtgtactgaaatgggctttctccccacaccctccacacaagcacatacacacattcactctgggtcatggcatcataaaaaccttgagtttaaaccatccctttctcttgttgggtccaaatggacagactctggttttctattgaagatttacacgcagattcctgtcataatttttcttttctatcgagccctgtcatgatgataagtgatagcaggttggttcctagatcatacaccatggacctagcacagaagtgttttcagaagagccttttccttacaaaacagcatgaaagtcattgagccaatggatactgagatttcaaactggagccaatggatacttagaggagccctgaagtgtagagtagttgctacttcttgttcactaggtctaattagcatgtcatcagtgtaacagactagtgtgttgtcttgtgaaagagaaaggtgataagatccctgtgaactaaactatgatgtagggcttgaaaattgatatacaatacgcctgaggtaggatggcgaaggtgtattcctggtcttaccagctgaaagtaaattgcttctggtggtctttactaacagttattgagaaaaaaagcattttcaaggtcaagaggtacatactaggttccaggggatatgttaatttgctcaagaaatgaaaccacatctggaacagcagctgcaattggagtcatcacctggcttagtttacaatgacccactaccatcttccaagatccatctgccttctgcataggccaaacaggtccacagaactcgaccctggaagagagagtcggggtcaggtcttcgggaggtggagggatcgaatgagggaactgatattccaagactccccacatcttggagcttcactcgccaggcatcccgcgctttcctgacgtcgcttcccctagtggtgcagcagcggagagctttgctacccagagcagcagggaggcgtggccacagaggcagaggcgtagtcgagccgaggaagaggaaagtggcctccggggaagccagagctgactgaagtgctcttgggaagaacaattcattgatttggtaccaacctgatgcaccctgatttgtcaaaggtggtaccaggtgggtgtcagtgtcacatacaagagtaaaactgttcctagagcaaatggcgatgagagagctgaacgcggattcatgctcaagcccccagatgggggctatgtgggagactagtgggtctgtgaaagagaactccagtcagagtaagaaatacagcacaaaaatagagaatcttggtcctgagagcgcttgcaggcacttctggagcttccgttatcatgaagcaaccggaccgcttgagactatcagccaacttcagaaattgtgccatcagtggctgaggccagagatccactcaaaagagcagatcttggaaatgctggtgttagagcagttcctgagcattctgcccaaggagacccagaactgggtgcagaagcatcatccacagaatgtcaaacaggctctggtcctggtggaattcttgcagagggagcctgatggaacaaagaatgaggtcacagcccatgagctgggaaaggaggcagtgctcttgggaggaacagcagtggccccaggcttcaagtggaagccagcagagccccaaccaatgggtgtgttccagaaagaatattggaatacataccgggtactacaagaacagctgggctggaacactcacaaagaaacccagcctgtatatgaaagagctgtgcatgatcaacagatgttagccctttctgagcagaaaagaatcaaacactggaagatggcatctaaactcatcctgcctgagtccctgagtttgttgacatttgaagatgtggctgtgtatttttctgaggaagagtggcaattattgaatcctcttgagaagactctctacaatgatgtaatgcaggatatctatgagactgtcatctctctagggttaaagctaaaaaatgacactggaaatgatcatcctatatctgtttctacatcagaaatacaaacatcaggatgcgaagtatcaaaaaagaccagaatgaaaattgcccagaaaacaatgggcagggaaaatcctggtgatacacacagtgtacagaaatggcatcgagcttttccaaggaagaaaagaaagaaacctgcaacttgtaaacaagagcttccaaaacttatggatcttcatgggaaaggccccacaggggagaaaccttttaagtgtcaggaatgtgggaaaagcttcagagttagctctgatcttattaaacaccacagaattcacactggagagaaaccctataaatgtcaacaatgtgacaggaggtttagatggagttcagatcttaataagcacttcatgacccatcaaggaataaaaccatatagatgctcatggtgtgggaaaagctttagtcataacacaaatctacacacacaccaaagaattcacacaggagagaagccctttaaatgtgatgaatgtggaaaaagattcattcagaactcccaccttattaaacaccagagaactcacacaggtgagcagccttatacgtgtagcttatgcaagagaaactttagtaggcgatcgagccttcttagacaccagaaactccacagaagaagggaagcatgtctagtgtctccaaactgaggaaagttaccatgtagagcttgactttagaagtggtgaaagaatacaaaattatgaggcacccaatgataggaatctgtgattaataaaacatttgggaagggtacatgttacacttcacaaaaaggaatctaagctgtctgttttattcagcattgcatcttctgtgcctagcacaagagttgatacataaggagtactttataaataaaaaaatgaaagtgtagtgatgagattcctttagctatctatctatatgtatatatctggttattcaaagcttccccacccccagtcatctaaatttttcaggtatcaagtgctcaacagacatatgatagtcaaggctcttagtctcattttttactctttgtcaagagaaatggaaaataagagtacttgggccctcttaagggagctcagagagaattactaaattagggacagtttcaatagttatcattctgtctacatgaacaatcaagaccaggactcagggaactttactctgtaacagaaagagaggattcagtgtttgccctgggagaattgtcccattcttgttgcttctctcctgagtacccactaccacaatgtcttctgtcaaggaattacaagtagcaagggaaggtctgaatgtaaggacaggcctagggaccttgcaagcacttgatatctctcctcttgctgactttgtcaacatagacatatagtgaaatgatgagggaggcagtcttggccctcatccaggtatctggtttttttttgtagaaagcacagataagtggtaaatggtctttttctgactttcattatgtggactggatggaggctttcaaactggtgccatactgctgcaggacctaaagggagccccatctttatggctgatcaactacaaccctatatgcctgaatactctgcaagaaggcctggagattttgcaaaactgatttattgagaatggcaaggagagccttgtgaacttttagctttggtgcacagctgataccaggagggaacatcctgaagtgtcagagaaaagtaaggcatatggctcacagtgatgatgccagtcagagccaggccagatggaaattgttttctgatgttactggttttcttttccctattagccaaagtgactatctcttaagagaagataatgtgacgtcaagggaagttggaaggcatggatttatatctatgtcagatcctggtttataatgttggccaaggcttatttatatatgtttatttagtattccataaaattgtacttcgtaatgaaaatgacacattttatcttaaatttagacaataaacaaaactttgttaccaaatcactcaaaaaaaaaaaaaaaaaaaaaaaaaaaaaaaaaaaaaaaaaaaaaa

SEQ ID NO: 29808 - DNA, 3186 bp, Homo Sapiens
agttaatatgatcctctgttgaagcaagaagacaaactgtatggtggagaaagaagtgggaaggatctgcgcggaagaagcctgagaagatgatgcacagatagagaggcaccaggacttgagaggcaccaggacttgggaggcatgttgatccatctccaggaaagactgagaaaaagagcgttgaatataagaaaaaatacttcctctgttctcagatcgtatttgttttaaggccacacctttttgaagttttcagtttgaaacacaacctggactgaaatcatgagggaggttgtgtaggaaagaatcatcaagggacttagttgggagcttctctaccacagcttactccttatggtattaaccccctttaagtgtaaatgtctttggtttaaaacgtttgtacctcatctgttaccagagtgttcatactggagagaaaccctatgaatttactgaatgtgggggaactgttactcatatgttgcatttcgtcgaacgtgcaagtcatgctgaagagaaaccctgtgcttctaaggagtattgacaagcccttagctagatgacaatctcattgagaagcagaaaattcatgctggagagaaactagtgaaggtagcaatacttcattgaatattagaaaatttttctagagagaaagcattgaatatactgagtatgataacatttcctctcaaaccttatcccttactctgcatttgggagatcatacacagagaagccttataaatgtaagagatgtggaaatatcttcagccaaaagtaaatcctcactcatcaagaaatttttactggagagaaaccttgtgaatgtgggaaagcttccattcagatgtcacacctcagccagcagaaaatttacagtggggaaaacccctttgcctgtaaggtatgtggaaaagtcttcagccacaaatcaaacctcactgagcatgagcattttcacacgagagagaaaccttttgaatgtaacgagtgtggaaaagcctttagccaaaagcagtatgtcattaaacatcagaacacccatactggcgagaagcttttcgaatgtaatgaatgtggaaaatcatttagccagaaggaaaacctccttacgcaccagaaaattcacactggagaaaaaccttttgagtgtaaagattgcgggaaagctttcattcagaagtcaaacctcatcagacaccagagaactcacacaggagagaagccctttgtatgtaaggagtgtggaaaaaccttcagtggcaaatccaaccttactgagcatgagaaaatccatattggagagaagccttttaaatgtagtgaatgtggaacagcctttggccagaagaagtacctcataaaacatcagaacattcacactggagagaaaccctatgaatgtaacgaatgtggaaaagccttctctcagcgaacatcacttattgtacatgtgaggattcattcaggtgataaaccttacgaatgcaatgtttgtggaaaagccttctctcagagctcatctctcactgtgcatgtgagaagccatacaggggagaagccctatggttgtaatgaatgtgggaaagctttctctcagttctcaacccttgctctgcatttgagaatacacacaggtaagaagccttatcagtgcagtgaatgtgggaaagctttcagccagaagtcacaccacattagacaccagaaaattcatactcactaaaaaccccatgaaagccttgaaagtgggaaagctttcattagaaatttgcacctcatcatgccccagaaataatccttctgaagcaaagcaccacgaatgaggttaactttaacaagtactaaaaacttaagggacaccagaaaatttgtactgaagagaaagacatgcatatgattaaaaccctgtgtccaacagagaaacctgcagcagagataatggtgaaagtttaggcacattttcactaaaagtgggaacagaaaatggaggcctgttttttattgctaccaccatagatctggagatcttcgccagtaacaagaaaaattaagttgtaaatattggaaaggaacagacaaaaatagatgacatggtcatctacaactaatattaagactcctgtggtattgattgagcagagcagaagagatttcaaaaaaagacctatgcatttattagaatttggaatatgatacaagtggcatcaggaaatgaggaaataatggaactattttttttaagtggaggtagtttgttctccaagggggaaaaatagaccatgaactatacacaaaagtgaatccagagattaaaaacagaaatatggaaaagctatgtactaaaatgcatatgaccttgggaatagggaaacattccttggaacaatttgagaaatacttagcggttctacttatgagtatgaatgctcaggaaatacgcactaggatatttactgtggcttgatttgtagtagccaaaaattagaaacaactgagaaagcccatcacgaacaatatgggaaattcttatgtaatactatatatctgtaaaatgcaacaaatgaaatccacatgtattaacagaaagatcccagaattgttgaggggggatcaagttgcagaatgatacagatagtacaatgacttttttgtaaatttgaattaaaagtttcctcataaaactcagtactatctattggtaatggatgcatatatgtatgtacatgtacatgtttttgaaacggattggaaggatacagaccaaactcttgatagtggtcacctgtgaagagtggagaagggaaaataatgagtgtgggaggtgggatgggtattggttaaaggggacttcagctttttatataaacatccacttctctttcaaaagacttcaagtaaatataagaagatactgattgattctggattgtggtatagggatatcttgtcttattttttgtacttttctgtatttttaaaatttctcaaaataggaatgggagtgaggatgggaatgctgtatctgtggaagtcatgttatactggattcatttccaattaaatactaaacattttatagaaaatatttctaaaattttatcacggatgaatggatggacttgctctctatgtaatatgaaattaatctattttattaaaatttaaaaggacagc

SEQ ID NO: 29809 - DNA, 2306 bp, Homo Sapiens
agcggggggagtggggaggaggggggtcggccgccgcagccatggaggccaactggaccgcgttcctgttccaggcccatgaagcttcccatcaccaacagcaggcagcacagaacagcttgctgcccctcctgagctctgccgtggagccccctgatcagaaaccattgcttccaataccaataactcagaaacctcagggtgcaccagaaacattaaaggatgccattgggattaaaaaagaaaaacccaaaacttcatttgtgtgcacttactgcagtaaagctttcagggacagctatcacctgaggcgccacgaatcctgccacacagggatcaagttggtgtcccggccaaagaaaacccccaccacggtggttccccttatctctaccatcgctggggacagcagccgaacttcgttggtctcgaccattgcaggcatcttgtcaacagtcactacatcttcctcgggcaccaaccccagtagcagtgccagcaccacagctatgccagtgacccagtctgtcaagaaacccagtaagcctgtcaagaagaaccatgcttgtgagatgtgtgggaaggccttccgagatgtgtaccatctcaatcgacacaagctctcccattcagatgagaaaccctttgagtgtcctatttgtaatcagcgcttcaagaggaaggaccggatgacttaccatgtgaggtctcatgaaggaggcatcaccaaaccctatacttgcagtgtttgtgggaaaggcttctcaaggcctgaccacttaagctgtcatgtaaaacatgtccattcaacagaaagacccttcaaatgccaaacgtgcactgctgcctttgccaccaaagacagactgcggacacacatggtgcgccatgaaggcaaggtatcatgtaacatctgtgggaagctcctgagtgcagcatacatcaccagccacttaaagactcatgggcagagccaaagtatcaactgtaatacatgtaaacaaggcatcagtaaaacatgcatgagtgaagagaccagtaaccaaaagcagcagcagcagcagcagcagcaacaacaacaacaacaacatgtgacaagctggccagggaagcaagtagaaacactcagactgtgggaagaagctgttaaagcaaggaagaaagaagctgctaacctgtgccaaacctccacggctgctacgacacctgtgactctcactactccattcagtataacatcctctgtgtcgtctgagactatgtcaaacccagtcacagtggcagctgcaatgagcatgagaagtccagtaaatgtttcaagtgcagttaacataaccagcccaatgaacatagggcatcctgtaactataaccagtccattatccatgacctctcctttaacactcactaccccagtcaacctccccacccccgtcactgccccagtgaatatagcacaccctgtcaccatcacatctccaatgaatctacccacacctatgacattagccgcccctctcaatatagcaatgagacctgtagagagcatgcctttcttgccccaagctttgcctacatcaccgccttggtaaacagtattataaaatcaaaatatgggtaaaagtaaatatttaccagcaacttaacttttagttgattaaagcaaaaagtaaaccatgaaattgggagattttattacattagttaataagagtgtggtagcatttttctccaatttggctgggattattcaaagtagggtgtgtatgtaacttatcactggaccactttagtttaatcagaaattccttttagctgacaacattgcttaaacaggatagtagttggcaagatgaaatgccagaattaaaaccaatcataagtagaacccacttcaaaataaaaaaacagcattactatttctaatcccaaggaatcactttattgtaaacactagcagaactcttctccctatacaaggtggatggctgattttaacctgaaattttaaatccacagattgagagctagtgtagaattgtctgtgtttattgtttttatgagtaaatacatgcattgtcataataaaatgcatttcagagaatatgcattttacctttgggaatatgttaatttcaggcagcattccctatgggaaaggtgataccagctctgatatgcaaagcatatgataatttatcattctaacttcaacgtataatagggattgtgacctgatatttggagatgtaaatattgctcagcatattaatcccgatggaatatagcattgtagttgacttttt

SEQ ID NO: 29810 - DNA, 3788 bp, Homo Sapiens
agagcgaccatttagcttctgttgttaagtggatctaagcctatgtcgcttactggacgctgaagtgattgggaatattagcagtgggggttctgtagggtcaggaaggggcggctggctttgggggagtgatgaggggcttgttgggggtgggggtgcgtgataaagggatttctcggctgaagacgaggctgtgaggcttctgcagaacccccaggtcaggccacatcattgaggctgcaggatctctcttcatagcccagtacgactctccgccgtgtccctggttggaaaatccaaacacctatccagcttctggctcctgggaaaagtggagttgtcagcaagagagaccgagagtagaagcccagagtggagatgcctgctgatgtgaatttatcccagaagcctcaggtcctgggtccagagaagcaggatggatcttgcgaggcatcagtgtcatttgaggacgtgaccgtggacttcagcagggaggagtggcagcaactggaccctgcccagagatgcctgtaccgggatgtgatgctggagctctatagccatctcttcgcagtggggtatcacattcccaacccagaggtcatcttcagaatgctaaaagaaaaggagccgcgtgtggaggaggctgaagtctcacatcagaggtgtcaagaaagggagtttgggcttgaaatcccacaaaaggagatttctaagaaagcttcatttcaaaaggatatggtaggtgagttcacaagagatggttcatggtgttccattttagaagaactgaggctggatgctgaccgcacaaagaaagatgagcaaaatcaaattcaacccatgagtcacagtgctttcttcaacaagaaaacattgaacacagaaagcaattgtgaatataaggaccctgggaaaatgattcgcacgaggccccaccttgcttcttcacagaaacaacctcagaaatgttgcttatttacagaaagtttgaagctgaacctagaagtgaacggtcagaatgaaagcaatgacacagaacagcttgatgacgttgttgggtctggtcagctattcagccatagctcttctgatgcctgcagcaagaatattcatacaggagagacattttgcaaaggtaaccagtgtagaaaagtctgtggccataaacagtcactcaagcaacatcaaattcatactcagaagaaaccagatggatgttctgaatgtggggggagcttcacccagaagtcacacctctttgcccaacagagaattcatagtgtaggaaacctccatgaatgtggcaaatgtggaaaagccttcatgccacaactaaaactcagtgtatatctgacagatcatacaggtgatataccctgtatatgcaaggaatgtgggaaggtctttattcagagatcagaattgcttacgcaccagaaaacacacactagaaagaagccctataaatgccatgactgtggaaaagcctttttccagatgttatctctcttcagacatcagagaactcacagtagagaaaaactctatgaatgcagtgaatgtggcaaaggcttctcccaaaactcaaccctcattatacatcagaaaattcatactggtgagagacagtatgcatgcagtgaatgtgggaaagcctttacccagaagtcaacactcagcttgcaccagagaatccactcagggcagaagtcctatgtgtgtatcgaatgcgggcaggccttcatccagaaggcacacctgattgtccatcaaagaagccacacaggagaaaaaccttatcagtgccacaactgtgggaaatccttcatttccaagtcacagcttgatatacatcatcgaattcatacaggggagaaaccttatgaatgcagtgactgtggaaaaaccttcacccaaaagtcacacctgaatatacaccagaaaattcatactggagaaagacaccatgtatgcagtgaatgcgggaaagccttcaaccagaagtcaatactcagcatgcatcagagaattcacaccggagagaagccttacaaatgcagtgaatgtgggaaagccttcacttctaagtctcaattcaaagagcatcagcgaattcacacgggtgagaaaccctatgtgtgcactgaatgtgggaaggccttcaacggcaggtcaaatttccataaacatcaaataactcacactagagagaggccttttgtctgttacaaatgtgggaaggcttttgtccagaaatcagagttgattacccatcaaagaactcacatgggagagaaaccctatgaatgccttgactgtgggaaatcgttcagtaagaaaccacaactcaaggtgcatcagcgaattcacacgggagaaagaccttatgtgtgttctgaatgtggaaaggccttcaacaacaggtcaaacttcaataaacaccaaacaactcataccagagacaaatcttacaaatgcagttattctgtgaaaggctttaccaagcaatgaattcctagtgcatcagcatattcataaatgaaatatactccgagtttcttgaagaagagaaaatcttctcagaatcaggtctaattatatgttattgaattcatgcttcagaaaaactctagggatgcactgcatgtgtgaacacatgataaaaaagtcatgctttattttagtgagggcaattacagagaaaagagtaagcagaaatgtccttctgagtactggcctcattaaggattataaattttctccccgggaagaaaccctgactaacgcattgagaaaagcctttctgtaaagaatggtacaagacaggttgttactcgattatttatagtaaaatatgtgggaaattatatcaatgataaccctgtttattgtgggatatcaatatttttaaagtgccaacacagtcatgataggacaatattttatgtgtgtgtgtgcgccttatgtatataagcatatatataatatataagcatattattatatacaggttgagtatcccttctccaaaatgcctgggatcagaagcattttggatttcagatacttacagattttggaatatttgcattatatttattggttgagcatccctaatctgaaaatccaagattaaatgctccaattagcatttcctttgagcgtcatgttagagttcaaaaagtttcagattttgggttttcagattaggaatacccaacctgtatgtacgtatatttctgtatctatgtatgtatatatatgcatatgcagacatatgtatatggtctggtcagcatatgtgtatgtatgcgtatgtatgtatgtatgtatgccctcagtgcagtggggtttgctgcagaattcactgcatagcaggagatgtaagcagatgagttattttttaagagaatctaatctaattgtttttataaaaattattccctattgaatatttatataatgaggttgtatcaacaatgattaactcctttattatacatacacatgaatgtgcatttttggtaaatgcataaatgagattctataatgtttactgatctttatattacagattttctcttcttttaggattagctcagcttgccccccctttccatctccaccatctatagtgagcctctccataattagtgccaaccattagtctcgttcatatttttacaccaggagtcaacaaactgtggccattggccaaatatggcctcccaactgtttttttaaaataaagttttattggaacacagccatgttcatttggaaaa

SEQ ID NO: 29811 - DNA, 3614 bp, Homo Sapiens
gctacaagatgaccactgaggattacaagaagctgtgagtatgcaacgccaggcaccctacaatatcaggcgcagctctacatcaggggacaccgaggaggaggaggaggaggaggtggtgccattctcctcagatgaacagaaacggaggtcagaggctgcaagcggtgttctgaggaggacagctccccgggagcactcctacgtcctgtcagcggccaagaagagcactggcagtcctacccaggagacacaggcaccgtttatcgcgaagagggtggaggtggtggaagaggacgggccttctgagaagagccaggacccacctgctctggcaagatccactcctggctcaaacagctcaagaggtgaggaaattgtccgcctgcagatcctgacacccagggcaggactccgcctggtggccccagacgtggaaggcatgagctccagtgccacttcagtctctgctgtccctgctgataggaagagcaacagcacagcagcccaggaggatgcaaaggcagacccaaagggggccttggctgattgtgaggggaaggatgtacccaccagggtcggagaggcctggcaggagaggcctggagctccaagaggtggccaaggagacccagctgtacccgctcagcaacctgcagatcccagcaccccagagcggcagagcagccccagcggatctgagcaacttgtcagacgagagagttgtggcagtagcgtgttgactgattttgaggggaaggatgtggccaccaaggtcggagaggcctggcaggacaggcctagagccccaagaggtggccaaggagacccagctgtacccactcagcaacctgcagatcccagtaccccagaacagcagaacagccccagcggatctgagcaattcgtcagacgagagagctgcaccagcagggtgaggagcccctcgagctgcatggtcactgttactgtcactgccacatctgagcagcctcacatttatattccagcccccgcaagtgaattggactccagctctaccaccaaagggattctcttcgtgaaggagtacgtgaatgctagtgaagtgtcttctgggaagccagtatctgcacgctatagcaacgtcagcagcattgaggactcattcgccatggagaagaagcctccatgtggcagcactccatactctgagaggacaactggagggatctgtacttactgcaaccgtgagatccgagactgtccaaagattaccctagaacatcttggtatctgctgccatgaatattgctttaagtgtgggatttgcagtaaaccgatgggcgatctcctggatcagatcttcattcaccgtgacaccattcactgtgggaaatgctatgagaagctcttctagcgaccccccaccgccaggctgatcagaagctgatgactcgtggacaaatttggctgtccccagttttgccccaagttgctgtctccccttccctcacctcctccctccctgtttgatttcttcatgcttttgcccttctcaagttgaagttgcatacatccaatatcgtatcttaatgatgctatgataattgcttgtgtgtgtagcttcttgtagcttagaaagcgctttatgcccatgatgtcatttcaggctcaaccaaagaggatcaaacaggaattccatcttggcttccctaagacagattggctttctaatgagtttaagtgggcagaagtgtagggttcagtgtgtcctgactcccttgaggcttataatgggccaagttgaagactgttgatgatccctggtgggtaaattgcagacatcaaatgctagggattggcataggctagtgtttagcttgtctatttgccatatctatttttttaaatttccatacacttgtaaaagtagttagttgcttttgattgagttatatagcagtttttcatttggtcttccactcaccgttcactatatttgagtgttcccttacaggtatgttggcatgtgttggaaaatttacacaattaggtttaaattcagtaggatgtgattttgggggtggactgatcaaagtgatatctgtgtctgttggaatcttgatagctgattaatttgccctcaattctgctccctgaacttcacacataaatcttcccaagtgggttttagggtgtatagatcccagcaggattaaggaagtggaaaagcagctaacatttcttgaggctctaccacatagcaggcactgtcacagagtaatggcattaatccccataataatcctgtgaaggtgatattctcatcccatcttagacatgaggatattggaactcagagaggtggctattgcattgcgcagaacgctacagagcccatgctcttcccagagcagcacccacaaaagcaagcattgattttgtgctcagtgtgtgccaagcactgtgcagagggtacacagttcctgccaggttaacaccctcccttcaggcctcccaaaggcataggcttgcaaagagcagaaggtgtgaaatcacactcttcctctgggcatcctggatccctgaattatccccccccccatgaagtacttcaagggccaagctgcccctttccctcctctccgcccatgaaaatgcctccaaactgagatgctttcagctgagaacagatttgactcacagacattaccaaagaggagcttgtgaatccaggaaaagctccagggggctagctgatctgagcagagagctttcagtgacccattttcctgtctagactctgccttaagctagtggcaactgctggggccccaggtacttgggacatggaaactcgttggatggctgggcagatgtaagcctgtccatgcagtcagccgatcctctgctcaggttcagctggactctgccatctgtgggcccagcatcactctgtaagttccttgaaaggaagaacaaccttagagtatttctgatacaaaatgagggcctctgctcttgatttaattataaaatgtctacgtctttctccagtttctgagccctatgcacattggcttgtgggcttgttcttcctgccaaatgatcagagagggaacattccatttatttgtagtggatttcctctggagggcatgtacccacactaaataccaactgctcttcctcagctgtagtccccaacatcagacttggcacgtggtggacactaacacacaggcactcaatgaatgagtgaaggaaataaaagtcaccccccgttggtgagaaggtgcctatccccctgagtcctcagtgcaggaccagtggatgaaaggcaaggtaaagaggcccaagataggctggcttcccccgttcaaggtatagtctgcctttaagggagttttagaaccaacatgcaagacattgaaagaaatcttgcaagagccattattgacttagatccaaaacagcctctctcatgtctaaaaaggcacagaattttgcagatctgaggaagagggatgcattacctttttgcttcttttcaattgcttagtgtttctaatcatacttaatccacactaatgtgcgcaattataataaatgctaaaatatcaaaaaaaaaa

SEQ ID NO: 29812 - DNA, 3016 bp, Homo Sapiens
gaattcgcggccgctcgacgctcagcagagctaccagctgccctgttggcttcgctggtcggatcgtcctcctggccccgccaaacaggcgagcggccccgactgtggggcatggcagtagtctcctcgttctccgccgccgctagcctagctgagtcgccggcttctgcgctaggggctcccaccgcctccgcaggctaaggagccgctgccaccaacgagctgtgagggttactatgctccctctttgccgccgtctcctcctcttgcccgcgcaggcacccctctggctgctcagtcctgcctcagtgtcaaaccagaagagaagtaaaattcaacaaaaatttatgtgtggagttccttcttaaaagaagaaaaaagtgattatttagactatggatcggagcaaacggaattcaattgcaggatttcctccacgtgtggagcgtcttgaagagtttgaaggaggtggtggaggagaaggaaatgtgagccaggtgggaagagtttggccatcttcgtatcgagctcttataagtgccttttccagactgacgcgtttggatgatttcacctgtgaaaaaatagggtctggcttcttttctgaagtgttcaaggtacgacaccgagcttctggtcaggtgatggctcttaagatgaacacattgagcagtaaccgggcaaacatgctgaaagaagtacagctcatgaatagactctcccatcccaacatccttaggtatatcaactccgggaacctggaacagttgctagacagtaacctgcatttgccttggactgtgagggtaaaactggcctatgacatagcagtgggcctcagctaccttcacttcaaaggcatttttcatcgggacctcacatctaagaactgcctgataaagagggatgagaatggttactctgcagtggtagctgactttggcctggctgagaagatccccgatgtcagcatggggagtgagaagctggccgtggtgggttccccattctggatggcacctgaggttctccgagatgagccctataatgaaaaggcagatgtgttctcttatggtatcatcctctgcgagatcatcgcccgcatccaggccgatccggactatcttccccgcacagagaatttcgggctggactatgatgctttccagcacatggtgggagactgtcccccagattttctgcaacttactttcaactgctgtaacatggatcccaaactgcgcccatcttttgtggagattgggaagaccctggaggaaattctgagccgcctacaggaagaagagcaggagagggataggaagctgcagcccacagccaggggactcttggagaaagcacctggggtgaagcgactaagctcactggatgacaagatcccccacaagtcaccatgcccaagacgtaccatctggctgtctcgaagccagtcagatatcttttcccgtaagcccccacgtacagtgagtgtcttggacccatactaccggccacgagatggtgctgcccgcacccccaaagtcaacccttttagtgctcgccaggacctcatggggggcaagatcaagttttttgacctgcccagcaagtctgtcatctctctggtatttgacctggatgcaccagggcccggaactatgcccctggctgactggcaggagcccctggccccacctattcgccggtggcgttccttgcctggttcgcctgagttcttgcatcaagaggcttgtccatttgtgggccgggaagaatcgctatctgatgggcccccaccacgcctaagtagtctcaagtacagagttaaagagatcccaccattccgggcatctgccctaccagctgctcaagcccatgaggctatggactgctccattctccaggaagaaaatggttttgggtccaggccccaggggaccagtccatgccctgcgggtgcttctgaggagatggaggtagaagaaaggccagcaggctcaactccagccaccttctccacctcaggcataggcctgcaaacccagggaaagcaggatgggtgagggggtttagtccctgcctcaccttggggatggaccttcagctgaaaccatatggccccctaggtgcacagccttgattcttccctggagcctacagagcaggcaggctaggccaagccaggctcaacttctgggctcccagtgcccattggctgtgtatgacgggaggcagcagtgagaggccttcctagttagggccaacagctgataccaagcctctgaaatccagcaaggaggtctgcctcccaccagaccctctccagtgtacttccccagataggaccagaggatgtctagttctaggctgagctggcaggcagctattaccccggttctttccccaccccaggtctgtctcttgccttttcttggggcatataagctactgagtggaacatggagctgatcaagaggccgtaatggtcatggctgtttccagacctgaatattgggtgcttcttgccagtattctaagacatttgagtaattgctgtttgcacttactgcatggtcagaccacgtcactacatttctatgcaaggggacagcaaggcagcgtggtggtcatggctcttagctaacctattcaaagaccttttcctgttgattaatctattttcatatttataaaggagtcttaatgttctgccccataagactttcaaccttgtggttgggagtggggctggttttgtaggccctagggcctgcttctatgtatttatcaacatgtgatacattcaattggttaaatggtttatacagggactgatttgcttcccttcctgccatggctggagctttgggaacagtctgtccttacagagctgcaataagaaataaccaaagatgaagctggtcaaatattttcataacttgcttctgttgattttttttttgtaaaactttcccaagacattttcagacttaaaaataaagtcagtgttacaggt

SEQ ID NO: 29813 - DNA, 3750 bp, Homo Sapiens
gcgctgctcgccagcttgctcgcactcggctgtgcggcggggcaggcatgggagccgcgcgctctctcccggcgcccacacctgtctgagcggcgcagcgagccgcggcccgggcgggctgctcggcgcggaacagtgctcggcatggcagggattccagggctcctcttccttctcttctttctgctctgtgctgttgggcaagtgagcccttacagtgccccctggaaacccacttggcctgcataccgcctccctgtcgtcttgccccagtctaccctcaatttagccaagccagactttggagccgaagccaaattagaagtatcttcttcatgtggaccccagtgtcataagggaactccactgcccacttacgaagaggccaagcaatatctgtcttatgaaacgctctatgccaatggcagccgcacagagacgcaggtgggcatctacatcctcagcagtagtggagatggggcccaacaccgagactcagggtcttcaggaaagtctcgaaggaagcggcagatttatggctatgacagcaggttcagcatttttgggaaggacttcctgctcaactaccctttctcaacatcagtgaagttatccacgggctgcaccggcaccctggtggcagagaagcatgtcctcacagctgcccactgcatacacgatggaaaaacctatgtgaaaggaacccagaagcttcgagtgggcttcctaaagcccaagtttaaagatggtggtcgaggggccaacgactccacttcagccatgcccgagcagatgaaatttcagtggatccgggtgaaacgcacccatgtgcccaagggttggatcaagggcaatgccaatgacatcggcatggattatgattatgccctcctggaactcaaaaagccccacaagagaaaatttatgaagattggggtgagccctcctgctaagcagctgccagggggcagaattcacttctctggttatgacaatgaccgaccaggcaatttggtgtatcgcttctgtgacgtcaaagacgagacctatgacttgctctaccagcaatgcgatgcccagccaggggccagcgggtctggggtctatgtgaggatgtggaagagacagcagcagaagtgggagcgaaaaattattggcattttttcagggcaccagtgggtggacatgaatggttccccacaggatttcaacgtggctgtcagaatcactcctctcaaatatgcccagatttgctattggattaaaggaaactacctggattgtagggaggggtgacacagtgttccctcctggcagcaattaagggtcttcatgttcttattttaggagaggccaaattgttttttgtcattggcgtgcacacgtgtgtgtgtgtgtgtgtgtgtgtgtaaggtgtcttataatcttttacctatttcttacaattgcaagatgactggctttactatttgaaaactggtttgtgtatcatatcatatatcatttaagcagtttgaaggcatacttttgcatagaaataaaaaaaatactgatttggggcaatgaggaatatttgacaattaagttaatcttcacgtttttgcaaactttgatttttatttcatctgaacttgtttcaaagatttatattaaatatttggcatacaagagatatgaattcttatatgtgtgcatgtgtgttttcttctgagattcatcttggtggtgggtttttttgtttttttaattcagtgcctgatctttaatgcttccataaggcagtgttcccatttaggaactttgacagcatttgttaggcagaatattttggatttggaggcatttgcatggtagtctttgaacagtaaaatgatgtgttgactatactgatacacatattaaactataccttatagtaaaccagtatcccaagctgcttttagttccaaaaatagtttcttttccaaaggttgttgctctactttgtaggaagtctttgcatatggccctcccaactttaaagtcataccagagtggccaagagtgtttatcccaacccttccatttaacaggatttcactcacatttctggaactagctatttttcagaagacaataatcagggcttaattagaacaggctgtatttcctcccagcaaacagttgtggccacactaaaaacaatcatagcattttacccctggattatagcacatctcatgttttatcatttggatggagtaatttaaaatgaattaaattccagagaacaatggaagcattgcctggcagatgtcacaacagaataaccacttgtttggagcctggcacagtcctccagcctgatcaaaaattattctgcatagttttcagtgtgctttctgggagctatgtacttcttcaatttggaaacttttctctctcatttatagtgaaaatacttggaagttactttaagaaaaccagtgtggcctttttccctctagctttaaaagggccgcttttgctggaatgctctaggttatagataaacaattaggtataatagcaaaaatgaaaattggaagaatgcaaaatggatcagaatcatgccttccaataaaggcctttacacatgttttatcaatatgattatcaaatcacagcatatacagaaaagacttggacttattgtatgtttttattttatggctctcggcctaagcacttctttctaaatgtatcggagaaaaaatcaaatggactacaagcacgtgtttgctgtgcttgcaccccaggtaaacctgcattgtagcaatttgtaaggatattcagatggagcactgtcacttagacattctctgggggattttctgcttgtctttcttgagctttttggaaggataattctgataaggcactcaagaaacgtacaaccacagtgctttcttcaaatcatatgagaaatactatgcatagcaaggagatgcagagccgccaggaaaattctgagttccagcacaattttctttggaatctaacaggaatctagcctgaggaagaagggaggtctccatttctatgtctggtatttgggggttttgtttgtttttgctttagcttggtgaaaaaaagttcactgaacaccaagaccagaatggatttttttaaaaaaatagatgttccttttgtgaagcaccttgattccttgattttgattttttgcaaagttagacaatggcacaaagtcaaaatgaaatcaatgtttagttcacaagtagatgtaatttactaaagaatgatacacccatatgctatatacagcttaactcacagaactgtaaaagaaaattataaaataattcaacatgtccatctttttagtgataataaaagaaagcatggtattaaactatcatagaagtagacagaaaaagaaaaaaggactcatggcattattaatataattagtgctttacatgtgttagttatacatattagaagcatatttgcctagtaaggctagtagaaccacatttcccaaagtgtgctccttaaacactcatgccttatgattttctaccaaaagtaaaaagggttgtattaagtcagaggaagatgcctctccattttccctctctttatcagaggttcacatgcctgtctgcacattaaaagctctgggaagacctgttgtaaagggacaagttgaggttgtaaaatctgcatttaaataaacatctttgatcacaaaaaaaaaaaaaaaaaaaa

SEQ ID NO: 29814 - DNA, 2309 bp, Homo Sapiens
ccggaaggaagtcgcgtgctgaggggtgtgacggttttcttgctcgtgggctcggacgagtacggagcgcctgcagggacagcctggataaaggctcactgatggctcagttgggagcagttgtggctgtggcttccagtttcttttgtgcatctctcttctcagctgtgcacaagatagaagagggacatattggggtatattacagaggcggtgccctgctgacttcgaccagcggccctggtttccatctcatgctccctttcatcacatcatataagtctgtgcagaccacactccagacagatgaggtgaagaatgtaccttgtgggactagtggtggtgtgatgatctactttgacagaattgaagtggtgaacttcctggtcccgaacgcagtgtatgatatagtgaagaactatactgctgactatgacaaggccctcatcttcaacaagatccaccacgaactgaaccagttctgcagtgtgcacacgcttcaagaggtctacattgagctgtttgatcagattgatgaaaatctcaaactggctttgcaacaggacctgacctccatggcccctgggctggtcattcaagctgtgcgggtaacaaagcccaacataccagaggcaatccgcagaaactacgagttgatggaaagtgagaagacaaagcttctcattgccgcccagaaacagaaggtggtggaaaaggaagcagagacagagcggaagaaggcgctcattgaggcagaaaaagtggcccaggtggctgagatcacctacgggcagaaggtgatggagaaggagactgagaagaagatttcagaaattgaagatgctgcatttctggcccgggagaaggcaaaggcagatgctgagtgctacactgctatgaaaatagccgaagccaataagctgaagctaacccctgaatatctgcagctgatgaagtacaaggccattgcttccaacagcaagatttactttggcaaagacattcctaacatgttcatggactctgcgggcagtgtgagcaagcagtttgaggggctagctgacaagctaagctttggcttagaagatgaacccttggagacggccactaaggagaattgaaaaaaacttgatatgactgcaaatgatacttaagcagatctttattttttaagatgaatcagaatgttcctccctccccgactaccttctctgactgtcttccagttactgtggtgaaaaagaagaaatgaacttaaatccactccctttctagggaaaggagggtggggactgatgatggggggttttatttcaggtaagcagtttatatgacttccaataagatttgtaaatcatgggcttgacctttgacctctagacactaattttatcctttgaggctggcttaattagggatgctgtcattaaggagagggagaaatgtagagtgttacctccaactcatttgatttcccttacttgggaaaatgcagtccagtgttctcacctctgcctccaaggtaggagatgtctgtgggtgaggctcagcaactgagcaaatatgtgcctgtgagtttgccagtagagctgtgaagaaacagctgcagagaacatttgaccttcctggcattcttgtctgcatgtgtgtgagttattttagaggtgtgctttcttgagccctcataaggaagtactggtgctaggttttgcaagattttgtatacactttgctccttgccctagggctcagagtggtggtttctgactacatttctagagtcagagcttgatcaccacaactcaattatttcggcatcttttcacctatgctgtgatttgttttttttttttcttctcaaaaattctgttcattggttccactcagcatcaagaagacagggacaaacaactcaagtgtcttaacagctgctggagtgggatccttgttatctcttagccactgcaggacctgcctgacaggttatgtgtgcacctcgagatgaagtgtctttctattattgtagagattctgtagtgaagaggtctgacaccatgtgtggaggaggaggaacgatcagtcaagagatgtcctggtcttaatgcctgtggcttgtgctgggagtgggtctgacttagtgataaaaggactctattcactaagtagcctgtgtttttaaatccagggctgcaggcagcaacgcaagtcaggctgaacattcagtctccagagacagctgtgtggagcaaatcagagttcatgcccaagtccccaggttggaatggctgtgccaaaatccattcaaaggg

SEQ ID NO: 29815 - DNA, 3575 bp, Homo Sapiens; identical to SEQ ID NO: 22962

SEQ ID NO: 29816 - DNA, 2439 bp, Homo Sapiens
atagagccctcagtgggatgagggtgaaactgctattgccggcggctcctgttttaccgcgtcacgatgctggtgcatttatttcgggtcgggattcggggtggcccattcccaggcaggctgctaccgcccctccgcttccagacattctcagctgtcaggtactctgatggctaccgcagctcctccctcctccgggccgtggcccacctgcggtcccagctctgggcccacctccctcgagcccccctagctcccagatggagcccctctgcctggtgctgggttgggggagccctgctaggccccatggtactgagtaagcatccccacctctgccttgtggccctgtgtgaggcagaagaggcccctcctgccagctccacaccccatgtcgtggggtctcgctttaactggaagctcttctggcagtttctgcacccccacctgctggtcctgggggtagccgtcgtgctggccttgggtgcggcactcgtgaatgtacagatccccctgctcctgggccagctggtaaaggtcgtggccaagtacacaagggaccacgtagggagtttcatgactgagtcccagaatctcagcacccacctgcttatcctctatggtgtccagggactgctgaccttcgggtacctggtgctgctgtcccacgttggcgagcgcatggctgtggacatgcggagggccctcttcagctccctgctccgacaaaacatcaccttctttgacgccaataagacagggcagctggtgagccgcttgacaactgacgtgcaggaatttaagtcatccttcaagcttgtcatctcccaggggctgcgaagctgctcccaggtggcaggctgcctggtgtccctgtccatgctgtcgacacgcctcacgctgctgctgatggtggccacaccagccctgatgggagtgggcaccctgatgggctcaggcctccgaaaattgtctcgccagtgtcaggaacatatcgccagggcaatgggcgtagcagacgaggccctgggcaatgtgcggactgtgcgagccttggccatggagcaacgggaagaggagcgctatggggcagagctggaagcctgccgctgccgggcagaggagctgggccgcggcatcgccttgttccaagggctttccaacatcgccttcaactgcatggtcttgggtaccctatttattgggggctcccttgtggccggacagcagctgacagggggagacctcatgtccttcctggtggcctcccagacagtgcaaaggtccatggccaacctctctgtcctgtttgggcaggtggtccgggggctgagtgcaggtgcccgggtctttgagtacatggccctgaacccctgcatcccactgtctgggggctgctgcgtccccaaagagcagctgcgtggctccgttacatttcagaacgtctgcttcagctacccctgccgccccggcttcgaggtgctgaaagacttcaccctgacgctgccccctggcaagatcgtggccctcgtgggccagtctggcggaggaaagaccaccgtggcttccctgctggagcgcttctacgaccccacggcaggcgtggtgatgctggatgggcgggacctgcgcacccttgacccctcctggctccggggccaggttgtcggtttcatcagccaggagcccgtcctgtttgggacgaccatcatggaaaacatccgctttgggaagctggaagcttccgatgaagaggtgtacacagccgcccgggaagcgaatgctcacgagttcatcaccagtttccccgagggctacaacacggtcgtcggtgaacggggcactaccctgtctgggggccagaagcagcgcctggccatcgcccgagcccttatcaagcagcccacggtgctgatactggatgaagctaccagcgcgctggatgcagagtccgagcgggttgtacaggaggccctggaccgggccagtgcaggccgcacggtgctggtaattgcccaccggctcagcactgtccgtggggcccactgcattgtcgtcatggccgatggccgtgtctgggaggctgggacacatgaagagctcctgaagaaaggcgggctatacgccgagctcatccggaggcaggccctggatgccccgaggacagcggccccaccgcccaaaaagccagaaggccccaggagccaccagcacaagtcctgagaagggccccctgaggtgtggtcgctgccaagcatcagtgttagggctggggctcagcctgggggagcctactggggactgagcccccaggagggccagcatgtggagagtcgctgcggctgctcctgctcacaataaagccggggccgagcagctggcaggggaggccaatccctccctcccctccccagtcctgccggctgcctccctcccacc

SEQ ID NO: 29817 - DNA, 3552 bp, Homo Sapiens
tgagccggccgcacgcggaggatcctaaggagcagctctgttgcgacataggccgagcagcgaggcccagctccctgaaacaacagtaacctacccctgtgggtcatcatcatgccctccgacctggccaagaagaaggcagccaaaaagaaggaggctgccaaagctcgacagcggcccagaaaaggacatgaagaaaatggagatgttgtcacagaaccacaggtggcagagaagaatgaggccaatggcagagagaccacagaagtagatttgctgaccaaggagctagaggactttgagatgaagaaagctgctgctcgagctgtcactggcgtcctggcctctcaccccaacagtactgatgttcacatcatcaacctctcacttacctttcatggtcaagagctgctcagtgacaccaaactggaattaaactcaggccgtcgttatggcctcattggtttaaatggaattggaaagtccatgctgctctctgctattgggaagcgtgaagtgcccatccctgagcacatcgacatctaccatctgactcgagagatgccccctagtgacaagacacccttgcattgtgtgatggaagtcgacacagagcgggccatgctggagaaagaggcagagcggctggctcatgaggatgcggagtgtgagaagctcatggagctctacgagcgcctggaggagctggatgccgacaaggcagagatgagggcctcgcggatcttgcatggactgggtttcacacctgccatgcagcgcaagaagctaaaagacttcagtgggggctggaggatgagggttgcccttgccagagccctctttattcggcccttcatgctgctcctggatgagcctaccaaccacctggacctagatgcttgcgtgtggttggaagaagaactaaaaacttttaagcgcatcttggtcctcgtctcccattcccaggattttctgaatggtgtctgtaccaatatcattcacatgcacaacaagaaactgaagtattatacgggtaattatgatcagtacgtgaagacgcggctagagctggaggagaaccagatgaagaggtttcactgggagcaagatcagattgcacacatgaagaactacattgcgaggtttggtcatggcagtgccaagctggcccggcaggcccagagcaaggagaagacgctacagaaaatgatggcatcaggactgacagagagggtcgtgagcgataagacactgtcattttatttcccaccatgtggcaagatccctccacctgtcattatggtgcaaaatgtgagcttcaagtatacaaaagatgggccttgcatctacaataatctagaatttggaattgaccttgacacacgagtggctctggtagggcccaatggagcagggaagtcaactcttctgaagctgctaactggagagctactacccacagatggcatgatccgaaaacactctcatgtcaagatagggcgttaccatcagcatttacaagagcagctggacttagatctctcacctttggagtacatgatgaagtgctacccagagatcaaggagaaggaagaaatgaggaagatcattgggcgatacggtctcactgggaaacaacaggtgagcccaatccggaacttgtcagacgggcagaagtgccgagtgtgtctggcctggctggcctggcagaacccccacatgctcttcctggatgaacccaccaatcacctggatatcgagaccatcgacgccctggcagatgccatcaatgagtttgagggtggtatgatgctggtcagccatgacttcagactcattcagcaggttgcacaggaaatttgggtctgtgagaagcagacaatcaccaagtggcctggagacatcctggcttacaaggagcacctcaagtccaagctggtggatgaggagccccagctcaccaagaggacccacaacgtgtgagccctctacctgggttcgggtcaggagctccatctgggaactaacagctgctaacctgaccagccgctcaggacaggaccctggggctacactcctgcattgctgcaatactgctcccccagcctctcccctgcccctcaacctgccttagctgcactctcttacctacagctggacagtacctgtctgtttcctgtcctccttccagttacatctgtccatgtctggactcggctggccgttccctccagccccttgctggttatcttactctgagtgtgatgcagtcagaggcacctgcgggttagcccaggggcccaagccctggatttggcctgcggaggagcttaggatcctcgttttctgggttttggtgatgttggaggagtaccccccagcccaccgccccgattcctttttgcttctggtttggagctccggaccaggaccttcgtcctggtcagtttttaaataattatttagcagtgtaacttttagacctgcgtgacatctacaaagcgcccaataaagaaagaggaagccacggtccctaccttccttctcgggtctctggggccttctcctccctgcagtgccaacatgcactgcccacagcaggagctggatccagcgtcagtgtgtcgatgggaactgaagactagtccataggagctggaagaactttgtccctttacttctgatttgaaattgtaccttttctcaggcctgtgattcacagactttaacatgaatcagaatcacctggagggctcatgcaatcagattgccagatctcgcctcagcgtttctggttcaataggttttgggggagaccaagaacgttaacatttctagcaagtttccaggtgatgctgttgttgctggtctagagactattttgagaaccactgtccaggagcgtggttttctgattgtgatctgaggttctgccccaactgcacagcagttgggctgcttgttaaaaatgcaggccaggtgcggtggctcacacctgtaatcccagcgctttgggaggctgaggcaggtggatcacttgagctcaggagttcaagaccagcttgggaaacatggcaaaacccgtctttatgtgcctggaatcccacctgctcaggtggctagggtggatggatcgcttgagcccaggaggtggaggttgcagtgagctgagattgcaccactgcattccagcctggatgacagagcaaaaccctgtctcaaaaaaatgcagactggccaggcacagtggctcacacctgtaatccgactgtaagctcatcaccttgggaggccactgtaggaggatcaattgagcctagaagttcaagaccagcctgggcaaagtagggagaccccttctctacaaatagtaataaaatgaaccgggcatagtagcatgtgcctgcggtcccagctgctctgataagaggaggctcacttgagcccaggaggttgaggctgcagtgagcagagcgtgccgctacactccagcctgatgacagaccgagacactgtctcaaaaaaataaaaaaattcagattgctgaaaaaa

SEQ ID NO: 29818 - DNA, 2547 bp, Homo Sapiens
cttacaaggtacagtcctctgctcaggggggccaggagggtcttataggcatcattcaccagggtcgaatgcttctctgagaagtccttttcagtctgagacctctggctgaagaaatctgggtggacaagacgctgcagttgctggtacctgtgctggagcttcgctgtatcaactctgaaggaacggttgcagtccataaggctgaagtagtctcgagtggggtcaggtgcctgcagcgctcggcactgtgggcagaagaacctgtcctcccgcccggggccccatgggccgccgcagttccaacagcggggataattgcttcccgcctgcgacgcagcatcgcagcttagcggtctccttctgggaacccctgtcggccaaaacccccacacccggagcaaagccccggctctcccccgccacatctggccggcggcctatctagccgtggtcactcgtggggaaaagcaaagagagcgtctaaccagactaatgttgctgattggctggggagtcgagggggcgggatcacccgaggggaacccgggttctaagttccgctctcccttctaaactacaactcccaggaggcattgaggcggcgcctgacggccacatctgctgctcctcattggtccggcggcaggggagggggttttgattggctgagggtggagtttgtatctgcaggtttagcgccactctgctggctgaggctgcggagagtgtgcggctccaggtgggctcacgcggtcgtgatgtctcgggagtcggatgttgaggctcagcagtctcatggcagcagtgcctgttcacagccccatggcagcgttacccagtcccaaggctcctcctcacagtcccagggcatatccagctcctctaccagcacgatgccaaactccagccagtcctctcactccagctctgggacactgagctccttagagacagtgtccactcaggaactctattctattcctgaggaccaagaacctgaggaccaagaacctgaggagcctacccctgccccctgggctcgattatgggcccttcaggatggatttgccaatcttgaatgtgtgaatgacaactactggtttgggagggacaaaagctgtgaatattgctttgatgaaccactgctgaaaagaacagataaataccgaacatacagcaagaaacactttcggattttcagggaagtgggtcctaaaaactcttacattgcatacatagaagatcacagtggcaatggaacctttgtaaatacagagcttgtagggaaaggaaaacgccgtcctttgaataacaattctgaaattgcactgtcactaagcagaaataaagtttttgtcttttttgatctgactgtagatgatcagtcagtttatcctaaggcattaagagatgaatacatcatgtcaaaaactcttggaagtggtgcctgtggagaggtaaagctggctttcgagaggaaaacatgtaagaaagtagccataaagatcatcagcaaaaggaagtttgctattggttcagcaagagaggcagacccagctctcaatgttgaaacagaaatagaaattttgaaaaagctaaatcatccttgcatcatcaagattaaaaacttttttgatgcagaagattattatattgttttggaattgatggaagggggagagctgtttgacaaagtggtggggaataaacgcctgaaagaagctacctgcaagctctatttttaccagatgctcttggctgtgcagtaccttcatgaaaacggtattatacaccgtgacttaaagccagagaatgttttactgtcatctcaagaagaggactgtcttataaagattactgattttgggcactccaagattttgggagagacctctctcatgagaaccttatgtggaacccccacctacttggcgcctgaagttcttgtttctgttgggactgctgggtataaccgtgctgtggactgctggagtttaggagttattctttttatctgccttagtgggtatccacctttctctgagcataggactcaagtgtcactgaaggatcagatcaccagtggaaaatacaacttcattcctgaagtctgggcagaagtctcagagaaagctctggaccttgtcaagaagttgttggtagtggatccaaaggcacgttttacgacagaagaagccttaagacacccgtggcttcaggatgaagacatgaagagaaagtttcaagatcttctgtctgaggaaaatgaatccacagctctaccccaggttctagcccagccttctactagtcgaaagcggccccgtgaaggggaagccgagggtgccgagaccacaaagcgcccagctgtgtgtgctgctgtgttgtgaactccgtggtttgaacacgaaagaaatgtaccttctttcactctgtcatctttcttttctttgagtctgtttttttatagtttgtattttaattatgggaataattgctttttcacagtcactgatgtacaattaaaaacctgatggaacctgg

SEQ ID NO: 29819 - DNA, 13290 bp, Homo Sapiens
gaagcgcctgtgctctgccgagactgccgtgcccattgctcgcctcggtcgccgccgctttagccgcctccgggggagcggccgcctattgtctttctccgcggcgaaggtgaagagttgtcccagctcggcccgcgggggagccccgggagccgcacgtgtcctgggtcatgaaacttaatccacagcaagctcccttatatggtgattgtgttgttacagtgctgcttgctgaagaggacaaagctgaagatgatgtagtgttttacttggtatttttgggttccaccctccgtcactgtacaagtactcggaaggtcagttctgatacattggagaccattgctcctggtcatgattgttgtgaaacagtgaaggtgcagctctgtgcttccaaagagggccttcccgtgtttgtggtggctgaagaagactttcatttcgtccaggatgaagcgtatgatgcagctcaattcctagcaaccagtgctggaaatcagcaggctttgaactttacccgttttcttgaccagtcaggacccccatctggggatgtgaattcccttgataagaagttggtgctggcattcaggcacctgaagctgcccacggagtggaatgtattggggacagatcagagtttgcatgatgctggcccgcgagagacattgatgcattttgctgtgcggctgggactgctgaggttgacgtggttcctgttgcagaagccaggtggccgcggagctctcagtatccacaaccaggaaggggcgacgcctgtgagcttggccttggagcgaggctatcacaagctgcaccagcttctaaccgaggagaatgctggagaaccagactcctggagcagtttatcctatgaaataccgtatggagactgttctgtgaggcatcatcgagagttggacatctatacattaacctctgagtctgattcacatcatgaacacccatttcctggagacggttgcactggaccaatttttaaacttatgaacatccaacagcaactaatgaaaacaaacctcaagcagatggacagtcttatgcccttaatgatgacagcacaggatccttccagtgccccagagacagatggccagtttcttccctgtgcaccggagcccacggaccctcagcgactttcttcttctgaagagactgagagcactcagtgctgcccagggagccctgttgcacagactgaaagtccctgtgatttgtcaagcatagttgaggaggagaatacagaccgttcctgtaggaagaaaaataaaggcgtggaaagaaaaggggaagaggtggagccagcacctattgtggactctggaactgtatctgatcaagacagctgccttcagagcttgcctgattgtggagtaaagggcacggaaggcctttcgtcctgtggaaacagaaatgaagaaactggaacaaaatcttctggaatgcccacagaccaggagtccctgagcagtggagatgctgtgcttcagagagacttggtcatggagccaggcacagcccagtattcctctggaggtgaactgggaggcatttcaacaacaaatgtcagtaccccagacactgcaggggaaatggaacatgggctcatgaacccagatgccactgtttggaagaatgtgcttcagggaggggaaagtacaaaggaaagatttgagaactctaatattggcacagctggagcctctgacgtgcacgtcacaagtaagcctgtggataaaatcagtgttccaaactgtgcccctgctgccagttccctggatggtaacaaacctgctgagtcttcacttgcatttagtaatgaagaaacctccactgaaaaaacagcagaaacggaaacttcacgaagtcgtgaggagagtgctgatgctccagtagatcagaattctgtggtgattccagctgctgcaaaagacaagatttcagatggattagaaccttatactctcttagcagcaggcataggtgaggcaatgtcaccctcagatttagcccttcttgggctggaagaagatgtaatgccacaccagaactcagaaacaaattcatctcatgctcaaagccaaaagggcaaatcctcacccatttgttctacaactggagacgataaactttgtgcagactctgcatgtcaacagaacacagtgacttctagtggcgatttggttgcaaaactgtgtgataacatagttagcgagtccgaaagcaccacagcaaggcaacccagctcacaagatccacccgatgcctcccactgtgaagacccacaggctcatacagtcacctctgaccctgtaagggatacccaggaacgtgcggatttttgtcctttcaaagtggtggataacaaaggccaacgaaaagatgtgaaactagataaacctttaacaaatatgcttgaggtggtttcacatccacatccagttgtccctaaaatggagaaagaactggtgccagaccaggcagtaatatcagacagtactttctctctggcaaacagtccaggcagtgaatcagtaaccaaggatgacgcactttcttttgtcccctcccagaaagaaaagggaacagcaactcctgaactacatacagctacagattatagagatggcccagatggaaattcgaatgagcctgatacgcggccactagaagacagggcagtaggcctgtccacatcctccactgctgcagagcttcagcacgggatggggaataccagtctcacaggacttggtggagagcatgagggtcccgcccctccagcaatcccagaagctctgaatatcaaggggaacactgactcttccctgcaaagtgtgggtaaggccactttggctttagattcagttttgactgaagaaggaaaacttctggtggtttcagaaagctctgcagctcaggaacaagataaggataaagcggtgacctgttcctctattaaggaaaatgctctctcttcaggaactttgcaggaagagcagagaacaccacctcctggacaagatactcaacaatttcatgaaaaatcaatctcagctgactgtgccaaggacaaagcacttcagctaagtaattcaccgggtgcatcctctgcctttcttaaggcagaaactgaacataacaaggaagtggccccacaagtctcactgctgactcaaggtggggctgcccagagcctggtgccaccaggagcaagtctggccacagagtcaaggcaggaagccttgggggcagagcacaacagctccgctctgttgccatgtctgttgccagatgggtctgatgggtccgatgctcttaactgcagtcagccttctcctctggatgttggagtgaagaacactcaatcccagggaaaaactagtgcctgtgaggtgagtggagatgtgacggtggatgttacaggggttaatgctctacaaggtatggctgagcccagaagagagaatatatcacacaacacccaagacatcctgattccaaacgtcttgttgagccaagagaagaatgccgttctaggtttgccagtggctctacaggacaaagctgtgactgacccacagggagttggaaccccagagatgatacctcttgattgggagaaagggaagctggagggagcagaccacagctgtaccatgggtgacgctgaggaagcccaaatagacgatgaagcacatcctgtcctactgcagcctgttgccaaggagctccccacagacatggagctctcagcccatgatgatggggccccagctggtgtgagggaagtcatgcgagccccgccttcaggcagggaaaggagcactccctctctaccttgcatggtctctgcccaggacgcacctctgcctaagggggcagacttgatagaggaggctgccagccgtatagtggatgctgtcatcgaacaagtcaaggccgctggagcactgcttactgagggggaggcctgtcacatgtcactgtccagccctgagttgggtcctctcactaaaggactagagagtgcttttacagaaaaagtgagtactttcccacctggggagagcctaccaatgggcagtactcctgaggaagccacggggagccttgcaggatgttttgctggaagggaggagccagagaagatcattttacctgtccaggggcctgagccagcagcagaaatgccagacgtgaaagctgaagatgaagtggattttagagcaagttcaatttctgaagaagtggctgtagggagcatagctgctacactgaagatgaagcaaggcccaatgacccaggcgataaaccgagaaaactggtgtacaatagagccatgccctgatgcagcatctcttctggcttccaagcagagcccagaatgtgagaacttcctggatgttggactgggcagagagtgtacctcaaaacaaggtgtacttaaaagagaatctgggagtgattctgacctctttcactcacccagtgatgacatggacagcatcatcttcccaaagccagaggaagagcatttggcctgtgatatcaccggatccagttcatccaccgatgacacggcttcactggaccgacattcttctcatggcagtgatgtgtctctctcccagattttaaagccaaacaggtcaagagatcggcaaagccttgatggattctacagccatgggatgggagctgagggtcgagaaagtgagagtgagcctgctgacccaggcgacgtggaggaggaggagatggacagtatcactgaagtgcctgcaaactgctctgtcctaaggagctccatgcgctctctttctcccttccggaggcacagctgggggcctgggaaaaatgcagccagcgatgcagaaatgaaccaccggagttcaatgcgagttcttggggatgttgtcaggagacctcccattcataggagaagtttcagtctagaaggcttgacaggaggagctggtgtcggaaacaagccatcctcatctctagaagtaagctctgcaaatgccgaagagctcagacacccattcagtggtgaggaacgggttgactctttggtgtcactttcagaagaggatctggagtcagaccagagagaacataggatgtttgatcagcagatatgtcacagatctaagcagcagggatttaattactgtacatcagccatttcctctccattgacaaaatccatctcattaatgacaatcagccatcctggattggacaattcacggcccttccacagtaccttccacaataccagtgctaatctgactgagagtataacagaagagaactataatttcctgccacatagcccctccaagaaagattctgaatggaagagtggaacaaaagtcagtcgtacattcagctacatcaagaataaaatgtctagcagcaagaagagcaaagaaaaggaaaaagaaaaagataagattaaggagaaggagaaagattctaaagacaaggagaaagataagaagactgtcaacgggcacactttcagttccattcctgttgtgggtcccatcagctgtagccagtgtatgaagcccttcaccaacaaagatgcctatacttgtgcaaattgcagtgcttttgtccacaaaggctgccgagaaagtctagcctcctgtgcaaaggtcaaaatgaagcagcccaaagggagccttcaggcacatgacacatcatcactgcccacggtcattatgagaaacaagccctcacagcccaaggagcgtcctcggtccgcagtcctcctggtggatgaaaccgctaccaccccaatatttgccaatagacgatcccagcagagtgtctcgctctccaaaagtgtctccatacagaacattactggagttggcaatgatgagaacatgtcaaacacctggaaattcctgtctcattcaacagactcactaaataaaatcagcaaggtcaatgagtcaacagaatcacttactgatgagggagtaggtacagacatgaatgaaggacaactactgggagactttgagattgagtccaaacagctggaagcagagtcttggagtcggataatagacagcaagtttctaaaacagcaaaagaaagatgtggtcaaacggcaagaagtaatatatgagttgatgcagacagagtttcatcatgtccgcactctcaagatcatgagtggtgtgtacagccaggggatgatggcggatctgctttttgagcagcagatggtagaaaagctgttcccctgtttggatgagctgatcagtatccatagccaattcttccagaggattctggagcggaagaaggagtctctggtggataaaagtgaaaagaactttctcatcaagaggataggggatgtgcttgtaaatcagttttcaggtgagaatgcagaacgtttaaagaagacatatggcaagttttgtgggcaacataaccagtctgtaaactacttcaaagacctttatgccaaggataagcgttttcaagcctttgtaaagaagaagatgagcagttcagttgttagaaggcttggaattccagagtgcatattgcttgtaactcagcggattaccaagtacccagttttattccaaagaatattgcagtgtaccaaagacaatgaagtggagcaggaagatctagcacagtccttgagcctggtgaaggatgtgattggagctgtagacagcaaagtggcaagttatgaaaagaaagtgcgtctcaatgagatttatacaaagacagatagcaagtcaatcatgaggatgaagagtggtcagatgtttgccaaggaagatttgaaacggaagaagcttgtacgtgatgggagtgtgtttctgaagaatgcagcaggaaggttgaaagaggttcaagcagttcttctcactgacattttagttttccttcaagaaaaagaccagaagtacatctttgcatcattggaccagaagtcaacagtgatctctttaaagaagctgattgtgagagaagtggcacatgaggagaaaggtttattcctgatcagcatggggatgacagatccagagatggtagaagtccatgccagctccaaagaggaacgaaacagctggattcagatcattcaggacacaatcaacaccctgaacagagatgaagatgaaggaattcctagtgagaatgaggaagaaaagaaaatgttggacaccagagcccgagaattaaaagaacaacttcaccagaaggaccaaaaaatcctactcttgttggaagagaaggagatgattttccgggacatggctgagtgcagcacccctctcccagaggattgctccccaacacatagccctagagttctcttccgctccaacacagaagaggctctcaaaggaggacctttaatgaaaagtgcaataaatgaggtggagatccttcagggtttggtgagtggaaatctgggaggcacacttgggccgactgtcagcagccccattgagcaagatgtggtcggtcccgtttccctgccccggagagcagagacctttggaggatttgacagccatcagatgaatgcttcaaaaggaggcgagaaggaagagggagatgatggccaagatcttaggagaacggaatcagatagtggcctaaaaaagggtggaaatgctaacctggtatttatgcttaaaagaaacagtgagcaggttgtccagagcgttgttcatctctacgagctcctcagcgctctgcagggtgtggtgctgcagcaggacagctacattgaggaccagaaactggtgctgagcgagagggcgctcactcgcagcttgtcccgcccgagctccctcattgagcaggagaagcagcgcagcctggagaagcagcgccaggacctggccaacctgcagaagcagcaggcccagtacctcgaggagaagcgcaggcgcgagcgtgagtgggaagctcgtgagagggagctgcgggagcgggaggccctcctggcccagcgcgaggaggaggtgcagcaggggcagcaggacctggaaaaggagcgggaggagctccagcagaagaagggcacataccagtatgacctggagcgactgcgtgctgcccagaaacagcttgagagggaacaggagcagctgcgccgggaggcagagcggctcagccagcggcagacagaacgggacctgtgtcaggtttcccatccacataccaagctgatgaggatcccatcgttcttccccagtcctgaggagcccccctcgccatctgcaccttccatagccaaatcagggtcattggactcagaactttcagtgtccccaaaaaggaacagcatctctcggacacacaaagataaggggccttttcacatactgagttcaaccagccagacaaacaaaggaccagaagggcagagccaggcccctgcgtccacctctgcctctacccgcctgtttgggttaacaaagccaaaggaaaagaaggagaaaaaaaagaagaacaaaaccagccgctctcagcccggtgatggtcccgcgtcagaagtatcagcagagggtgaagagatcttctgctgaccctcttcctctctgctgaggcagctgcctcctgatcctggccagcccacctctcctgctgtccccgcgtgcacaagtctcttacactggacgcccactgctcctcagcgtccagtcctcctgggcggccccaggtcctggacaataagcaacagatgatattgagtgtcgggtggggaaggaggcccagactctgcttcggccatgatttgtgactgcccaggactctcaggttgggctggccctactcaggattacactgaaagtaatggcctcgtaagtacaggtgatggttttggacacgtcaggaattcctaaaggctgaaagagtgtatccaagtaaggtctgaacctccgaatgccttttatttgggggaacacaaaaccaaacagcagatgttttggacttgatctgtgtacgtacatggggacctgtctgcatatacacacggggaatgccagaagaaggcccagtctgcaccaggcgtctggtcaacttagcacaagggcagtgcctggacggacccggagcccccgcatatcagcagttcacccagtactcctcagagactggtttccctctaaacccatcccgggcacataccacccgtgttttgcatgtatttctcatttcattttagggatgacaaacatttgtgaaaccagtgagagaaggcttgatgtgtataaaagacgtgatgtgcaccacctcgatctcggtgtttcaggcactaaagcaacaaaacaacccatagtatctcattctgtcatcagatccagaagaaatatcctggttttccagcatgtttacccacatgttttggccatggataaagtgaagaggcctactcaccattatccctgcagcgtgacaccttttgattgtcactgaccactcagaaggggccacggcctcctggctgtgttcctgagcccccgtcgtgcctctcccagacagcagctgtctggcccttgctgggtgagggcacaccactgccaggggtcagcctcgcacccaggccaggcagaagctgtgctctgaagctaggacagctggctgagaagtgggttcaggcgaagggtgaagccatgtgtagcagttcctgccagtgcagatctggagaggagctggcccggaaggcgtggttgtgaaagcgcccttcttatgttaggaggccttggcaaaattggatttcttcaaaaatacatgtaaaggtctgttgttgaattgtactctgcccctggaagcagatacagatggctgcctgctgctcggctttgcttttgcttttcccaccgtgttttcatctttgttcacttgaggctttccccagctggtgtgtgcaggacagttcatggtaatgttgccctctgaggccccgtacaccagaagggaggccctggaaaattttgtgcttccaacgtggccttcaattcttgcttttttgcccctcggaagcatggggcttttgagcacacttaaaaaaagaaaaatctgtaacttggtgcttattgatgaattgcaagctggccttgcagatggagatatttatctttcagtttatttgaaagaggtctggtttaaaatttgtagcctacatttgttttatttattgtatttgtgtgtttgtgtttgtttttttttaagggtgagccaggtctagcccaacagtctaaactatccagtcaataccgagtgaagtggcagccagcactgttcactctgtgtcttttgaagtgccttgaaggcccagatgaaattttaaagggagggggtccatgtccttccctcccccaccccgcctcattctttaatcaaaggatgtcttctcccttgtttgagaatgaagaaactcgccacctctgacctacctttgcctttttctgtcatggagaatactcacccttcagaaacagaccaaaggccaaaacctgctgatttttctattgaaaatatgtccccttgcaaagaccctaaacaaaaagttaagtttctttctttcacctatttgtacaactccaagttacagctgaatctgtcgtgactttcctgagatctacccggggcttggctgtctgttctgggcactggctccgagttcccctcctgggatttgcaggagggcagtactgaacctgcattcttctccttgtaaatgtaggccgggtgcccctgttctccgggtttggaacaatacgaggttggtgctgatgggatttacttgcgtacgtgctcttcacaaaaacaccgtggatgctgaagttagagcacgtcgccacagagcttgacatcaatgttagagggtctcttactccccgcccagctgtgatgtttcatctgctttggttgttttggtggtcttttttaaaaatagagatttcacatctgcccagaccccactcaaaacgatttggtcaggttctggttggacaagtttaaaatcaaagtagtgcccggaattccctcaaaccacccaacttcatccaggaatacagtctgcagtgcagcaacagaaccgcttaccaagaactgtgcttacatacctttgtcatctctcttccccccttggaagttgtcctcagggggatttgttcctgtcctggggatttacctgggatggtggctgcctgtgcttttgctcatggccttgacagtgctctagttgctggatctaatggcctgtcttggtttctatcacatgagaaggggttgtttttttggggtgactcggactgaattccccatactgtttccacgccgggacaccatgttctccatcaagctaaagaaatcacgtgcctgaaactgtgcttaagttttgggggaaagatggagttcctatccagagcccccagatttccagaatcgagtgagcttcctggaaggagactgcgtcttctctcaattccagtcatctcagtcgttgtcgttaggtgacatgtgcactttaaatgctctcatcggttggcttcattttcaagacaatcaaatgtattgactgtgttttcttcttagaaaatggagagggttaaaaacatgcaaactgccactttcaacctttgccagtattccctctacccccgtgagagctatctggggggaagaatccttaccaaggtttttttggaaaggtacgaatcttaacttttttccccttctgtgtctcagggtaatactattcagagtcgcccctttgctcattttctcccgtatttgttaccttcctgaggcctcagtattagtcgtgagcacaaagttttgagacctttggcgttgtttcttgatgtgggaggggaggtgttagtgcatgcaagggttgaactagatagaccctgccttagtagagggtgggactataaccttagaggccagaacttgatccagaagttgctgtccacagaagtgctttctatttcatcatttttgtttctagggctctttttctgtagccaggtcttcccaaggattttagtatttgcattggagttgaggtttactctaatgatggtggcccagctgtgcccagaggacagccaggcaggccctgggagggagtttagaaagacagtcctggtgaatgggcttcaagtggtcacaaagagggtggctgtgaggtgaccccagacactgcagaacgatgtgcaccctctgcgttttggatgtccttggaatgtgggagcctagaaataaccctgtggatggaattggggcagcggctgctggagatctgtgtgccttgccttccttcagcaggaccgtctaggtgcgcagccacctatggatgcgtcccagccagccccgtcgctctcgtccatcctcagagacaaagaagagggcagggagtttgggcttggttttgaactttcctttcaatgtagcaaagcattcctagttaaccagagccttggaatctactgcctgctggccaggctttaaaatgaaaagtgttttaatgctgccataaaagggaggcgggggggaggaagggaaaataaaggcatctttccaagtactcatctaatttaattgtcaaaagattgataggccatgaattacttctccatctcactaagggttaaaggcgtgcaaccccccactggctgtgtcccctgccaccgaagtgagtgacctgccctacaaccaggtgggaccacctgtgctgcagtccggaggggcttctgcaggaagcactcaccccccacaccttccccggcctgagcttcccctacctttcgtcaccacctgagggcatgagcacaggccatggggcgtgcctggtgagtctgcctgtggttcaggcttagcctgtggtctcctgtgtgctgctgcccgcatgggatgcgcaggggaggcgtggggatccgcaggagggtggttgggatacaccggatacctctgctctcattgcttgtttgcaaatgctctatggacatttgtgtgctaaatcctattaaataaaaaagacgggttaaaacccagatgctgtatattcatttgtaattatgtataaagtgaagcagttttaaactgtaaagatttttttcagtgtgttttctcgaattttgccacaacatactggcttcgtattttatttatctttctttctagttaccagcttcagacccttgtaaagtctccctcagccctttcaaaaaataataaatttcctgtgaagtt

SEQ ID NO: 29820 - DNA, 2929 bp, Homo Sapiens
gcggcttgttgataatatggcggctggagctgcctgggcatcccgaggaggcggtggggcccactcccggaagaagggtcccttttcgcgctagtgcagcggcccctctggacccggaagtccgggccggttgctgaatgaggggagccgggccctccccgcgccagtccccccgcaccctccgtcccgacccgggccccgccatgtccttcttccggcggaaagtgaaaggcaaagaacaagagaagacctcagatgtgaagtccattaaagcttcaatatccgtacattccccacaaaaaagcactaaaaatcatgccttgctggaggctgcaggaccaagtcatgttgcaatcaatgccatttctgccaacatggactccttttcaagtagcaggacagccacacttaagaagcagccaagccacatggaggccgctcattttggtgacctgggcagatcttgtctggactaccagactcaagagaccaaatcaagcctttctaagacccttgaacaagtcttgcacgacactattgtcctcccttacttcattcaattcatggaacttcggcgaatggagcatttggtgaaattttggttagaggctgaaagttttcattcaacaacttggtcgcgaataagagcacacagtctaaacacagtgaagcagagctcactggctgagcctgtctctccatctaaaaagcatgaaactacagcgtcttttttaactgattctcttgataagagattggaggattctggctcagcacagttgtttatgactcattcagaaggaattgacctgaataatagaactaacagcactcagaatcacttgctgctttcccaggaatgtgacagtgcccattctctccgtcttgaaatggccagagcaggaactcaccaagtttccatggaaacccaagaatcttcctctacacttacagtagccagtagaaatagtcccgcttctccactaaaagaattgtcaggaaaactaatgaaaagtatagaacaagatgcagtgaatacttttaccaaatatatatctccagatgctgctaaaccaataccaattacagaagcaatgagaaatgacatcatagcaaggatttgtggagaagatggacaggtggatcccaactgtttcgttttggcacagtccatagtctttagtgcaatggagcaagagcactttagtgagtttctgcgaagtcaccatttctgtaaataccagattgaagtgctgaccagtggaactgtttacctggctgacattctcttctgtgagtcagccctcttttatttctctgagtacatggaaaaagaggatgcagtgaatatcttacaattctggttggcagcagataacttccagtctcagcttgctgccaaaaagggccaatatgatggacaggaggcacagaatgatgccatgattttatatgacaagtacttctccctccaagccacacatcctcttggatttgatgatgttgtacgattagaaattgaatccaatatctgcagggaaggtgggccactccccaactgtttcacaactccattacgtcaggcctggacaaccatggagaaggtctttttgcctggctttttgtccagcaatctttattataaatatttgaatgatctcatccattcggttcgaggagatgaatttctgggcgggaacgtgtcgctgactgctcctggctctgttggccctcctgatgagtctcacccagggagttctgacagctctgcgtctcagtccagtgtgaaaaaagccagtattaaaatactgaaaaattttgatgaagcgataattgtggatgcggcaagtctggatccagaatctttatatcaacggacatatgccgggaagatgacatttggaagagtcagtgacttggggcaattcatccgagaatctgagcctgaacctgatgtaaggaaatcaaaaggatccatgttctcacaagctatgaagaaatgggtgcaaggaaatactgatgaggcccaggaagagctagcttggaagattgctaaaatgatagtcagtgacattatgcagcaggctcagtatgatcaaccgttagagaaatctacaaagttatgactcaaaacttgagataaaggaaatctgcttgtgaaaaataagagaacttttttcccttggttggattcttcaacacagccaatgaaaacagcactatatttctgatctgtcactgttgtttccaggagagaatgggagacaatcctagacttccaccataatgcagttacctgtaggcataattgatgcacatgatgttcacacagtgagagtcttaaagatacaaaatggtattgtttacattactagaaaattattagttttccaatggcaataacccatttatgagagtgttttagcctactggaatagacagggaccacatcctctgggaagcagataagcatagaactgatacttgatgcacactcgtagtggtaactcatccctaatcagcattgtaaagcaggtgccagaggtggtttgctttgtccttccaaagcaggtgagtcagccccaccgagagccaggcagctttgagtggcagcgtggtgctagcagcttcagcggaacagggtgagagttaattatgcagtcttcttgacagcggcattaatttggaaggaaactgacaagtcatgggtcaagtttcagtgacttcctccttcctctgatggcagtatatagttttcacattttaattcctcctcctgagatgcactatacttaaaaccattctctcccctgctaacagaagggtgtgaatctggtttactttgagcattaggatttgcccctttggaattctgcactccagttacttaactttcccttcagaatacatgtggaaaaaaaaaaaaaaa

SEQ ID NO: 29821 - DNA, 3449 bp, Homo Sapiens
ccgagaggcggggcggtgcccccaccgcaggcccgcggcgccctctgcaggccacaggcagcgactcaccagttgcctcatctttcctctcctccctcttggggctttcctcaggccacattttttgtgtgtctgggcagtctctcagcctccgactcccgtccctttcttccacttccaggccgggcgtgttagtgtcttcgcgggaaaactgccaataaagtttttcttcttctcgctcccaagatccccgcctccccttaagcaccgcgagatctgacggcgcggctaccatggcggcggcatttgaagcctcgggagccttagcagcagtggcgactgctatgccggctgagcatgtggccgtgcaggtcccggccccagagccaacacccgggcctgtgaggatcctgcggaccgctcaggatctcagcagcccgcggacccgcacgggggatgtgctgttggcggagccggccgacttcgagtcactgctgctttcgcggccggtgctggaggggctgcgggcggccggcttcgagaggccctcgccggtgcagctcaaggccatcccgttggggcgctgcgggctcgatttaattgttcaagctaaatctggcaccgggaaaacctgtgtgttctccaccatagctttggactctcttgttcttgaaaacttaagtacccagattttgatcttggctcctacaagagaaattgctgtacagatacattctgttattacagccattggaataaaaatggaaggcttagagtgtcatgtctttattggagggaccccattatcacaagacaaaaccagacttaaaaagtgtcatattgctgttggatctcctggcagaattaagcaactcatagaacttgactacttgaacccaggcagtatacgcctctttattcttgatgaagcagataagcttttagaagaaggcagcttccaggagcaaataaattggatttattcttccttgcctgccagtaaacagatgctggcagtatcagctacttatcccgaatttttggctaatgctttgacaaagtacatgagagatcccacttttgtaagactgaattccagtgatccaagtctcataggtttgaagcagtattacaaagttgtcaattcataccctttggcacataaggtttttgaggaaaagactcagcatttacaggaactgttcagcagaattccatttaatcaagctttagtcttttctaatttgcacagcagagcacaacatttggctgatatcctttcttctaaaggctttcctgctgagtgcatttcaggcaatatgaatcagaatcagcgtcttgatgctatggctaaactgaagcactttcattgcagagtcctcatttccacagatttgacttctcgtgggattgatgctgagaaggtgaatctggttgtaaatctggatgtaccattggattgggagacatacatgcatcggattgggagagctggccgttttggtacattggggctgacagtgacctactgttgccggggagaggaagaaaatatgatgatgagaattgcccagaaatgtaatatcaaccttctccctttaccagatcccattccttctggtctgatggaagaatgtgtggattgggatgtggaagttaaagctgctgtgcatacatatggtatagcaagtgtacctaaccaacccttaaaaaagcaaattcagaaaatagagagaacccttcaaattcagaaagctcatggtgaccacatggcttcctctagaaataattctgtatctggactatcagtcaaatcaaaaaataataccaaacaaaagcttcctgtgaaaagccactcagaatgtggaatcatagaaaaagcaacgtcaccaaaagaactgggctgtgacaggcaatccgaagagcaaatgaagaattctgttcagactcccgttgaaaactccaccaacagtcagcaccaggtcaaagaagctttacctgtgtcactcccccagattccttgtctgtcttcctttaaaatccatcagccatacacgttgacttttgctgaattggtagaggattatgaacattatattaaagaggggttagagaaacctgtggaaatcatcaggcactacacaggccctggggatcagactgtgaatcctcaaaatggttttgtgagaaataaagttattgaacagaaagtccctgtgttggcaagtagtagccaatctggagactctgagagtgacagtgattcttacagctcaagaacctcttcccagagcaaaggaaataagtcatacttggaaggctcttctgataatcagctgaaagactctgaatctacgcctgtggatgatcgtatttctttggaacaaccaccaaatggaagtgacacccccaatccagagaaatatcaagaatcacctggaatccagatgaagacaagacttaaagagggggctagccagagagctaagcagagccggagaaacctacccaggcggtcttccttcagattgcagactgaagcccaggaagatgattggtatgactgtcatagggaaatacgtctgagtttttctgatacctatcaggattatgaggagtactggagagcttactacagggcatggcaagaatattatgctgccgcttctcattcatattattggaatgctcagagacatccaagttggatggcagcttatcacatgaataccatttatctacaagaaatgatgcatagtaaccagtgattataggatatacctgagaccatcaggaactgtcaacaaatgatacctttggatatccatcctcctcgacttatagtacagtggtgtatagtggcatttctgataaacttgaaaagacttgagtctttccactgggacacatccatttttcagattgttttgatttaggccaggtatattatcttcatttttaagagtttctttaagaaacttcatcagattgttgaaagataatttttgggacatagagctgaaagtttcagggtgccattttctataagatcttcccaaaagaaacatttaaaaagatgacatataccaccacttacttaaaaacaataaaagcaatagatttgattagtaatattattgctgtggagttctttacaaagggcttaggctgcatttccttctatagaggtgcattcttgtagaaatttgtagcatggtagatcagaaaatcctcttaggttttaggcaggaaggaatatttaaacattgctttagattttcctaaaggtatttgatttgatctgttagcttccagtaaaaatatttgtttttagtaaaaacaaatttaaatatatttacatgtttgttgtttatcttttgaatgtcttttgaggctgtgaaagctgtccacatttttgctgtgtattaaatagctgtgggtcatcaaaa

SEQ ID NO: 29822 - DNA, 3550 bp, Homo Sapiens
cgcctccgcccctcgctcgctcgctccttcccgccctccccgcagcgccggccgagccggcttcccctcagtctctcatgaatattgagcggcccctgttgtatttcccgagctccattgcggaagctgaggctcgccatattgtgcggcggcgccggcgtccgcggcagctgataccagagtcttgctccggccgcggccagcggagccctgggctggggcaggagccgcaatgtctcaggctgtgcagacaaacggaactcaaccattaagcaaaacatgggaactcagtttatatgagttacaacgaacacctcaggaggcaataacagatggcttagaaattgtggtttcacctcgaagtctacacagtgaattaatgtgcccaatttgtttggatatgttgaagaacaccatgactacaaaggagtgtttacatcgtttttgtgcagactgcatcatcacagcccttagaagtggcaacaaagaatgtcctacctgtcggaaaaaactagtttccaaaagatcactaaggccagacccaaactttgatgcactcatcagcaaaatttatccaagtcgtgatgagtatgaagctcatcaagagagagtattagccaggatcaacaagcacaataatcagcaagcactcagtcacagcattgaggaaggactgaagatacaggccatgaacagactgcagcgaggcaagaaacaacagattgaaaatggtagtggagcagaagataatggtgacagttcacactgcagtaatgcatccacacatagcaatcaggaagcaggccctagtaacaaacggaccaaaacatctgatgattctgggctagagcttgataataacaatgcagcaatggcaattgatccagtaatggatggtgctagtgaaattgaattagtattcaggcctcatcccacacttatggaaaaagatgacagtgcacagacgagatacataaagacttctggtaacgccactgttgatcacttatccaagtatctggctgtgaggttagctttagaagaacttcgaagcaaaggtgaatcaaaccagatgaaccttgatacagccagtgagaagcagtataccatttatatagcaacagccagtggccagttcactgtattaaatggctctttttctttggaattggtcagtgagaaatactggaaagtgaacaaacccatggaactttattacgcacctacaaaggagcacaaatgagcctttaaaaaccaattctgagactgaacttttttatagcctatttctttaatattaaagatgtactggcattacttttatggacagatcttggatatgttgttcaattttctttctgagccagactagtttacgctattcaaatcttttcccctttatttaagatttcctttttggaagggactgcaattattcagtatttttttctttcctttaaaaaaatatatctgaagtttcttgtgtttttttttttccccacaaagtgtgtttccacttggagcaccattttgacccaggaatttttcatagtttctgtattcttataagattcagttggctgtccttttcctgctcccctcaaaagatttttagtcatacagaatgttaaatattatgtattctgactttttttttcccccggagtcttgtatatttatagttttctatataaactgtagtatcttcatgaagacccaaggctcaaatttactgtccttaaaaacaattctcataggattattcttttcatggtattttcttccataatatctcattttaaaaagaagttctttatgaacttagtgtccattgtcatgcaatgtttttttttttccattctttttccctgtaattttggaatttctggtcctgggaagaatcaaacaaaatcttaagttctatgagaacttggttcattgacatattctgctgaagaaagaaaaattaaattggtagtaaaatatagtcttcaagtatacgtttgagagtgcttttttttgtattagttctgctgtcacttcatttcctgtattatatgtgatgtttttccccattaaaataccagagataatggagatattttgcactttagccttgatgaaaagtacaagatatgttcaaagcttccctaatttttttcttatttgtagccacataagtttcaagaataacatggcacacagaacaatggaaaaaagtttgtttccattggaaaattatatcattttgggttgccacatcagtttataaatttggcgctcttttaattacactctgtagaaggttaatagagcttgagccctgctttaatatgtagtgaaagataattctgtagaaaaacgtcagccagtagggtaaagtcattctactgttcttaatttttatattgaggaacaatattgggtgtttgggagccagaaagctttgttgacagatcagaaataagattgacttgggtgttatatttcatctctctccagactctaggtatatttccaactttatatatcacagtatttaaaaagacatgtttgcattgagaaattaaccctaaagggttttcaatagggtgtagacctccagtacctttgtaactaaagtctgtctagtcattgtaaatatttatctgtcagttttgacagattggggccagcttgatgttttaaatcttcagcccggtatgaaaacttaaaggtatatattcaattttttaccattttatggaaaatatttaaaatctgtttttacagggttttttttttttttttttttttgtaatctgtgccatgaaatttgaaaaccaccaaaaatcaagggaacttttatatattcaattccttttctggtgtaatgttaaagttgtatagattattaatgcatgcccactgaatataaccctggttttgtgataaaactgcttagattttgttgatgacattagattagtagttgcattaaataactaaattcccattgtgattaattgaaattttgtctttaagcagagagttatttgtgactataagctttgtgcttagagaatgtatgtgtttttatctgtcagtatgggaggatataaactgcatcattagtgaaattattggttgtgtaatcctttgtgaaatataattctaggtatttgatagggtattgagtgtattttgtgtgtgtgtggatgtgtgttttggggtacggggagaggcgatgctattggccatcactaccaaccagggtttcaaaaagtattacctaagtaatttcttttatcactatctcaactgaggaagaaaaggctcaccacaagtggtgtgaaggctttgggtacttagttctaaatttttttatggtaacatatacatagccacatttacagttttaaccattttaaggcatgtaattcagtggggttaggtacattcacaatgttgtgtaatgatcaccgctgtctacttgtaaaactttttcatcaccccaaacagaaactctgtgtgcaattaaagtaatgcatttctcttcttcttaacccct

SEQ ID NO: 29823 - DNA, 4929 bp, Homo Sapiens; identical to SEQ ID NO: 27298

SEQ ID NO: 29824 - DNA, 1904 bp, Homo Sapiens
gcgccggctccgcgcctcgcgcccagtccgcgggccgcgccgccgctcccgccgctcccgccgctcccgcagccgccccgccgcccgcccggagccccgcgtccctaggcctggctcccgcctgcccgagacccgcccagcctgccccgctcagccgccagagaagatgcggctgctcccggaatggttcctcttgctctttggcccgtggctccttaggaaggccgtcagtgcccagataccagagtccggaaggccgcagtacctggggctgcgccccgccgcggccggagcgggtgcccccggccagcagctcccagagccaaggtcttcggacggcctaggcgtgggccgcgcctggagctgggcctggccgaccaaccacacgggggcgctggcccgggcaggggcagccggggcgttgcccgcgcagcgcaccaagaggaagccgtccatcaaggcggcgcgcgccaaaaagatcttcggctggggggacttctactttcgggtgcataccctcaagttttcgctgctggtgaccggcaagatcgtggaccatgtgaacggtaccttcagtgtgtatttccgccacaactcgtccagcctgggcaacctcagtgtcagcatcgtgccgccctccaagcgtgtcgagttcggaggagtctggctgcccgggcctgtcccccaccctctgcagtctacgctcgccctggagggggtgcttcctgggctggggcccccgctggggatggcagcagcagcggcggggccggggcttgggggctccctcgggggcgcactggcggggccgcttgggggcgcgttgggagtgcctggggccaaagagtcacgcgctttcaattgccacgtggagtatgagaagacaaaccgcgcgcgcaagcaccgaccgtgcctgtacgacccgtcgcaggtgtgtttcaccgagcacacgcagagccaggccgcctggctctgtgccaagcccttcaaagtcatctgtatcttcgtctctttcctcagctttgactacaaactggtgcagaaggtgtgcccagactataacttccagagtgagcacccctacttcggatagcgcccctccccagccagtcctgagcctcccgccaaatcccagcctcactaggtgggacccccttcccagtgttctgccgctcctgtggccatgtcgcccactccttccactctgggggcggaggggaatggcttctcgggaccctcagctagcgtgggtgcccttttccttatgcggagtgcccgcaaggctggggtagccccctccagtacaccccaaagtgaaagggataagagtgcagccccagaataggcggggcttggaggcggtcccaatgtcccctgggtccacagtgggtccccttttcacccttggcgctaggctgcgcactccctttccccgcagctttaataactcctggcctggcaccctcaccccaccctgactttcccatcccccagcgcttgtcctgcttcaccataccccgcctaagactgtaaaggcctaaaaacctcggcctgtcctcccaccattctgcctgccatatgcctgtccccttttcctccaaaccctattagggtaccggaagcagaacccctgggctgaggccctggccctgcccccggcccctgcccctgcccgcccccctccagtccaggcagtcgagctccacctgccctctcctgctgcttcctctcggtgatattttttctacgccaaaacagacgggaaagggaacaaaataaagtgaaatcccaaaaaaaaaaaaaaaaaaaaaaaaaaaaaaaaaaaaaaaaaaaaaaaaaaaaaaaaaaaaaaaaaaaaaaaaaaaaaaaaaaaaaaaaaaaaaaaaaaaaaaaaaaaaaaaaaa

SEQ ID NO: 29825 - DNA, 1799 bp, Homo Sapiens
cggctccgcgcctcgcgcccagtccgcgggccgcgccgccgctcccgccgctcccgccgctcccgccgctcccgcagccgccccgccgcccgcccggagccccgcgtccctaggcctggctcccgcctgcccgagacccgcccagcctgccccgctcagccgccagagaagatgcggctgctcccggaatggttcctcttgctctttggcccgtggctccttaggaaggccgtcagtgcccagataccagagtccggaaggccgcagtacctggggctgcgccccgccgcggccggagcgggtgcccccggccagcagctcccagagccaaggtcttcggacggcctaggcgtgggccgcgcctggagctgggcctggccgaccaaccacacgggggcgctggcccgggcaggggcagccggggcgttgcccgcgcagcgcaccaagaggaagccgtccatcaaggcggcgcgcgccaaaaagatcttcggctggggggacttctactttcgggtgcataccctcaagttttcgctgctggtgaccggcaagatcgtggaccatgtgaacggtaccttcagtgtgtatttccgccacaactcgtccagcctgggcaacctcagtgtcagcatcgtgccgccctccaagcgtgtcgagttcggaggagtctggctgcccgggcctgtcccccaccctctgcagtctacgctcgccctggagggggtgcttcctgggctggggcccccgctggggatggcagcagcagcggcggggcccgggcttgggggctccctcgggggcgcactggcggggccgcttgggggcgcgttgggagtgcctggggccaaagagtcacgcgctttcaattgccacgtggagtatgagaagacaaaccgcgcgcgcaagcaccgaccgtgcctgtacgacccgtcgcaggtgtgcttcaccgagcacacgcagagccaggccgcctggctctgtgccaagcccttcaaagtcatctgtatcttcgtctctttcctcagctttgactacaaactggtgcagaaggtgtgcccagactataacttccagagtgagcacccctacttcggatagcgcccctccccagccagtcctgagcctcccgccaaatcccagcctcactaggtgggacccccttcccagtgttctgccgctcctgtggccatgtcgcccactccttccactctgggggcggaggggaatggcttctcgggaccctcagctagcgtgggtgcccttttccttatgcggagtgcccgcaaggctggggtagccccctccagtacaccccaaagtgaaagggataagagtgcagccccagaataggcggggcttggaggcggtcccaatgtcccctgggtccacagtgggtccccttttcacccttggcgctaggctgcgcactccctttccccgcagctttaataactcctggcctggcaccctcaccccaccctgactttcccatcccccagcgcttgtcctgcttcaccctaccccgcctaagactgtaaaggcctaaaaacctcggcctgtcctcccaccattctgcctgccatatgcctgtccccttttcctccaaaccctattagggtaccggaagcagaacccctgggctgaggccctggccctgcccccggcccctgcccctgcccgcccccctccagtccaggcagtcgagctccacctgccctctcctgctgcttcctctcggtgatattttttctacgccaaaacagacgggaaagggaacaaaataaagtgaaatccaatac

SEQ ID NO: 29826 - DNA, 4520 bp, Homo Sapiens
taggaacaggggagagtgcacctgctaccagtcaagctcagccagactgcaagaggaggcgaggcggagccagccgagggagtgaaccatggacaagttgaaatgcccgagtttcttcaagtgcagggagaaggagaaagtgtcggcttcatcagagaatttccatgttggtgaaaatgatgagaatcaggaccgtggtaactggtccaaaaaatcggattatcttctatctatgattggatacgcagtgggattaggaaatgtgtggagatttccatatctgacctacagcaatggtggaggcgccttcttgataccttatgcaattatgttagcattggctggtttacctttgttctttctggagtgttcactgggacaatttgctagcttaggtccagtttcagtttggaggattcttccattgtttcaaggtgtgggaattacaatggtcctgatctccatttttgtgacaatctattacaatgtcataattgcctatagtctttactacatgtttgcttcttttcaaagtgaactaccatggaaaaattgttcttcgtggtcagataaaaactgtagcagatcaccaatagtaactcactgtaatgtgagtacagtgaataaaggaatacaagagatcatccaaatgaataaaagctgggtagacatcaacaattttacctgcatcaacggcagtgaaatttatcagccagggcagcttcccagtgaacaatattggaataaagtggcgctccaacggtcaagtggaatgaatgagactggagtaattgtttggtatttagcactttgtcttcttctggcttggctcatagttggagcagcactatttaaaggaatcaaatcgtctggcaaggtggtatattttacagctcttttcccctatgtggtcctactcatcctgttagtacgaggtgcaactctggagggtgcttcaaaaggcatttcatactatattggagcccagtcaaattttacaaaacttaaggaagctgaggtatggaaagatgctgccactcagatattttactccctttcagtggcttggggtggcttagttgctctatcatcttacaataagttcaaaaacaactgcttctctgatgccattgtggtttgtttgacaaactgtctcactagcgtgtttgctggatttgctattttttctatattgggacacatggcccatatatctggaaaggaagtttctcaagttgtaaaatcaggttttgatttggcattcattgcctatccagaggctctagcccaactcccaggtggtccattttggtccatattattttttttcatgcttttaactttgggtctcgattctcagtttgcttcgattgaaacgatcacaacaacaattcaagatttatttcccaaagtgatgaagaaaatgagggttcccataactttgggctgctgcttggttttgtttctccttggtctcgtctgtgtgactcaggctggaatttactgggttcatctgattgaccacttctgtgctggatggggcattttaattgcagctatactggagctagttggaatcatctggatttatggagggaacagattcattgaggatacagaaatgatgattggagcaaagaggtggatattctggctatggtggagagcttgctggtttgtaattacgcctatccttttgattgcaatatttatctggtcattggtgcaatttcatagacctaattatggcgcaattccataccctgactggggagttgctttaggctggtgtatgattgttttctgcattatttggataccaattatggctatcataaaaataattcaggctaaaggaaacatctttcaacgccttataagttgctgcagaccagcttctaactggggtccatacctggaacaacatcgtggggaaagatataaagacatggtagatcctaaaaaagaggctgaccatgaaatacctactgttagtggcagcagaaaaccggaatgagatctcattgaaaaaaatatatgattgtataatgtgattttttttagaatagggggaaccttatttatttgtgtgttaactgaataggaaaatgtacatactatgttcatgatagtgtgatttttttcacatttaagcaggaatgcaatataaaaatgtgaatctcttaattctcagccatgtgcttattatatttctttttagattgtctatctgtataacacacacacacacacctaagagtctctatttcacaattatatttttgtaaatagtatatgcatttttaatacattggaggctttattttgaactaatttcttagagaatagttatattttctattacacaagtttaaaaatattattaacttgtattttcttaatatacaatctatcttttccacaaatatgagtgggaaataaatcagcacatttgaaagaaagtgttaaaactgaaggcctcacttaattagaaacgtgataaatatatggacaaatggactatacatactataagaggactgtagtttaatactttttacccaaatatgtttaaaaacatcgtgcatttgttacagctcatgttttctatatgaacttagtcattaatgttctttataaaaagtgaaataagatggaaaaattaggatcctacagccagtacgtgataaatctagaaaattgagttttgagtacctcttttcccatatacaatcttccttccttaggtaatttggaagaaaactatgacccatttaatttctattgtgtttcaccaaattcagtgttgttcattatacctctctgaaatataggtttaatttcaaatagaatatggacttaaatgttaatgagaaactggctttaatcaattctagcattttattactgtaatacagggctgatagagtgattttgtcttatatgagtcagttactacttacaggtgataacttgcatactattggaagataaagttgtcaaacttgtcaagaatgagaaaagccaaattagaaaatcctatgtcctagtttccttaccaaggataattaaatatatcactaagagctttatatattgattatatattgttgacaactggtttaagcatcatagcctatgatgataaacactgcctatatatgtaaatagcttttcatcaattcttaaatttcttaacctaggcttcagggagcatatgaaaccaaaattatatggaacattttctgtgtgtacatgtacatgcatttttctagggagagagtccgtaggtttatcagaatatcaaggaaaactgtgacccaaagaagtttaagaatcacatacagtgctgctggctttttgtgcttggcaaatgagtgacaatagaagaaataatttttcttacacattttaaaacgttttctcttccttgtgattgaagatgaaaggagtaagaaattaaggcatttgtttaatttatactggtaacttatttaggggggaggggacatgaaggtaggtaaataggtaggcctctaattgaaccacctctctaagttatgtacgtatatataagctgaaattgtgtttgacattctgagggttttctttttctttttcctttttttttttttttggtggggggctgggggtcagagtcttgttctgttgcctgggctggagtgcagtggcatgatctcagctcactgcaacctctgccttctggattcaagtgattctcctgcctcagcctcttgagtagctgggactacaggtgcccgccaccacaccagctaatttttgtatttttagtagaggcgaagtttccccatgttggccaggctggtcttgaactcccgacctcaagtgatctgtctacctcggcctcctaaagtgctgagattacaggtgtgagccaccgtgcccggcccattctaagggttttctttgaagacaggtcaaatgctgttagtaagtttcaggagattgttaattcctcagttataccagattttataaaatatttgagaatagatggctaacaagaggttagaaatacttttccttaattttaatccacagtatgttacatgcattctaccactacattttggtgctatttaaggtgtgcaattttctataggtgacttttgcaattcagggaagatttgggcatattaaatgaaagaatatctaattgggggaggtgtgaagggaaagaaattcttttcaaaagctgaccacaaagagtagttaaaagtttttgtcactatcttcacaagtgtgtaaagcacagatttcaacagagtgcttggcatattgtagggtgctcaatggtggtttttattattattactcagattccacagtggcaagaaacatcattctacataatggaaaacatttacatcaaatcccacttactttaatgcgaacttggagataatttatggtattgtattgtaaaccattaatgaaaactttttcacagttgagtgaaattaaaatcactatatctc

SEQ ID NO: 29827 - DNA, 3159 bp, Homo Sapiens
gctgccgccccgcactcgggcgagcgcgggagccgcacagtagacggagcgcgcccggccgagcgggccatggccgcgggggccgccgccgcaggtggtggcgcgcggtgaggagagcgcggcgccccctccggggcggatggaacgcggctcggcgggcgggcagtgccggcgtccgcggctggaatggtgctggctgtgttggtcggtgcctgcgttctgaagcccgagaggagccacaatggagacgccgccgctgcctcccgcatgcacaaagcagggtcatcagaagcctctcgattcaaaagatgataataccgaaaaacactgcccagtgacagtgaatccttggcatatgaagaaagctttcaaagtcatgaacgaattaagaagtcaaaatttgctgtgcgatgtcacaattgtggcagaagacatggaaatttctgctcatagagtggtgctggccgcctgtagtccttattttcatgccatgtttacaggtgagatgagtgagagccgagcaaagagagttagaataaaagaggtagatggctggaccctgaggatgctaattgattatgtttacactgcagaaattcaggttacagaagaaaatgtacaggtacttctcccagcagctggtctcttacagttacaggatgtgaagaagacttgttgtgaatttttggaatcccagcttcaccctgtcaactgcttaggaatccgggcttttgctgatatgcatgcatgtactgaccttctgaacaaggccaacacctatgcagagcaacattttgcagatgttgtacttagtgaagaatttctcaatcttggcatcgaacaagtgtgcagcttaatctcaagtgacaaacttaccatttcttcagaagagaaggtatttgaagcagtaatagcatgggtgaaccatgacaaggatgtgaggcaagagtttatggcccgactgatggaacatgtacggttacctttgcttcctcgggaatatttagttcagagggttgaagaggaagcattggtcaagaatagcagtgcttgcaaagattacctcattgaagcaatgaagtaccatttgctgccaacagagcagcgtatattaatgaagagtgtccggacccggctgaggacacccatgaaccttcccaaattgatggtggtggttgggggccaagcaccaaaggctatccggagtgtggaatgctatgactttaaagaagaaaggtggcaccaagtagcagagttgccttccaggaggtgcagggcaggcatggtctacatggctggacttgtttttgctgttggtggctttaatggctcattaagagttcgcactgtagattcctacgaccctgtgaaggaccagtggaccagcgttgctaacatgagagaccggagaagcactttgggagctgctgtgttaaatggattattatacgctgtgggaggctttgatgggagtacaggtttgtcatctgtggaagcatacaacataaagtctaatgagtggtttcatgtagctcccatgaatacaaggaggagcagtgttggtgtgggtgttgttggaggtttgctctatgctgtaggaggttatgatgtagcatcacgtcagtgtcttagcacagtagaatgctataatgctacaacaaatgagtggacctatatagcagaaatgagcaccaggcggagtggagcaggtgttggtgtgttaaacaatttattgtatgctgtaggaggtcatgatggccctttagtacgaaaaagtgttgaagtatatgatcccaccactaacgcatggagacaggttgcagatatgaacatgtgcagaagaaatgcaggagtttgtgcagttaatggtctgttatatgttgttggaggggatgatggttcctgtaacttggcgtcagtagaatattataacccaacaaccgataaatggacagttgtgtcatcgtgtatgagcacagggagaagttatgcaggggtcacagttattgataaacgattatgagcctgaaggacattttcagcatatttatacatgagaaacagccttcaacaagtatttgtgaagtgactgagaatctagcacttctccacttgtagctgcactttaagtctcagcagaagatacgatcgtctgcctttataggcctcagatactgaagattatttttggtagaagcaccgtgtaggctttttctgcaatgagcagcagctgactgaattttcataagaaacttggactgcaggacttaatctgtagtctttagacaacagttgctttcataaagactagttcttatcaaccttgaatgactacagattattttgtgaaggaggatgaagtaatgtgtgttcttgtaaaattaaattttatctttatttcttctaaaaatctgtataccaggaactgaaaatctttgaacagatattaaaatctacgtaagtatacaaactagttgagggatacactgtttgcttttataaaataactttgattacatgaatataataaattatgtgcatataaatgtgtgtctatatgctttcctttaaatatgtttgaaaagatgtttgaaacttgattatactatttataattggcacagtactttgaattatgccagtactacattgtaaaacagagttgtattttttgatatttaacaatgcttaacactttaaatgccacttctgaggaatggacctggtgtaacacacttgaatatgtgtgatgccaaactttttaaaatacaatataagttatgcttatttattattttctttagtttaatcttggtcatgttttggtgtgtatttttaatttttttcttaaattaacactttggcatgaacattactgcaggtttttgatgaatataatgaatgtatggaattcaattgaatttgcatggtcttcggaattttttctgtgtgtataaatttagctgctattaacagaagagagaactttctgtgagtagccatgtgtgttgatcagatacagtttttctgagatcttcaattaatctcactttaaaaatgaccaaaacatgtctttcttgaattaactttgaataaaagtttgtatattaaaaaaaaaaaaaaaaaaaaaaaaaaaaaaaaagaaaaaaaaaaaaaaaa

SEQ ID NO: 29828 - DNA, 5114 bp, Homo Sapiens
gataaggtggcggcggcgaaggcagcggcaggtcgggagcaagatggcgctgcggccaggagctggttctggtggcggcggggccgcgggagctggcgcggggtccgccgggggaggcggcttcatgtttcctgttgcaggtgggataagaccccctcaagcaggcctgatgccgatgcagcaacaaggatttcctatggtctctgtcatgcagcctaatatgcaaggcattatgggaatgaattacagctctcagatgtcccaaggacctattgctatgcaggcaggaataccaatgggaccaatgccagcagcgggaatgccttacctaggacaagcacccttcctgggcatgcgtcctccaggcccacagtacactccagacatgcagaagcagtttgccgaagagcagcagaaacgatttgaacagcagcaaaaactcttagaagaagaaagaaaaagacgccagtttgaagagcagaagcaaaagctcagacttttgagcagtgtgaaacccaagacaggagagaagagtagagatgatgctttggaagccataaaaggaaatttagatgggttttccagagatgcaaaaatgcaccctactccagcatcgcaccccaagaaaccaggcccttccttggaggagaagttcctagtatcttgtgatataagtacatctgggcaggaacaaattaaattaaatacttctgaagttggccacaaagccctaggcccaggttccagtaagaagtatcccagtttaatggccagtaacggggttgctgtagatggatgtgtaagtggtaccaccactgcagaggcagaaaatacttcagatcaaaacctgtcaattgaagagagtggtgtgggagtatttccctcacaggatcctgctcagcccagaatgcctccttggatttacaatgagagtttggttccagatgcctataagaaaatcttagaaaccacaatgactccaactggaatagatactgccaaactgtatcccattctgatgtcatctgggcttcccagggaaactcttggacagatatgggccttagctaatcgaactacacctggcaaacttacaaaagaagaactttataccgttctagccatgatagcggtaacacagaggggcgttcctgcaatgagtcctgatgctttaaaccagttcccagcagctcctattccaactttaagtggcttttctatgactctgcctacaccggtgagtcagccaactgtgataccttcaggtcctgcgggctccatgcccctcagccttggacagccagtcatgggcattaaccttgttggaccagtgggtggagctgcagcccaggcttctagtggtttcataccaacctaccctgcaaatcaggtagtaaagccagaagaagatgacttccaggattttcaagatgcttctaagtcaggatcccttgatgactcattcagtgatttccaagagttgcctgcttcttcaaaaacaagtaactcccagcatggaaacagtgccccttctttgttgatgccacttcctggaactaaagcattgccttcaatggacaaatatgctgtgtttaaaggaattgcagctgacaagtcctctgaaaatactgttccacctggagatcctggtgataaatatagtgctttcagagaacttgaacagacagcagagaataaacctttaggagaaagctttgcagaattcagatctgcaggaactgatgatggtttcaccgattttaaaacagccgatagtgtatcaccactagagccaccaacaaaagacaaaacttttccaccatccttcccctcaggaactatacaacagaaacaacaaacacaagtgaaaaaccctctgaacttagcagacctagatatgttttcctcagttaattgcagcagcgagaaaccattgtctttttcagctgtgtttagcacatcaaaatcagtttctacaccacagtcaacaggttctgctgctactatgacagcattggcagcaacaaaaacttctagtttggctgatgattttggagaattcagcctttttggggaatattctggtctagcacctgttggggagcaggatgactttgcagattttatggctttcagtaatagctctatttcatctgagcaaaagccggatgacaaatatgatgcccttaaagaggaagccagtcctgttcctctaaccagcaacgtgggcagcacagtgaagggtggacaaaactcgactgctgcgtctaccaagtacgatgtcttcagacaactttctctggaagggtctggactaggtgttgaagacctgaaagataacactccttcaggaaaaagtgatgatgattttgctgacttccactccagtaaattttcttccataaactcggacaaatccctgggagagaaagcagtggctttcagacacaccaaagaagactctgcatcagtgaagtccttagatctcccttccattggtggcagcagtgttggcaaggaggactctgaagatgcactctctgttcagtttgacatgaaattggctgatgtgggaggagatcttaagcatgtcatgtctgatagctctttggatttaccaacagttagtggccagcatcctcctgctgcagatatagaggacttaaaatatgctgcttttggaagctacagtagcaattttgcagtgagcacacttacaagctatgactggtcagacagggatgatgcaactcagggcagaaaactctctccatttgtcctctcagcaggaagtggatccccctcagccacctcaattcttcaaaagaaagagacttcatttggcagttctgaaaacatcaccatgacatctctctccaaagtaacgacctttgtaagtgaagatgctcttccagagaccaccttcccagctcttgccagttttaaagacacgattcctcagaccagtgagcaaaaggaatatgaaaacagagactataaagatttcacaaaacaggacctgcctacggctgaacggagccaggaggccacgtgtcccagcccagcgtccagtggtgcctctcaagaaaccccgaacgaatgttcggatgactttggagagtttcaaagtgaaaagcccaaaatcagcaaatttgacttcttagtagccacttcacaaagcaaaatgaaatccagtgaagaaatgatcaaaagtgagctggcaacctttgacctttctgttcaaggatcacacaagaggagtttgagccttggtgataaagaaataagccgttcttctccttctccagctttggagcagcctttcagagaccgttccaatactctgaatgagaagcccgccctgcccgtcatccgagacaagtacaaagacctgacgggagaggtggaggaaaatgagagatatgcatatgaatggcagagatgcctggggagtgccctgaatgtcattaagaaggcaaatgataccttaaatggaatcagtagtagttctgtttgcacagaagtaattcagtcagctcaaggcatggaatatttattaggtgttgttgaagtgtacagggtaaccaagcgtgtggagctggggataaaagccactgcagtgtgcagtgagaaactccagcagttgctgaaggacatcgataaagtatggaataacctaatcggcttcatgtcactcgccacactcacaccagatgaaaactcgctggatttttcctcctgtatgttacggcctgggattaaaaatgctcaggagcttgcctgtggagtgtgcctcttgaatgtggactcgaggagccggaaagaagagaagcctgcagaagaacatcctaaaaaagcattcaactcagaaacagacagtttcaagctggcctatggagggcaccagtatcacgccagctgtgccaacttctggatcaactgtgtcgaaccaaagcctcctggcctcgtcctgcctgacctgctctgaacaactcctctgtgaagcattgacttttttttttctgtgacaccccacggggtgacagggaccaataaatagaatgcgagcactgcacagttcgcttccctgaatcgatatgaagaacaccgcaagggacggggcccccgtcatccccacggccagtctgcaggacttcaggtaaaattgtcccacccaaactgcacgtggcaccagaagcttgctcacttatctctacttaagattttctgaaatacggaccacggctttcttgatctaaggaagaacttgctgctgcagtattgaaactgtgaagaactgacatttgaagaaaaatagattaccgttgcgggactagaatgggcgactgcttggagccagtgcttgtttttatctaggacacttactgtcctgtgaagtagaatacatttatctgcatttagtttgttaatgtctgaaatgaataaaaagaggaaattgcgattaaactgatgttctgctttttatggagaagattctgcccatctcccctggacagtagcaggcaggtgagggcagattttacccacttggttgtcacaactgaaccagttctctactccttcccttcacttctgtccactctcaagactttttcccaaaacatgcctgggcactctgcagccgtgaagaatgctcattttgacagaggcccaaatcctgtgtattaggataatatccttccccccgggagccttcgctgcaaacctgttctgccgcatgcaaagactgtgaccatggagttttctcagacaagatttggaaaggcagtggaatgaaatctctttgcagtggcctctctccaaatttccaaagatgactgcatagggaccaacactgcctgactttgcagtatctgtgagaaaaacctgaaaattaattcagggtgaaaatgtggagctctcggcctagtgtaaagtatcaagatgtatatttatgggatagatacatgacttagaagaagtagaagaaaattgtccagaaacagtactgaattttagatagaaaaggctcatgcttcctggagtagggaattgtctttgccatttaatgtgaatgcataaaattaggggaaaaaccaaaaaaaaaaaaaaaa

SEQ ID NO: 29829 - DNA, 4108 bp, Homo Sapiens
gtgacccagggagacaaacacttggagatacttggggctgagtttgagcaagactccctaacctgtgtctggacaggtctgatgtcctgtgtggcccaagaagaactgaccccgtgtctggagctcccaccgttattgcatccctgctgtggctcacctgctgctgtctccaggagcccctgagaagatttgcttcctctcccctgctaagctccaggtcctgagattaaattaggggctggagctcactgcactccagcagtcatgggacccaggatagggccagcgggtgaggtaccccaggtaccagacaaggaaaccaaagccacaatgggcacagaaaacacacctggaggcaaagccagcccagaccctcaggacgtgcggccaagtgtgttccataacatcaagctgttcgttctgtgccacagcctgctgcagctggcgcagctcatgatctccggctacctaaagagctccatctccacagtggagaagcgcttcggcctctccagccagacgtcggggctgctggcctccttcaacgaggtggggaacacagccttgattgtgtttgtgagctattttggcagccgggtgcaccgaccccgaatgattggctatggggctatccttgtggccctggcgggcctgctcatgactctcccgcacttcatctcggagccataccgctacgacaacaccagccctgaggatatgccacaggacttcaaggcttccctgtgcctgcccacaacctcggccccagcctcggccccctccaatggcaactgctcaagctacacagaaacccagcatctgagtgtggtggggatcatgttcgtggcacagaccctgctgggcgtgggcggggtgcccattcagccctttggcatctcctacatcgatgactttgcccacaacagcaactcgcccctctacctcgggatcctgtttgcagtgaccatgatggggccaggcctggcctttgggctgggcagcctcatgctgcgcctttatgtggacattaaccagatgccagaaggtggtatcagcctgaccataaaggacccccgatgggtgggtgcctggtggctgggtttcctcatcgctgccggtgcagtggccctggctgccatcccctacttcttcttccccaaggaaatgcccaaggaaaaacgtgagcttcagtttcggcgaaaggtcttagcagtcacagactcacctgccaggaagggcaaggactctccctctaagcagagccctggggagtccacgaagaagcaggatggcctagtccagattgcaccaaacctgactgtgatccagttcattaaagtcttccccagggtgctgctgcagaccctacgccaccccatcttcctgctggtggtcctgtcccaggtatgcttgtcatccatggctgcgggcatggccaccttcctgcccaagttcctggagcgccagttttccatcacagcctcctacgccaacctgctcatcggctgcctctccttcccttcggtcatcgtgggcatcgtggtgggtggcgtcctggtcaagcggctccacctgggccctgtgggatgcggtgccctttgcctgctggggatgctgctgtgcctcttcttcagcctgccgctcttctttatcggctgctccagccaccagattgcgggcatcacacaccagaccagtgcccaccctgggctggagctgtctccaagctgcatggaggcctgctcctgcccattggacggctttaaccctgtctgcgaccccagcactcgtgtggaatacatcacaccctgccacgcaggctgctcaagctgggtggtccaggatgctctggacaacagccaggttttctacaccaactgcagctgcgtggtggagggcaaccccgtgctggcaggatcctgcgactcaacgtgcagccatctggtggtgcccttcctgctcctggtcagcctgggctcggccctggcctgtctcacccacacaccctccttcatgctcatcctaagaggagtgaagaaagaagacaagactttggctgtgggcatccagttcatgttcctgaggattttggcctggatgcccagccccgtgatccacggcagcgccatcgacaccacctgtgtgcactgggccctgagctgtgggcgtcgagctgtctgtcgctactacaataatgacctgctccgaaaccggttcatcggcctccagttcttcttcaaaacaggttctgtgatctgcttcgccttagttttggctgtcctgaggcagcaggacaaagaggcaaggaccaaagagagcagatccagccctgccgtagagcagcaattgctagtgtcggggccagggaagaagccagaggattcccgagtgtgagctgtcttggggccccacctggccaagagtagcagccacagcagtacctcctctgagtcctttgcccaagattgggtgtcaagagccctgtgttccattctggctcctccactaaattgctgtgtgacttcaggcaagacattgatcctctctcagcctttgcttgctagtctgaaccaaagagttgtttgggcatttgctgtgttggccatttctggagcaagagggtcttcttcctccttcccccagccagccagctgtcctggggccaggctttcctgggtggaaagaagtatacctttccctggggccctaggatagcaaagtgagccatagtgggccaggctgccctccatgctgggccccagcccaggtctgcactcgcctggatcaccttctttgagccttagccatctcctgtcaggtaggaatgaacttgccagccttcaggctcgttcagctatgaccatctgtgcggtcagggtacactcagctctcctccccaactccagcagcctttaagaagtgtccctttggcgccccctggaggcagagcactgagctggaccctgggtagactcccacagggaggacggagctggcctcaggagtgggacacccagacttggcagggccttcaagaggcctgtgtgggggccccaggaatccttagctgaagcggggagactcactctccatctcaggaaattctagcccttgccctcagggagccacggttgagggtgaggcccaacacctgccttagggccctgggtgggcaagtctgggccctggggtagggagggagactcaggcccacacttgggtattttctaatttcagacaaacacacactcagcgcgcactcactgattcctacacattgccaagatttcacacatgtgaccaggggccaccaaagtccctgtgacctttgtgactaggatcctaatttctctattttctcctgggtgcctgggtctgtgtcacctggggcagtgtggataatgtttagttctgtgacactgttttttgggggtggcacctggttctccgatgcctgggctggtgtcaggcccaggactgtagtgctgggagcagtaaagctcagctctgtgtaatgagtgatgctatggcttgctcgtgtcttatgatccaatccttttctacatcagcccttgttttgttttatggctagtcttatctggcctggttatttccttgcggggaggagagggtttgctaatctgctcccagcccaacctattaccaccccacctcgctgggacctactgctcgggaggcagcagacagggagccaccagcagtggcttcctggccctgtgctgggggtggggggaagctgggggcacatgtggcccttgccttctgagcagctcccagtgccagggctttgagactttcccacatgataaaagaaaagggaggtacagaagttccaattccctttttattttgctggttggtatctgtaaatgtttaataaatatctgagcatgtatctatcaacgccaagaatttcaaagtctccttcaacaatatgaggcttttaggatgtttatattccttcatccctcttgtttcccaggttttgcagggaaaaaaagtctggaattatagatacagcttattattaaatttgttcttgcataaaaaaaaaaaaaaaaaaaaaaaaaaaaaaaaaaaaaaaaaa

SEQ ID NO: 29830 - DNA, 3593 bp, Homo Sapiens; identical to SEQ ID NO: 25853

SEQ ID NO: 29831 - DNA, 1609 bp, Homo Sapiens
cccaaaccaacttgtccccatcaactccatctttctagtccccaccttccccggtgcagacacccggcgaagcccacccggttttcccagcggcatttccgatgacagcttcggggctacgtgtcctgtgctgtcggagacgcacaggaagcaaagtttgtgagaagccttgggggcgactttgccttgggcacccgcatttgtgcgtctgcgaggtgcctcggtgtgcgcggagctagtttcccagtttcccgggcccctcccttctccgagcccctctagcgatttgtttaggaaaagtgatgacatgaactagtagtggagaatcgcagcgccgctccccgccctggggagggaggggagccccggagagcctgccggtgggagctggaagcaggctcccggctgagcgccccagcccgaaaggcagggtctgggtgcgggaagagggctcggagctgccttcctgctgccttggggccgcccagatgagggaacagcccgatttgcctggttctgattctccaggctgtcgtggttgtggaatgcaaacgccagcacataatggaaacaggacctgaagacccttccagcatgccagaggaaagttcccccaggcggaccccgcagagcattccctaccaggacctccctcacctggtcaatgcagacggacagtacctcttctgcaggtactggaaacccacaggcacacccaaggccctcatctttgtgtcccatggagccggagagcacagtggccgctatgaagagctggctcggatgctgatggggctggacctgctggtgttcgcccacgaccatgttggccacggacagagcgaaggggagaggatggtagtgtctgacttccacgttttcgtcagggatgtgttgcagcatgtggattccatgcagaaagactaccctgggcttcctgtcttccttctgggccactccatgggaggcgccatcgccatcctcacggccgcagagaggccgggccacttcgccggcatggtactcatttcgcctctggttcttgccaatcctgaatctgcaacaactttcaaggtccttgctgcgaaagtgctcaaccttgtgctgccaaacttgtccctcgggcccatcgactccagcgtgctctctcggaataagacagaggtcgacatttataactcagaccccctgatctgccgggcagggctgaaggtgtgcttcggcatccaactgctgaatgccgtctcacgggtggagcgcgccctccccaagctgactgtgcccttcctgctgctccagggctctgccgatcgcctatgtgacagcaaaggggcctacctgctcatggagttagccaagagccaggacaagactctcaagatttatgaaggtgcctaccatgttctccacaaggagcttcctgaagtcaccaactccgtcttccatgaaataaacatgtgggtctctcaaaggacagccacggcaggaactgcgtccccaccctgaatgcattggccggtgcccggctcatggtctgggggatgcaggcaggggaagggcagagatggcttctcagatatggcttgccaaaaaaaaaaaaaaaaaaaaa

SEQ ID NO: 29832 - DNA, 5665 bp, Homo Sapiens
agtccggcctcagcctggagcccgcgcgccttgggcggatgcacggactgagaggcgcttggctgggctctcagcccgccactgccacccggccccgtgcgctcattggtcgggatgtgtcggctcagcagcctccaacttctcccgaatcccactggattttaggtgatgggcaagtcagaaagtcagatggatataactgatatcaacactccaaagccaaagaagaaacagcgatggactcgactggagatcagcctctcggtccttgtcctgctcctcaccatcatagctgtgagaatgatcgcactctatgcaacctacgatgatggtatttgcaagtcatcagactgcataaaatcagctgctcgactgatccaaaacatggatgccaccactgagccttgtagagactttttcaaatatgcttgcggaggctggttgaaacgtaatgtcattcccgagaccagctcccgttacggcaactttgacattttaagagatgaactagaagtcgttttgaaagatgtccttcaagaacccaaaactgaagatatagtagcagtgcagaaagcaaaagcattgtacaggtcttgtataaatgaatctgctattgatagcagaggtggagaacctctactcaaactgttaccagacatatatgggtggccagtagcaacagaaaactgggagcaaaaatatggtgcttcttggacagctgaaaaagctattgcacaactgaattctaaatatgggaaaaaagtccttattaatttgtttgttggcactgatgataagaattctgtgaatcatgtaattcatattgaccaacctcgacttggcctcccttctagagattactatgaatgcactggaatctataaagaggcttgtacagcatatgtggattttatgatttctgtggccagattgattcgtcaggaagaaagattgcccatcgatgaaaaccagcttgctttggaaatgaataaagttatggaattggaaaaagaaattgccaatgctacggctaaacctgaagatcgaaatgatccaatgcttctgtataacaagatgagattggcccagatccaaaataacttttcactagagatcaatgggaagccattcagctggttgaatttcacaaatgaaatcatgtcaactgtgaatattagtattacaaatgaggaagatgtggttgtttatgctccagaatatttaaccaaacttaagcccattcttaccaaatattctgccagagatcttcaaaatttaatgtcctggagattcataatggatcttgtaagcagcctcagccgaacctacaaggagtccagaaatgctttccgcaaggccctttatggtacaacctcagaaacagcaacttggagacgttgtgcaaactatgtcaatgggaatatggaaaatgctgtggggaggctttatgtggaagcagcatttgctggagagagtaaacatgtggtcgaggatttgattgcacagatccgagaagtttttattcagactttagatgacctcacttggatggatgccgagacaaaaaagagagctgaagaaaaggccttagcaattaaagaaaggatcggctatcctgatgacattgtttcaaatgataacaaactgaataatgagtacctcgagttgaactacaaagaagatgaatacttcgagaacataattcaaaatttgaaattcagccaaagtaaacaactgaagaagctccgagaaaaggtggacaaagatgagtggataagtggagcagctgtagtcaatgcattttactcttcaggaagaaatcagatagtcttcccagccggcattctgcagccccccttctttagtgcccagcagtccaactcattgaactatgggggcatcggcatggtcataggacacgaaatcacccatggcttcgatgacaatggcagaaactttaacaaagatggagacctcgttgactggtggactcaacagtctgcaagtaactttaaggagcaatcccagtgcatggtgtatcagtatggaaacttttcctgggacctggcaggtggacagcaccttaatggaattaatacactgggagaaaacattgctgataatggaggtcttggtcaagcatacagagcctatcagaattatattaaaaagaatggcgaagaaaaattacttcctggacttgacctaaatcacaaacaactatttttcttgaactttgcacaggtgtggtgtggaacctataggccagagtatgcggttaactccattaaaacagatgtgcacagtccaggcaatttcaggattattgggactttgcagaactctgcagagttttcagaagcctttcactgccgcaagaattcatacatgaatccagaaaagaagtgccgggtttggtgatcttcaaaagaagcattgcagcccttggctagacttgccaacaccacagaaatggggaattctctaatcgaaagaaaatgggccctaggggtcactgtactgacttgagggtgattaacagagagggcaccatcacaatacagataacattaggttgtcctagaaagggtgtggagggaggaagggggtctaaggtctatcaagtcaatcatttctcactgtgtacataatgcttaatttctaaagataatattactgtttatttctgtttctcatatggtctaccagtttgctgatgtccctagaaaacaatgcaaaacctttgaggtagaccaggatttctaatcaaaagggaaaagaagatgttgaagaatagagttaggcaccagaagaagagtaggtgacactatagtttaaaacacattgcctaactactagtttttacttttatttgcaacatttacagtccttcaaaatccttccaaagaattcttatacacattggggccttggagcttacatagttttaaactcatttttgccatacatcagttattcattctgtgatcatttattttaagcactcttaaagcaaaaaatgaatgtctaaaattgttttttgttgtacctgctttgactgatgctgagattcttcaggcttcctgcaattttctaagcaatttcttgctctatctctcaaaacttggtatttttcagagatttatataaatgtaaaaataataatttttatatttaattattaactacatttatgagtaactattattataggtaatcaatgaatattgaagtttcagcttaaaataaacagttgtgaaccaagatctataaagcgatatacagatgaaaatttgagactatttaaacttataaatcatattgatgaaaagatttaagcacaaactttagggtaaaaattgcgattggacagttgtctagagatatatatacttgtggttttcaaattggactttcaaaattaaatctgtccctgagagtgtctctgataaaagggcaaatctgcacctatgtagctctgcatctcctgtcttttcaggtttgtcatcagatggaaatattttgataataaattgaaattgtgaactcattgctccctaagactgtgacaactgtctaactttagaagtgcatttctgaatagaaatgggaggcctctgatggaccttctagaattataagtcacaaagagttctggaaaagaactgtttactgcttgataggaattcatcttttgaggcttctgttcctctcttttcctgttgtattgactattttcgttcattacttgattaagattttacaaaagaggagcacttccaaaattcttatttttcctaacaaaagatgaaagcagggaatttctatctaaatgatgagtattagttccctgtctcttgaaaaatgcccatttgcctttaaaaaaaaaagttacagaaatactataacatatgtacataaattgcataaagcataagtatacagttcaataaacttaactttaactgaacaatggccctgtagccagcacctgtaagaaacagagcagtaccagcgctctaaaagcacctccttgtcactttattactcccagaacaacaactatcctgacttctaatatcattcactagctttgcctggttttgtcttttatgcagatagaatcaatcagtatgtattcttttgtgcctggcttctttctctcagccttacatttgtgagattcctctgtattgtgctgattgtggatcttttcattctcattgcagaataatgttctattgtgggacttattacaatttgttcatcctattgttgatgggcacttgagaactttccattttggcgctattacaaatagtgcaactatgaatgtactgcatgttaccatcttacttgagcctttaatggacttatttcttcaaatccttccaaaaattattataagcattgaaattatagtttcaagccaactgtggatacccttaccctttcctcctttatcacaaccaccgttacaagtatacttatatttccctaaaatacatttaaaacttacctaagtgacatttgtagttggagtaataggagcttccagctctaataaaacagctgtctctaacttattttatttccatcatgtcagagcaggtgaagagccagaagtgaagagtgactagtacaaattataaaaagccactagactcttcactgttagctttttaaaacattaggctcccatccctatggaggaacaactctccagtgcctggatcccctctgtctacaaatataagattttctgggcctaaaggatagatcaaagtcaaaaatagcaatgcctccctatccctcacacatccagacatcatgaattttacatggtactcttgttgagttctatagagccttctgatgtctctaaagcactaccgattctttggagttgtcacatcagataagacatatctctaattccatccataaatccagttctactatggctgagttctggtcaaagaaagaaagtttagaagctgagacacaaagggttgggagctgatgaaactcacaaatgatggtaggaagaagctctcgacaatacccgttggcaaggagtctgcctccatgctgcagtgttcgagtggattgtaggtgcaagatggaaaggattgtaggtgcaagctgtccagagaaaagagtccttgttccagccctattctgccactcctgacagggtgaccttgggtatttgcaatattcctttgggcctctgcttctctcacctaaaaaaagagaattagattatattggtggttctcagcaagagaaggagtatgtgtccaatgctgccttcccatgaatctgtctcccagttatgaatcagtgggcaggataaactgaaaactcccatttaagtgtctgaatcgagtgagacaaaattttagtccaaataacaagtaccaaagttttatcaagtttgggtctgtgctgctgttactgttaaccatttaagtggggcaaaaccttgctaattttctcaaaagcatttatcattcttgttgccacagctggagctctcaaactaaaagacatttgttattttggaaagaagaaagactctattctcaaagtttcctaatcagaaatttttatcagtttccagtctcaaaaatacaaaataaaaacaaacgtttttaatact

SEQ ID NO: 29833 - DNA, 3682 bp, Homo Sapiens
aaaactgcgactgcgcggcgtgagctcgctgagacttcctggaccccgcaccaggctgtggggtttctcagataactgggcccctgcgctcaggaggccttcaccctctgctctgggtaaagttcattggaacagaaagaaatggatttatctgctcttcgcgttgaagaagtacaaaatgtcattaatgctatgcagaaaatcttagagtgtcccatctgtctggagttgatcaaggaacctgtctccacaaagtgtgaccacatattttgcaaattttgcatgctgaaacttctcaaccagaagaaagggccttcacagtgtcctttatgtaagaatgatataaccaaaaggagcctacaagaaagtacgagatttagtcaacttgttgaagagctattgaaaatcatttgtgcttttcagcttgacacaggtttggagtatgcaaacagctataattttgcaaaaaaggaaaataactctcctgaacatctaaaagatgaagtttctatcatccaaagtatgggctacagaaaccgtgccaaaagacttctacagagtgaacccgaaaatccttccttgcaggaaaccagtctcagtgtccaactctctaaccttggaactgtgagaactctgaggacaaagcagcggatacaacctcaaaagacgtctgtctacattgaattgggatctgattcttctgaagataccgttaataaggcaacttattgcagtgtgggagatcaagaattgttacaaatcacccctcaaggaaccagggatgaaatcagtttggattctgcaaaaaagggtgaagcagcatctgggtgtgagagtgaaacaagcgtctctgaagactgctcagggctatcctctcagagtgacattttaaccactcagcagagggataccatgcaacataacctgataaagctccagcaggaaatggctgaactagaagctgtgttagaacagcatgggagccagccttctaacagctacccttccatcataagtgactcttctgcccttgaggacctgcgaaatccagaacaaagcacatcagaaaaagcagtattaacttcacagaaaagtagtgaataccctataagccagaatccagaaggcctttctgctgacaagtttgaggtgtctgcagatagttctaccagtaaaaataaagaaccaggagtggaaaggtcatccccttctaaatgcccatcattagatgataggtggtacatgcacagttgctctgggagtcttcagaatagaaactacccatctcaagaggagctcattaaggttgttgatgtggaggagcaacagctggaagagtctgggccacacgatttgacggaaacatcttacttgccaaggcaagatctagagggaaccccttacctggaatctggaatcagcctcttctctgatgaccctgaatctgatccttctgaagacagagccccagagtcagctcgtgttggcaacataccatcttcaacctctgcattgaaagttccccaattgaaagttgcagaatctgcccagagtccagctgctgctcatactactgatactgctgggtataatgcaatggaagaaagtgtgagcagggagaagccagaattgacagcttcaacagaaagggtcaacaaaagaatgtccatggtggtgtctggcctgaccccagaagaatttatgctcgtgtacaagtttgccagaaaacaccacatcactttaactaatctaattactgaagagactactcatgttgttatgaaaacagatgctgagtttgtgtgtgaacggacactgaaatattttctaggaattgcgggaggaaaatgggtagttagctatttctgggtgacccagtctattaaagaaagaaaaatgctgaatgagcatgattttgaagtcagaggagatgtggtcaatggaagaaaccaccaaggtccaaagcgagcaagagaatcccaggacagaaagatcttcagggggctagaaatctgttgctatgggcccttcaccaacatgcccacagatcaactggaatggatggtacagctgtgtggtgcttctgtggtgaaggagctttcatcattcacccttggcacaggtgtccacccaattgtggttgtgcagccagatgcctggacagaggacaatggcttccatgcaattgggcagatgtgtgaggcacctgtggtgacccgagagtgggtgttggacagtgtagcactctaccagtgccaggagctggacacctacctgataccccagatcccccacagccactactgactgcagccagccacaggtacagagccacaggacccaagaatgagcttacaaagtggcctttccaggccctgggagctcctctcactcttcagtccttctactgtcctggctactaaatattttatgtacatcagcctgaaaaggacttctggctatgcaagggtcccttaaagattttctgcttgaagtctcccttggaaatctgccatgagcacaaaattatggtaatttttcacctgagaagattttaaaaccatttaaacgccaccaattgagcaagatgctgattcattatttatcagccctattctttctattcaggctgttgttggcttagggctggaagcacagagtggcttggcctcaagagaatagctggtttccctaagtttacttctctaaaaccctgtgttcacaaaggcagagagtcagacccttcaatggaaggagagtgcttgggatcgattatgtgacttaaagtcagaatagtccttgggcagttctcaaatgttggagtggaacattggggaggaaattctgaggcaggtattagaaatgaaaaggaaacttgaaacctgggcatggtggctcacgcctgtaatcccagcactttgggaggccaaggtgggcagatcactggaggtcaggagttcgaaaccagcctggccaacatggtgaaaccccatctctactaaaaatacagaaattagccggtcatggtggtggacacctgtaatcccagctactcaggtggctaaggcaggagaatcacttcagcccgggaggtggaggttgcagtgagccaagatcataccacggcactccagcctgggtgacagtgagactgtggctcaaaaaaaaaaaaaaaaaaggaaaatgaaactaggaaaggtttcttaaagtctgagatatatttgctagatttctaaagaatgtgttctaaaacagcagaagattttcaagaaccggtttccaaagacagtcttctaattcctcattagtaataagtaaaatgtttattgttgtagctctggtatataatccattcctcttaaaatataagacctctggcatgaatatttcatatctataaaatgacagatcccaccaggaaggaagctgttgctttctttgaggtgatttttttcctttgctccctgttgctgaaaccatacagcttcataaataattttgcttgctgaaggaagaaaaagtgtttttcataaacccattatccaggactgtttatagctgttggaaggactaggtcttccctagcccccccagtgtgcaagggcagtgaagacttgattgtacaaaatacgttttgtaaatgttgtgctgttaacactgcaaataaacttggtagcaaaca

SEQ ID NO: 29834 - DNA, 7224 bp, Homo Sapiens
aaaactgcgactgcgcggcgtgagctcgctgagacttcctggaccccgcaccaggctgtggggtttctcagataactgggcccctgcgctcaggaggccttcaccctctgctctgggtaaagttcattggaacagaaagaaatggatttatctgctcttcgcgttgaagaagtacaaaatgtcattaatgctatgcagaaaatcttagagtgtcccatctgtctggagttgatcaaggaacctgtctccacaaagtgtgaccacatattttgcaaggtcttactctgttgtcccagctggagtacagtggtgcgatcatgaggcttactgttgccttgacctcctaggctcaagcgatcctatcacctcagtctcccaagtagctgggactattttgcatgctgaaacttctcaaccagaagaaagggccttcacagtgtcctttatgtaagaatgatataaccaaaaggagcctacaagaaagtacgagatttagtcaacttgttgaagagctattgaaaatcatttgtgcttttcagcttgacacaggtttggagtatgcaaacagctataattttgcaaaaaaggaaaataactctcctgaacatctaaaagatgaagtttctatcatccaaagtatgggctacagaaaccgtgccaaaagacttctacagagtgaacccgaaaatccttccttgcaggaaaccagtctcagtgtccaactctctaaccttggaactgtgagaactctgaggacaaagcagcggatacaacctcaaaagacgtctgtctacattgaattgggatctgattcttctgaagataccgttaataaggcaacttattgcagtgtgggagatcaagaattgttacaaatcacccctcaaggaaccagggatgaaatcagtttggattctgcaaaaaaggctgcttgtgaattttctgagacggatgtaacaaatactgaacatcatcaacccagtaataatgatttgaacaccactgagaagcgtgcagctgagaggcatccagaaaagtatcagggtagttctgtttcaaacttgcatgtggagccatgtggcacaaatactcatgccagctcattacagcatgagaacagcagtttattactcactaaagacagaatgaatgtagaaaaggctgaattctgtaataaaagcaaacagcctggcttagcaaggagccaacataacagatgggctggaagtaaggaaacatgtaatgataggcggactcccagcacagaaaaaaaggtagatctgaatgctgatcccctgtgtgagagaaaagaatggaataagcagaaactgccatgctcagagaatcctagagatactgaagatgttccttggataacactaaatagcagcattcagaaagttaatgagtggttttccagaagtgatgaactgttaggttctgatgactcacatgatggggagtctgaatcaaatgccaaagtagctgatgtattggacgttctaaatgaggtagatgaatattctggttcttcagagaaaatagacttactggccagtgatcctcatgaggctttaatatgtaaaagtgaaagagttcactccaaatcagtagagagtaatattgaagacaaaatatttgggaaaacctatcggaagaaggcaagcctccccaacttaagccatgtaactgaaaatctaattataggagcatttgttactgagccacagataatacaagagcgtcccctcacaaataaattaaagcgtaaaaggagacctacatcaggccttcatcctgaggattttatcaagaaagcagatttggcagttcaaaagactcctgaaatgataaatcagggaactaaccaaacggagcagaatggtcaagtgatgaatattactaatagtggtcatgagaataaaacaaaaggtgattctattcagaatgagaaaaatcctaacccaatagaatcactcgaaaaagaatctgctttcaaaacgaaagctgaacctataagcagcagtataagcaatatggaactcgaattaaatatccacaattcaaaagcacctaaaaagaataggctgaggaggaagtcttctaccaggcatattcatgcgcttgaactagtagtcagtagaaatctaagcccacctaattgtactgaattgcaaattgatagttgttctagcagtgaagagataaagaaaaaaaagtacaaccaaatgccagtcaggcacagcagaaacctacaactcatggaaggtaaagaacctgcaactggagccaagaagagtaacaagccaaatgaacagacaagtaaaagacatgacagcgatactttcccagagctgaagttaacaaatgcacctggttcttttactaagtgttcaaataccagtgaacttaaagaatttgtcaatcctagccttccaagagaagaaaaagaagagaaactagaaacagttaaagtgtctaataatgctgaagaccccaaagatctcatgttaagtggagaaagggttttgcaaactgaaagatctgtagagagtagcagtatttcattggtacctggtactgattatggcactcaggaaagtatctcgttactggaagttagcactctagggaaggcaaaaacagaaccaaataaatgtgtgagtcagtgtgcagcatttgaaaaccccaagggactaattcatggttgttccaaagataatagaaatgacacagaaggctttaagtatccattgggacatgaagttaaccacagtcgggaaacaagcatagaaatggaagaaagtgaacttgatgctcagtatttgcagaatacattcaaggtttcaaagcgccagtcatttgctccgttttcaaatccaggaaatgcagaagaggaatgtgcaacattctctgcccactctgggtccttaaagaaacaaagtccaaaagtcacttttgaatgtgaacaaaaggaagaaaatcaaggaaagaatgagtctaatatcaagcctgtacagacagttaatatcactgcaggctttcctgtggttggtcagaaagataagccagttgataatgccaaatgtagtatcaaaggaggctctaggttttgtctatcatctcagttcagaggcaacgaaactggactcattactccaaataaacatggacttttacaaaacccatatcgtataccaccactttttcccatcaagtcatttgttaaaactaaatgtaagaaaaatctgctagaggaaaactttgaggaacattcaatgtcacctgaaagagaaatgggaaatgagaacattccaagtacagtgagcacaattagccgtaataacattagagaaaatgtttttaaagaagccagctcaagcaatattaatgaagtaggttccagtactaatgaagtgggctccagtattaatgaaataggttccagtgatgaaaacattcaagcagaactaggtagaaacagagggccaaaattgaatgctatgcttagattaggggttttgcaacctgaggtctataaacaaagtcttcctggaagtaattgtaagcatcctgaaataaaaaagcaagaatatgaagaagtagttcagactgttaatacagatttctctccatatctgatttcagataacttagaacagcctatgggaagtagtcatgcatctcaggtttgttctgagacacctgatgacctgttagatgatggtgaaataaaggaagatactagttttgctgaaaatgacattaaggaaagttctgctgtttttagcaaaagcgtccagaaaggagagcttagcaggagtcctagccctttcacccatacacatttggctcagggttaccgaagaggggccaagaaattagagtcctcagaagagaacttatctagtgaggatgaagagcttccctgcttccaacacttgttatttggtaaagtaaacaatataccttctcagtctactaggcatagcaccgttgctaccgagtgtctgtctaagaacacagaggagaatttattatcattgaagaatagcttaaatgactgcagtaaccaggtaatattggcaaaggcatctcaggaacatcaccttagtgaggaaacaaaatgttctgctagcttgttttcttcacagtgcagtgaattggaagacttgactgcaaatacaaacacccaggatcctttcttgattggttcttccaaacaaatgaggcatcagtctgaaagccagggagttggtctgagtgacaaggaattggtttcagatgatgaagaaagaggaacgggcttggaagaaaataatcaagaagagcaaagcatggattcaaacttaggtgaagcagcatctgggtgtgagagtgaaacaagcgtctctgaagactgctcagggctatcctctcagagtgacattttaaccactcagcagagggataccatgcaacataacctgataaagctccagcaggaaatggctgaactagaagctgtgttagaacagcatgggagccagccttctaacagctacccttccatcataagtgactcttctgcccttgaggacctgcgaaatccagaacaaagcacatcagaaaaagcagtattaacttcacagaaaagtagtgaataccctataagccagaatccagaaggcctttctgctgacaagtttgaggtgtctgcagatagttctaccagtaaaaataaagaaccaggagtggaaaggtcatccccttctaaatgcccatcattagatgataggtggtacatgcacagttgctctgggagtcttcagaatagaaactacccatctcaagaggagctcattaaggttgttgatgtggaggagcaacagctggaagagtctgggccacacgatttgacggaaacatcttacttgccaaggcaagatctagagggaaccccttacctggaatctggaatcagcctcttctctgatgaccctgaatctgatccttctgaagacagagccccagagtcagctcgtgttggcaacataccatcttcaacctctgcattgaaagttccccaattgaaagttgcagaatctgcccagagtccagctgctgctcatactactgatactgctgggtataatgcaatggaagaaagtgtgagcagggagaagccagaattgacagcttcaacagaaagggtcaacaaaagaatgtccatggtggtgtctggcctgaccccagaagaatttatgctcgtgtacaagtttgccagaaaacaccacatcactttaactaatctaattactgaagagactactcatgttgttatgaaaacagatgctgagtttgtgtgtgaacggacactgaaatattttctaggaattgcgggaggaaaatgggtagttagctatttctgggtgacccagtctattaaagaaagaaaaatgctgaatgagcatgattttgaagtcagaggagatgtggtcaatggaagaaaccaccaaggtccaaagcgagcaagagaatcccaggacagaaagatcttcagggggctagaaatctgttgctatgggcccttcaccaacatgcccacagatcaactggaatggatggtacagctgtgtggtgcttctgtggtgaaggagctttcatcattcacccttggcacaggtgtccacccaattgtggttgtgcagccagatgcctggacagaggacaatggcttccatgcaattgggcagatgtgtgaggcacctgtggtgacccgagagtgggtgttggacagtgtagcactctaccagtgccaggagctggacacctacctgataccccagatcccccacagccactactgactgcagccagccacaggtacagagccacaggaccccaagatgagcttacaaagtggcctttccaggccctgggagctcctctcactcttcagtccttctactgtcctggctactaaatattttatgtacatcagcctgaaaaggacttctggctatgcaagggtcccttaaagattttctgcttgaagtctcccttggaaatctgccatgagcacaaaattatggtaatttttcacctgagaagattttaaaaccatttaaacgccaccaattgagcaagatgctgattcattatttatcagccctattctttctattcaggctgttgttggcttagggctggaagcacagagtggcttggcctcaagagaatagctggtttccctaagtttacttctctaaaaccctgtgttcacaaaggcagagagtcagacccttcaatggaaggagagtgcttgggatcgattatgtgacttaaagtcagaatagtccttgggcagttctcaaatgttggagtggaacattggggaggaaattctgaggcaggtattagaaatgaaaaggaaacttgaaacctgggcatggtggctcacgcctgtaatcccagcactttgggaggccaaggtgggcagatcactggaggtcaggagttcgaaaccagcctggccaacatggtgaaaccccatctctactaaaaatacagaaattagccggtcatggtggtggacacctgtaatcccagctactcaggtggctaaggcaggagaatcacttcagcccgggaggtggaggttgcagtgagccaagatcataccacggcactccagcctgggtgacagtgagactgtggctcaaaaaaaaaaaaaaaaaaggaaaatgaaactaggaaaggtttcttaaagtctgagatatatttgctagatttctaaagaatgtgttctaaaacagcagaagattttcaagaaccggtttccaaagacagtcttctaattcctcattagtaataagtaaaatgtttattgttgtagctctggtatataatccattcctcttaaaatataagacctctggcatgaatatttcatatctataaaatgacagatcccaccaggaaggaagctgttgctttctttgaggtgatttttttcctttgctccctgttgctgaaaccatacagcttcataaataattttgcttgctgaaggaagaaaaagtgtttttcataaacccattatccaggactgtttatagctgttggaaggactaggtcttccctagcccccccagtgtgcaagggcagtgaagacttgattgtacaaaatacgttttgtaaatgttgtgctgttaacactgcaaataaacttggtagcaaaca

SEQ ID NO: 29835 - DNA, 2097 bp, Homo Sapiens
gggcgggcccaaggagggagtggaatggccgcgggcggctcgacgcagcagaggcgacgcgagatggcggcagcttcagcggcggcgatctcaggagctggtcgctgtcggctaagcaagattggagctactcgtcgtccacctccagctcgcgtaagggtggctgtgcgactgcggccatttgtggatggaacagcgggagcaagtgatcccccctgtgtgcggggcatggacagctgctctctagagattgctaactggaggaaccaccaggagactctcaaataccagtttgatgccttctatggggagaggagtactcagcaggacatctatgcaggttcagtgcagcccatcctaaggcacttgctggaagggcagaatgccagtgtgcttgcctatggacccacaggagctgggaagacgcacacaatgctgggcagcccagagcaacctggggtgatcccgcgggctctcatggacctcctgcagctcacaagggaggagggtgccgagggccggccatgggccctttctgtcaccatgtcttacctagagatctaccaggagaaggtattagacctcctggaccctgcttcgggagacctggtaatccgagaagactgccgggggaatatcctgattccgggtctctcccagaagcccatcagtagctttgctgattttgagcggcacttcctgccagccagtcgaaatcggactgtaggagccacccggctcaaccagcgctcctcccgcagtcatgctgtgctcctggtcaaggtggaccagcgggaacgtttggccccatttcgccagcgagagggaaaactctacctgattgacttggctgggtcagaggacaaccggcgcacaggcaacaagggccttcggctaaaagagagtggagccatcaacacctccctgtttgtcctgggcaaagtggtagatgcgctgaatcagggcctccctcgtgtaccttatcgggacagcaagctcactcgcctattgcaggactctctgggtggctcagcccacagtatccttattgccaacattgcccctgagagacgcttctacctagacacagtctccgcactcaactttgctgccaggtccaaggaggtgatcaatcggccttttaccaatgagagcctgcagcctcatgccttgggacctgttaagctgtctcagaaagaattgcttggtccaccagaggcaaagagagcccgaggccctgaggaagaggagattgggagccctgagcccatggcagctccagcctctgcctcccagaaactcagccccctacagaagctaagcagcatggacccggccatgctggagcgcctcctcagcttggaccgtctgcttgcctcccaggggagccagggggcccctctgttgagtaccccaaagcgagagcggatggtgctaatgaagacagtagaagagaaggacctagagattgagaggcttaagacgaagcaaaaagaactggaggccaagatgttggcccagaaggctgaggaaaaggagaaccattgtcccacaatgctccggcccctttcacatcgcacagtcacaggggcaaagcccctgaaaaaggctgtggtgatgcccctacagctaattcaggagcaggcagcatccccaaatgccgagatccacatcctgaagaataaaggccggaagagaaagctggagtccctggatgccctagagcctgaggagaaggctgaggactgctgggagctacagatcagcccggagctactggctcatgggcgccaaaaaatactggatctgctgaacgaaggctcagcccgagatctccgcagtcttcagcgcattggcccgaagaaggcccagctaatcgtgggctggcgggagctccacggccccttcagccaggtggaggacctggaacgcgtggagggcataacggggaaacagatggagtccttcctgaaggcaaacatcctgggtctcgccgccggccagcgctgtggcgcctcctgaccgtcgtctcctcactccgccttttcaaatttttgtataaccccgtgttgtgtaaatacagtttttgctccggtg

SEQ ID NO: 29836 - DNA, 5190 bp, Homo Sapiens
ccagaagttctccagggcttccgcagagcactttttcgctgcctgtgagctgcagcgcgggagagctcgggctcgcgcggaccccagcgcctggcaggctgacagcgctctctcgccccaggtgcccgcgcgcgtggtgagcagctgcaccaggtggcgtccggggtggggtcaatgaagtgcagcctgaggaagatgtggcgccctggagaaaagaaggagccccagggcgttgtctatgaggatgtgccggacgacacggaggatttcaaggaatcgcttaaggtggtttttgaaggaagtgcatatggattacaaaactttaataagcaaaagaaattaaaaacatgtgacgatatggacaccttcttcttgcattatgctgcagcagaaggccaaattgagctaatggagaagatcaccagagattcctctttggaagtgctgcatgaaatggatgattatggaaatacccctctgcattgtgctgtagaaaaaaaccaaattgaaagcgttaagtttcttctcagcagaggagcaaacccaaacctccgaaacttcaacatgatggctcctctccacatagctgtgcagggcatgaataatgaggtgatgaaggtcttgcttgagcatagaactattgatgttaatttggaaggagaaaatggaaacacagctgtgatcattgcgtgcaccacaaataatagcgaagcattgcagattttgcttaacaaaggagctaagccatgtaaatcaaataaatggggatgtttccctattcaccaagctgcattttcaggttccaaagaatgcatggaaataatactaaggtttggtgaagagcatgggtacagtagacagttgcacattaactttatgaataatgggaaagccacccctctccacctggctgtgcaaaatggtgacttggaaatgatcaaaatgtgcctggacaatggtgcacaaatagacccagtggagaagggaaggtgcacagccattcattttgctgccacccagggagccactgagattgttaaactgatgatatcgtcctattctggtagcgtggatattgttaacacaaccgatggatgtcatgagaccatgcttcacagagcttcattgtttgatcaccatgagctagcagactatttaatttcagtgggagcagatattaataagatcgattctgaaggacgctctccacttatattagcaactgcttctgcatcttggaatattgtaaatttgctactctctaaaggtgcccaagtagacataaaagataattttggacgtaattttctgcatttaactgtacagcaaccttatggattaaaaaatctgcgacctgaatttatgcagatgcaacagatcaaagagctggtaatggatgaagacaacgatgggtgtactcctctacattatgcatgtagacaggggggccctggttctgtaaataacctacttggctttaatgtgtccattcattccaaaagcaaagataagaaatcacctctgcattttgcagccagttatgggcgtatcaatacctgtcagaggctcctacaagacataagtgatacgaggcttctgaatgaaggtgaccttcatggaatgactcctctccatctggcagcaaagaatggacatgataaagtagttcagcttcttctgaaaaaaggtgcattgtttctcagtgaccacaatggctggacagctttgcatcatgcgtccatgggcgggtacactcagaccatgaaggtcattcttgatactaatttgaagtgcacagatcgcttggatgaagacgggaacactgcacttcactttgctgcaagggaaggccacgccaaagccgttgcgcttcttctgagccacaatgctgacatagtcctgaacaagcagcaggcctcctttttgcaccttgcacttcacaataagaggaaggaggttgttcttacgatcatcaggagcaaaagatgggatgaatgtcttaagattttcagtcataattctccaggcaataaatgtccaattacagaaatgatagaatacctccctgaatgcatgaaggtacttttagatttctgcatgttgcattccacagaagacaagtcctgccgagactattatatcgagtataatttcaaatatcttcaatgtccattagaattcaccaaaaaaacacctacacaggatgttatatatgaaccgcttacagccctcaacgcaatggtacaaaataaccgcatagagcttctcaatcatcctgtgtgtaaagaatatttactcatgaaatggttggcttatggatttagagctcatatgatgaatttaggatcttactgtcttggtctcatacctatgaccattctcgttgtcaatataaaaccaggaatggctttcaactcaactggcatcatcaatgaaactagtgatcattcagaaatactagataccacgaattcatatctaataaaaacttgtatgattttagtgtttttatcaagtatatttgggtattgcaaagaagcggggcaaattttccaacagaaaaggaattattttatggatataagcaatgttcttgaatggattatctacacgacgggcatcatttttgtgctgcccttgtttgttgaaataccagctcatctgcagtggcaatgtggagcaattgctgtttacttctattggatgaatttcttattgtatcttcaaagatttgaaaattgtggaatttttattgttatgttggaggtaattttgaaaactttgttgaggtctacagttgtatttatcttccttcttctggcttttggactcagcttttacatcctcctgaatttacaggatcccttcagctctccattgctttctataatccagaccttcagcatgatgctaggagatatcaattatcgagagtccttcctagaaccatatctgagaaatgaattggcacatccagttctgtcctttgcacaacttgtttccttcacaatatttgtcccaattgtcctcatgaatttacttattggtttggcagttggcgacattgctgaggtccagaaacatgcatcattgaagaggatagctatgcaggtggaacttcataccagcttagagaagaagctgccactttggtttctacgcaaagtggatcagaaatccaccatcgtgtatcccaacaaacccagatctggtgggatgttattccatatattctgttttttattttgcactggggaaataagacaagaaataccaaatgctgataaatctttagaaatggaaatattaaagcagaaataccggctgaaggatcttacttttctcctggaaaaacagcatgagctcattaaactgatcattcagaagatggagatcatctctgagacagaggatgatgatagccattgttcttttcaagacaggtttaagaaagagcagatggaacaaaggaatagcagatggaatactgtgttgagagcagtcaaggcaaaaacacaccatcttgagccttagctcctcagaccttcagtgaggcttctaatggggggtgcatgacttgctggttctaactttcaatttaaaaagagtgaggaagaagcagaatgattgattttactgcgtgtgaaatcatggttcctgcatgctatataaaagtaaaccatcttttatcctctattcatattttctaccaatcactatgtattggggatatctttgcagatatgttcaaattggactggactttgatgagatataatctcattatttgaatgggtagaaaatgaatttgctagaacacacatttttaatgaaaagaagtaataaatgtaactattaagctaaaatgcaaatgtcagtactgaattcctgcttgttaattacataatatgtgatgctctagaaaatagtcacaagtattaataatgccttagatgatagtcttaaatattaggttgaggtctacctaacctaagctgcttcctggaaagcttcatgttgaaagaacctatgggtggcaccatgtggacttttctgtccctactgtgatgaatagccccacccttcttgctgtccccaacacacctgatgtcactttgagccatatagttgaagtacaaattaataggccttatgatatgcacgaattttactatagataatatatgttgtttctggttttgtttgccaatgagcataataaatgtaaaacctatatagtatccctgtgattattgtatgagcctttgtttgagatttgaaaaaaacatggctccatcacatattcccttttttcttttgatgtctactcaaatcatgaattaatcacatacctcatcattaatcttttcaaggtccttctattgttttgtctgattttctccatcatcctgattagcatgtttattccctcactacccccaggagatattcactgtaatgaatatgtctttggctatgtatgtgtccttgtgttatgttgtacagtgttgttttgagtctgttattatttacacagatgttattatgctatagcttctatttctgtttttgcttcttatttctcttataattctcacttatttcctattttttctactcatttctatttgttactcctttttactggacatgatgtttacaagatacaactgtgttactgtattccatctagtacggggcctttggtgtggcttactatttcattgtgtgcacccacccacccaccacactggacttttctagagatggacagcttggttacctccaccttcctgcactcattctcaaacatactgatgttcatacaaaccagcagagtgctgagggacgatatgtactattacaaaaccagacacttttacattcatggtccaacagaacacatggcctagaggcaatgttgcatataccttaatctttgatatgaataatatctttgttctttatatttcttaaaacagaaagggtggaaaatcactatacagaagcaatatccaaagatctcctgatcataaagacaaggggtcttttcagtcttccctctcctcaaaccttgtgtagcattgcacaatatagatctcagtcaacattcactgagtgccaagaatgtgagaaacactgtaccatgcctgtcatgcgaaatatttaaataaacagattgtcttacag

SEQ ID NO: 29837 - DNA, 3137 bp, Homo Sapiens
agcagcacttccgggttgggagaaaggtggcggcgctttcggagggaataaaatggaaggagaatcaagcagatttgaaatccacactccagtttctgacaagaaaaagaaaaagtgttctatacataaggaaagacctcagaaacattcccacgaaattttcagagactcctccctggtgaatgaacagtctcaaataactaggaggaaaaagaggaaaaaagatttccagcatctcatttcttctcctttgaaaaaatccagaatctgtgatgagactgcaaatgccacttccacactcaaaaagagaaaaaagagaagatatagtgctttggaggtggacgaggaagcaggtgttacagttgtccttgtggataaagaaaatattaacaacacaccaaagcattttagaaaggatgttgatgttgtttgtgttgatatgagcatagaacagaagttaccaagaaagcctaaaacagacaaatttcaggtacttgctaagtcacatgcacataaatcagaagccctgcacagtaaagttagggagaaaaagaataaaaagcatcagaggaaagctgcatcctgggagagccagcgggcaagggacaccctgcctcagtcagaatcccaccaggaggagtcctggctttctgtgggtccagggggtgaaattacagaactaccagcatctgctcataaaaacaagtctaagaaaaaaaagaaaaagtccagtaaccgggaatatgagacactggccatgcctgaaggatcgcaagcaggcagagaggccgggactgatatgcaggaatcccagcctactgtgggcttggatgatgaaactccacaactactaggacctactcacaaaaaaaagtctaagaaaaaaaagaagaaaaagtccaatcaccaggaatttgaggcattggccatgcctgaaggatcacaagtgggcagtgaggttggggctgatatgcaggaatcccggcctgctgtgggcctgcatggtgaaactgcaggaataccagcacctgcttataaaaacaagtctaagaaaaaaaagaaaaagtccaatcaccaggaatttgaggcagtggccatgcctgagagcctcgagagtgcataccctgaaggatcacaggtgggcagtgaggttgggactgtggaaggcagtacagctcttaaagggttcaaggaatccaacagtacaaagaagaagtctaagaaaaggaagcttacgtctgtcaaaagggcacgagtgtctggtgatgatttttcagtgcccagtaagaactctgagagcacactctttgattcagtagaaggtgatggcgccatgatggaagaaggtgtgaaatctaggccccgacaaaagaaaacccaggcctgtttggcaagcaagcacgtgcaagaggcgccaaggttagaacctgcaaatgaagaacacaatgtggaaacagctgaagattccgaaataagatacttatctgcagattcaggagatgccgatgattcagatgcggatttgggttctgccgtgaaacagcttcaggagttcattcctaacatcaaggacagggccaccagcacaatcaagcggatgtaccgggacgacttggaacggtttaaggaatttaaagcacaaggtgtcgctattaaatttggcaagttttctgtaaaggaaaataagcagttagagaaaaatgtggaagactttctagccctgacaggcattgagagtgcagacaagctgctgtacacggacagatatcctgaggaaaaatctgtgatcaccaacttaaaaaggagatactcgtttagattacacattggtaggaacattgcccggccctggaaacttatatactatcgagcaaagaagatgttcgatgtcaacaattacaaaggcaggtatagcgaaggagatactgagaagttaaagatgtaccattctctccttgggaatgactggaagacgattggtgagatggtggcccgaagtagcctctccgtggccctcaagttctcacagatcagcagtcaaagaaatcgtggtgcttggagtaagtctgaaacccggaaactaatcaaggctgtcgaagaagtgattctgaagaagatgtctccccaggagttaaaagaggtggattccaaactccaagaaaatcctgaaagttgcctatcaattgttcgggaaaaactctacaagggcatatcttgggtagaagtagaagctaaagtgcaaaccagaaattggatgcagtgtaaaagtaagtggacagaaattctaaccaagaggatgactaatggtcggcgtatctactatggcatgaatgccctgcgggccaaggtcagccttattgaaaggttgtatgaaataaatgtggaagatactaatgaaatagactgggaagatcttgctagtgccataggtgatgttcctccatcttacgttcaaactaaattttctaggctgaaagctgtctatgttccattttggcagaaaaagacttttccagagatcatcgactacctttatgagacgactctacctttgctgaaggaaaagttagaaaaaatgatggagaaaaaaggcactaaaatccagactcctgcagcacccaagcaagttttcccatttcgagacatcttttattatgaagacgatagtgaaggagaggacatagaaaaagaaagcgaaggccaggcgccatgcatggctcacgcctgtaattccagtactttgggaggccaaggccggtggatcatctgaggtcaggagttcgagaccggcctgaccaacatggtgaagacctgtcactattaaaaatgcgaaaattagccgggtgtggtagtgcacacctgtaatttcaactacttgggaggctgaggcaggagaattgcttgaacccaggaggtggaggttgcagtgagccaagatcgcaccaccgcatgagagagagagattactatttcttgtccctttttctcagtttgattatatttatatacatatgtcagtaaatctgttttcagtattgatgtttaataaagaatgtacaatggccagagttctactctttcctctggagcattaaaatatattgccattcctattaaaacgtatttgaatgtgaaaa

SEQ ID NO: 29838 - DNA, 2423 bp, Homo Sapiens
ttccgcctccagcgcgagccccgccgccgccgagcatggacgaccccgactgcgactccacctgggaggaggacgaggaggatgcggaggacgcggaggacgaggactgcgaggacggcgaggccgccggcgcgagggacgcggacgcaggggacgaggacgaggagtcggaggagccgcgggcggcgcggcccagctcgttccagtccagaatgacagggtccagaaactggcgagccacgagggacatgtgtaggtatcggcacaactatccggatctggtggaacgagactgcaatggggacacgccaaacctgagtttctacagaaatgagatccgcttcctgcccaacggctgtttcattgaggacattcttcagaactggacggacaactatgacctccttgaggacaatcactcctacatccagtggctgtttcctctgcgagaaccaggagtgaactggcatgccaagcccctcacgctcagggaggtcgaggtgtttaaaagctcccaggagatccaggagcggcttgtccgggcctacgagctcatgctgggcttctacgggatccggctggaggaccgaggcacgggcacggtgggccgagcacagaactaccagaagcgcttccagaacctgaactggcgcagccacaacaacctccgcatcacacgcatcctcaagtcgctgggtgagctgggcctcgagcacttccaggcgccgctggtccgcttcttcctggaggagacgctggtgcggcgggagctgccgggggtgcggcagagtgccctggactacttcatgttcgccgtgcgctgccgacaccagcgccgccagctggtgcacttcgcctgggagcacttccggccccgctgcaagttcgtctgggggccccaagacaagctgcggaggttcaagcccagctctctgccccatccgctcgagggctccaggaaggtggaggaggaaggaagccccggggaccccgaccacgaggccagcacccagggtcggacctgtgggccagagcatagcaagggtgggggcagggtggacgaggggccccagccacggagcgtggagccccaggatgcgggacccctggagaggagccagggggatgaggcagggggccacggggaagataggccggagcccttaagccccaaagagagcaagaagaggaagctggagctgagccggcgggagcagccgcccacagagccaggccctcagagtgcctcagaggtggagaagatcgctctgaatttggaggggtgtgccctcagccagggcagcctcaggacggggacccaggaagtgggcggtcaggaccctggggaggcagtgcagccctgccgccaacccctgggagccagggtggccgacaaggtgaggaagcggaggaaggtggatgagggtgctggggacagtgctgcggtggccagtggtggtgcccagaccttggcccttgccgggtcccctgccccatcggggcaccccaaggctggacacagtgagaacggggttgaggaggacacagaaggtcgaacggggcccaaagaaggtacccctgggagcccatcggagaccccaggccccagcccagcaggacctgcaggggacgagccagccgagagcccatcggagaccccaggcccccgcccagcaggacctgcaggggacgagccagccgagagcccatcggagaccccaggcccccgcccggcaggacctgcaggggacgagccagccgagagcccatcggagaccccaggccccagcccggcaggacctacaagggatgagccagccgagagcccatcggagaccccaggcccccgcccggcaggacctgcaggggacgagccagccgagagcccatcggagaccccaggcccccgcccggcaggacctgcaggggacgagccagccgagagcccatcggagaccccaggccccagcccggcaggacctacaagggatgagccagccaaggcgggggaggcagcagagttgcaggacgcagaggtggagtcttctgccaagtctgggaagccttaaggaaaggagtgcccgtcggcgtcttggtcctcctgtccctgctgcaggggctggggcctccggagctgctgcgggctcccctcaggctctgcttcgtgacccgtgacccatgacccacagtgctggcctcctgtggggccactatagcagccaccagaagccgcgaggccctcagggaagcccaaggcctgcagaagcctcctggcctggctgtgtcttccccacccagctctcccctgcgcccctgtctttgtaaattgacccttctggagtggggggcggcgggcagggctgcttttcttagtctgataccaagcaaggccttttctgaataaattcatttgactttgaaaa

SEQ ID NO: 29839 - DNA, 1412 bp, Homo Sapiens
ctccttgggcgatcgcctgggtagaggagaggagtttccggggctcgggtccgggtcgccttccaggggaacgagcgcggaagcaagtgggcggcgagaggcggagcaagagacgctggagggcgtggacgcagcgggctttggaaaggccccaagttaatgaggcgtgcgccggctgccgagcgcctcttggagctgggctttcccccgcggtgcgggcgccaggagccgccttttccgctgggtgtcactcgggggtggggaagatggcccattcaaaagcgccgcgagggggcccggccagtgcccttcagtgagcgctcgcaagaggacggcagaggcccggcagctcggagctccgggaccttgtggcgcatcaggacgcggctgtccctctgccgggacccagagccgccgccgccgctctgcctcctgcgtgttagcctcctctgcgcgctccgggcaggcggccgtgggagccgctggggcgaggacggcgcgaggctgctgctgctgcccccggcccgcgcggctggaaacggagaggccgagccaagcggcggcccctcttatgctgggaggatgctggagagtagcggctgcaaagcgctgaaggagggcgtgctggagaagcgcagcgacgggttgttgcagctctggaagaaaaagtgttgcatcctcaccgaggaagggctgctgcttatcccgcccaagcagctgcaacaccagcagcagcagcaacagcagcagcagcagcagcaacaacagcccgggcaggggccggccgagccgtcccaacccagtggccccgctgtcgccagcctcgagccgccggtcaagctcaaggaactgcacttctccaacatgaagaccgtggactgtgtggagcgcaagggcaagtacatgtacttcactgtggtgatggcagagggcaaggagatcgactttcggtgcccgcaagaccagggctggaacgccgagatcacgctgcagatggtgcagtacaagaatcgtcaggccatcctggcggtcaaatccacgcggcagaagcagcagcacctggtccagcagcagcccccctcgcagccgcagccgcagccgcagctccagccccaaccccagcctcagcctcagccgcaaccccagccccaatcacaaccccagcctcagccccaacccaagcctcagccccagcagctccacccgtatccgcatccacatccacatccacactctcatcctcactcgcacccacaccctcacccgcacccgcatccgcaccaaataccgcacccacacccacagccgcactcgcagccgcacgggcaccggcttctccgcagcacctccaactctgcctgaaaggggcagctcccgggcaagacaaggttttgaggacttgaggaagtggg

SEQ ID NO: 29840 - DNA, 4220 bp, Homo Sapiens
tggcggtcttgcaggcgggcggaccctcggccgcgctcggggctccggcgccgccgctcctcctgctcggcctgagctgcccgggctcggcgcgcgcttggggcgaggctcggcgggcgcggacgcgcagcatggcggtggaggacgaggggctccgggtcttccagagcgtgaagatcaagatcggtgaagccaaaaaccttccctcttacccggggccgagcaagatgagggattgctactgcacggtgaacctggaccaggaggaggttttcaggaccaaaattgtggaaaagtcactctgcccgttttacggagaagacttttactgtgaaattcctcggagctttcgtcacctgtccttctacattttcgatagagacgttttccggagggattccatcatagggaaggtggccatccagaaggaggacttgcagaagtaccacaacagggacacctggttccagctgcagcacgtggacgctgactcggaagtgcagggcaaagtgcacctggagctgcggctgagcgaggtcatcacagacactggggtcgtctgccacaagctcgccacacgcatcgtcgagtgccagggcctccccatcgtgaatgggcaatgtgacccctacgccaccgtgacgctggcaggacccttcagatcagaagcaaagaagacgaaagtgaagaggaagaccaacaatccccagttcgatgaagtgttttattttgaggtgacccggccctgtagctacagcaagaagtcccactttgactttgaggaggaagacgtggacaagctcgaaatcagagttgacctctggaatgccagtaacctgaagtttggagatgaattcctgggagaactaaggatcccgttgaaagtcctgcggcagtccagctcctacgaggcgtggtacttcctccagccccgggacaatggtagcaagagcctaaagccagacgacctgggctccctgcggctgaacgtggtatacacggaagaccacgtgttttcttctgactattacagccctctgcgggacctgctgttgaagtctgcggatgtggagcccgtgtcagcgtctgcggcccacatcctgggcgaggtttgccgggagaagcaggaggcggccgtcccgctggtgcggctcttcctacactatggcagggtggtgccattcatcagtgccatcgccagcgcggaggtgaagcggacccaggaccccaacaccatcttccgaggaaactcactggcgtccaagtgcatcgacgagaccatgaagctggcggggatgcattacctgcatgtcaccctgaagcccgccatcgaggagatatgccagagccacaaaccctgtgaaatcgaccctgtgaagttgaaagacggagaaaaccttgaaaacaacatggagaacctacggcagtatgtggaccgcgtcttccacgccatcactgagtctggggtgagctgcccgaccgtcatgtgtgacatcttcttctccctccgggaggcggcggccaagcgcttccaggatgacccggacgtcaggtacactgcagtgagcagcttcatcttcctgaggttctttgcgcccgccattctctcccccaacctcttccagctcacgccgcaccacacggacccccagacgtccaggacgctgacattgatctccaagaccgttcagaccctcggcagcctgtccaagtccaaatctgcgagttttaaggagtcctacatggctacattttatgaattcttcaatgagcagaaatatgctgatgcggtgaagaacttcttggatctgatttcgtcctcggggagaagagaccccaagagtgttgagcagcccatcgtgcttaaagaagggttcatgatcaagagggcccaaggacggaagcgctttgggatgaagaattttaagaagagatggtttcgcttgaccaaccatgaatttacctaccacaaaagcaaaggggaccagcctctctacagcattcccatcgagaacatcctggcagtggagaagctggaggaggagtctttcaaaatgaaaaacatgttccaggtcatccagccagagcgtgcgctgtacatccaggccaacaactgcgtggaggccaaggactggatcgacattctcaccaaagtgagccagtgcaaccagaagcgcctcaccgtctaccacccgtccgcctacctgagcggccactggctgtgctgtagggcgccatccgactcggctccgggctgctcgccctgcactggcggcctcccagccaacatccagctggacattgatggggaccgtgagacggagcgtatctactccctcttcaacttgtacatgagcaagctggagaagatgcaggaggcctgtgggagcaaatctgtgtatgacggcccggagcaggaggagtattcgacgttcgtcattgacgacccccaggagacctacaagacgctaaagcaagtcatcgctggggttggggctttggagcaggagcacgcccagtataagagggacaagttcaagaagacgaaatatggaagccaggagcaccccatcggagacaagagcttccagaactacatccggcagcagtccgagacctccactcattccatttaaagtctgcgggacgcgcccagtggcgccagcaagctgcccatgcaaagccgcagcctttgggagggagaagagaaggaagagcgcagagccggcaaagtgagatgcacgccgtcccggcccatagacaagtggcgctggggtttccctctcccagaaccgctgccaccaccgccacgccctccgcagaaagcccacctggccctgtggaacgtgtcgtcatttgattctgtgctttttgctccttgtttgtggggatctggggatcagctgaaggatcaggaagtgtgggctgtgccctagccacaccacagccagcctcagggagccacggcccgtctagtcgactgtgacatgcacctccggccgtgtgtgcgtcagtctcgtgcacgtctgtcttgcgtgcacggtgcgtgtgacgctgggctctgtggctctgtgcccgggaggcctgctggccccgcctcggctttcggcttcatcacattgggaggttcagagcattactctcccactgtgcctgccatccaggcagccatgggaggcggcctccctgttccactttcgaggttcgtttgattcctggctgaggggtcagttttatggctgggaggtgcagaattacacagaagtcccagtctgaggatgtccttggtgcttgggggatacgggttctgtccacagagtcccttggagggaaaggtgtgggctccagcttctccaggcgtctgcggagcccacagttgaagcccacatcgttttgctgttgaatggggtttaaaatcagaattaacatttgccaccccccgtggaagtttgaagattttaaaaatagaaatgtacatttttcaagctgtttttctttatgtttttgaaggaccatttttaattagctctttgatacaaagtaactcagaacgtcaaaacctatacccactaaagggaaggctgccgggaaggcaaatggaacaggaatggagcctgtctcaggaaggccagctgcaggtcctccagaaaatcaaagaagggaagaaactctgagtttgaggtacaggggcttcggggtgcagacgtccctccagggcccatggtcagtattgcacctgtgttatgaacccccagatgctgtgcagggcaggggcgggggctgctgttttattggggaggggagcatcctaaaaatggggtccaggcagacccctccagacctcacactgccgaggaggcctttcccaaagggcgtcctcccgggatgcagacggcaggtgtgtgggaagcgccgtttaaatacacagcacgacgtatccttgtaccgacttctcccggttcttgtttgaaaatactgtagttcaggctcttgatctagatggcagataggaactttcttgtcacaaaaatactggaggaaaatgttgtaaaaatagacttttggacacacagctgttggggctgcactgagctgcaatttttaacatggatttataacttaatgtttctgtttataaaatactaatgatttgcaatgtattttactggccaattaaaacagatgttttattctttctgaaaaaaaaaaaaaaaaaaaaa

SEQ ID NO: 29841 - DNA, 2119 bp, Homo Sapiens
gagttgcttttgcgcgcgaactgtaagtgccagggtctcagggtcaggtcgcggctggtcactgtgcaggcgcttgggtgacgcgacgatctcagcggatctggtcaccttcgtctccccgccatggagacctcagcactcaagcagcaggagcagcccgcggcgaccaagatcaggaacctgccctgggttgaaaaataccggccacagaccctgaatgatctcatttctcatcaggacattctgagtaccattcagaagtttatcaatgaagaccgactgccacacttgcttctctacggtcccccagggacaggcaagacatctaccatcctagcctgtgcgaaacagctatataaagacaaagaatttggctccatggtcttggagctgaatgcttcagatgaccgaggaatagacatcattcgaggaccgatcctgagctttgctagcacaaggacaatatttaagaaaggctttaagctagtgatcttggatgaagcagacgccatgactcaggacgcccagaatgccttgagaagagtaattgagaaattcacagaaaataccagattctgcctcatctgtaactatctgtcaaagatcatccctgccttgcagtcccgctgcacgaggtttcggttcggtcccctgactcctgaactcatggttccccgcctggaacatgtcgtggaagaagagaaagttgatataagtgaagatggaatgaaagcactagtcactctttccagtggagacatgcgtagggctctgaacattttgcagagcaccaatatggcctttgggaaggtgacagaggagactgtctacacctgcaccgggcacccgctcaagtcagacattgccaacatcctggactggatgttgaatcaagatttcaccacagcctacagaaatattacagagttgaaaactctgaaggggttggcactgcatgatatcctgacagagatacacttgtttgtgcatagagttgactttccatcttcagttcgaatacatttattgaccaaaatggcagacattgagtacaggctttctgttggcaccaacgagaagatccagctgagctccctcattgctgcatttcaagtcaccagagacctgattgttgcagaggcctagatgctctgagggccattcacaattctcagggctcagcagtgatgggagaacagaggacagttccaggataaactgctgcctggggctgtgggatgaatcagtcaccccgaatcttggaaaaacccccttccaggagaggatgggcaggcatttaaaaagtaccatttttgtggttgtttggagcagggatgtacaaaataattttaatgtattaactcatactgcctgtcttttataggggaaaaaaataaccttttttattttaaagttataaggtttttaccttttagttgcttggatgacagggaattagcctaccccattttggtctggaacagaagactttcaaatttaatatggtccaagtgtcttcctactcaaggtaaacattatctccaaaattacatttatgattctaatatttggcattgtgtctgtatctaatttaaacagatgttaatggacgtctggccgaaactattatacttttataagatgagctgaatcctcttactttaaaaactggtctttttatttaccctctgtggtagaagagtcaccagcaggttccaaattgatgtgtatgataggaaaaaaaccttaattttaaatataatatagagccttaaactatgccactgggtggcagaggctgtataaaacgcacttgttttcatgcaggagcggggcaagtaaggttgagcctgactgtaaacctagaactgcggaaggactgggacttttgtacaaatttcacatttattttacagcaatcatgctgcatttgtgttagtgttctttataataaaaaacaaagcagcctcctggctggctgtgttacaagtgactcttccttagacagctagaaagatgctgactttgtcaaacttgcatttatatgaaaaccttctgtctctaatatcacagaataaactttctttagatgctgttctttaaaaaaaaaaaaaaaaaa

SEQ ID NO: 29842 - DNA, 3085 bp, Homo Sapiens
gacggccgccggagccgcgaggccaactgtcgcctggttgggcccggaaatgggacgtcgcgctttctcagggagcgtagaagcagccagggcctctccaagccgctgctgtgacagaaagtgagtgagctgccggaggatgtccaccgccacgacagtcgcccccgcggggatcccggcgaccccgggccctgtgaacccaccccccccggaggtctccaaccccagcaagcccggccgcaagaccaaccagctgcagtacatgcagaatgtggtggtgaagacgctctggaaacaccagttcgcctggcccttctaccagcccgtggacgcaatcaaattgaacctgccggattatcataaaataattaaaaacccaatggatatggggactattaagaagagactagaaaataattattattggagtgcaagcgaatgtatgcaggacttcaacaccatgtttacaaattgttacatttataacaagcccacagatgacatagtgctaatggcccaagctttagagaaaatttttctacaaaaagtggcccagatgccccaagaggaagttgaattattaccccctgctccaaagggcaaaggtcggaagccggctgcgggagcccagagcgcaggtacacagcaagtggcggccgtgtcctctgtctccccagcgaccccctttcagagcgtgccccccaccgtctcccagacgcccgtcatcgctgccacccctgtaccaaccatcactgcaaacgtcacgtcggtcccagtccccccagctgccgccccacctcctcctgccacacccatcgtccccgtggtccctcctacgccgcctgtcgtcaagaaaaagggcgtgaagcggaaagcagacacaaccactcccacgacgtcggccatcactgccagccggagtgagtcgcccccgccgttgtcagaccccaagcaggccaaagtggtggcccggcgggagagtggtggccgccccatcaagcctcccaagaaggacctggaggacggcgaggtgccccagcacgcaggcaagaagggcaagctgtcggagcacctgcgctactgcgacagcatcctcagggagatgctatccaagaagcacgcggcctacgcctggcccttctacaagccagtggatgccgaggccctggagctgcacgactaccacgacatcatcaagcacccgatggacctcagcaccgtgaaaaggaagatggatggccgagagtacccagacgcacagggctttgctgctgatgtccggctgatgttctcgaattgctacaaatacaatcccccagaccacgaggttgtggccatggcccggaagctccaggacgtgtttgagatgaggtttgccaagatgccagatgagcccgtggaggcaccggcgctgcctgcccccgcggcccccatggtgagcaagggcgctgagagcagccgtagcagtgaggagagctcttcggactcaggcagctcggactcggaggaggagcgggccaccaggctggcggagctgcaggagcagctgaaggccgtgcacgagcagctggccgccctgtctcaggccccagtaaacaaaccaaagaagaagaaggagaagaaggagaaggagaagaagaagaaggacaaggagaaggagaaggagaagcacaaagtgaaggccgaggaagagaagaaggccaaggtggctccgcctgccaagcaggctcagcagaagaaggctcctgccaagaaggccaacagcacgaccacggccggcagacagctgaagaaaggcggcaagcaggcatctgcctcctacgactcagaggaagaggaggagggcctgcccatgagctacgatgaaaagcgccagcttagcctggacatcaaccggctgcccggggagaagctgggccgggtagtgcacatcatccaatctcgggagccctcgctcagggactccaaccccgacgagatagaaattgactttgagactctgaaacccaccactttgcgggaactggagagatatgtcaagtcttgtttacagaaaaagcaaaggaaaccgttctcagcaagcgggaagaaacaggcagccaagtcgaaagaggagctagctcaggaaaagaagaaggagctggaaaagcgtctgcaggatgtcagcgggcagctgagcagcagcaagaagcccgcccggaaagagaagcccggctcagcaccctcagggggcccgtccaggctcagcagcagcagctcctccgagtctgggagcagcagctccagcgggtccagctctgacagcagtgactcagaatgaactggcttcggacagaacaggacagatggatgtcgcacacgccgagactctgccgtacccctctgtggttcatattactacttctgttccatggtgtgcaggtctgcttcttaattcagtgttatgatatcttccagtttttgctttcataggtcagagatctatcttgtgtgtgcgttagacttgatgagaaggtgtgaactctgcagaaagtctcttcttcatcactgaattcagtcacttggagatgacaacttcaaatgctaacccgatgaccccagaaaaccgtgtgagattcgtaccgaagaaccttgtggaatccctttgcttaggcccaacctggtcgatagctcgagaaagaattttttccaaggaaatgtctcggatatgggtactgtatttgaaagctgttagctttgtcaacacgcattgtccttgtcatttgggccccgagctctgaccctcgtgtctgacgcggccacctctttctggaggggctgaggacagatgtgcctgcttgtggagaccaggctgggcctaagcgaagggtcatcgcagccccagcccggagcgtggagcccttggggggtggtcgggtgggatgtgcgttctccgctcgtggtgatgtcaggagctcctcggagggaacagagcggctgtgtatgcagcctgcaggtttccatacactgaagcttttacctcaactttaaaaaaaaaaaagaagaaaagattaaaaaaaaaaaaaaaaaactcgaggcatctatg

SEQ ID NO: 29843 - DNA, 4236 bp, Homo Sapiens
ggtgggcggggggaggaggcggccctagcgccattttgtgggagcgaagcggtggctgggctgcgcttgggtccgtcgctgcttcggtgtccctgtcgggcttcccagcagcggcctagcgggaaaagtaaaagatgtctgaatatattcgggtaaccgaagatgagaacgatgagcccattgaaataccatcggaagacgatgggacggtgctgctctccacggttacagcccagtttccaggggcgtgtgggcttcgctacaggaatccagtgtctcagtgtatgagaggtgtccggctggtagaaggaattctgcatgccccagatgctggctggggaaatctggtgtatgttgtcaactatccaaaagataacaaaagaaaaatggatgagacagatgcttcatcagcagtgaaagtgaaaagagcagtccagaaaacatccgatttaatagtgttgggtctcccatggaaaacaaccgaacaggacctgaaagagtattttagtacctttggagaagttcttatggtgcaggtcaagaaagatcttaagactggtcattcaaaggggtttggctttgttcgttttacggaatatgaaacacaagtgaaagtaatgtcacagcgacatatgatagatggacgatggtgtgactgcaaacttcctaattctaagcaaagccaagatgagcctttgagaagcagaaaagtgtttgtggggcgctgtacagaggacatgactgaggatgagctgcgggagttcttctctcagtacggggatgtgatggatgtcttcatccccaagccattcagggcctttgcctttgttacatttgcagatgatcagattgcgcagtctctttgtggagaggacttgatcattaaaggaatcagcgttcatatatccaatgccgaacctaagcacaatagcaatagacagttagaaagaagtggaagatttggtggtaatccaggtggctttgggaatcagggtggatttggtaatagcagagggggtggagctggtttgggaaacaatcaaggtagtaatatgggtggtgggatgaactttggtgcgttcagcattaatccagccatgatggctgccgcccaggcagcactacagagcagttggggtatgatgggcatgttagccagccagcagaaccagtcaggcccatcgggtaataaccaaaaccaaggcaacatgcagagggagccaaaccaggccttcggttctggaaataactcttatagtggctctaattctggtgcagcaattggttggggatcagcatccaatgcagggtcgggcagtggttttaatggaggctttggctcaagcatggattctaagtcttctggctggggaatgtagacagtggggttgtggttggttggtatagaatggtgggaattcaaatttttctaaactcatggtaagtatattgtaaaatacatatgtactaagaattttcaaaattggtttgttcagtgtggagtatattcagcagtatttttgacatttttctttagaaaaaggaagagctaaaggaattttataagttttgttacatgaaaggttgaaatattgagtggttgaaagtgaactgctgtttgcctgattggtaaaccaacacactacaattgatatcaaaaggtttctcctgtaatattttatccctggacttgtcaagtgaattctttgcatgttcaaaacggaaaccattgattagaactacattctttaccccttgttttaatttgaaccccaccatatggatttttttccttaagaaaatctccttttaggagatcatggtgtcacagtgtttggttcttttgttttgttttttaacacttgtctcccctcatacacaaaagtacaatatgaagccttcatttaatctctgcagttcatctcatttcaaatgtttatggaagaagcacttcattgaaagtagtgctgtaaatattctgccataggaatactgtctacatgctttctcattcaagaattcgtcatcacgcatcacaggccgcgtctttgacggtgggtgtcccatttttatccgctactctttatttcatggagtcgtatcaacgctatgaacgcaaggctgtgatatggaaccagaaggctgtctgaacttttgaaaccttgtgtgggattgatggtggtgccgaggcatgaaaggctagtatgagcgagaaaaggagagagcgcgtgcagagacttggtggtgcataatggatattttttaacttggcgagatgtgtctctcaatcctgtggctttggtgagagagtgtgcagagagcaatgatagcaaataatgtacgaatgttttttgcattcaaaggacatccacatctgttggaagacttttaagtgagtttttgttcttagataacccacattagatgaatgtgttaagtgaaatgatacttgtactccccctacccctttgtcaactgctgtgaatgctgtatggtgtgtgttctcttctgttactgatatgtaagtgtggcaatgtgaactgaagctgatgggctgagaacatggactgagcttgtggtgtgctttgcaggaggacttgaagcagagttcaccagtgagctcaggtgtctcaaagaagggtggaagttctaatgtctgttagctacccataagaatgctgtttgctgcagttctgtgtcctgtgcttggatgctttttataagagttgtcattgttggaaattcttaaataaaactgatttaaataatatgtgtctttgttttgcagccctgaatgcaaagaattcatagcagttaattccccttttttgacccttttgagatggaactttcataaagtttcttggcagtagtttattttgcttcaaataaacttatttgaaaagttgtctcaagtcaaatggattcatcacctgtcatgcattgacacctgatacccagacttaattggtatttgttcttgcattggccaaagtgaaaatttttttttttcttttgaaatctagttttgaataagtctgggtgaccgcacctaaaatggtaagcagtaccctccggctttttcttagtgcctctgtgcatttgggtgatgttctatttacatggcctgtgtaaatctccattgggaagtcatgccttctaaaaagattcttatttgggggagtgggcaaaatgttgattattttctaatgctttgtagcaaagcatatcaattgaaaagggaatatcagcaccttcctagtttgggatttgaaaagtggaattaattgcagtagggataaagtagaagaaaccacaaattatcttgtgcctgaaatccattaagaggcctgatagctttaagaattagggtgggttgtctgtctggaagtgttaagtggaatgggctttgtcctccaggaggtgggggaatgtggtaacattgaatacagttgaataaaatcgcttacaaaactcacactctcacaatgcattgttaagtatgtaaaagcaataacattgattctctgttgtacttttttgtaactaattctgtgagagttgagctcattttctagttggaagaatgtgatatttgttgtgttggtagtttacctaatgcccttacctaattagattatgataaataggtttgtcattttgcaagttacataaacatttatcaatgaagtcatcctttagacttgtaatcgccacattgtttcattattcagtttcctctgtaaagggatcttgagttgttttaattttttttttctgcatctgaatctgcatgatttccaaaccctgtaccatctgaattttgcattttagcacttgcactattactcagcagcagtaacatggtaacacttaaaatggtactcggggacctccaaagactaaactgacaagccttcaaggagcccaggggtaagttaacttgtcaacggcatggtttaatcccttctttacacttgtgtaaatttcagttactggtcatagaaggctttcaatgttgagtggccttttattaacatgtttatggtactgcatagatacgggtatttattttaccctaagaagattttgaagtttaaaagtacttaaactatttggcaaagatttgtttttaaaaatctatttggtcaatctaaatgcattcattctaaaaaattttttgaaccagataaataaaatttttttttgacaccacaaaaaaaaaaaaaaaaaaaa

SEQ ID NO: 29844 - DNA, 4236 bp, Homo Sapiens; identical to SEQ ID NO: 29843

SEQ ID NO: 29845 - DNA, 3293 bp, Homo Sapiens
ggaggcgaactgtgggccccggccattcattgccgtggccggcgggcactggggccccgtgttttcagagtcatggaggcgctaattcctgtcataaacaagctccaggacgtcttcaacacggtgggcgccgacatcatccagctgcctcaaatcgtcgtagtgggaacgcagagcagcggaaagagctcagtgctagaaagcctggtggggagggacctgcttcccagaggtactggaattgtcacccggagacctctcattctgcaactggtccatgtgacacaagaagataaacggaaaacaacaggagaagaaaatggggtggaagcagaagaatggggtaaatttcttcacaccaaaaataagctttacacggattttgatgaaattcgacaagaaattgaaaatgaaacagaaagaatttcaggaaataataagggagtaagccctgaaccaattcatcttaagattttttcacccaacgttgtcaatttgacacttgtggatttgccaggaatgaccaaggtgcctgtaggtgatcaacctaaggatattgagcttcaaatcagagagctcattcttcggttcatcagtaatcctaattccattatcctcgctgtcactgctgctaatacagatatggcaacatcagaggcacttaaaatttcaagagaggtagatccagatggtcgcagaaccctagctgtaatcactaaacttgatctcatggatgcgggtactgatgccatggatgtattgatgggaagggttattccagtcaaacttggaataattggagtagttaacaggagccagctagatattaacaacaagaagagtgtaactgattcaatccgtgatgagtatgcttttcttcaaaagaaatatccatctctggccaatagaaatggaacaaagtatcttgctaggactctaaacaggttactgatgcatcacatcagagattgtttaccagagttgaaaacaagaataaatgttctagctgctcagtatcagtctcttctaaatagctacggtgaacccgtggatgataaaagtgctactttactccaacttattaccaaatttgccacagaatattgtaacactattgaaggaactgcaaaatatattgaaacttcggagctatgcggtggtgctagaatttgttatattttccatgagacttttgggcgaaccttagaatctgttgatccacttggtggccttaacactattgacattttgactgccattagaaatgctactggtcctcgtcctgctttatttgtgcctgaggtttcatttgagttactggtgaagcggcaaatcaaacgtctagaagagcccagcctccgctgtgtggaactggttcatgaggaaatgcaaaggatcattcagcactgtagcaattacagtacacaggaattgttacgatttcctaaacttcatgatgccatagttgaagtggtgacttgtcttcttcgtaaaaggttgcctgttacaaatgaaatggtccataacttagtggcaattgaactggcttatatcaacacaaaacatccagactttgctgatgcttgtgggctaatgaacaataatatagaggaacaaaggagaaacaggctagccagagaattaccttcagctgtatcacgagacaagtcttctaaagttccaagtgctttggcacctgcctcccaggagccctcccccgctgcttctgctgaggctgatggcaagttaattcaggacagcagaagagaaactaaaaatgttgcatctggaggtggtggggttggagatggtgttcaagaaccaaccacaggcaactggagaggaatgctgaaaacttcaaaagctgaagagttattagcagaagaaaaatcaaaacccattccaattatgccagccagtccacaaaaaggtcatgccgtgaacctgctagatgtgccagttcctgttgcacgaaaactatctgctcgggaacagcgagattgtgaggttattgaacgactcattaaatcatattttctcattgtcagaaagaatattcaagacagtgtgccaaaggcagtaatgcattttttggttaatcatgtgaaagacactcttcagagtgagctagtaggccagctgtataaatcatccttattggatgatcttctgacagaatctgaggacatggcacagcgcaggaaagaagcagctgatatgctaaaggcattacaaggagccagtcaaattattgctgaaatccgggagactcatctttggtgaagagaactatgtaatactgagactttgttgactcaaaacttgctagttactgcctacctgagtagaatcttatttatgaactcctgtgtattgcaatggtatgaatctgctcatgtggagactggctataaactgaaaagtgtattccaaattgcagaacacatcacacatttaatccaaataataaatggctgtttctaaagtttcccagtatatataaaatacatcaagtctgtcttgtgacagtttcatctgaacttaacttaaaaacaactgttaatgttctagttgtgcaaagcagtttgcctgtggataagatgacctgtgtaataatctttgttagtagtcttaaagctgctgccatagtcctccaagaagaaagcaccaagacaacatttcatatgactataatgcatgtactatataagctgatctggctttgaaagatgtgagttggcaagttcctcacatagagtcattgtattccacctgtccttcaatttagttttttctgagcttctttgcagcctttgatgtgtttttaagaaagctgaatgcacaagaggatctgtgacactgacatggctgtggtgtgcatactgtgtagttacatagcccttccaattctgggtccatttgcactagcaaattaaaatatgctttgattcatacttaaacctgaaagcaggaatgcctacattaattcctacattaaaaacagccatctacccttgattatctagaaagacttggtaatgatggtcagttccttttagatttcagaaaatcaaatgatgacctaaatttcccttaatttgcaaatacagtagtaattaaggtacatctctaaagtggagcacttacaccaggctctaagattcactttgaggtggaacttaaaaccagtgtactgtatgtatgcattggtaatagctacttttgcttcatagcttcataccaacaaaatatatttattagaatagtatgaaagtactgaaggagttgaaaga

SEQ ID NO: 29846 - DNA, 6699 bp, Homo Sapiens
aaagccctcagcctttgtgtccttctctgcgccggagtggctgcagctcacccctcagctccccttggggcccagctgggagccgagatagaagctcctgtcgccgctgggcttctcgcctcccgcagagggccacacagagaccgggatggccacctccatgggcctgctgctgctgctgctgctgctcctgacccagcccggggcggggacgggagctgacacggaggcggtggtctgcgtggggaccgcctgctacacggcccactcgggcaagctgagcgctgccgaggcccagaaccactgcaaccagaacgggggcaacctggccactgtgaagagcaaggaggaggcccagcacgtccagcgagtactggcccagctcctgaggcgggaggcagccctgacggcgaggatgagcaagttctggattgggctccagcgagagaagggcaagtgcctggaccctagtctgccgctgaagggcttcagctgggtgggcgggggggaggacacgccttactctaactggcacaaggagctccggaactcgtgcatctccaagcgctgtgtgtctctgctgctggacctgtcccagccgctccttcccaaccgcctgcccaagtggtctgagggcccctgtgggagcccaggctcccccggaagtaacattgagggcttcgtgtgcaagttcagcttcaaaggcatgtgccggcctctggccctggggggcccaggtcaggtgacctacaccacccccttccagaccaccagttcctccttggaggctgtgccctttgcctctgcggccaatgtagcctgtggggaaggtgacaaggacgagactcagagtcattatttcctgtgcaaggagaaggcccccgatgtgttcgactggggcagctcgggccccctctgtgtcagccccaagtatggctgcaacttcaacaatgggggctgccaccaggactgctttgaagggggggatggctccttcctctgcggctgccgaccaggattccggctgctggatgacctggtgacctgtgcctctcgaaacccttgcagctccagcccatgtcgtgggggggccacgtgcgtcctgggaccccatgggaaaaactacacgtgccgctgcccccaagggtaccagctggactcgagtcagctggactgtgtggacgtggatgaatgccaggactccccctgtgcccaggagtgtgtcaacacccctgggggcttccgctgcgaatgctgggttggctatgagccgggcggtcctggagagggggcctgtcaggatgtggatgagtgtgctctgggtcgctcgccttgcgcccagggctgcaccaacacagatggctcatttcactgctcctgtgaggagggctacgtcctggccggggaggacgggactcagtgccaggacgtggatgagtgtgtgggcccggggggccccctctgcgacagcttgtgcttcaacacacaagggtccttccactgtggctgcctgccaggctgggtgctggccccaaatggggtctcttgcaccatggggcctgtgtctctgggaccaccatctgggccccccgatgaggaggacaaaggagagaaagaagggagcaccgtgccccgcgctgcaacagccagtcccacaaggggccccgagggcacccccaaggctacacccaccacaagtagaccttcgctgtcatctgacgcccccatcacatctgccccactcaagatgctggcccccagtgggtcctcaggcgtctggagggagcccagcatccatcacgccacagctgcctctggcccccaggagcctgcaggtggggactcctccgtggccacacaaaacaacgatggcactgacgggcaaaagctgcttttattctacatcctaggcaccgtggtggccatcctactcctgctggccctggctctggggctactggtctatcgcaagcggagagcgaagagggaggagaagaaggagaagaagccccagaatgcggcagacagttactcctgggttccagagcgagctgagagcagggccatggagaaccagtacagtccgacacctgggacagactgctgaaagtgaggtggccctagagacactagagtcaccagccaccatcctcagagctttgaactccccattccaaaggggcacccacatttttttgaaagactggactggaatcttagcaaacaattgtaagtctcctccttaaaggccccttggaacatgcaggtattttctacgggtgtttgatgttcctgaagtggaagctgtgtgttggcgtgccacggtggggatttcgtgactctataatgattgttactccccctcccttttcaaattccaatgtgaccaattccggatcagggtgtgaggaggctggggctaaggggctcccctgaatatcttctctgctcacttccaccatctaagaggaaaaggtgagttgctcatgctgattaggattgaaatgatttgtttctcttcctaggatgaaaactaaatcaattaattattcaattaggtaagaagatctggttttttggtcaaagggaacatgttcggactggaaacatttctttacatttgcattcctccatttcgccagcacaagtcttgctaaatgtgatactgttgacatcctccagaatggccagaagtgcaattaacctcttaggtggcaaggaggcaggaagtgcctctttagttcttacatttctaatagccttgggtttatttgcaaaggaagcttgaaaaatatgagaaaagttgcttgaagtgcattacaggtgtttgtgaagtcacataatctacggggctagggcgagagaggccagggatttgttcacagatacttgaattaattcatccaaatgtactgaggttaccacacacttgactacggatgtgatcaacactaacaaggaaacaaattcaaggacaacctgtctttgagccagggcaggcctcagacaccctgcctgtggccccgcctccacttcatcctgcccggaatgccagtgctccgagctcagacagaggaagccctgcagaaagttccatcaggctgtttcctaaaggatgtgtgaacgggagatgatgcactgtgttttgaaagttgtcattttaaagcattttagcacagttcatagtccacagttgatgcagcatcctgagattttaaatcctgaagtgtgggtggcgcacacaccaagtagggagctagtcaggcagtttgcttaaggaacttttgttctctgtctcttttccttaaaattgggggtaaggagggaaggaagagggaaagagatgactaactaaaatcatttttacagcaaaaactgctcaaagccatttaaattatatcctcattttaaaagttacatttgcaaatatttctccctatgataatgcagtcgatagtgtgcactctttctctctctctctctctctcacacacacacacacacacacacacacacacacagagacacggcaccattctgcctggggcactggaacacattcctgggggtcaccgatggtcagagtcactagaagttacctgagtatctctgggaggcctcatgtctcctgtgggctttttaccaccactgtgcaggagaacagacagaggaaatgtgtctccctccaaggccccaaagcctcagagaaagggtgtttctggttttgccttagcaatgcatcggtctctgaggtgacactctggagtggttgaagggccacaaggtgcagggttaatactcttgccagttttgaaatatagatgctatggttcagattgtttttaatagaaaactaaaggggcaggggaagtgaaaggaaagatggaggttttgtgcggctcgatggggcatttggaacttctttttaaagtcatctcatggtctccagttttcagttggaactctggtgtttaacacttaagggagacaaaggctgtgtccatttggcaaaacttccttggccacgagactctaggtgatgtgtgaagctgggcagtctgtggtgtggagagcagccatctgtctggccattcagaggattctaaagacatggctggatgcgctgctgaccaacatcagcacttaaataaatgcaaatgcaacatttctccctctgggccttgaaaatccttgcccttatcatttggggtgaaggagacatttctgtccttggcttcccacagccccaacgcagtctgtgtatgattcctgggatccaacgagccctcctattttcacagtgttctgattgctctcacagcccaggcccatcgtctgttctctgaatgcagccctgttctcaacaacagggaggtcatggaacccctctgtggaacccacaaggggagaaatgggtgataaagaatccagttcctcaaaaccttccctggcaggctgggtccctctcctgctgggtggtgctttctcttgcacaccactcccaccacggggggagagccagcaacccaaccagacagctcaggttgtgcatctgatggaaaccactgggctcaaacacgtgctttattctcctgtttatttttgctgttactttgaagcatggaaattcttgtttgggggatcttggggctacagtagtgggtaaacaaatgcccaccggccaagaggccattaacaaatcgtccttgtcctgaggggccccagcttgctcgggcgtggcacagtggggaatccaagggtcacagtatggggagaggtgcaccctgccacctgctaacttctcgctagacacagtgtttctgcccaggtgacctgttcagcagcagaacaagccagggccatggggacgggggaagttttcacttggagatggacaccaagacaatgaagatttgttgtccaaataggtcaataattctgggagactcttggaaaaaactgaatatattcaggaccaactctctccctcccctcatcccacatctcaaagcagacaatgtaaagagagaacatctcacacacccagctcgccatgcctactcattcctgaatttcaggtgccatcactgctctttctttcttctttgtcatttgagaaaggatgcaggaggacaattcccacagataatctgaggaatgcagaaaaaccagggcaggacagttatcgacaatgcattagaacttggtgagcatcctctgtagagggactccacccctgctcaacagcttggcttccaggcaagaccaaccacatctggtctctgccttcggtggcccacacacctaagcgtcatcgtcattgccatagcatcatgatgcaacacatctacgtgtagcactacgacgttatgtttgggtaatgtggggatgaactgcatgaggctctgattaaggatgtggggaagtgggctgcggtcactgtcggccttgcaaggccacctggaggcctgtctgttagccagtggtggaggagcaaggcttcaggaagggccagccacatgccatcttccctgcgatcaggcaaaaaagtggaattaaaaagtcaaacctttatatgcatgtgttatgtccattttgcaggatgaactgagtttaaaagaatttttttttctcttcaagttgctttgtcttttccatcctcatcacaagcccttgtttgagtgtcttatccctgagcaatctttcgatggatggagatgatcattaggtacttttgtttcaacctttattcctgtaaatatttctgtgaaaactaggagaacagagatgagatttgacaaaaaaaaattgaattaaaaataacacagtctttttaaaactaacataggaaagcctttcctattatttctcttcttagcttctccattgtctaaatcaggaaaacaggaaaacacagctttctagcagctgcaaaatggtttaatgccccctacatatttccatcaccttgaacaatagctttagcttgggaatctgagatatgatcccagaaaacatctgtctctacttcggctgcaaaacccatggtttaaatctatatggtttgtgcattttctcaactaaaaatagagatgataatccgaattctccatatattcactaatcaaagacactattttcatactagattcctgagacaaatactcactgaagggcttgtttaaaaataaattgtgttttggtctgttcttgtagataatgcccttctattttaggtagaagctctggaatccctttattgtgctgttgctcttatctgcaaggtggcaagcagttcttttcagcagattttgcccactattcctctgagctgaagttctttgcatagatttggcttaagcttgaattagatccctgcaaaggcttgctctgtgatgtcagatgtaattgtaaatgtcagtaatcacttcatgaatgctaaatgagaatgtaagtatttttaaatgtgtgtatttcaaatttgtttgactaattctggaattacaagatttctatgcaggatttaccttcatcctgtgcatgtttcccaaactgtgaggagggaaggctcagagatcgagcttctcctctgagttctaacaaaatggtgctttgagggtcagcctttaggaaggtgcagctttgttgtcctttgagctttctgttatgtgcctatcctaataaactcttaaacacatt

SEQ ID NO: 29847 - DNA, 2222 bp, Homo Sapiens
ggctcgagtgcctggcgggctccggcttccgcgtccgcccctgctccggcttcgcccgcagctccgcgcccgcgggcaaccaagcccccagcgaagcccgcacagctccgggtgccaggacggggggccatgccgtgccggagggaggaggaagaggaagccggcgaggaggcggagggggaggaagaggaggacgacagcttcctcctgctgcagcagtcggtgacgctgggcagctcgggcgaggtggaccggctggtggcccagatcggcgagacgctgcagctggacgcggcgcaggacagcccggcctcgccgtgcgcgcccccgggggtgccgctgcgggccccggggcccctggctgcggcggtgccggcggacaaggcccggcccccggcggtgccgctgctgctgccgcccgcttcggctgagacggtgggcccggcgccctctggggccctgcgctgcgccctaggggaccgcggccgcgtgcgcggacgcgctgcgccctactgcgtggcggaggtcgccgcaggccccagcgcgctgccggggccgtgccggcgaggatggctcagggacgcggtcacctcccgccgcttgcagcagcgccgatggacccaagccggggcacgcgccggcgacgacgacccgcatcggctcctccagcagctcgtgctctcgggaaacctcatcaaggaagccgtgcggagactccaacgagccgtcgccgcggttgcagccacgggccccgcaagcgcccctgggcccgggggaggccgcagcggacctgaccgcattgccctgcagccctcaggctccttgctctgacgcaggcctcctggaggaggaagtggaggccgctgcgtagacccaacagcgtccagttcctactaactctgagctgaagccgacgtcgccagcctgggagcgaccactttggctgcggggaggcgcgtggggagagatctcaaccagagaagttaccagccgcggcgaggccgtcggagaaaacttaagcgtggagaaatgtatgcgccagggtgcttccgtggggcatgagaatttcccgggccatccaagcccaaggacctgggataaactgggagaactatggcagctacttgcatcgacttgtacctcacttagcccttgggggcgtcgtgagcttggattgtttaaggagggctcaggggtaggaatcgcgatggctttataacaatacttgaaaactaacgacacgcatacattttcttattttctggtggaggagcttagtaagtggtgctacaattgctgtgcaaagaaattccagaggggagaagaatgtaaaagtttggtggtgggtggcttggcattgcccctttttcccaccgattcggtggctggtgaaggtgggagatgtgaactccaattaagggactggagagaggtgaagaattttgcaggtgggagatttggatttgaatgtggacttgtaaatgacttgaccttgccatctgtgttcaaggtcacggtttgctgtggggttcctgggagagcttactcaccccggagtcttttctttctcttgctccaagaagagccctgttggtgctttaccaccgcttggagtctcccgaggacacaaacaggcagagagggacgtgtagggagagttctttcctgttttctgtgctttcctttttacaggactcccggaaggccactcatggccatgccaggagctttctcagaaacagtcataaacgatctcttgagtctctttcttgtcctcccagctgagctttcttattccaccctttctggtgtctataggaatgcatgagagaccctggacgtttttctgctctcttctggccctccatggagtcatgggcctcggcctcggcggctcctcaccctcacaatttatttcctcctcccgtgccagcccttcttttgtgtctgaaaccggttttaaaatgtgactctcccagagaagaagccgctggctgtatgaaacttgacggcgcttttgtaaggtgccacccccaaactttaaggtagctaaaccaatttttaaaagattcaatggcttgttcatcctccagatgtagctattgatgtacacttcgcaacggagtgtctgaaattgtggtggtcctgatttataggatttcataattaaaatgtctgctgaataaatttggcttttgttttggaaaaaaaaaaaaaaaaaa

SEQ ID NO: 29848 - DNA, 2727 bp, Homo Sapiens
ctaggcgcgtttcctgaaggtcgatggccaggtggtcttcataaactatactgccttgtgatgcctccctagaaatgagaggtctcaataccagctcagaccatgtggaccgcggatgagattgctcagctatgctatgaacactatgggatcaggctgcccaagaaggggaagcctgagccaaaccatgagtggacattattggcagcggtggtgaagatacaatctccagctgacaaggcctgcgacacccctgataagccggtgcaagtgacaaaggaaattgtgtcaatgggaacaggaacaaaatgcataggacagtccaaaatgaggaagaacggagacatcctcaatgatagccatgctgaggtcatagccagaaggagtttccaaaggtaccttctccaccaactccagttggcagccaccctgaaagaggatagcatctttgtcccaggaactcaaaaaggagtgtggaaacttagacgagacctcatttttgtgtttttctccagccatacaccctgtggggatgcctccatcattccgatgcttgagtttgaagatcagccttgctgtcctgtcttcagaaattgggccaacaactcatcagtagaagccagtagtaacctggaagctcctggaaatgaaagaaaatgtgaagaccctgacagtcctgtaaccaaaaagatgaggcttgagcctgggactgcagccagggaggtcaccaacggagcagctcaccatcagagttttggcaagcagaaaagtggcccaatctcaccaggcatccacagctgtgatctcactgtagagggactggctactgtcaccagaatagcccctggtagtgccaaagtgacagacgtttatagaactggagccaagtgtgtacctggagaagctggagactccggaaagccgggtgctgcgtttcaccaggtggggctgctccgagtgaagccaggccgtggagacagaacacgctccatgtcctgtagtgacaagatggcccgatggaacgtcctcggatgccaaggggcactgttgatgcacttgctggaagagcccatctacctgtcagctgtggtcattgggaagtgcccatacagccaggaagccatgcagagagcactgattggaaggtgtcagaatgtgtctgctttaccaaaaggcttcggagttcaagaattaaaaatactgcagtcagatttactatttgaacagagccgcagtgcggtgcaggcaaaaagggctgatagcccaggtcgacttgttccttgtggggcagccatcagctggagtgcagttcctgagcagcctttggatgttactgccaatggctttccacagggaacaacaaagaaaacaattggaagccttcaggcaagatcccaaatcagcaaagtggaactcttcagatcattccagaagctgctaagcagaattgcaagggacaagtggccacactccctcagggtgcagaagctggatacctaccaggagtacaaggaggctgcgtcctcttaccaggaagcctggagcacactccggaagcaggtgtttggatcctggatcagaaacccaccggattatcaccagttcaagtgagaaggaaatgtttgctctggtagcaggacccttcatcctgaactgccttcctccacgcaggacaagtcttagcttttttggtagttaaatcagggaacattctttctgagctttgcatctctgttgtgtaatacagatggaatctggaacttagagcaagctatacttgattgaagtagctctctgctaaaatggcatctcactaatgacctcactatctgacttccattgtgttttattgcttctctaaaatatgaaatcagagtttggaacatgatgctttgaaagtactctgcagcagctctgttttatgggttcctacattgattcagcaaatatttattgagctgaaatgatgtttgacgctctgcaagttttacagctttgcctagcatagcgaatatatattttgtattcccagcctttctttcttcagggagccattcttttcccattcttcagtggtcctgctctgtgcctcagacttggctgaagctaaccttactccctggctctaggaatagcctgtgagccagccctggactgccctggacttgttctcagaggtatcaggaaaggctttctgttttgatctggagctgtaagggtcacataatcatgggactgccggtggccatcttttcctactacctagagaaagccagcaaagaatgaaggcaacaaaggaaacagccaagagaatcaaagatctagtaacactgtttagatgtctcaattatgtgagacagattcctgttgttattttgattaagcctgtttgtgttggttttctgacttacaattgaaagagttctgtccaaaaagccaaaaggtggccaggcttggtggctcaggcctgtaatcccagcactttgggaagcccaggcaggcagatcacttgaggtcaggagttcaagaccagcctggccaacctggtgaaaccctgtctctactaaaaatgcaaaaactagccgggcatggtggcgcacacctgtaatcctagctactcgggaggctgaggcaggagaattgcttgaacccaggaggcggaggtagtggtgagcaaagatcgtaccgctgcactccagcctgggtgatagagcaagaccctatctc

SEQ ID NO: 29849 - DNA, 5970 bp, Homo Sapiens; identical to SEQ ID NO: 23222

SEQ ID NO: 29850 - DNA, 3572 bp, Homo Sapiens
gcctttctggggcctgggggatcctcttgcactggtgggtggagagaagcgcctgcagccaaccagggtcaggctgtgctcacagtttcctctggcggcatgtaaaggctccacaaaggagttgggagttcaaatgaggctgctgcggacggcctgaggatggaccccaagccctggacctgccgagcgtggcactgaggcagcggctgacgctactgtgagggaaagaaggttgtgagcagccccgcaggacccctggccagccctggccccagcctctgccggagccctctgtggaggcagagccagtggagcccagtgaggcagggctgcttggcagccaccggcctgcaactcaggaacccctccagaggccatggacaggctgccccgctgacggccagggtgaagcatgtgaggagccgccccggagccaagcaggagggaagaggctttcatagattctattcacaaagaataaccaccattttgcaaggaccatgaggccactgtgcgtgacatgctggtggctcggactgctggctgccatgggagctgttgcaggccaggaggacggttttgagggcactgaggagggctcgccaagagagttcatttacctaaacaggtacaagcgggcgggcgagtcccaggacaagtgcacctacaccttcattgtgccccagcagcgggtcacgggtgccatctgcgtcaactccaaggagcctgaggtgcttctggagaaccgagtgcataagcaggagctagagctgctcaacaatgagctgctcaagcagaagcggcagatcgagacgctgcagcagctggtggaggtggacggcggcattgtgagcgaggtgaagctgctgcgcaaggagagccgcaacatgaactcgcgggtcacgcagctctacatgcagctcctgcacgagatcatccgcaagcgggacaacgcgttggagctctcccagctggagaacaggatcctgaaccagacagccgacatgctgcagctggccagcaagtacaaggacctggagcacaagtaccagcacctggccacactggcccacaaccaatcagagatcatcgcgcagcttgaggagcactgccagagggtgccctcggccaggcccgtcccccagccaccccccgctgccccgccccgggtctaccaaccacccacctacaaccgcatcatcaaccagatctctaccaacgagatccagagtgaccagaacctgaaggtgctgccaccccctctgcccactatgcccactctcaccagcctcccatcttccaccgacaagccgtcgggcccatggagagactgcctgcaggccctggaggatggccacgacaccagctccatctacctggtgaagccggagaacaccaaccgcctcatgcaggtgtggtgcgaccagagacacgaccccgggggctggaccgtcatccagagacgcctggatggctctgttaacttcttcaggaactgggagacgtacaagcaagggtttgggaacattgacggcgaatactggctgggcctggagaacatttactggctgacgaaccaaggcaactacaaactcctggtgaccatggaggactggtccggccgcaaagtctttgcagaatacgccagtttccgcctggaacctgagagcgagtattataagctgcggctggggcgctaccatggcaatgcgggtgactcctttacatggcacaacggcaagcagttcaccaccctggacagagatcatgatgtctacacaggaaactgtgcccactaccagaagggaggctggtggtataacgcctgtgcccactccaacctcaacggggtctggtaccgcgggggccattaccggagccgctaccaggacggagtctactgggctgagttccgaggaggctcttactcactcaagaaagtggtgatgatgatccgaccgaaccccaacaccttccactaagccagctccccctcctgacctctcgtggccattgccaggagcccaccctggtcacgctggccacagcacaaagaacaactcctcaccagttcatcctgaggctgggaggaccgggatgctggattctgttttccgaagtcactgcagcggatgatggaactgaatcgatacggtgttttctgtccctcctactttccttcacaccagacagcccctcatgtctccaggacaggacaggactacagacaactctttctttaaataaattaagtctctacaataaaaacacaactgcaaagtaccttcataatatacatgtgtatgagcctcccttgtgcacgtatgtgtataccacatatatatgcatttagatatacatcacatgtgatatatctagatccatatataggtttgccttagatacctaaatacacatatattcagttctcagatgttgaagctgtcaccagcagctttgctcttaggagaaaagcatttcattagtgttgtattacttgagtctaagggtagatcacagactgtgtggtctcaactgaaaggatcacccttggcatctgtgtgcctggattcttccagaatgtctacaatgctaatctctcacatagaggttcccagcttcttaagaaccccttttggcacctaatcaaatttcaaaatccctccccccacattttcatacttttccccattctcaggacttttcaccatccatcacccacttatcccttcatttgacaccattcattaagtgccttctgtgtgtcagtccctggccactcactgcagttcaaggccccctttccgctctgctgtactcctcgcctacctactccttgccttttctgtcgcacagccccttctttccaggcgagattcctcagcttctgagtaggaaacactccgggctccaggtttctggttgggaagggaaggccaggccaaaagctccaccggccgtatagataatgtactcgcagttttgtatcttccattcatactttaacctacaggtcatttgagtcttcacacaaataataacctatctggccaggagaattatctcagaacagaagtcatcagatcatcagagcccccagatggctacagaccagagattccacgctctcaggctgactagagtccgcatctcatctccaaactacacttccctggagaacaagtgccacaaaaatgaaaacaggccacttctcaggagttgaataatcaggggtcaccggaccccttggttgatgcactgcagcatggtggctttctgagtcctgttggccaccaagtgtcagcctcagcactcccgggactattgccaagaaggggcaagggatgagtcaagaaggtgagacccttcccggtgggcacgtgggccaggctgtgtgagatgttggatgtttggtactgtccatgtctgggtgtgtgcctattacctcagcatttctcacaaagtgtaccatgtagcatgttttgtgtatataaaagggagggtttttttaaaaatatattcccagattatccttgtaatgacacgaatctgcaataaaagccatcagtgct

SEQ ID NO: 29851 - DNA, 8035 bp, Homo Sapiens; identical to SEQ ID NO: 22464

SEQ ID NO: 29852 - DNA, 8035 bp, Homo Sapiens; identical to SEQ ID NO: 22464

SEQ ID NO: 29853 - DNA, 2058 bp, Homo Sapiens
cggtgctagcgacacgggagtggcaaacgcatcctcttgccgttcccggtgtttgggccttgcctgtgacggtgggaaaagaaaatggccttgctgtgctacaaccggggctgcggtcagcgcttcgatcctgagaccaattccgacgatgcttgcacataccacccaggtgttccggtctttcacgatgcattaaagggttggtcttgctgtaagagaagaacaactgatttttctgatttcttaagcattgtaggctgtacaaaaggtagacataatagtgagaagccacctgagccagtcaaacctgaagtcaagactactgagaagaaggagctatgtgaattaaaacccaaatttcaggaacacatcattcaagcccctaagccagtagaagcaataaaaagaccaagcccagatgaaccaatgacaaatttggaattaaaaatatctgcctccctaaaacaagcacttgataaacttaaactgtcatcagggaatgaagaaaataagaaagaagaagacaatgatgaaattaagattgggacctcatgtaagaatggagggtgttcaaagacataccagggtctagagagtctagaagaagtctgtgtatatcattctggagtacctattttccatgaggggatgaaatactggagctgttgtagaagaaaaacttctgattttaatacattcttagcccaagagggctgtacaaaagggaaacacatgtggactaaaaaagatgctgggaaaaaagttgttccatgtagacatgacttgcatcagactggaggtgaagttaccatttcagtatatgctaaaaactcacttccagaacttagccgagtagaagcaaatagcacattgttaaatgtcattattgtatttgaaggagagaaggaatttgatcaaaatgtgaaattatggggtgtgattgatgtaaagcgaagttatgtaactatgactgcaacaaagattgaaatcactatgagaaaagctgaaccgatgcagtgggcaagccttgaactgcctgcagctaaaaagcaggaaaaacaaaaagatgacacaacagattgagtgggagatggaaggaaggctattacattatttccgaatttttaatactgtgtgaagtggtggcttgctgctgtaatcttttgttttgttgttgtgttactgaatgtggcatttcagggttaacattaggttcttaaaagccaaagtcagtttgtctttttgtgcctctcatctttcttttgtgttatgtaagattgattattcatttctccctactggtaggaaccatagttgtgtcctatacttgaagaggctggaaagtagcccataaccataattgcagtatttctttgtatttctctgttaagcaaagaaatattaaggaacattttttttatgtttttgtattattccataattagtaaagcaagatgaaatgtcaaattttaatcagttttttcatggatttgtgttcttacagtacttgaaaatatttaaggaagagatgaagctctgcagttttttctatgtgggatgattacttttttaaggaggattaattctgaggtagtatagtaactaaaggggaatatatgaattgtttaacaaattagaatttgtttacaactacttgaatttttaaattatgtcaaaacttacattacttgccaagcagtatgatgttataggaaacataaataagattacagaggtatcaatttggttaaaattcaccattttataagactaagcaataatcttaacaacctctttcctgaatatttaaatgtgtttgtatggtgttatgactaattgttactgatttagagactaagccctcttaaaacctttagttaaatataaaaagaaattatatatatcttgcctccctgatggaaaactatataaaattgtagacttaaaaggtttgtggaaatacattaggatatcagaaaactaaatatatggagttgctttatgactattacatgttaaataaaaatagcttaattgttaaaaaaaaaaaaaaaaaaa

SEQ ID NO: 29854 - DNA, 3949 bp, Homo Sapiens
aggagccgacgggcgctcgcaggctcagcgcgcgctgcccgcggcaggacccggccgcctccgccgccgccgccgcccctaagcctcccgaagccatggccgggctcggccaccccgccgccttcggccgggccacccacgccgtggtgcgggcgctacccgagtcgctcggccagcacgcgctgagaagcgccaagggcgaggaggtggacgtcgcccgcgcggaacggcagcaccagctctacgtgggcgtgctgggcagcaagctggggctgcaggtggtggagctgccggccgacgagagccttccggactgcgtcttcgtggaggacgtggccgtggtgtgcgaggagacggccctcatcacccgacccggggcgccgagccggaggaaggaggttgacatgatgaaagaagcattagaaaaacttcagctcaatatagtagagatgaaagatgaaaatgcaactttagatggcggagatgttttattcacaggcagagaattttttgtgggcctttccaaaaggacaaatcaacgaggtgctgaaatcttggctgatacttttaaggactatgcagtctccacagtgccagtggcagatgggttgcatttgaagagtttctgcagcatggctgggcctaacctgatcgcaattgggtctagtgaatctgcacagaaggcccttaagatcatgcaacagatgagtgaccaccgctacgacaaactcactgtgcctgatgacatagcagcaaactgtatatatctaaatatccccaacaaagggcacgtcttgctgcaccgaaccccggaagagtatccagaaagtgcaaaggtttatgagaaactgaaggaccatatgctgatccccgtgagcatgtctgaactggaaaaggtggatgggctgctcacctgctgctcagttttaattaacaagaaagtagactcctgagctgcagagtcccccccggtagccggcaagaccgcacaggcaaggccgatgactctgtgcccactcctgttgttttccttgacaatctactgtgccactgtgctactaactcttgtttacaaaatttgattctaagttgaattgcttcattcaacacccccaccctccctcccctcgaggtggtacctaagctgtggatttgctaaatgaattaagcaacctagaagatacagagctaatgaattatcaaaatgtgattaatcccagtaaggaaacactcatttagtgtctgtatttttggtgtgaaaattatttagttgccagtatattctgaagaatgtcttcttgatcagtcagataagcttgctttttttttttttttttttcatgaatcatgtttggttcctgtgaaagtccctggtccagggatcctcctcctttctcttttacttctgaattctgaaattcagttagttacttttgcctttcgctcttctatcacagccaccttgaccttgggtaaaacccaaggtctttccttctggctaccttcctgcaggtccaccctgtctgccattggtctcctctgcctctgactacatctgccaccaacaaccctcccctcacccctgccaggggcagacaggcttctcagcagaactgtgactgaaatcagagctgctgtctggggcagtgttaactacacagaggcacatcctgacagggtttgccccagagatctaaattccagaaggagggcaccacacctaggaaggtaaatccagtatcagaaggttgctaaaagattaaagatcaagaagcttggaaacatcccatgggtacaatgtcttagaaagtctttaagtcacataccatgaatttttgcttcattactgaccatatatgaccttggaggaactcttttttttttttccttctactcatttctgtttccacctaccctgactcaccgtatttccagtcttctacccctgcagttatcctagtccagcaaagtcatttctttcaaaagagacatcatgtctgaaaataattactggtagtctaatatgagccagagtaaacagctcctcatggtcaatgaacatgttcaggaagcgatcaccttgatgcttgaacccaaccccagacagtggacaattctactttgaaatatccgtgaatatttactgtgggatccaatttaaacttctttcttctctagcctttaaattacacaactttgaactgacacggatctcttacaaagaacaatgcggcactgaaggaagagatgattcctttactcaaacctgcaggaatcagcctattaacaggcaggggaaacggtactttccaatgaatggtaactgatccaggcacattatcacacttcctagtcatctccacctttcctgtattgcctgtggcttgttgtttaagattaagaatcaaagagattaagaagtatcacttcaagtcttgctctgctcacttctatgtttgcagtcaaattattccttatgttggtgacctaaagagaattactttcattcatttcatttcccccgtagcagatggaagtgagaaacctctgagaaaatgaaaacatccttaaccactatctttcccttttatttgattattttatgtcagaaatttgcaaaagtttttttctcctccttctcttccttgttgcttaactttttaattcatgccatatgcagatatccaattatgtgcatcctgtgaataaaccacgtcttggtcactgtcatattttgaaccatctcatcagagatgaataatatctttttaccagagagagaacgaatgttagccacatgcccaagttaacaaagaaaaaatgttctcaaggttgtccttttgggttaaatctggcccttccttggcaaaagcaaaaattctccctgtgagagctcaacatctcaaatacaaccacaggaaaaatggcccaatctgccagtttaggcttaccagcatataatttttaatatctttacttctatcatcccaaatcaaagaactcttctctattatgtttaatcaattgcaagcaaatagatttttctttgtaacaatttgttctgcagaaggctgtttttcacttttcctttcttttgcttctttctgtctttccttctcttttgtctggagaaatcacttagactctgtgtgcctcttctacattgcattctgctctgctatgttacctgctaggctggcttctttggactccctatatgattgatgatgtgaaaacctaaattacttgcagcatagtattacttctttgatgttctcattagcataatgttatttttgaaaaggaaagatactatcacataagttttcctcatctgttgtgatatacaccaatggataaactaacggaaactgctttttgacattaaaagacaggagaaattatatttaactaagtaaaagttaagtcagaattacttgggtgatgtgattcaatttagttaaaggatgatatagagaaaatacattatttagcattatttcttcagctataatgaattgctatagaaatcaggcagatctttctaatgtgtattgattggtcttttcagctactctgaacagattactaaggccatctcctcatctctaagggagaaaaatagtctgtagatgaataatgtaaggtaaagagttgcatgtcagtctttgtaattatttacactttaactttctccagaactcagacatgatttcaacatggtgttagatttgtgcattttattttcctgaccacctcattccagccaatgtatggttatccactctgtgtgccaaaaccaatcatgcctttcacggccctttagttcagagaagttctgcactgatttttagtctcttgatgtctcaatcttacatgtataccaatcacaatggaataaagtgttgagttgtactgtgaaaaaaaaaaaaaaaaaaaaaaaaaaaaa

SEQ ID NO: 29855 - DNA, 6276 bp, Homo Sapiens
agtcggcatccatcagcgggcgggggtgtcgccgaacaggctgctccgcagagcccgccgcgaccccgcgccgccccgccccgcggcctgcctgccagaggagccgagggggccgcccctcgcccaacctgcccgacatggggaaccccgggcccaggcgtgctggtcaccatgacaacagagacaggccccgactctgaggtgaagaaagctcaggaggaggccccgcagcagcccgaggctgctgccgctgtgaccacccctgtgacccctgcaggccacggccacccagaggccaactccaatgagaagcatccatcccagcaggacacgcggcctgctgaacagagcctagacatggaggagaaggactacagtgaggccgatggcctttcggagaggaccacgcccagcaaggcccagaaatcgccccagaagattgccaagaaatacaagagtgccatctgccgggtcactctgcttgatgcctcggagtatgagtgtgaggtggagaaacatggccggggccaggtgctgtttgacctggtctgtgaacacctcaacctcctagagaaggactacttcggcctgaccttctgtgatgctgacagccagaagaactggctggacccctccaaggagatcaagaagcagatccggagtagcccctggaattttgccttcacagtcaagttctacccgcctgatcctgcccagctgacagaagacatcacaagatactacctgtgcctgcagctgcgggcagacatcatcacgggccggctgccatgctcctttgtcacgcatgccctactgggctcctacgctgtgcaggctgagctgggtgactatgatgctgaggagcatgtgggcaactatgtcagcgagctccgcttcgcccctaaccagacccgggagctggaggagaggatcatggagctgcataagacatatagggggatgaccccgggagaagcagaaatccacttcttagagaatgccaagaagctttccatgtacggagtagacctgcaccatgccaaggactctgagggcatcgacatcatgttaggcgtttgtgccaatggcctgctcatctaccgggaccggctgagaatcaaccgctttgcctggcccaagatcctcaagatctcctacaagaggagtaacttctatatcaagatccggcctggggagtatgagcaatttgagagcacaattggctttaagctcccaaaccaccggtcagccaagagactgtggaaggtctgcatcgagcatcatacattcttccggctggtgtcccctgagcccccacccaagggcttcctggtgatgggctccaagttccggtacagtgggaggacccaggcacagactcgccaggccagcgccctcattgaccggcctgcacccttctttgagcgttcttccagcaaacggtacaccatgtcccgcagccttgatggagcagagttctcccgcccagcctcggtcagcgagaaccatgatgcagggcctgacggtgacaagcgggatgaggatggcgagtctggggggcaacggtcagaggctgaggagggagaggtcaggactccaaccaagatcaaggagctaaagccggagcaggaaaccacgccgagacacaagcaggagttcttagacaagccagaagatgtcttgctgaagcaccaggccagcatcaatgagctcaaaaggaccctgaaggagcccaacagcaaactcatccaccgggatcgagactgggaacgggagcgcaggctgccctcctcccccgcctccccctcccccaagggcacccctgagaaagccaatgagagagcagggctgagggagggctccgaggagaaagtcaaaccaccacgtccccgggccccagagagtgacacaggcgatgaggaccaggaccaggagagggacacggtgttcctgaaggacaaccacctggccattgagcgcaagtgctccagcatcacggtcagctctacgtctagcctggaggctgaggtggacttcacggtcattggtgactaccatggcagcgccttcgaagacttctcccgcagcctgcctgagctcgaccgggacaaaagcgactcggacactgagggcctgctgttctcccgggatctcaacaagggggcccccagccaggatgatgagtctgggggcattgaggacagcccggatcgaggggcctgctccaccccggatatgccccagtttgagcccgtgaaaacagaaaccatgactgtcagcagtctggccattagaaagaagattgagccggaggccgtactgcagaccagagtctccgctatggataacacccagcaggttgatgggagtgcctcagtggggagggagttcatagcaaccactccctccatcaccacggagaccatatcgaccaccatggagaacagtctcaagtccgggaagggggcagctgccatgatcccaggcccacagacggtggccacggaaatccgttctctttctccgatcatcgggaaagatgtcctcaccagcacctacggcgccactgcggaaaccctctcaacctccaccaccacccatgtcaccaaaactgtgaaaggagggttttctgagacaaggatcgagaagcgaatcatcattactggggatgaagatgtcgatcaagaccaggccctggctttggccatcaaggaggccaaactgcagcatcctgatatgctggtaaccaaagctgtcgtatacagagaaacagacccatccccagaggagagggacaagaagccacaggaatcctgacctctgtgaagagatcctggcatttctggtccaacccaagccagagaaccattaagaaggggccttcattctggattctccgacgcaacactgacgtcccagctgcgacgtactgtcactgatgagagactgggaagggaaaagcatatatatatagatatatagagatatagatatatatacaggaaacaccgcatccttgcactgctgctggggctggcagagcagttggctgacagcaacaaccgacatctgaacacctacatttcctttgcagacaaattgaagaactggtgggatttttttcaagaaaaaaaattatataataactataatcccttgctcacccctttcccccgccaaataagaaacgcaagccagaccacgatgattgtagaagtccctcccgccctggttctgcacgttacagttagcagacgagcaattccatttgttcttctccagcatctctaaggcccacttgaatgcaaaggaaaacacttgcacagcaaagcaagagaagtcacagcagcaagacacgcacagtcaaccattttccgagaaaaaaagaaaattccccacttggaaagaaagaggaggaacactggattcttactttctggatcttgacactgggctgcaaaacctaccttcctctctcccgcctcccctcaccctcaactctcaatgtcttgctgtcattttctgtctcggctccctcctcccccttcccccttcccccaccccacacccttcaccctctgtgtcctggtccttctgagggccactgcagatgactctcctttgaaatgagaaaaagaaaagaaagcaagaacagaaaacgaagccacaggaagggaagtagacattgtatgcttatggtttctcattatgaaggtgcagcttgtaggaggtttgtacggatgtgctttgaagttatgtatattacatataacaggaaaaaatattaaaataaacagtgctggtaagtatgaagctgacattctaaaattataattatctgactgtgattgatgtatcctgaggttcctagatctcactgaactggcccagctaaggagacctggactctgggtgtgggttggctcacagtaggggctgacgggttcagtgtagtaatactgtgtgtggtgtttgtaattggttgattggtggggaggggtggggggccctaatggagaggtgtgggtttggcaagaaagaagcaacacagatgtcgtccccaaaatgccagttcaagacaccttctccctgcccccctggtagtaacagtcagggcctggtctgtgctcaggtactgggtcccagtctgggactctgctgctgaagttgccacagtagaggtccctggcttagtccttatctccctacggggcttgccttggttttcagtcttctctctctttctctcttttttttttttttgccacattctgcccttccctgaccccattgtaataaccaactccatatccaaagggaggtggtgctctcagccattgtagaagatggtggctttaacctgactgtctaaaaattcccagctaagccttttcctctactctcttccttgttctgaatcatttcttcttctcaggccaaagtagccatggtaaggaggcttcatggggcagaccctgaaagatcaaaactgcatttgcaaagccctcccctgtcccaggacaaagctgagactgacgggtgatgttgctcataggctccagctctgcataagaccttggcttggagacctccctctcagtcaacagctgaactctgagcttgtgcccagaaattaccccaagaccacaggaacccttcaagaagctcccatcacaagcttggcattgctctctgccacacgtgggcttcctcaggcttgtctgccacaagctacttctctgagctcagaaagtgccccttgatgagggaaaatgtcccactgcactgcgaatttctcagttccattttacctcccagtcctccttctaaaccagttaataaattcattccacaagtatttactgattacctgcttgtgccagggactattctcaggctgaagaaggtgggaggggagggcggaacctgaggagccacctgagccagctttatatttcaaccatggctggcccatctgagagcatctccccactctcgccaacctatcggggcatagcccagggatgcccccaggcggcccaggttagatgcgtccctttggcttgtcagtgatgacatacaccttagctgcttagctggtgctggcctgaggcagggcaggaaatcagaatagcatttgcttctctgggcaaatgggaagttcagcggggcagcagaatcagtggcattccccctggtgcaggccggtgggtccactccaactccccctgagtgtagcagcacactttccatacaccaggttctttctacaatcctggtggaaaagccacagaaccttcttcctgcccttcttgagagttccccctctttctgggtcaagagctggagtggtggctccatcctctctgggccacttcggtctaggaactcatctttgcaggaaccaggagtcctgagcacactgaacacacctcagagggaggatccttgttgtggattttgcacctggctttggggcaggggtgaagtgaccaggcttagcttgtggagtttatgggccaccagggtttggggaaatcaccatcccgcggatgctgtgacctcccttctacggagatgcaggcagtgccacgagggaggaggggacctgcaaagctagaatctagggcactgtttcctccccatccttctctttgtagagaatagagacgtttgtcttgtctgtcttcaacctacttttccttttctcttttttgtttctcatcctctctgtgccacctctccacccaggaggccatgtagcatagtggaaaaagtccctgagggcggttaggagttctgggtgaccatcctggctcagctcctaactcaccatgtgacatcaggctatccccattccccctcttgggcctcagtttcccgacttgcaaaataagcagaaagaaccagatgctctccagggtctttttctactttgctatctcatgggtcttcattttctcttattttgttttctctggatcttttccatctgagggtacaggaagtaccaggacctgtttcagtttttgaatcctgcaagcacattccaagactggcctgaaactgcatgagcaacatcactcgaaataattttttttttcaaaagcaccttaacaaccaattgcgatgctgtcctgttcctttttactcacacccttctctcctttctcgtccccatgctcccccacctcagtgctccgtgctgtatgcgtgtgctctctgttcttgtatactcaatataagtgaaataaatgtgtttgatgctgaaccata

SEQ ID NO: 29856 - DNA, 3489 bp, Homo Sapiens
gcggtggcagccgctcgctgaggtagtctctcgcggcgccggggatccctgaacacagacagcgcgggactgagaaggaaagcttctttctgggcagccagagccgcaaaggtggagccgcgttggcgccctccgcgggaccagcgcctcggatgcgggcggagcgcggggggccgcggctgcgggagcgcgaagcggggggccaggggcgcctcatgtgagagccgcgggacctgcagccgccgccgtccccggagcacggggtggtgtgtgggggaagccgcccccggcagcaggatgaaacgaggaggaagagatagtgaccgtaattcatcagaagaaggaactgcagagaaatccaagaaactgaggactacaaatgagcattctcagacttgtgattggggtaatctccttcaggacattattctccaagtatttaaatatttgcctcttcttgaccgggctcatgcttcacaagtttgccgcaactggaaccaggtatttcacatgcctgacttgtggagatgttttgaatttgaactgaatcagccagctacatcttatttgaaagctacccatccagagctgatcaaacagattattaaaagacattcaaaccatctacaatatgtcagcttcaaggtggacagcagcaaggaatcagctgaagcagcttgtgatatactatcgcaacttgtgaattgctctttaaaaacacttggacttatttcaactgctcgaccaagctttatggatttaccaaagtctcactttatctctgcactgacagttgtgttcgtaaactccaaatccctgtcttcgcttaagatagatgatactccagtagatgatccatctctcaaagtactagtggccaacaatagtgatacactcaagctgttgaaaatgagcagctgtcctcatgtctctccagcaggtatcctttgtgtggctgatcagtgtcacggcttaagagaactagccctgaactaccacttattgagtgatgagttgttacttgcattgtcttctgaaaaacatgttcgattagaacatttgcgcattgatgtagtcagtgagaatcctggacagacacacttccatactattcagaagagtagctgggatgctttcatcagacattcacccaaagtgaacttagtgatgtatttttttttatatgaagaagaatttgaccccttctttcgctatgaaatacctgccacccatctgtactttgggagatcagtaagcaaagatgtgcttggccgtgtgggaatgacatgccctagactggttgaactagtagtgtgtgcaaatggattacggccacttgatgaagagttaattcgcattgcagaacgttgcaaaaatttgtcagctattggactaggggaatgtgaagtctcatgtagtgcctttgttgagtttgtgaagatgtgtggtggccgcctatctcaattatccattatggaagaagtactaattcctgaccaaaagtatagtttggagcagattcactgggaagtgtccaagcatcttggtagggtgtggtttcccgacatgatgcccacttggtaaaaactgcatgatgaatagcaccttaatttcaagcaaatgtattataattaaagttttatttgctgtagttctgatataattctactattttgtggcacagaaatttgatatcttcagtcagtatatgtaaagattgtttatcggaagacccatgaatgagttttggtcagaaaattccacttgtttccttagtgtaatagcagtcatatctccgaattttttttaatgtggttcggatgtgaaataaccagttatacgtattaaacagtttacagtctaaaggaaacaaaacctatatgttataatatccaagaagtactaataggttttctgaaatgttatattctctatgcatttaaaaaaaaatgtaaacttgacattttagggtcttcagttacacatacacctgttataaggtgtttaatatagctcaggaaagtgagcattttgtgagaaaaatgaatatatcatatctaatggaaaagattggatgaatgttctcaaatgttacaaagctgtttaaagaaaaaggtatatataagtaatcagaacacttagaagactgatagatgtcacaacagtggtattatagaaggataatacagagccaagatcaaattaaaagacaataaatggaacagaagggaggcagtgtttagctttgtataaacttttaggtttgctctgtaatctgctaaaccatatacattcttttgtgatatgttattatgtatgtggcacttgaggcactgtatgtaaagtaaggaatgctttactagttctccttggttttatctttgtttaaactagctttaaagtattaaacaataattgaaatgaaaagcttacctattttaaaaagccaaatttaaataaatatagaactttaaaatgtttatcagttgtttccatgaaagaatattagtttccagtaaattttagtgatggctcactcacttttctattttggaattacatagttatgtaagtaaaatttttaaaaatcataaagggagcaccattgtacagtctagcataaacagcaaattttaaagaggacatatttaagttcataatcatatttttcagtaaatattgctcagtgaactggaaaactttaatagaaaaatgtctgcagttttgtgattgttaatttggttaaaccgatattttatattatttaagttaggtaacattttatattactttcatatgaataaaagtaatccatgcattgtagagtctataaaatgttgagtttttttagatgatataaactttgattctgggcactagtgctagtagatattactaccctcctgaggaaatcagaaatgatttaaccccagtggaatacattaattcttaaagcggctcttttcagtagtgtgacttttagaaagtgtctcagtagttaaggaagctaacagtcttagatctacttttaaaacggatggccttcttaagaataaagcaaaaggtgattttctacataatttttgctttccaaaagtgatgatatgctctcctacagcaacatatgagaagaaaaaaggcttatctagattcgaaaattaacagcaattatagtaatatatcccctccttctaaatagtaaaaagctctgattgtacaagaattacctgtgctagtcaagttgttgtttttccttgaacaactttggaaaaatggatttgacagtacataatcagttctactaaccaaagcttgtatttggaaatttactttttgtacaaattgaattatataatgcttaaaatactttgtcactttataagcaaaatgcatagtacttaatttgtttatactgtaaagtatatgttaaatgcttttatcactttgagaataaaaagttactaatgcaaaaaaaaaaaaaaaaaaaaa

SEQ ID NO: 29857 - DNA, 1333 bp, Homo Sapiens
acattttctaatgtttacagaatgaagaggaacagtttatctgttgagaataaaattgtccagttgtcaggagcagcgaaacagccaaaagttgggttctactcttctctcaaccagactcatacacacacggttcttctagactgggggagtttgcctcaccatgtagtattacaaatttttcagtaacttcctttactagatcgggcctgtgcatcttctgtatgtaggaggtggaatgaagtttttcatatttctgacctttggagaaagtttgaatttgaactgaaccagtcagctacttcatcttttaagtccactcatcctgatctcattcagcagatcattaaaaagcattttgctcatcttcagtatgtcagctttaaggttgacagtagcgctgagtcagcagaagctgcctgtgatatactctctcagctggtaaattgttccatccagaccttgggcttgatttcaacagccaagccaagtttcatgaatgtgtcggagtctcattttgtgtcagcacttacagttgtttttatcaactcaaaatcattatcatcaatcaaaattgaagatacaccagtggatgatccttcattgaagattcttgtggccaataatagtgacactctaagactcccaaagatgagtagctgtcctcatgtttcatctgatggaattctttgtgtagctgaccgttgtcaaggccttagagaactggcgttgaattattacatcctaactgatgaacttttccttgcactctcaagcgagactcatgttaaccttgaacatcttcgaattgatgttgtgagtgaaaatcctggacagattaaatttcatgctgttaaaaaacacagttgggatgcacttattaaacattcccctagagttaatgttgttatgcacttctttctatatgaagaggaattcgagacgttcttcaaagaagaaacccctgttactcacctttattttggtcgttcagtcagcaaagtggttttaggacgggtaggtctcaactgtcctcgactgattgagttagtggtgtgtgctaatgatcttcagcctcttgataatgaacttatttgtattgctgaacactgtacaaacctaacagccttgggcctcagcaaatgtgaagttagctgcagtgccttcatcaggtttgtaagactgtgtgagagaaggttaacacagctctctgtaatggaggaagttttgatccctgatgaggattatagcctagatgaaattcacactgaagtctccaaatacctgggaagagtatggttccctgatgtgatgcctctctggtaatgggctg

SEQ ID NO: 29858 - DNA, 1523 bp, Homo Sapiens
ggaggctgacgcgctagcgtggctctaagacgcgtcacccacgctgcgggcaagccatggcgggaagcgagccgcgcagcggaacaaactcgccgccgccgcccttcagcgactggggccgcctggaggcggccatcctcagcggctggaagaccttctggcagtcagtgagcaaggagagggtggcgcgtacgacctcacgggaggaggtggatgaggcggccagcaccctgacgcggctgccgattgatgtacagctatatattttgtcctttctttcacctcatgatctgtgtcagttgggaagtacaaatcattattggaatgaaactgtaagagatccaattctgtggagatactttttgttgagggatcttccttcttggtcttctgttgactggaagtctcttccagatctagaaatcttaaaaaagcctatatctgaggtcactgatggtgcattttttgactacatggcagtctatagaatgtgctgtccatacacaagaagagcttcaaaatccagccgtcctatgtatggagctgtcacttcttttttacactccctgatcattcagaatgaaccacgatttgctatgtttggaccaggtttggaagaattgaatacctctttggtgttgagcttgatgtcttcagaggaactttgcccaacagctggtttgcctcagaggcagattgatggtattggatcaggagtcaattttcagttgaacaaccaacataaattcaacattctaatcttatattcaactaccagaaaggaaagagatagagcaagggaagagcatacaagtgcagttaacaagatgttcagtcgacacaatgaaggtgatgatcaacaaggaagccggtacagtgtgattccacagattcaaaaagtgtgtgaagttgtagatgggttcatctatgttgcaaatgctgaagctcataaaagacatgaatggcaagatgaattttctcatattatggcaatgacagatccagcctttgggtcttcgggaagaccattgttggttttatcttgtatttctcaaggggatgtaaaaagaatgccctgtttttatttggctcatgagctgcatctgaatcttctaaatcacccatggctggtccaggatacagaggctgaaactctgactggttttttgaatggcattgagtggattcttgaagaagtggaatctaagcgtgcaagatgattctcttttcagatcttgggaactgaaaccatttgaaatttattactaaggtcgtgatgtgaatatttgctcagtcagcccaccttgtcctgcctttttgcagataggctttcatttggacagctataactgctgtgttttttatattatttttactctttaccataaatcaattacaagaaaagagtttcagtcctagtatttagccccaaaatgaacctttaaacatttttttggtaatttttatattttctgtctttttaaaaatattaaattctggaaaaaacaaaaaaaaaaaaaaaa

SEQ ID NO: 29859 - DNA, 2564 bp, Homo Sapiens
gaaaaggcggatctggtcattcgtctccgcccggggtctctgtaaggacggcggagagaggcgacctccgcccaataccaggcgcagccttgccgtctcctcggggctcaccaagcagccaccagcaaagaagccggtttcaaaggcccagcacgacagggagaggaaaacggagcatatgcaaccatacacagtcaccagagtccagcctcccgcaaccagtcgctacagccaggcgcctgcgcccagaagcgcttctcgcgccgaccgtttgtatttggaattgtgggttcctgcccgccacgcaccaccgcaagaccttcaaagctgggagcttctctgtgctccaggattcctcgctgccgattccacaccgcgttcaagactcctgtgaagagcgactccgctgagagcctcctcaatggccagtccacttctaacttgcagctgagaagtttttctgatcttgatggtcagagtggctcgtgctacgaagtgagaaacaaggaatctatagcgaatcgtaaacaacagaaataaaaatgcgtctccgttaagagtcggagcctaacgtcacttccggcaacaataggaaacgtcaaaattgggatagtcggcagttctggcccctgcagctggaggtaccctgagttctgagggtcgtagtgctgtttctggtattctcatcgcggtcacctctaccggtgtggacaagtaaagtttgaatcagcttctccatggcctgggcaccagttcccggctgagccattttccttttggctaaaagtccccgcccagaggccaattcgtcgcggcggcggtggagatcgcaggtcgctcaggcttgcagatgggtcaagggttgtggagagtggtcagaaaccagcagctgcaacaagaaggctacagtgagcaaggctacctcaccagagagcagagcaggagaatggctgcgagcaacatttctaacaccaatcatcgtaaacaagtccaaggaggcattgacatatatcatcttttgaaggcaaggaaatcgaaagaacaggaaggattcattaatttggaaatgttgcctcctgagctaagctttaccatcttgtcctacctgaatgcaactgacctttgcttggcttcatgtgtttggcaggaccttgcgaatgatgaacttctctggcaagggttgtgcaaatccacttggggtcactgttccatatacaataagaacccacctttaggattttcttttagaaaattgtatatgcagctggatgaaggcagcctcacctttaatgccaacccagatgagggagtgaactactttatgtccaagggtatcctggatgattcgccaaaggaaatagcaaagtttatcttctgtacaagaacactaaattggaaaaaactgagaatctatcttgatgaaaggagagatgtcttggatgaccttgtaacattgcataattttagaaatcagttcttgccaaatgcactgagagaattttttcgtcatatccatgcccctgaagagcgtggagagtatcttgaaactcttataacaaagttctcacatagattctgtgcttgcaaccctgatttaatgcgagaacttggccttagtcctgatgctgtctatgtactgtgctactctttgattctactttccattgacctcactagccctcatgtgaagaataaaatgtcaaaaagggaatttattcgaaatacccgtcgcgctgctcaaaatattagtgaagattttgtagggcatctttatgacaatatctaccttattggccatgtggctgcataaaaagcacaattgctaggacttcagtttttacttcagactaaagctacccaaggacttagcagatatgggggttacatcagtgctggtcattgtagcctgagtatacaatcaagcttcagtgtgcaacctttttttcttttgccattttctattttagtaatttccttggggaactaaataattttgcagaatttttcctaattttgtttatcacgttttgcacaaagcagagccactgtctaacacagctgttaacgaatgataaactgacattatactctaaaagatggtgtatttgtgcattagatttgcctgaaaaactttatccatttccattctttatacaaataccatgtaatgtgtacatatttaactaaagagatttatagtcataattattttattgtaaagattttaactaaagtttttccttttctctcaaactgagttctgaaatttatttgattctgatctgaaactattgtcttcgtaaaagttagatctgacttcagacagaaaccaataccagcttccttttcctttaaactttgaagagtgttgatttgttactatattactatgcaaaactggcagttatttttataatataaatttataatttgattttttattttaaaaactgggttaatcaagtctcggtaagtcctttaaaccatttaggatttttaaaacatcaaaatttatgatttacattcataggaataaaataaaatattattagaactctggtaaa

SEQ ID NO: 29860 - DNA, 7391 bp, Homo Sapiens
gctgcgcagcgctggctgctggctggcctcgcggagacgccgaacggacgcggccggcgccggcttgtgggctcgccgcctgcagccatgaccctcgcagcctgtccctcggcctcggcccgggacgtctaaaatcccacacagtcgcgcgcagctgctggagagccggccgctgccccctcgtcgccgcatcacactcccgtcccgggagctgggagcagcgcgggcagccggcgcccccgtgcaaactgggggtgtctgccagagcagccccagccgctgccgctgctacccccgatgctggccatggcctggcggggcgcagggccgagcgtcccgggggcgcccgggggcgtcggtctcagtctggggttgctcctgcagttgctgctgctcctggggccggcgcggggcttcggggacgaggaagagcggcgctgcgaccccatccgcatctccatgtgccagaacctcggctacaacgtgaccaagatgcccaacctggttgggcacgagctgcagacggacgccgagctgcagctgacaactttcacaccgctcatccagtacggctgctccagccagctgcagttcttcctttgttctgtttatgtgccaatgtgcacagagaagatcaacatccccattggcccatgcggcggcatgtgtctttcagtcaagagacgctgtgaacccgtcctgaaggaatttggatttgcctggccagagagtctgaactgcagcaaattcccaccacagaacgaccacaaccacatgtgcatggaagggccaggtgatgaagaggtgcccttacctcacaaaacccccatccagcctggggaagagtgtcactctgtgggaaccaattctgatcagtacatctgggtgaaaaggagcctgaactgtgtgctcaagtgtggctatgatgctggcttatacagccgctcagccaaggagttcactgatatctggatggctgtgtgggccagcctgtgtttcatctccactgccttcacagtactgaccttcctgatcgattcttctaggttttcctaccctgagcgccccatcatatttctcagtatgtgctataatatttatagcattgcttatattgtcaggctgactgtaggccgggaaaggatatcctgtgattttgaagaggcagcagaacctgttctcatccaagaaggacttaagaacacaggatgtgcaataattttcttgctgatgtacttttttggaatggccagctccatttggtgggttattctgacactcacttggtttttggcagcaggactcaaatggggtcatgaagccattgaaatgcacagctcttatttccacattgcagcctgggccatccccgcagtgaaaaccattgtcatcttgattatgagactggtggatgcagatgaactgactggcttgtgctatgttggaaaccaaaatctcgatgccctcaccgggttcgtggtggctcccctctttacttatttggtcattggaactttgttcattgctgcaggtttggtggccttgttcaaaattcggtcaaatcttcaaaaggatgggacaaagacagacaagttagaaagactgatggtcaagattggggtgttctcagtactgtacacagttcctgcaacgtgtgtgattgcctgttatttttatgaaatctccaactgggcactttttcggtattctgcagatgattccaacatggctgttgaaatgttgaaaatttttatgtctttgttggtgggcatcacttcaggcatgtggatttggtctgccaaaactcttcacacgtggcagaagtgttccaacagattggtgaattctggaaaggtaaagagagagaagagaggaaatggttgggtgaagcctggaaaaggcagtgagactgtggtataaggctagtcagcctccatgctttcttcattttgaaggggggaatgccagcattttggaggaaattctactaaaagttttatgcagtgaatctcagtttgaacaaactagcaacaattaagtgacccccgtcaacccactgcctcccaccccgaccccagcatcaaaaaaccaatgattttgctgcagactttggaatgatccaaaatggaaaagccagttagaggctttcaaagctgtgaaaaatcaaaacgttgatcactttagcaggttgcagcttggagcgtggaggtcctgcctagattccaggaagtccagggcgatactgttttcccctgcagggtgggatttgagctgtgagttggtaactagcagggagaaatattaacttttttaaccctttaccattttaaatactaactgggtctttcagatagcaaagcaatctataaacactggaaacgctgggttcagaaaagtgttacaagagttttatagtttggctgatgtaacataaacatcttctgtggtgcgctgtctgctgtttagaactttgtggactgcactcccaagaagtggtgttagaatctttcagtgcctttgtcataaaacagttatttgaacaaacaaaagtactgtactcacacacataaggtatccagtggatttttcttctctgtcttcctctcttaaatttcaacatctctcttcttggctgctgctgttttcttcattttatgttaatgactcaaaaaaggtatttttatagaatttttgtactgcagcatgcttaaagaggggaaaaggaagggtgattcactttctgacaatcacttaattcagaggaaaatgagatttactaagttgacttacctgacggaccccagagacctattgcattgagcagtggggacttaatatattttacttgtgtgattgcatctatgcagacgccagtctggaagagctgaaatgttaagtttcttggcaactttgcattcacacagattagctgtgtaatttttgtgtgtcaattacaattaaaagcacattgttggaccatgacatagtatactcaactgactttaaaactatggtcaacttcaacttgcattctcagaatgatagtgcctttaaaaatttttttattttttaaagcataagaatgttatcagaatctggtctacttaggacaatggagactttttcagttttataaagggaactgaggacagctaatccaactacttggtgcgtaattgtttcctagtaattggcaaaggctccttgtaagatttcactggaggcagtgtggcctggagtatttatatggtgcttaatgaatctccagaatgccagccagaagcctgattggttagtagggaataaagtgtagaccatatgaaatgaactgcaaactctaatagcccaggtcttaattgcctttagcagaggtatccaaagcttttaaaatttatgcatacgttcttcacaagggggtacccccagcagcctctcgaaaattgcacttctcttaaaactgtaactggcctttctcttaccttgccttaggccttctaatcatgagatcttggggacaaattgactatgtcacaggttgctctccttgtaactcatacctgtctgcttcagcaactgctttgcaatgacatttatttattaattcatgccttaaaaaaataggaagggaagcttttttttttctttttttttttttcaatcacactttgtggaaaaacatttccagggactcaaaattccaaaaaggtggtcaaattctggaagtaagcatttcctcttttttaaaaatttggtttgagccttatgcccatagtttgacatttccctttcttctttcctttttgtttttgtgtggttcttgagctctctgacatcaagatgcatgtaaagtcgattgtatgttttggaaggcaaagtcttggcttttgagactgaagttaagtgggcacaggtggcccctgctgctgtgcccagtctgagtaccttggctagactctaggtcaggctccaggagcatgagaattgatccccagaagaaccattttaactccatctgatactccattgcctatgaaatgtaaaatgtgaactccctgtgctgcttgtagacagttcccataactgtccacggccctggagcacgcacccaggggcagagcctgcccttactcacgctctgctctggtgtcttgggagttgtgcagggactctggcccaggcaggggaaggaagaccaggcggtaggggactggtcttgctgttagagtatagaggtttgtaatgcagttttcttcataatgtgtcagtgattgtgtgaccaaggcagcatctagcagaaagccaggcatggagtaggtgatcgatacttgtcaatgactaaataataacaataaaagagcacttgggtgaatctgggcacctgatttctgagttttgagttctggagctagtgttttgacaatgctttgggttttgacatgccttttccacaaatctcttgccttttcagggcaaagtgtatttgatcagaagtggccatttggattagtagccttagcaatgctacagggttataggcctctcctttcacattccagacaatggagagtgtttatggtttcaggaaaagaactttgtggctgaggggtcagttaccagtgaccttcaatcaactccatcacttcttaaatcggtatttgttaaaaaaatcagttattttatttattgagtgccgactgtagtaaagccctgaaatagataatctctgttcttctaactgatctaggatggggacgcacccaggtctgctgaactttactgttcctctgggaaaggagcagggacctctggaattcccatctgtttcactgtctccattccataaatctcttcctgtgtgagccaccacacccagcctgggtctctctacttttaacacatctctcatccctttcccaggattccttccaagtcagttacaggtggttttaacagaaagcatcagctctgcttcgtgacagtctctggagaaatcccttaggaagactatgagagtaggccacaaggacatgggcccacacatctgctttggctttgccggcaattcagggcttggggtattccatgtgacttgtataggtatatttgaggacagcatcttgctagagaaaaggtgagggttgtttttctttctctgaaacctacagtaaatgggtatgattgtagcttcctcagaaatcccttggcctccagagattaaacatggtgcaatggcacctctgtccaacctcctttctggtagattcctttctcctgcttcatataggccaaacctcagggcaagggaacatgggggtagagtggtgctggccagaaccatctgcttgagctacttggttgattcatatcctctttcctttatggagacccatttcctgatctctgagactgttgctgaactggcaacttacttgggcctgaaactggagaaggggtgacatttttttaatttcagagatgctttctgattttcctctcccaggtcactgtctcacctgcactctccaaactcaggttccgggaagcttgtgtgtctagatactgaattgagattctgttcagcaccttttagctctatactctctggctcccctcatcctcatggtcactgaattaaatgcttattgtattgagaaccaagatgggacctgaggacacaaagatgagctcaacagtctcagccctagaggaatagactcagggatttcaccaggtcggtgcagtatttgatttctggtgaggtgaccacagctgcagttagggaagggagccattgagcacagactttggaaggaaccttttttttgttgtttgtttgtttgtttgtttgtttgtttgtttgagacagggtcttgctctgtcacccaggctggggcgcaatggcacgatcttggctcactgcaacctctgcctcctgggttcaagtgattctcctgccacagcctcctgaggagctgggactacaggtgcgtgctaccacgcccagctacttctgtatttttagtagagacggggtttcactgtgttggccaggctggtctcgaactcctgacctcatgatctgcccgcctcagcctcccaaagtgctgggattacaagtgtgagccaccacacctggcctggaaggaacctcttaaaatcagtttacgtcttgtattttgttctgtgatggaggacactggagagagttgctattccagtcaatcatgtcgagtcactggactctgaaaatcctattggttcctttattttatttgagtttagagttcccttctgggtttgtattatgtctggcaaatgacctgggttatcacttttcctccagggttagatcatagatcttggaaactccttagagagcattttgctcctaccaaggatcagatactggagccccacataatagatttcatttcactctagcctacatagagctttctgttgctgtctcttgccatgcacttgtgcggtgattacacacttgacagtaccaggagacaaatgacttacagatcccccgacatgcctcttccccttggcaagctcagttgccctgatagtagcatgtttctgtttctgatgtaccttttttctcttcttctttgcatcagccaattcccagaatttccccaggcaatttgtagaggacctttttggggtcctatatgagccatgtcctcaaagcttttaaacctccttgctctcctacaatattcagtacatgaccactgtcatcctagaaggcttctgaaaagaggggcaagagccactctgcgccacaaaggttgggtccatcttctctccgaggttgtgaaagttttcaaattgtactaataggctggggccctgacttggctgtgggctttgggaggggtaagctgctttctagatctctcccagtgaggcatggaggtgtttctgaattttgtctacctcacagggatgttgtgaggcttgaaaaggtcaaaaaatgatggccccttgagctctttgtaagaaaggtagatgaaatatcggatgtaatctgaaaaaaagataaaatgtgacttcccctgctctgtgcagcagtcgggctggatgctctgtggcctttcttgggtcctcatgccaccccacagctccaggaaccttgaagccaatctgggggactttcagatgtttgacaaagaggtaccaggcaaacttcctgctacacatgccctgaatgaattgctaaatttcaaaggaaatggaccctgcttttaaggatgtacaaaagtatgtctgcatcgatgtctgtactgtaaatttctaatttatcactgtacaaagaaaaccccttgctatttaattttgtattaaaggaaaataaagttttgtttgttaaaaaaaaa

SEQ ID NO: 29861 - DNA, 3210 bp, Homo Sapiens; identical to SEQ ID NO: 23136

SEQ ID NO: 29862 - DNA, 7958 bp, Homo Sapiens
gtaaaagtgacattctaaatgttcctcactctgcgaggcttattttttagggactttgctataattctgaaagacttagttttacagtacatctgaaagtaggagttttcagaagtatggctcttgggataaatttagattcttaattgtgaagctctgttaccacttgttagaaggcaggtcagctcacctgcttggggaggtaaatatatgaatgcactctcgagtaatttaatggagccctacctcaatgtacagaatgacagtatcacagatcaagaatggagtacgagtgattttcggctatggtgggggtaggtaggtcacttgtcccctgttgtctcttactatttgtaaagtgaagactatgattagtctttttgatcgggatggtttgagatgaataaagaataggcaggcaatttggatactttaggcttttcaagaacattagtaacattttttcttagatatttctcctaatacaatgagtgttgtgaaataacatggcagttattgttgagagaaaagccttcccagttatgtattgagtccttaggcgttttgaccttccctccactcttacagaacttggtggaaggggccactatgttttctacctccttccgtgcctttcacaaagccacatcctgcaccgtctacccttctctgtggatatttttccgcttggcaatttcctttcctgaggcacccacttgggacatctgaatctccatctccatgttgatggcccgtttgtgcttggacgtgttcttccacttgagactgagggttcatgtaatcaaagaagtttctttgttgtgtgtatctttacagaacacaacaggaattgaaaatgaatcagaacactactgagcctgtggcggccaccgagaccctggctgaggtacccgaacatgtgctgcgaggacttccggaggaagtgaggcttttcccttctgctgttgacaagacccggattggtgtctgggccactaaaccaattttaaaaggcaaaaaatttgggccatttgttggtgataagaaaaaaagatctcaggttaagaataatgtatacatgtgggaggtgtattacccaaatttgggatggatgtgcattgatgccactgatccagagaagggaaactggctgcgatatgtgaattgggcttgctcaggagaagagcaaaatttattcccactggaaatcaacagagccatttactataaaactttaaagccaatcgcgccgggcgaggagctcctggtctggtacaatggggaagacaaccctgagatagcagctgcgattgaggaagagcgagccagcgcccggagcaagcggagctcccccaagagccggaaagggaagaaaaaatcccaggaaaataaaaacaaaggaaacaaaatccaagacatacaactgaagacaagtgagccagatttcacctctgcaaatatgagagattctgcagaaggtcctaaagaagacgaagagaagccttcagcctcagcacttgagcagccggccaccctccaggaggtggccagtcaggaggtgcctccagaactagcaacccctgcccctgcctgggagccacagccagaaccagacgagcgattagaagcggcagcttgtgaggtgaatgatttgggggaagaggaggaggaggaagaggaggaggatgaagaagaagaagaagatgatgatgatgatgagttggaagacgagggggaagaagaagccagcatgccaaatgaaaattctgtgaaagagccagaaatacggtgtgatgagaagccagaagatttattagaggaaccaaaaacaacttcagaagaaactcttgaagactgctcagaggtaacacctgccatgcaaatccccagaactaaagaagaggccaatggtgatgtatttgaaacgtttatgtttccgtgtcaacattgtgaaaggaagtttacaaccaaacaggggcttgagcgtcacatgcatatccatatatccaccgtcaatcatgctttcaaatgcaagtactgtgggaaagcctttggcacacagattaaccggcggcgacatgagcggcgccatgaagcagggttaaagcggaaacccagccaaacactacagccgtcagaggatctggctgatggcaaagcatctggagaaaacgttgcttcaaaagatgattcgagtcctcccagtcttgggccagactgtctgatcatgaattcagagaaggcttcccaagacacaataaattcttctgtcgtagaagagaatggggaagttaaagaacttcatccgtgcaaatattgtaaaaaggtttttggaactcatactaatatgagacggcatcagcgtagagttcacgaacgtcatctgattcccaaaggtgtacggcgaaaaggaggccttgaagagccccagcctccagcagaacaggcccaggccacccagaacgtgtatgtaccaagcacagagccggaggaggaaggggaagcagatgatgtgtacatcatggacatttctagcaatatctctgaaaacttaaattactatattgatggtaaaattcaaactaataacaacactagtaactgtgatgtgattgagatggagtctgcttcggcagatttgtatggtataaattgtctgctcactccagttacagtggaaattactcaaaatataaagaccacacaggtccctgtaacagaagatcttcctaaagagcctttgggcagcacaaatagtgaggccaagaagcggagaactgcgagcccacctgcactgcccaaaattaaggccgaaacagactctgaccccatggtcccctcttgctctttaagtcttcctcttagcatatcaacaacagaggcagtgtctttccacaaagagaaaagtgtttatttgtcatcaaagctcaaacaacttcttcaaacccaagataaactaactcctgcagggatttcagcaactgaaatagctaaattaggtcctgtttgtgtgtctgctcctgcatcaatgttgcctgtgacctcaagtaggtttaagaggcggaccagctctcctcccagttctccacagcacagtcctgcccttcgagactttggaaagccaagtgatgggaaagcagcatggaccgatgccgggctgacttccaaaaaatccaaattagaaagtcacagcgactcaccagcatggagtttgtctgggagagatgagagagaaactgtgagccctccatgctttgatgaatataaaatgtctaaagagtggacagctagttctgcttttagcagtgtgtgcaaccagcagccactggatttatccagcggtgtcaaacagaaggctgagggtacaggcaagactccagtccagtgggaatctgtcttagatctcagtgtgcataaaaagcattgtagtgactctgaaggcaaggaattcaaagaaagtcattcagtgcagcctacgtgtagtgctgtaaagaaaaggaaaccaaccacctgcatgctgcagaaggttcttctcaatgaatataatggcatcgatttacctgtagaaaaccctgcagatgggaccaggagcccaagtccttgtaaatccctagaagctcagccagatcctgacctcggtccgggctctggtttccctgcccctactgttgagtccacacctgatgtttgtccttcatcacctgccctgcagacaccctccctttcatccggtcagctgcctcctctcttgatccccacagatccctcttcccctccaccctgtcccccggtattaactgttgccactccgccccctcccctccttcctaccgtacctcttccagccccctcttccagtgcatctccacacccatgcccctctccactctcaaatgccaccgcacagtccccacttccaattctgtccccaacagtgtccccctctccctctcccattcctcccgtggagcccctgatgtctgccgcctcacccgggcctccaacactttcttcttcctcctcttcatcttcctcctcctcttcgttttcttcttcatcttcctcctcttctccttctccacctcctctctccgcaatatcatctgttgtttcctctggtgataatctggaggcttctctccccatgatatctttcaaacaggaggaattagagaatgaaggtctgaaacccagggaagagccccagtctgctgctgaacaggatgttgttgttcaggaaacattcaacaaaaactttgtttgcaacgtctgtgaatcaccttttctttccattaaagatctaaccaaacatttatctattcatgctgaagaatggcccttcaaatgtgaattttgtgtgcagctttttaaggataaaacggacttgtcagaacatcgctttttgcttcatggagttgggaatatctttgtgtgttctgtttgtaaaaaagaatttgcttttttgtgcaatttgcagcagcaccagcgagatctccacccagataaggtgtgcacacatcacgagtttgaaagcgggactctgaggccccagaactttacagatcccagcaaggcccatgtagagcatatgcagagcttgccagaagatcctttagaaacttctaaagaagaagaggagttaaatgattcctctgaagagctttacacgactataaaaataatggcttctggaataaagacaaaagatccagatgttcgattgggcctcaatcagcattacccaagctttaaaccacctccatttcagtaccatcaccgtaaccccatggggattggtgtgacagccacaaatttcactacacacaatattccacagactttcactaccgccattcgctgcacaaagtgtggaaaaggtgtcgacaatatgccggagttgcacaaacatatcctggcttgtgcttctgcaagtgacaagaagaggtacacgcctaagaaaaacccagtaccattaaaacaaactgtgcaacccaaaaatggcgtggtggttttagataactctgggaaaaatgccttccgacgaatgggacagcccaaaaggcttaactttagtgttgagctcagcaaaatgtcgtcgaataagctcaaattaaatgcattgaagaaaaaaaatcagctagtacagaaagcaattcttcagaaaaacaaatctgcaaagcagaaggccgacttgaaaaatgcttgtgagtcatcctctcacatctgcccttactgtaatcgagagttcacttacattggaagcctgaataaacacgccgccttcagctgtcccaaaaaacccctttctcctcccaaaaaaaaagtttctcattcatctaagaaaggtggacactcatcacctgcaagtagtgacaaaaacagtaacagcaaccaccgcagacggacagcggatgcggagattaaaatgcaaagcatgcagactccgttgggcaagaccagagcccgcagctcaggccccacccaagtcccacttccctcctcatccttcaggtccaagcagaacgtcaagtttgcagcttcggtgaaatccaaaaaaccaagctcctcctctttaaggaactccagcccgataagaatggccaaaataactcatgttgaggggaaaaaacctaaagctgtggccaagaatcattctgctcagctttccagcaaaacatcacggagcctgcacgtgagggtacagaaaagcaaagctgttttacaaagcaaatccaccttggcgagtaagaaaagaacagaccggttcaatataaaatctagagagcggagtggggggccagtcacccggagccttcagctggcagctgctgctgacttgagtgagaacaagagagaggacggcagcgccaagcaggagctgaaggacttcagctacagcctccgcttggcgtcccgatgctctccaccagcggccccgtacatcaccaggcagtataggaaggtcaaagctccggctgcagcccagttccagggaccattcttcaaagagtagacactctggctgctccctgacagcacctgaagtgacctggaatcagtgaagccaaagggactggcagtctgccctgcagggagtaccgacctatcccagttgtgtgaggctgcgagagaaagggagtgcatgtgcgcgcgtgcatgtgtgcgtgcgtgtgtgttcacgtgttctcgtgcgggcgcgtgagtggtcttcaaacgagggtcccgaaccccggggcggcaggaagggggccgactccacgctgtcctttgggatgatacttggatgcagctcttgggaccgtgttctgcagcccagccttcctgttggggtggggcctctcctactatgcaatttttcaagagctccttgaccctgctttttgcttcttgagttgtcttttgccattatggggactttggtttgacccaggggtcagccttaggaaggccttcaggaggaggccgagttccccttcagtaccacccctctctccccaccttccctctcccggcaacatctctgggaatcaacagcatattgacacgttggagccgagcctgaacatgcccctcggccccagcacatggaaaacccccttccttgcctaaggtgtctgagtttctggctcttgaggcatttccagacttgaaattctcatcagtccattgctcttgagtctttgcagagaacctcagatcaggtgcacctgggagaaagactttgtccccacttacagatctatctcctcccttgggaagggcagggaatggggacggtgtatggaggggagggatctcctgcgcccttcattgccacacttggtgggaccatgaacatctttagtgtctgagcttctcaaattagctgcaataggaaaaaaacaaattgggaaatgaaaaaaaaatgggaagattaaaaagcacagggggaagaagaagagatttcggaggccatcctgccagggggggacggggctgactcctgctctctggaggacggtcagtccatgtctcggagaaacgggtgagctgagcttggcgtttggacccagttcagtgaggttcttgggttttgtgcctttggggcagactccagacaaggatgtctgagaccacttgggctctgttttctcagctccaatttcaagagtgagctatcaaacccagagcggaaggagggagctctgatgagcacggtttgtcacacgataaagggattttttttttcagggctactacggttgatcttgcaactctgtaaatatgtatgtagacacttttaaaagcacgtatttatgtccctgactgtaaatgctccatttttaaagttttataacttgtgttatttaatgagtcagtcaatcggctgcagtatgggatctgataaggatctaggagaagggtctcatgcggaccctcacatgggcagaaaaatggtggtcattggccgacatcacagttttcctgtttcccacccagctaaaaaccgttgtttgctttaaattttcataaactggaatcctttcacccgctcctacagctaaccctcacaagcatgaagtgctgtggctgttccttatcctaatgatgcgcttttgtcccgtaaatgttaacactcatgaagcataccccggcctctcagttcttgagggcctccccaccgcagcagcaaggaaagctcacgaaccccaaacctggcaagtcacctgcagcccatggtgagctctgggaagtgtggttgaggccttggggtcactccttttttgcatgtgcaaatgtgctggtcacccttcaacgctcccagacggtcaggaaaactgttccaatcatgaaaaggggggatgattttgtaaaagtggcatttcctggtcagtggtggtcttcaagacgacagctctgtatctgccatgtgaagagaattaacaataaaagtgtgaagagcgattgtgaggaacaag

SEQ ID NO: 29863 - DNA, 1670 bp, Homo Sapiens
ccggagcgcggtcgggacacagcgcctctaggagaaagcctggaaggcgctccgggggtacccagagctcttagcgggccggcagcatgtgcggggcccaagtaaatggaaatgttttctaacatataaaaacctacagaagaagaaaataattttctggatcaaattagaagtctgtattatattgatgtctccagattcaaatatattagaaagcagccgtggagacaaccatcttcattttgggagaaataactaaagcccgcctcaagcattagaactacagacaaaccctgatgcgacctctccagattgtcccaagtcgattgatttcccagctatattgtggcctgaagcctccagcgtccacacgaaaccagatttgcctgaaaatggctcggccaagttcaagtatggcagattttcgaaagttttttgcaaaagcaaagcacatagtcatcatctcaggagctggtgttagtgcagaaagtggtgttccgaccttcagaggagctggaggttattggagaaaatggcaagcccaggacctggcgactcccctggcctttgcccacaacccgtcccgggtgtgggagttctaccactaccggcgggaggtcatggggagcaaggagcccaacgccgggcaccgcgccatagccgagtgtgagacccggctgggcaagcagggccggcgagtcgtggtcatcacccagaacatcgatgagctgcaccgcaaggctggcaccaagaaccttctggagatccatggtagcttatttaaaactcgatgtacctcttgtggagttgtggctgagaattacaagagtccaatttgtccagctttatcaggaaaaggtgctccagaacctggaactcaagatgccagcatcccagttgagaaacttccccggtgtgaagaggcaggctgcgggggcttgctgcgacctcacgtcgtgtggtttggagaaaacctggatcctgccattctggaggaggttgacagagagctcgcccactgtgatttatgtctagtggtgggcacttcctctgtggtgtacccagcagccatgtttgccccccaggtggctgccaggggcgtgccagtggctgaatttaacacggagaccaccccagctacgaacagattcaggtttcatttccagggaccctgtggaacgactcttcctgaagcccttgcctgtcatgaaaatgaaactgtttcttaagtgtcctggggaagaaagaaattacagtatatctaagaactaggccacacgcagaggagaaatggtcttatgggtggtgagctgagtactgaacaatctaaaaatagcctctgattccctcgctggaatccaacctgttgataagtgatgggggtttagaagtagcaaagagcacccacattcaaaagtcacagaactggaaagttaattcatattatttggtttgaactgaaacgtgaggtatctttgatgtgtatggttggttattgggagggaaaaattttgtaaattagattgtctaaaaaaaatagttattctgattatatttttgttatctgggcaaagtagaagtcaaggggtaaaaaccctactattctgatttttgcacaagttttagtggaaaataaaatcacactctacagtaaaaaaaaaaaaaaaaaa

SEQ ID NO: 29864 - DNA, 6708 bp, Homo Sapiens
agggagggaaggaaggaagagagggaggcgggcaagcaggcgggcgcgggggtcggggactgaggcagtagagggaggcgagagcccggcagccgcttcgcgctgtttgctgcgcgggcttttggagggggcggccgtttagtcggctgaggagaagcggacaccagcggcgttggtgatagcgcctgggggagggggactggagaggcgagaaggggggtcgctgcggtggttctctcgctgtcgctctctctttgcctcgctcccggctcggcgggctcctcccggcgtctctctcgcctccggggtcccgctccccgccccccgcggtatgtcttgatcccgagcagcgggtttcatggggctcctcaggattatgatgccgcccaagttgcagctgctggcggtggtggccttcgcggtggcgatgctcttcttggaaaaccagatccagaaactggaggagtcccgctcgaagctagaaagggctattgcaagacacgaagtccgagaaattgagcagcgacatacaatggatggccctcggcaagatgccactttagatgaggaagaggacatggtgatcatttataacagagttcccaaaacggcaagcacttcatttaccaatatcgcctatgacctgtgtgcaaagaataaataccatgtccttcatatcaacactaccaaaaataatccagtgatgtcattgcaagatcaggtgcgctttgtaaagaatataacttcctggaaagagatgaaaccaggattttatcatggacacgtttcttacttggattttgcaaaatttggtgtgaagaagaaaccaatttacattaatgtcataagggatcctattgagaggctagtttcttattattactttctgagatttggagatgattatagaccagggttacggagacgaaaacaaggagacaaaaagacctttgatgaatgtgtagcagaaggtggctcagactgtgctccagagaagctctggcttcaaatcccgttcttctgtggccatagctccgaatgctggaatgtgggaagcaggtgggctatggatcaagccaagtataacctaattaatgaatattttctggtgggagttactgaagaacttgaagattttatcatgttattggaggcagcattgccccggtttttcaggggtgctactgaactctatcgcacaggaaagaaatctcatcttaggaaaaccacagagaagaaactccccactaaacaaaccattgcaaaactacagcaatctgatatttggaaaatggagaatgagttctatgaatttgcactagagcagttccaattcatcagagcccatgccgttcgagaaaaagatggagacctctacatcctcgcacaaaactttttctatgaaaagatttaccctaagtcgaactgagtataaggtgtgactattagattcttgaactaaaatttgaccctgtcttcacctttgttctcagctccacagtctggattgctgacagtaggtgtatatgacaatttgtattgagccaaattaggaaacagacagtaacgtcaaggaagtagatactggctggcattgtcagtgttctaagtttcaggcatttttatttttcctggctaaacgttggtgaaagttataacctcctgcctgggagaaaatatacatcacctaaaatgaacttatggcaggtctaatcaaaaggctaaatacaatttcagaaaaggttctgatactcttgtttttgataaagcattttttcaactaaccatgaattaagatgagtccatttgcctcttctgccttcactgagggtttgggttatacacctctactgaattgtgttaataactgtttggcagtgtgtactttgtttttgtgagtcatgtctcatgaaatttattggaatgtttaatcatatttgctaagaaatgtttctgctgtagttggatttgcccatatttatgtaggtggttttaattttttaaatggtgattagtgttaaaaatcaatttaaatcatgactaatatggtaaaaagataaagcatcaaagcagtatttctcattcctgcctcctcaatatctaatactgggaagatacttcaaagaatattgagattgtctgaagttttagttaagattttcacacattaatatcaaaaaagtaagtttagtatttgtttctccatgggttatttgtaaagctgtaaactgagatatcggtgactccgtattatgactccattagtgagctgtggtatgggtaggattttcctacttcttctgtacttttacctgtagactatttttactaaggtgctttataatgtgttttaaagcattgcatttacaaaacaaggaaaatgctgtaaatattgcatattttatgtatttggaccaaaaggttacaagtaattagacaaaagtggttttgcaccaattttatgtcaagtaaaaccatcagacctactgttcttgtatttctcatttaactttactgttaagacatcactgaaatgaacttcagtaagctttcaattttgatacacagttcattattcataacttgaggcagtaattacagtggaatgagtactggacaaggagtcaaaaaacttgatttcaggtcctagctctagcacttacagctgtgtgatcttgggcaagtcacttaacctctctttgcctcaatttcctcatcttgaaatgaggataataatacctgctgtacctacctcacagggctgttgtgaggattaaatgagatggcatgtgaaagcactttgaaaattgtaaagcgctatgtaaatgtaaggtattatagaaacatctttaacatatagtttcataccattcattttttaacaaagaaagggaaaagtctgcttgtaagctggttgaaaaagttaatcttgatataaatttgtgtttgataaatatcctctcagtgttttatcttccatgtttcaacaactattgaaatatgaaatgcctgtgaactcttaaagcttcatgagcagctgcttgagttcaggaagttcactgttagaaataggctttgttagctgactagggtcagggaaacttttctcttcaaatttgaaagctgtttctgttttcattttacattattattcagaaatggtagctattctatacctatggtttaagtaaatatttctgaataaggcttcaccatactgtaagcattttaggtagattgccttaaaggttatgggagggcatgagggaacacttcttatgagaaaacatttataaacaaaagaaacatttataaactaaagaaaaactaaaagaatgacagaacaatcatcttagcaccctttcctcacaataatataaaaatattaaaagaacataggcaggctttttttaaatttggcttttttctttccttttttcaaattgacttttataggtatttcctgaaagtgtatacaaattatttcctcgcccaaaataaagcaccacttcaaggtgtggtttgacattacatgctaatgaacaaacccagtatgcaagttattcttgcaccacatgctcaaatcttcttgaggtgcattaactcttttaggtaactagagcagtacttggtgaactagatcaggaggtcagtaaactttctgtggaagggccagagagtaaatattttaggctttgcagcccatacggtctctgtcacagctagtcaaccctgccattttaccacaaaagcagcaatagacattatgtaaacaaatgagcacagttatgttccaataaaactttatttacaaaaacagatgacatcccagatgcagaccatgggcaaccaaccattgcactggctaaatcattatttatggagaaatcctctttgtgtctctactctagatgcctaaaagagtttatatacttctaaaagctcctaacttatatccaaagaattgctttctgattcgtgtagtctctcccacagattcataaacttttatgacttatattgtttccaggtgggcatggtttatttcccagtttaacagttcagaataggggcatttattttatcatattttagggtgggttaggagtatcctttctggagactgagaaaggggtgtatttaattccatcaggtccagtacagtactaggagtcataatactttataatcaattaaataaatagaaccactgagacaataatgtatttttttaaagtggcaaatgtggttttcttttttcagcctttgcgctttttcagtattttgaccatagggagataatttttttataatacaaaagtaaccacttggaattttaaagataatgttatgtgtgtatgtgaaatatatatacatatatatatatatttcctaaaagaagaaaagatacctttctgttcaacttgtatcaactcctcttttctaattgctgtgaaatggcaactgttgataaattattgtgattgttttaaaatctaatgggaagtaaaatatattttgattttacccagcttaatctgtaaagtagcacttaaatatatctgatagcaacacttaagatattgcatggggattactttcctatcatccatatgcatttgtgcaacttcaaacatattgggtgcttctgaattcctgatgattggatttaagctattgaaaattggataatttaaacttaatgatttttataattttctgatcttaaaatttggttaatgcctataatctgttgctttttctcaatatgtgtcctattggaaattcctcaaatcgttggtgccatcagtgatttacaaacaatattttgatattgcagatgacttgcttactgtatttgcattgttagaaaacagtttgtagacaatgattcttttttaataaaatcaaataattctaaaagtgctagagaatttaactaaaagctggttcccaaatgcatagctggcattttaatttaaattcaaatctacatagagaacatccgtgtaaatcatctaactggattttcccattggtcattcccaaacacacctatggtcctagaatccttaagagaagcaccctgtaaccttttatgtggtttgcctttaagaggcccaggtgcttctcctttatgatttgagttggcctcttcataaattagtgctgtttactttcagaggaagcagagaagttgctgttatgtttttgcatccgtttaccctatgcaaagttgctgtatgatgccaactaaactgctctttaggcagccttctgaggagaaaagcaaccctgtttcaaatccactgccaattcagctcctctggagtggagctttctgatttcttggagcaggaattttagagattgaaatgaatgatcatttagtcagatttatcctgtaatttcatgcagctttgtggcctttgcagtactatttataaaatggaccctgatggtgatgaactctttagaacgcattactgttaagcctgtgttgagacattgatgctgtctatctcattttttagacagtttttgtagctttctattgagagtcaggtatgtgagcatctctgaagcagtgttgaatgtaattttcggaaacatggattgtgtattttgacttttattttataaatacacagctcaacagtgccttttttttccctcatagtcctgttggaagatgctcactactttctctcttctctctccctgccctcccccactccattcagttgattcatttatgcaaattctgtttccaacttgaaaccattttgtcacatctgttggagagataatcactccttttccttaacattctgccagctttctgatgttgaagtgtttcagttgactacctgatgcaaaagctataaaataaacagtgggaaggggaaaaattggtgtcctgttttaatattttcttttgtagccttgacactgatggacattttccaagctgactcagtgttcagtgtcaacttaactctcagatagtgttgccatcaagaaagcatgcaacatcattggtttctaatgattttatggcttgtgacaatattttatctggactgacatgcctctgctgcttttgctttgtacttcattgctggtaataaaatttcagatggaaaacttacaaaatatatacttaattagaagaaaaaaatagagaaagggctattagaattaaaaaaatttgaaagtaacttaatctaacatttatggcacagtttggacatatccataattttttttgggaacacacatttctgattttttttttcccccttaaagaagaaagtctcaattccattgattttcaattcttagccactggctcattgctttgagcaatgcttgattgattctatttatattatatgatattgggttgataaaataccagttcaatgatgagttttcttaacagaatttggtttgtacttgcagtggctgaacaaagagcatggcttgagaatcaaagggatctgcatttagcaatgtgatgtcagtaaatggacataacaggattgttgtaaaggttgggcatgatgtatgcaaagtactggccagggtagactaataactgatggcatttatatgctgtgctggaatattgttaccaagctgatgtgccgttctcaccctgcagaatactggttttgtcatttcataaatgatatttttataaat

SEQ ID NO: 29865 - DNA, 2466 bp, Homo Sapiens
  misc_feature (13)..(13): n is a, c, g, or t
tggtgcggctgtntcacggaccacggcggcgcccgcagctcctcaccgcagcacccccactgcaggctcgaggagctttccggagcttcccacactcctggggagaagacttcttagccagcttgatgtttaaaattcagctggagcccttaaaacttcgagcgtggacgctgaatgggtttgtaaagtttcgaaacaaggagaccagtgctggtccagtggctgtgatgggaaaagattattacaagattcttgggatcccatcgggggccaacgaggatgagatcaagaaagcctaccggaagatggccttgaagtaccacccagacaagaataaagaacccaacgctgaggagaagtttaaggagattgcagaggcctatgatgtgctaagtgaccccaagaaacggggcctgtatgaccagtatggggaggaaggcctgaagaccggcggtggcacatcaggtggctccagtggctcctttcactacacctttcatggggacccccatgccacctttgcctccttctttggtggctccaaccccttcgatatcttctttgccagcagccgctccactcggcccttcagtggctttgacccagatgacatggatgtggatgaagatgaggacccatttggcgctttcggccgttttggcttcaatgggctgagtaggggtccaaggcgagccccagaaccactgtaccctcggcgcaaggtgcaggaccccccagtggtgcacgagcttcgggtgtccctggaggagatctaccatggctccaccaagcgcattgaagatcacaaggcgtcgctcaaccctgatgggcgaactgtgcgcaccgaggacaagatcctgcacatagtcatcaagcgtggctggaaggaaggcaccaagatcaccttccccaaagaaggcgacgcacaccttgacaacatccctgctgacatcgtctttgtgctcaaagacaagccccatgcacacttccgccgagatggcaccaacgtgctctacagtgccctgatcagcctcaaggaggcgctgtgtggctgcactgtgaacattcccactatcgacggccgagtgatccctttgccctgcaatgatgtcatcaagccaggcaccgtgaagagactccgtggggagggccttcccttccccaaagtgccaactcagcgaggagacctcattgttgagttcaaagttcgcttcccagacagattaacaccacagacaagacagatccttaagcagcacctaccctgttcctaggctctgccccagccagtccagagcctaccacagcaatacccccaacactcactccactcaatgtgcacccagcttgatgtccactggacactggcaactttttctaaaatgcaaaaaaaagccactggttttcaggaaaatgttcctgtccctgaccccttttagagctgggctgcctggggggagtgggagggaggtggggagagctagcccaggccaggggtcaatgttcatgtcactagctttcaatccagtttccactgcagtggctggagagtgacctgagtgctacttgaagatatgtagagattccttatccatgcctgtacatagcatgtcctcctcccctcagctttgctaataccagtcccctcccttccctttggcttcctgctgttgggggtggaaaagactagaaaggacattgctttctcagccccacccccaggtccacagtgtccaaggtaatggcacacatattcatgcacaagaagcactcacctagagctgtctgtgcctctctgggagaaaggagagaggataagaagggaaagttcacaacctgtgaacagggacttgagcacgagacacttttcatctggagcaggggggtgagctcctcagcagcctccgtaacagctgccctgcctacacctgcagagctggaggttctgtcctccctgctgctctcaggagtgttcaagggtggagggcagggaatggggcctgaggtattaaggctaagaagtgggggacagggcccatctaccagccttcatcaggaagggaaagggctttggggtcaggtggcagctattccccaccaagagattcagggtcacaggtttttccccacacctctgaactcagggcctagccacccccaaacttccaaatcccacttttgtgatatgtgaagctactcatttcttacccttggaggctgtgtggggaatttccagcccttttatgcctgtgtgatcccaccccacccccatagttgtataaaggtcatagtgaagaagctgggggaagactgcttcagccagatcctggggtggggtctttaggttttctcactttgacaacccccgaatgtttttatagtagtttttttgtatttttttgtaatgacagtattatgtaaaaaataaagtattttaaaaatatggaaaaaaaaaaaaaaaaaaaa

SEQ ID NO: 29866 - DNA, 7387 bp, Homo Sapiens
gagattttaaaaagagctcagcacctttaaaaagtgaggatctagggaaaccttcacgatctaaaacagacagagatgataaatattttagctattcaaaacttgaaagagatactcggtatgtatcttcccgatgtagatcagaaagagagcgacggcggagcagatctcactctaggtctgagagaggctctagaactaatttatcctattccaggtcagaacgatctcattattatgactctgatcgtcgctaccataggagctccccttatcgagagaggacgcgctattctcggccatacacagataacagagcacgagagagttctgactcagaagaagagtataagaagacatactcaaggcgtacctcatctcattcctcttcttacagagacctaaggacatcatcctattctaaatctgatcgggactgtaaaactgagacctcttacttagagatggaaagaagaggcaagtattcttcaaaactagaaagagaatctaaaaggacttcagaaaatgaagcaattaaaagatgttgttctccccctaatgaactgggattccgacgagggtcatcatattctaagcatgacagtagtgcttcccgttataaatctaccctttcaaaacctatacccaagtctgataaatttaaaaattctttctgttgtacagaattaaatgaagaaatcaaacagtctcattcttttagtttacagacaccttgttcaaaaggtagtgaattaagaatgattaataaaaatcctgaaagagaaaaggctgggtctccagctccatcaaatcgattaaatgattcacctactttaaaaaagctagatgaattgcctatttttaagtccgaatttataacacatgatagccatgatagtattaaggaattagactctttatctaaagtgaagaatgatcaattaagaagtttttgtcccatagaattaaatataaatggatctcctggggcagaatctgatttggcaacattttgcacttctaaaactgatgctgttttaatgacttctgatgatagtgtgactggatcggaattatcccctttggtcaaagcatgcatgctttcatcaaatggatttcagaatattagtaggtgcaaagaaaaagacttggatgatacctgcatgctgcataagaagtcagaaagcccatttagagaaacagaacctctggtgtcaccacaccaagataaactcatgtctatgccagttatgactgtggattattccaaaacagtagttaaagaaccagttgatacgagggtttcttgctgcaaaaccaaagattcagacatatactgtactttgaacgatagcaacccttctttgtgtaactctgaagctgaaaatattgagccttcagttatgaagatttcttcaaatagctttatgaatgtgcatttggaatcaaaaccagttatatgtgatagtagaaatttgacagatcactcaaaatttgcatgtgaagaatataagcagagcatcggtagcactagttcagcttctgttaatcattttgatgatttatatcaacctattgggagttcaggtattgcttcatctcttcagagtcttccaccaggaataaaggtggacagtctaactctcttgaaatgcggagagaacacatctccagttctggatgcagtgctaaagagtaaaaaaagttcagagtttttaaagcatgcagggaaagaaacaatagtagaagtaggtagtgaccttcctgattcaggaaagggatttgcttccagggagaacaggcgtaataatgggttatctgggaaatgtttgcaagaggctcaagaagaagggaattccatattgcctgaaagaagaggaagaccagaaatctctttagatgaaagaggagaaggaggacatgtgcatacttctgatgactcagaagttgtattttcttcttgtgatttgaatttaaccatggaagacagtgatggtgtaacttatgcattaaagtgtgacagtagtggtcatgccccagaaattgtgtctacagttcatgaagattattctggctcttctgaaagttcaaatgatgaaagtgattcagaagatacagattcggatgatagcagtattccaagaaaccgtctccagtctgttgtggttgtgccaaagaattctactttgcccatggaagaaacaagtccttgttcttctcggagcagtcaaagttatagacactattctgaccattgggaagatgagagattggagtcaaggagacatttgtatgaggaaaaatttgaaagtatagcaagtaaagcctgtcctcaaactgataagtttttccttcataaaggaacagagaagaatccggaaatttcttttacacagtccagtagaaaacaaatagataatcgcctgcctgaactttctcatcctcagagtgatggggttgatagtacaagtcatacagatgtgaaatctgaccctctgggtcacccaaattcagaggaaaccgtgaaagccaaaataccttctaggcagcaagaagagctgccaatttattcttctgattttgaagatgtcccaaataagtcttggcaacagaccactttccaaaacaggccagatagtagactgggaaaaacagaattgagtttttcttcctcttgtgagataccacatgtggatggcttgcactcatcagaagagctcagaaacttaggttgggacttctctcaagaaaagccttctaccacgtatcagcaacctgacagtagctatggagcttgtggtggacacaagtatcagcaaaatgcagaacagtatggtgggacacgtgattactggcaaggcaatggttactgggatccaagatcaggtagacctcctggaactggggttgtgtatgatcgaactcaaggacaagtaccagattccctaacagatgatcgtgaagaagaggagaattgggatcaacaggatggatcccatttttcagaccagtccgataaatttcttctatcccttcagaaagacaaggggtcagtgcaagcacctgaaataagcagcaattccattaaggacactttagctgtgaatgaaaagaaagatttttcaaaaaacttagaaaaaaatgatatcaaagatagagggcctcttaaaaaaaggaggcaggaaatagagagtgattctgaaagtgatggtgagcttcaggacagaaagaaagttagagtggaggtagagcagggagagacatcagtgcccccaggttcagcactggttgggccctcctgtgtcatggatgacttcagggacccacagcgatggaaggaatgtgccaagcaagggaaaatgccatgttactttgatcttattgaagaaaatgtttatttaacagaaagaaagaagaataaatctcatcgagatattaagcgaatgcagtgtgagtgtacacctctttctaaagatgaaagagctcaaggtgaaatagcatgtggggaagattgtcttaatcgtcttctcatgattgaatgttcttctcggtgtccaaatggggattattgttccaatagacggtttcagagaaaacagcatgcagatgtggaagtcatactcacagaaaagaaaggctggggcttgagagctgccaaagaccttccttcgaacacctttgtcctagaatattgtggagaggtactcgatcataaagagtttaaagctcgagtgaaggagtatgcacgaaacaaaaacatccattactatttcatggccctgaagaatgatgagataatagatgccactcaaaaaggaaattgctctcgtttcatgaatcacagctgtgaaccaaattgtgaaacccaaaaatggactgtgaacggacaactgagggttgggttttttaccaccaaactggttccttcaggctcagagttaacgtttgactatcagttccagagatatggaaaagaagcccagaaatgtttctgcggatcagccaattgccggggttacctgggaggagaaaacagagtcagcatcagagcagcaggagggaaaatgaagaaggaacgatctcgtaagaaggattcagtggatggagagctagaagctctgatggaaaatggtgagggtctctctgataaaaaccaggtgctcagcttatcccggctaatggttagaattgaaactttggagcagaaacttacctgtctggaactcatacagaacacacactcacagtcctgcctgaagtcctttctggaacgtcatgggctgtctttgttgtggatctggatggcagagctaggtgacggccgggaaagtaaccagaagcttcaggaagagattataaagactttggaacacttgcccattcctactaaaaatatgttggaggaaagcaaagtacttccaattattcaacgctggtctcagactaagactgctgtccctccgttgagtgaaggagatgggtattctagtgagaatacatcgcgtgctcatacaccactcaacacacctgatccttccaccaagctgagcacagaagctgacacagacactcccaagaaactaatgtttcgcagactgaaaattataagtgaaaatagcatggacagtgcaatctctgatgcaaccagtgagctagaaggcaaggatggcaaagaggatcttgatcaattagaaaatgtccctgtagaggaagaggaagaattgcagtcacaacagctactcccacaacagctgcctgaatgcaaagttgatagtgaaaccaacatagaagctagtaagctacctacatctgaaccagaagctgacgctgaaatagagcccaaagagagcaacggcacaaaactagaagaacctattaatgaagaaacaccatcccaagatgaagaggagggtgtgtctgatgtggagagtgaaaggagccaagaacagccagataaaacagtggatataagtgatttggccaccaaactcctggacagttggaaagacctaaaggaggtatatcgaattccaaagaaaagtcaaactgaaaaggaaaacacaagaaatcagcctgaataaatggaatgacttgtctgcctcacatattctaaggtgcagagtcagaatatgaactgttgcaactgaacgaggaagggatgctgttggcttcagagatcaaacacctgccccgaagactcctaataggtcaagagagagagacccagacaagcaaactcaaaataaagagaaaaggaaacgaagaagctccctctcaccaccctcttctgcctatgagcggggaacaaaaaggccagatgacagatatgatacaccaacttctaaaaagaaagtacgaattaaagaccgcaataaactttctacagaggaacgccggaagttgtttgagcaagaggtggctcaacgggaggctcagaaacaacagcaacagatgcagaacctgggaatgacatcaccactgccctatgactctcttggttataatgccccgcatcatccctttgctggttacccaccaggttatcccatgcaggcctatgtggatcccagcaaccctaatgctggaaaggtgctcctgcccacacccagcatggacccagtgtgttctcctgctccttatgatcatgctcagcccttggtgggacattctacagaacccctttctgcccctccaccagtaccagtggtgccacatgtggcagctcctgtggaagtttccagttcccagtatgtggcccagagtgatggtgtagtacaccaagactccagcgttgctgtcttgccagtgccggcccccggcccagttcagggacagaattatagtgtttgggattcaaaccaacagtctgtcagtgtacagcagcagtactctcctgcacagtctcaagcaaccatatattatcaaggacagacatgtccaacagtctatggtgtgacatcaccttattcacagacaactccaccaattgtacagagttatgcccagccaagtcttcagtatatccaggggcaacagattttcacagctcatccacaaggagtggtggtacagccagccgcagcagtgactacaatagttgcaccagggcagcctcagcccttgcagccatctgaaatggttgtgacaaataatctcttggatctgccgcccccctctcctcccaaaccaaaaaccattgtcttacctcccaactggaagacagctcgagatccagaagggaagatttattactaccatgtgatcacaaggcagactcagtgggatcctcctacttgggaaagcccaggagatgatgccagccttgagcatgaagctgagatggacctgggaactccaacatatgatgaaaaccccatgaaggcctcgaaaaagcccaagacagcagaagcagacacctccagtgaactagcaaagaaaagcaaagaagtattcagaaaagagatgtcccagttcatcgtccagtgcctgaacccttaccggaaacctgactgcaaagtgggaagaattaccacaactgaagactttaaacatctggctcgcaagctgactcacggtgttatgaataaggagctgaagtactgtaagaatcctgaggacctggagtgcaatgagaatgtgaaacacaaaaccaaggagtacattaagaagtacatgcagaagtttggggctgtttacaaacccaaagaggacactgaattagagtgactgttgggccagggtgggaggatgggtggtcaggtaagacagactctagggagaggaaatcctgtgggcctttctgtcccacccctgtcagcactgtgctactgatgatacatcaccctggggaattcaaccctgcagatgtcaactgaaggccacaaaaatgaactccatctacaagtgattacctagttgtgagctgttggcatgtggttagaagccatcagaggtgcaagggcttagaaaagaccctggccagacctgactccactcttaaacctgggtcttctccttggcggtgctgtcagcgcacagacccatgcgcatccccacccacaaccctttaccctgatgatctgtattatattttaatgtatatgtgaatatattgaaaataatttgttttttcctggtttttgtttggttttcgttttgcttttagcctctacatgctaggatcacaggaagactttgtaaggacagtttaagttctcctgcaaggtttaatttgttatcatgtaaatattccaaagcaggctgccttgtggttttggccagccttgtgctatgttgataagattgatttactgcttaaaatcactttactttatccaatttttactgaactttttatgtaaaaaaataaaatcaattaaagaacttg

SEQ ID NO: 29867 - DNA, 3089 bp, Homo Sapiens
aggcgcctgagaggctctctaccggtgagggtttgcggggaagatggagtatcccgcgccggccacggtgcaggccgcggacggcggagcggccgggccttacagcagctcggagttgctggagggccaggagccggacggggtgcgctttgaccgcgagagggcgcgccgcctgtgggaagccgtgtccggtgcccagccggtgggtagagaggaagtggagcacatgatccagaagaaccaatgtctcttcaccaacacccagtgtaaggtttgctgcgccttgcttatttctgagtcccagaagctggcacattaccagagcaaaaaacatgccaacaaagtgaagagatacctagcaatccatggaatggagacattaaagggggaaacgaagaagctagactcagatcagaagagcagcagaagcaaagacaagaaccagtgctgccccatctgtaacatgaccttttcctcccctgtcgtggcccagtcgcactacctggggaagacccacgcaaagaacttaaagctgaagcagcagtccactaaggtggaagccttgcaccagaatagagagatgatagacccagacaagttctgcagcctctgccatgcaactttcaacgaccctgtcatggctcaacaacattatgtgggcaagaaacacagaaaacaggagaccaagctcaaactaatggcacgctatgggcggctggcggaccctgctgtcactgactttccagctggaaagggctacccctgcaaaacatgtaagatagtgctgaactccatagaacagtaccaagctcatgtcagcggcttcaaacacaagaaccagtcaccaaaaacagtggcatcatccctgggccagattccaatgcaaaggcaacccattcagaaagactcaaccaccttggaagactagaggtgattctgcccagcatcccatattgggccagccatgagccagcttcccgtgactgctcagcccttggctccctcttgctcgttgttctcaccaggaaagtacacgggcctgaggcaggattgggccacagacagcctctcattggtccgggctaattcactcctgctgctcccctttggcaggggtcctgtaggtcatgacaggggaggcaagggtattgagagactcggggtctcgcggggtggtagtttggagggtggctttccccatttcccaacccctctgggccttaggtgctgaggcccctgccacctgtctttcctctaaaggtcagttttgggccagttcttgcaactaaagagcagagatctctctgggccctagacatttccagcaaaacctggaactttcatgccaaacctggggcagggcaggaaacagaggaaatggctgcaacatgggagcttggagctaatacgacactctgccttcccccagaaggtgcaggctttcctgagtcttagaccagatatggccagttgcgcaggtttctgccaactgtgaagtatcctcctggagcagtgacacaatcttggcggagcattgctacccccgctgccccctccacagttcctgaatggtgctaaggatctgcagcagttggcaacgagctggggctgggggcggcctccatgtccactgagatcataggacactccaatggggatgggacctttcccctcctccatcagaggtgctctgaccctaggttacacgggaaagtgccccacatgcaagtctccctgagggttctgcccctaaaggcagactgcctcatgcccgctagctgtgaggttcattgctaccctcggccctactagccctctcttcccccttgtgcagcggaccacttgcccagtttgctgtggtgctagccttccccatcatccaccgggtgatttctgggtcccagggaaagaaagagagagctgatgcaggtttctacagtgaggaacaggcgtttcccaggccccacacccagatttctctatctttgctgtgttttatggcctgggactgagtccacacggatagatttttccttgtaaccttgagacgagaattccaaggagtgtcaccatcagaggcttctcttcattgtgtcaaagaagcccctagctgctctcgtggcctccttcccccactccctatcccttcacctgtgaaatgcctttgctttgcatattgtgtgtggatgtgtgtgtgtgtgtgtgtgtgtttgtgtgtatgtgtgtgcttctgtgtgtgcctaatgctctgtctcttggtcactgaagcatccaaataaagaatttccctcatgggccagactacaacttaacagacctagggttttgagccatattgccattggatctagtatgtctgtcttgacccctcacccccaccccattcagacctcagtagtccccagtagtcactttaggagttgggacagagtcgagcaccctgtgaaagtctcccttgagttcaggtgccctgaactcagtacagcctcatcttctcatccaccaccttctcctgcttctcctgtcacatagggcctcatgaaggtctttaaagggtttaagctggggatctgctttatgtttgagagaactgttctggctgttatgtaaaggagtgcagggaggggcaggaaaggagacaaggaggccagtatggacactgtgtccagtatggctttccaggctaatcacttagggcagagacccagccttattcatctctacttcctgatgtccatagtggtgtgtcatgaatttttattgaatgaacaaatgaggtgtatgaggagagatggttttctcctgctcagctcttacacagtgataggtttgttccatgggacttatcataggcctggtgattcttgaaagagcatttttcatgactcaaaaatgagctgagaaggagtgttatggccaggtgcggcgtcatgcacctatagtcccagctgctcaggaggctaaggcagaaagaccattcaagcccaggagttccagcctgaagtatgctgtgatcatgcctgtgaataaccactgcactccagccagggcaacataacaagactctatctaaaaaaaaaaaaaaaaaa

SEQ ID NO: 29868 - DNA, 6552 bp, Homo Sapiens
atgaggagcttcaaaagagtcaactttgggactctgctaagcagccagaaggaggctgaagagttgctgcccgacttgaaggagttcctgtccaaccctccagctggttttcccagcagccgatctgatgctgagaggagacaagcttgtgatgccatcctgagggcttgcaaccagcagctgactgctaagctagcttgccctaggcatctggggagcctgctggagctggcagagctggcctgtgatggctacttagtgtctaccccacagcgtcctcccctctacctggaacgaattctctttgtcttactgcggaatgctgctgcacaaggaagcccagaggccacactccgccttgctcagcccctccatgcctgcttggtgcagtgctctcgcgaggctgctccccaggactatgaggccgtggctcggggcagcttttctctgctttggaagggggcagaagccctgttggaacggcgagctgcatttgcagctcggctgaaggccttgagcttcctagtactcttggaggatgaaagtaccccttgtgaggttcctcactttgcttctccaacagcctgtcgagcggtagctgcccatcagctatttgatgccagtggccatggtctaaatgaagcagatgctgatttcctagatgacctgctctccaggcacgtgatcagagccttggtgggtgagagagggagctcttctgggcttctttctccccagagggccctctgcctcttggagctcaccttggaacactgccgtcgcttttgctggagccgccaccatgacaaagccatcagcgcagtggagaaggctcacagttacctaaggaacaccaatctagcccctagccttcagctatgtcagctgggggttaagctgctgcaggttggggaggaaggacctcaggcagtggccaagcttctgatcaaggcatcagctgtcctgagcaagagtatggaggcaccatcacccccacttcgggcattgtatgagagctgccagttcttcctttcaggcctggaacgaggcaccaagaggcgctatagacttgatgccattctgagcctctttgcttttcttggagggtactgctctcttctgcagcagctgcgggatgatggtgtgtatgggggctcctccaagcaacagcagtcttttcttcagatgtactttcagggacttcacctctacactgtggtggtttatgactttgcccaaggctgtcagatagttgatttggctgacctgacccaactagtggacagttgtaaatctaccgttgtctggatgctggaggccttagagggcctgtcgggccaagagctgacggaccacatggggatgaccgcttcttacaccagtaatttggcctacagcttctatagtcacaagctctatgccgaggcctgtgccatctctgagccgctctgtcagcacctgggtttggtgaagccaggcacttatcccgaggtgcctcctgagaagttgcacaggtgcttccggctacaagtagagagtttgaagaaactgggtaaacaggcccagggctgcaagatggtgattttgtggctggcagccctgcaaccctgtagccctgaacacatggctgagccagtcactttctgggttcgggtcaagatggatgcggccagggctggagacaaggagctacagctaaagactctgcgagacagcctcagtggctgggacccggagaccctggccctcctgctgagggaggagctgcaggcctacaaggcggtgcgggccgacactggacaggaacgcttcaacatcatctgtgacctcctggagctgagccccgaggagacaccagccggggcctgggcacgagccacccacctggtagaactggctcaggtgctctgctaccacgactttacgcagcagaccaactgctctgctctggatgctatccgggaagccctgcagcttctggactctgtgaggcctgaggcccaggccagagatcagcttctggacgataaagcacaggccttgctgtggctttacatctgtactctggaagccaaaatacaggaaggtatcgagcgggatcggagagcccaggcccctggtaacttggaggaatttgaagtcaatgacctgaactatgaagataaactccaggaagatcgtttcctatacagtaacattgccttcaacctggctgcagatgctgctcagtccaaatgcctggaccaagccctggccctgtggaaggagctgcttacaaaggggcaggccccagctgtacggtgtctccagcagacagcagcctcactgcagatcctagcagccctctaccagctggtggcaaagcccatgcaggctctggaggtcctcctgctgctacggattgtctctgagagactgaaggaccactcgaaggcagctggctcctcctgccacatcacccagctcctcctgaccctcggctgtcccagctatgcccagttacacctggaagaggcagcatcgagcctgaagcatctcgatcagactactgacacatacctgctcctttccctgacctgtgatctgcttcgaagtcaactctactggactcaccagaaggtgaccaagggtgtctctctgctgctgtctgtgcttcgggatcctgccctccagaagtcctccaaggcttggtacttgctgcgtgtccaggtcctgcagctggtggcagcttaccttagcctcccgtcaaacaacctctcacactccctgtgggagcagctctgtgcccaaggctggcagacacctgagatagctctcatagactcccataagctcctccgaagcatcatcctcctgctgatgggcagtgacattctctcaactcagaaagcagctgtggagacatcgtttttggactatggtgaaaatctggtacaaaaatggcaggttctttcagaggtgctgagctgctcagagaagctggtctgccacctgggccgcctgggtagtgtgagtgaagccaaggccttttgcttggaggccctaaaacttacaacaaagctgcagataccacgccagtgtgccctgttcctggtgctgaagggcgagctggagctggcccgcaatgacattgatctctgtcagtcggacctgcagcaggttctgttcttgcttgagtcttgcacagagtttggtggggtgactcagcacctggactctgtgaagaaggtccacctgcagaaggggaagcagcaggcccaggtcccctgtcctccacagctcccagaggaggagctcttcctaagaggccctgctctagagctggtggccactgtggccaaggagcctggccccatagcaccttctacaaactcctccccagtcttgaaaaccaagccccagcccatacccaacttcctgtcccattcacccacctgtgactgctcgctctgcgccagccctgtcctcacagcagtctgtctgcgctgggtattggtcacggcaggggtgaggctggccatgggccaccaagcccagggtctggatctgctgcaggtcgtgctgaagggctgtcctgaagccgctgagcgcctcacccaagctctccaagcttccctgaatcataaaacacccccctccttggttccaagcctcttggatgagatcttggctcaagcatacacactgttggcactggagggcctgaaccagccatcaaacgagagcctgcagaaggttctacagtcagggctgaagtttgtagcagcacggataccccacctagagccctggcgagccagcctgctcttgatttgggccctcacaaaactaggtggcctcagctgctgtactacccaactttttgcaagctcctggggctggcagccaccattaataaaaagtgtccctggctcagagccctctaagactcagggccaaaaacgttctggacgagggcgccaaaagttagcctctgctcccctgcgcctcaataatacctctcagaaaggtctggaaggtagaggactgccctgcacacctaaacccccagaccggatcaggcaagctggccctcatgtccccttcacggtgtttgaggaagtctgccctacagagagcaagcctgaagtaccccaggcccccagggtacaacagagagtccagacgcgcctcaaggtgaacttcagtgatgacagtgacttggaagaccctgtctcagctgaggcctggctggcagaggagcctaagagacggggcactgcttcccggggccgggggcgagcaaggaagggcctgagcctaaagacggatgccgtggttgccccaggtagtgcccctgggaaccctggcctgaatggcaggagccggagggccaagaaggtggcatcaagacattgtgaggagcggcgtccccagagggccagtgaccaggccaggcctggccctgagatcatgaggaccatccctgaggaagaactgactgacaactggagaaaaatgagctttgagatcctcaggggctctgacggggaagactcagcctcaggtgggaagactccagctccgggccctgaggcagcttctggagaatgggagctgctgaggctggattccagcaagaagaagctgcccagcccatgcccagacaaggagagtgacaaggaccttggtcctcggctccagctcccctcagcccccgtagccactggtctttctaccctggactccatctgtgactccctgagtgttgctttccggggcattagtcactgtcctcctagtgggctctatgcccacctctgccgcttcctggccttgtgcctgggccaccgggatccttatgccactgctttccttgtcaccgagtctgtctccatcacctgtcgccaccagctgctcacccacctccacagacagctcagcaaggcccagaagcaccgaggatcacttgaaatagcagaccagctgcaggggctgagccttcaggagatgcctggagatgtccccctggcccgcatccagcgcctcttttccttcagggctttggaatctggccacttcccccagcctgaaaaggagagtttccaggagcgcctggctctgatccccagtggggtgactgtgtgtgtgttggccctggccaccctccagcccggaaccgtgggcaacaccctcctgctgacccggctggaaaaggacagtcccccagtcagtgtgcagattcccactggccagaacaagcttcatctgcgttcagtcctgaatgagtttgatgccatccagaaggcacagaaagagaacagcagctgtactgacaagcgagaatggtggacagggcggctggcactggaccacaggatggaggttctcatcgcttccctagagaagtctgtgctgggctgctggaaggggctgctgctgccgtccagtgaggagcccggccctgcccaggaggcctcccgcctacaggagctgctacaggactgtggctggaaatatcctgaccgcactctgctgaaaatcatgctcagtggtgccggtgccctcacccctcaggacattcaggccctggcctacgggctgtgcccaacccagccagagcgagcccaggagctcctgaatgaggcagtaggacgtctacagggcctgacagtaccaagcaatagccaccttgtcttggtcctagacaaggacttgcagaagctgccgtgggaaagcatgcccagcctccaagcactgcctgtcacccggctgccctccttccgcttcctactcagctactccatcatcaaagagtatggggcctcgccagtgctgagtcaaggggtggatccacgaagtaccttctatgtcctgaaccctcacaataacctgtcaagcacagaggagcaatttcgagccaatttcagcagtgaagctggctggagaggagtggttggggaggtgccaagacctgaacaggtgcaggaagccctgacaaagcatgatttgtatatctatgcagggcatggggctggtgcccgcttccttgatgggcaggctgtcctgcggctgagctgtcgggcagtggccctgctgtttggctgtagcagtgcggccctggctgtgcatggaaacctggagggggctggcatcgtgctcaagtacatcatggctggttgccccttgtttctgggtaatctctgggatgtgactgaccgcgacattgaccgctacacggaagctctgctgcaaggctggcttggagcaggcccaggggccccccttctctactatgtaaaccaggcccgccaagctccccgactcaagtatcttattggggctgcacctatagcctatggcttgcctgtctctctgcggtaaccccatggagctgtcttattgatgctagaagcctcataactgttctacctccaaggttagatttaatccttaggataactcttttaaagtgattttccccagtgttttatatgaaacatttccttttgatttaacctcagtataataaagatacatcatttaaaccctgaaaaaaaaaaaaaaaaaaaa

SEQ ID NO: 29869 - DNA, 5525 bp, Homo Sapiens
agttcccagtgaaaggacagggatggcaagatcttttagcatttaggggatgcctttgttagtaaccgttcacaatgggcagctcccggctgagggtctttgaccctcatttggagaggaaagattccgccgcggcgctctcagaccgagagctgcccttgcctaccttcgatgtgccttatttcaaatacatcgacgaggaggatgaggacgatgaatggagcagccgctcgcagtcttccaccgaggatgactcagtggactctctgctctctgacagatatgtggtggtgtccgggaccccggagaagattttggagcaccttttgaatgacttgcacctggaagaagtccaggacaaagaaacagagaccctcctggatgacttccttctcacgtacactgtcttcatgacaactgatgacttgtgccaggctctgttaaggcactattctgctaagaagtatcaaggcaaagaggaaaactcagatgttccgcgtaggaaacgtaaagtcttgcatcttgtttcccagtggattgctctgtacaaagactggttacctgaagatgaacattcaaaaatgtttttaaagaccatatataggaatgtactggatgatgtttatgaatatccaatacttgaaaaagaattgaaagaatttcaaaagatacttggaatgcaccgtcgtcacactgtagatgaatattcaccacaaaaaaagaataaagcccttttccaccaattcagtcttaaggagaactggctccagcatagaggaactgtgactgaaacggaggaaattttctgccacgtgtatataacagagcactcctatgtcagtgtgaaggcaaaagtttccagtatagcccaagagattctgctctgcagccagctgggcaagcgagtgcagctggtgaaaaaattcatcaaaattgcggctcactgcaaagcccagagaaacctgaattctttctttgccattgtgatgggtctcaacactgcttctgtcagtcgactgtcgcagacctgggagaaaatccctgggaagtttaagaaacttttctctgaacttgaaagtttaacagatccttccctaaatcacaaagcctacagagatgcattcaaaaagatgaagccaccaaaaatccctttcgtgcccttattgcttaaagatgtaacatttattcatgaaggaaataaaacttttttggataatcttgtcaattttgaaaagctgcatatgatcgcagacactgtccgaaccctgagacactgcaggactaaccagtttggtgacctgtctccaaaagagcatcaagagttaaagtcctatgttaatcacctgtatgtcattgacagccagcaggctctgtttgagctctcacacaggatcgagcctcgggtgtgagccccactgcctcacctcccctgtatctgcagcactttgagctacgggaatgtctatgccaagcacgttgctttcctgtgagaaaagaagttgctgagttttatcagtataacccaagacattcacaggaaagccagccaaagcgtgttcaggaagtgatgtcagccaccagagagggggagaggttttctccatgctactctcgggacaagaaggcagaaggagagtcagaagcattcttgagatggagaaggctggtttcttatgatcacattgttgatccagtccagttttcaatatgagatgtgccagcatcaagacaagacaacgtcttgacatgcaatgaccaaatatttcattaagagcgtgcatgaaacaggaaggagtttttactttgcctagttttagattactgtccataagctgtcaaagaagtcattcttttgaacacctgatgacagagacagcatctctagatctccagggaggagaggtttctgttgatacaacctgtgacatcaccaaaagccacttgtgtctagggagttagtgaggactgcagctagcatccatgctctgatgggcagatgaacaatgtcaaggtgtgcatcactttgcaccacaatcaactattgacacatgcttgcaggtgaaattagtttctgtacaactgatttgcagctataggcaaggtagatgaagttgctttgccagtaaggaaaaatagtaatctttaagaaattgactcattgtttaatttctggggattttctttatacttctaagcaggctcttatcttttattggacataatatgattttgaaaaagcacagtgcctgacacattgcaaacactcaccaactgcttgctgaggtgacagagtcacaaaagtctgcattcttgtgcctgatgatgcattttgcgtacctcatacaggctccttgcccacactatggaatgacagcagccagtgcagggaggttaagtgacatttaatgagtgaagcacttagcactctctaggtaataagatagtggtaattactagtgttttggcaaatgaaaaatgccctgaaatagccaaatgtctgattaatgttggcaacttagaagtcctataatccaactaccagccaaagcagggagcctttctataatttgcctttttttttttttttttcaaaatctgagtcttctaaaatcttattattcccatttttaccaattgaggctcctgtagcaaataagacctcttgatattttcaaggactggttagaggatttctttcaaccttcacatgaacaaaacagcctatgggtcaaaataatgaaatccacccctgcctgctagatacttgtcaccttgctaaaatgcaagggcctggtccattcattttccaaatgcaggagtcttggtgcacttctcactcttcctgcctgttcatctctttcatgcccacacagacctgtttcctttttgtctcatcaacgcctcattcatcctcattactgaggcgtgtccaatgctttttgacatctttatagcagtgctgtttcctgggctcaggaaccacactgagcttgagatactgctggaaggaaccatgtggagagaaggtttgggagaactttgagagagacttagtttggcccagcatgtaaaacttcagtcctgaacatttatagggttttatagaagggcatcctccagggctggtccattcagagaaatgctgcatgctgccgtcatggaatgtggcccacaggacaccagagccgtgagaaccggagagcagacttccctcacggctgggctgagcaaaccctccaaagccctcctcacgcagttactaacaatagcatgggcttacagcacaagcacgtgttctcacctttttcctatgccctggactaaggtttggccagtgtaatcatataaggccatcctgacattgtttctgtgtttcaaaatttggatttttatttacattagaactacattgctcctagtagaacattacctttaggggactaattttccatggagaactatttcagcatattgcatgctgctcagaccccaagtcagatatgcccaccaagccagatgaagctacacaaatgtggtatttaaatgcattttgtacagtgacttcagagtatctcacatgacatgggtgtaaactggctggggagaaaatgatgcttgttcacctcttcctccagccgtggttaggtggtcctaggggtagcagagggaagggaggattttgtgcagtcaagatttgcttttccatccttgtcttctgaatgtctaaaatctctgcatctttctgaagtttaacaactgtctccagaggtttgccaggcagcagctctcagaagtttccaaagctttgcagaatcttagatctggaattaaagaattcaagcccgaattgtgagaaccagatattactcaacagaaagctctttctaaggaatctgagctgttcactggtggacagtggtggggcttgagtgctccttgttaataggatgggccatgcaccctctctggatattcaccaaggcctcttcagaatagggtttgttctggctagaagcgtggtctagaagatggctaagctctttgccagctctcatttggagttttattattgcataaaatcttcgctcactctgcaaatcttacgtaatctggcaccttcggcaccaggtggtgcaggggcacttctaagtgggctctttttgttacagcacaactctcagacagtcctgtgggtctttggattcgtcagcattccagcaaactagccctgcttagaagttagcacaagacggcagaatgcaggaccccgtaggcaaaatcacaaccttgctattaaaaaaaatttttttttacatacacatttgcaggtgttccctagagtgtggtgttttgaatttgctctttgtcatctgtataattgccaaatgattatagtgatacacatgacctgcattcacttttttctagtttccttaattatgtttagaataaattcgtttccctagaccgagaaccacaaacaggtagtgtggagcatacaccgaatttagaagcatgtggataaggtcagtgctcacactgcctagtccacagggagaggatgctgcatgaatatatacttgcctctgagtggaggagaaatcgtggcatgaaagagagagtaccagtgatgacttcttatccctggagctgggctttcactgctacccatatcccagccctgcgagtctgttctagccagcacagacaccgcagatccggaactgaatgttcctaaatggcgcagccaatccaggcttttcagaaactgggcaaaaacattaaaatggggacgatcgggtcttccgcagtggtccaacacaggatttcttttaaatgtttcaaaaacatgtccttaaaatttcagcctgcttcttagcgagtgggccagttttgcttaaaactggtgggggggcgggggggaagtttttaaaaattgccaaaaagttagatgcaaatgtattactgtataaagcaaagctgtatatactaaacattttttagcagagtaatatttatttgcatagtctatttattgtattcgtattacactgttattaaatactgggatgaaatcagtgacctgaagcaagaaatcttgccttttaatgtatcattaattagggctgctgtgatattgtcagcttgcattaacaattagaagatagagaacccgccatcagggtgtctacctaacttctcagggactacacttggtagttttccaccatttaaagaactggtaaatatgaaacatttgttgagttaccagaattgccattaacagtgttttctttcccatattccatgctttctgcctctgtgtatatatataatatatatgtatatgactgtgctgtgtatttatcgaagctagtaagcaataatttatatgtaaaaatggccaagcaatataaggttaaaacttatataagtaacccttaccttatcttgtattttcaatttttttttaaaactgcttttccaaatatgagactatgttaaagacaaaaaaaaaaaaaaaa

SEQ ID NO: 29870 - DNA, 6053 bp, Homo Sapiens
gaaattttgagaagtggtgggatgaagaagatccctgaagagaggagtaactgagacaaaggcgaggctagcaatagagagacaagtgagggaattagacctttggtatcatcatgaaaaggcctggaagaaacgctggtttatcctgcggagtggccggatgagcggtgacccagatgttctggaatactacaagaacgatcactccaagaagcctctgcggatcatcaacctgaacttctgtgagcaggtagatgcaggcctgacctttaacaagaaggagctgcaggatagttttgtgtttgacatcaagaccagtgaacgcaccttttacctggtggctgagacagaagaggacatgaataagtgggtccagagcatctgccagatctgtggcttcaatcaggctgaggagagcacagactccctgagaaatgtttcctcagccggtcatggcccccgctcttctccagctgagctcagcagctctagccagcaccttctccgagagcgcaagtcctcagccccatcacactccagccagccaactctgttcacgtttgaaccccctgtgtcaaaccacatgcagcccaccttgtccaccagcgcacctcaggagtatctctacttgcaccagtgcataagccgaagagcagaaaatgcaaggagtgccagcttctctcagggcaccagagcctcttttctcatgaggagtgacacagctgtacaaaaacttgcccagggcaatggacactgtgtcaacgggatcagtggtcaagtccatggcttctatagccttcccaagccgagccggcacaatacagaattcagagacagtacctacgacctcccccgcagcctggcctcccatggccacaccaagggcagcctcacaggctccgagacagataatgaggatgtgtacaccttcaagacgcccagcaacaccctgtgcagggagttcggggacctcctggtagacaatatggatgttccggccaccccactctcagcctaccagatccctaggacattcactctggacaaaaaccacaatgccatgacagtggccactcctggggactcagccatagctcccccaccccgcccccccaagccaagtcaggcagaaacacctcgatggggcagtcctcagcagagaccgccaatcagtgaaaatagcagatctgtcgctgccaccatccccagacgcaacaccctccctgcaatggacaacagccgacttcaccgagcttcttcctgtgagacctacgagtacccacagcgtggtggagagagtgcaggccggtctgctgaatccatgagtgatggagttggctctttcctgccagggaaaatgattgtgggccgatcggacagcaccaattctgaagacaactatgtgcccatgaatccaggttcttccaccctgttggccatggaacgagcaggtgataattcccagagcgtctacatcccaatgagcccaggggcccatcactttgactcacttggctacccatcaacaacccttcctgtgcaccgaggccccagcagaggaagtgagattcagccaccccctgtcaaccgcaacctcaaacctgatcggaaagcaaagccaacaccacttgacctgaggaacaacaccgtcatcgatgaactccccttcaagtcacctatcaccaagtcttggtctagggccaaccacaccttcaactccagctcctcccagtactgccgccccatctccacccagagcatcaccagcacagactcaggagacagcgaagagaactatgtccctatgcaaaacccagtgtctgcatctcccgttcccagtggcacgaacagtcctgcccctaagaagagcaccggcagcgttgattatctggccctggacttccagccgagctccccaagcccccaccgcaagccatctacttcatccgtcacctctgatgagaaggtggactacgttcaggtggacaaggagaagacccaggccctgcagaacaccatgcaggagtggacagacgtgcggcagtcctcagagccttccaagggtgccaagctgtgatgagagggccaccgcagagcccaggaggcagcatctccagagctggcccttcccatctcccctctcccctctcccgttcttcctcccatccacctcctctctactctgccagtctcagccttcaaagcacttgacatcagggaccctgaacccttcccctgggaggtgagggcctgatcaaggcacctcctctgcccactcggggcccagctgtgatttttatcagtaatggccatgcctccacccaccttagttaggagctacttccaaaaagcatccttcagcctcttcctgtcctttagacctgactctctaccagatgtttggagggaagggctggggctctgagccagattccacacctcacgttcagtcacagccctcagctatcttccctccggccactgggctacctctccttcagtcccagaagacaagtctcaccaacccagggagtcaaggaccagcaaaccaaagtggataatggactttttcattcctgtttttcttggcaggagagaagcaaggccactaaaagaggagatggtggagacggaggctcagcagtggtcttgaggggtaaaggacttagatgcccagatgaagagggaaagctgacatctgcagggaacccactttgaggctgaggccatggcaggacagctgctgtggggtgcagaggcagaagatgaaggacaaaaggaagggaaaactgatggccaacctagagcagcaaggagcagggcttggagctcgggtggtggagatgacaaggacactgtggggtctgggtccccagaactctggagctacaggccactctaggcccaagggctagtcctcttccccagtcccctcagaggcccccgccagccccaccttgaaagcagcatacaggggaaggcttggaccaagctgggcgaccaagcacatggggcaggaacacatggtaaaggggtggggaatatgggagggagtgtggtgtggatgggggtgatgcagggactgaggggaaccctgggacaggcacaggctgggcagaggcacagggcagtgcaggggactctgcagtggggtcgggaagtgagtttctttgcagtgagcagtgcagtggaagtcgggcacagaggtagcagacagatgtgaagcagtggtgaaggccatgtagcaagtggggaaatacatccaaagggcctgggagttggggggtgcccaacgcaatccttgggggtgcagggtggagcagaaagtgaaggagggacacgtgcaagagtggtgtgcatggtggtgtgacatgaggaccgttcctaggatgggacagtgggtcaggcaggacaaggagaaagcagggcagaatgatgcctagaggaccacatcaggcatggctgacagcttgtgcccatgggctgtggcgtatgtcagatcgcagggtaggaacgagtctggcctggtgccggcccagtgtttcctcagctcatccgccctctgttgctccctagcattccaggagccatcttggactctcctccccaggtttgaaaggccatcagattagcagggacggggtgtagggcatcacccaaggttccttctcttaaactaagggtgggggatctgaatgtttttatgttgactgttcttgactaaattttcaagagtttcagaagcaacaggacagaccagacgtttcattctaccctggggcgaacagaacttcttcctcccaaacaatgacttcctgccatgtttgatggggacagctaccactgtcctctgcccccattcccctttcagctcccatgagcatgcatagttcaccagaccaatggcctagccattctctaagtcccatcctggaagaagttatttcttcaagagctgcacctctcctcctagcattagtttagatcaactcaaggagtatttattaatggctgctgtctccagtttctggggttaagcactaaggacacaagaatcaatcagaccttctccctgaacttaagatagccacaatcagaaaaaggacaaggacatgagacagtggtgatggccatcagacagagacttcaaatgctgatggagggcagaggaagtacttagggaggttggtgtcagaggcaggagtgggggatcagggaaggtggattctaggaaaagggagtgcctgaggtaggccttagaaggggatgagtcagatttttacagaggaggagggcagggcttgggtccagtggaggaagaaggaaggagaggcttggaaagccttgtgtcttgggaaaaaaaggcctttgagcatatgggtccagccactcagaagtgcaggggccatgccttggtgttccaataagtgaatggaagcagtggtggtagctacactgggcagagttggcagggtgctggttcactctgcccagccctgaatgtgtgccttaaaggccccctacaaggggccccatacgacagagcttttaactggtgccttccctgtacccgcagcagccacaagtgggcccagactattgcagcctcccataaacatgtgagcatgttctgagtgtgccatgatgtgagtggacctggctggaatcttcggagagcgactgaggtgttcaaatcgaatctcccaggaggcttccttccagccccctattctggtaactaccaggaggcttccttccagccccctattctggtaactaccaaaatccctcgggtgcaagtgtaggggtagagatggaaggatgagaggtgaaattgaccttttgaaagcaaagctctggctcacaggccccaaactaccagccgtatctagcatatccccaccctccacccactacctcctccaacaaaggagtcaactcagttgaaaaaactggtcctttggcctatccatgggtcaaagtccacctctcctgggggcctggagaggactgagcctacggaaaggggataccttcccactcagcactgcttcacacaggccccctgcctggggctctccaaggagccttcttcacccacttccagctccacttctgcaaggttaagtcaagtgagaacgatgagaaatagggagatggtgtctccttaagtccttgatctgcctgtctgtggaatgggaggttggattagctgcgctgaggtcccatccacagctggtgctcagctgcttgaaggggagactccctcctctgtaacttctttctgggggattggggtgggcagtacctatccccagtcccctcctagcttgactttagtggtttccaatgtagaagttaacaaagtatgccccattcctgtgacaaaagcacaaccattctgaagttactggagcatgggctcagctcatcctccctctggccccttctcccatggggacatctcggcccagcacccctatcccatttccagagttcttccttccccatctgggccttcataaaatgcaggggaagccagactggtctcaggagcgctaaagcccttccgtggggggtcgtctttctgggactagccctgctgtttaggacctgggaccacaatggggtacctgccgagggggtccccaagagatccaggctgtcatgtgatttatggtggcatgtgttgtgtatttgttggctacttgtgtcttgaaatctagaattatttcacgcagaattgtcactgtttgtcaggaagagaaaatgggctagtggaagcccagtcttgagttcttgtcttgttaccatttaaaattgacatttaattttcaaatcactgttggtgcctaatcacttaagttattaatttattctgttgtattcttttttttaaattgtaacatatttatccggtgggtgggacaggagtgtgttcaagtgggtcatgtttttgctgtggtgacacatggtacaggcttggagcttgcaggtccctttctactgtggtgttggagcaggacaataaagtccactagaaatgcacccca
